United States Patent Application Publication US 2018/0126003 A1 - sequence listing, part 129

SEQ ID NO: 226107 - DNA, 600 bp, Artificial Sequence
  derived and/or modified sequence
atggccaagtcagccgaggtgaagctggcaatcttcggcagggccggagtcggaaaatctgctctggtggtgcggttcctcactaagaggttcatttgggaatacgatcccacactggaaagtacctacagacatcaggcaaccatcgatgatgaagtcgtctctatggaaatcttggataccgccggtcaagaagataccatccaacgggaaggccatatgcgttggggagaaggcttcgtgttggtctatgatatcactgaccgcgggtcctttgaggaggtgctacctctgaaaaacatcttggacgaaattaaaaaacccaagaatgtaaccttaatcttggtggggaacaaggccgaccttgaccactcaagacaggtctcaacggaagaaggggaaaagctggccactgaactggcgtgcgcattttacgaatgctcggcgtgtaccggcgagggaaatataaccgagattttctacgagttgtgtcgtgaggttcgccgcagacgtatggttcagggcaaaacgcgccggagatcctctaccactcatgtgaagcaggcaattaataagatgctgacgaagattagttcctag

SEQ ID NO: 226108 - DNA, 120 bp, Artificial Sequence
  derived and/or modified sequence
atggccaaaagtgcagaagtcaaactcgctatcttcggacgggccggagtggggaaatcagccttggtggtcaggtttttgaccaaaaggttcatatgggagtatgatcccacgctgtag

SEQ ID NO: 226109 - DNA, 600 bp, Artificial Sequence
  derived and/or modified sequence
atggctaaatccgcagaggtaaagttagcgatcttcggacgagccggcgtcggaaaatctgccctcgttgttcgctttctgactaaacgatttatctgggaatatgaccccaccttagagtctacttaccgacaccaagcgacaattgatgatgaggtcgtgtcaatggaaattctcgataccgcagggcaagaggacacaatccaaagggagggccatatgaggtggggcgagggttttgtgttagtttatgatatcaccgacagaggctcattcgaggaggttcttccactcaaaaacatcttggatgagatcaagaaacccaagaacgtgacactgatcttagtcggtaacaaggccgatctggaccacagccggcaggtctccaccgaggagggtgagaaactggccacagagctggcttgcgccttctatgagtgctctgcttgtactggggagggaaatatcacggagatcttctacgagctttgcagagaagtgagacggcgccggatggtacaagggaaaacacgccgtcggagtagtacgacccacgtcaagcaagcaattaacaagatgctcacaaagatcagttcttag

SEQ ID NO: 226110 - DNA, 600 bp, Artificial Sequence
  derived and/or modified sequence
atggccaagagcgcagaggtgaagttagctatatttgggagagccggtgtgggcaagtctgccctggtggtccgcttcctgacaaagagatttatttgggagtatgatcccacactggagtcgacgtatcggcaccaggcgacaatcgatgacgaagtcgtgtcaatggagattctcgataccgccggccaggaggacacgattcaacgggaggggcacatgcggtggggcgaaggatttgtgcttgtgtatgatatcacagataggggcagttttgaggaggtgttaccgctcaagaatattttggatgaaatcaagaaaccaaagaacgttacactaattctcgtgggaaataaagccgatttagaccactcccgtcaggtgagtactgaggagggcgaaaagctggctactgaactggcctgtgcattttatgaatgcagtgcctgcacaggggagggcaacattacggagatcttctacgagttgtgccgggaggtccggcgacgaaggatggtccaggggaaaacacggcgccgaagctccacaacgcacgtcaagcaggctatcaacaagatgcttacaaagatcagttcttag

SEQ ID NO: 226111 - DNA, 600 bp, Artificial Sequence
  derived and/or modified sequence
atggccaagtctgctgaggtgaagctggccatcttcggccgggccggcgtgggcaagagcgccctggtggtgcgcttcctgaccaagcgcttcatctgggagtatgaccccaccctggagagcacctaccgccaccaggccaccattgatgatgaggtggtgtccatggagatcctggacacagctggccaggaggacaccatccagcgggagggccacatgcgctggggcgagggctttgtgctggtgtatgacatcacagaccggggcagctttgaggaggtgctgcccctgaagaacatcctggatgagatcaagaagcccaagaatgtgaccctcatcctggtgggcaacaaggctgacctggaccacagccggcaggtgtccacagaggagggggagaagctggccacagagctggcctgtgccttctatgagtgcagcgcctgcacaggagagggcaacatcacagagatcttctatgagctgtgccgggaggtgagaagaagaaggatggtgcagggcaagaccaggagaagaagcagcaccacccacgtgaagcaggccatcaacaagatgctgaccaagatcagcagctag

SEQ ID NO: 226112 - DNA, 120 bp, Artificial Sequence
  derived and/or modified sequence
atggccaagtctgctgaggtgaagctggccatcttcggccgggccggcgtgggcaagagcgccctggtggtgcgcttcctgaccaagcgcttcatctgggagtatgaccccaccctgtag

SEQ ID NO: 226113 - DNA, 600 bp, Artificial Sequence
  derived and/or modified sequence
atggccaagagcgccgaggtgaagctggccatcttcggccgggccggggtgggcaagagtgctttagtggtgagattcctcaccaagaggtttatctgggaatatgatcctacccttgaaagtacctatcgtcaccaggcaacaatcgacgacgaagttgtcagcatggaaatactggacaccgccggtcaggaggacaccatacaaagagaggggcacatgaggtggggggagggttttgtcctcgtgtacgatatcactgacagagggtctttcgaggaagtgctacccctgaagaatatcttggacgagattaagaaacccaagaacgtcacacttatcttggtggggaataaagcagatctggaccattccaggcaagtgtccactgaagagggcgaaaagttggcaaccgaattggcgtgtgccttctacgaatgtagcgcgtgcaccggagagggcaacataactgagatcttttacgagctgtgccgggaggtgcgccgacggaggatggttcagggcaaaacccggcggagatctagcaccactcacgtcaaacaggccatcaacaagatgctgaccaaaatctcctcatag

SEQ ID NO: 226114 - DNA, 120 bp, Artificial Sequence
  derived and/or modified sequence
atggccaagagcgccgaggtgaagctggccatcttcggccgggccggcgtgggtaaatccgccctggtggtgaggtttctgaccaaacgatttatttgggaatacgatcccacattatag

SEQ ID NO: 226115 - DNA, 600 bp, Artificial Sequence
  derived and/or modified sequence
atggccaagagcgccgaggtgaagctggccatcttcggccgggccggagtgggcaagtctgccctcgttgttcgattcttaaccaagcgcttcatctgggaatacgatccgactctggagagcacatatcgtcaccaagccactattgacgatgaggtggtttccatggagattctggataccgcgggacaagaggataccattcaacgcgaggggcacatgcgctggggcgaaggattcgttctggtctatgatatcacagataggggttcctttgaggaagtactcccactgaagaacattcttgacgaaatcaaaaaaccaaagaacgtcacccttatcctggttggaaataaggctgatctggaccactcaagacaggtgtctaccgaagagggcgagaagctcgccactgaattagcctgcgctttttacgagtgttctgcctgtaccggtgaggggaacattaccgagattttttacgagttatgccgggaggtgagaagacgccgtatggtgcagggtaagacccggagaaggagcagcacgacacacgtgaaacaggcaattaataagatgctaacaaagatcagttcgtag

SEQ ID NO: 226116 - DNA, 600 bp, Artificial Sequence
  derived and/or modified sequence
atggccaagagcgccgaggtgaagctggccatcttcggccgggccggggttggtaaaagcgcccttgtcgtgaggttcctgacaaagcgattcatctgggagtatgacccgaccctcgaatccacttaccggcaccaggcgacgattgacgatgaggtagtcagcatggagatccttgacaccgctggccaggaggataccattcaaagggagggccacatgcgatggggcgagggattcgtactcgtgtacgatataacggatcgaggaagctttgaggaggttctgcctcttaagaacatactggatgaaattaagaaaccaaagaatgtgaccctcatactggtggggaataaagcagacttggaccattccagacaagtctcaactgaagaaggcgagaaactcgccacagaacttgcttgtgcattctatgagtgttccgcctgcacaggggagggcaacatcacagaaattttctatgaactctgtagggaagttcgccggcgcagaatggtacagggaaaaacacgtagaaggtcatccaccacgcatgtgaaacaggcgattaacaagatgcttacaaagatttcaagttag

SEQ ID NO: 226117 - DNA, 600 bp, Artificial Sequence
  derived and/or modified sequence
atggcaaagtctgcggaggtcaagctggcaatcttcgggcgagctggggttggcaagagtgcgctggttgtccgcttcttaacaaagagatttatttgggaatacgaccccaccctcgaatccacatacaggcaccaggccacaattgatgacgaagtagtgtcaatggaaattctagacaccgctgggcaggaggacacgattcagagagagggccacatgcgctggggcgagggtttcgttttggtctatgatatcactgaccggggatcattcgaggaggtcctgccactcaagaacatcctggacgagatcaaaaagccaaaaaacgtcaccctgattctcgtgggcaataaggcagacttagatcacagtaggcaagtcagcacagaagaaggtgagaaactagcgactgaattggcctgtgctttctatgagtgttctgcctgtaccggtgaaggcaatatcacagagatcttttacgaactgtgccgcgaagtccggagacgcagaatggtgcagggcaaaaccaggagaaggtcctctaccacgcacgttaaacaggcgattaataagatgcttacaaaaatttctagttag

SEQ ID NO: 226118 - DNA, 120 bp, Artificial Sequence
  derived and/or modified sequence
atggccaaaagcgcagaagtgaaactcgccatcttcgggagagccggtgtgggcaaatccgcactagtcgtgaggtttctgactaaacggttcatctgggagtacgacccgactctgtag

SEQ ID NO: 226119 - DNA, 600 bp, Artificial Sequence
  derived and/or modified sequence
atggctaagagtgccgaggtgaagttggccatattcgggagagctggggtgggaaaatctgccctcgtagtccgatttttaacaaaacgctttatttgggaatacgaccccaccctggaaagcacgtataggcatcaggccacaattgacgatgaggtcgtgagcatggaaatactggataccgctggccaggaggataccattcagcgggaggggcacatgagatggggagaaggatttgtgttggtatacgatattaccgatcggggatcattcgaggaggtcctgccacttaaaaatattttggatgagattaagaagccaaaaaacgtcaccttgatcctagtagggaacaaagctgacttggatcatagtcgacaggtgtcaacggaggaaggggagaagctagcaaccgaactagcctgcgcattttacgagtgttcagcctgtactggcgaaggtaacatcacagagatattctacgagctgtgccgtgaagtgcggcgaagacgaatggtgcaaggaaagaccagacggcgtagctcaactacacatgtaaagcaggccatcaataaaatgctgaccaagattagctcctag

SEQ ID NO: 226120 - DNA, 600 bp, Artificial Sequence
  derived and/or modified sequence
atggccaagtccgccgaggttaagctggctattttcggtcgcgcaggcgtgggtaagtctgccctcgtcgtacgcttcctgaccaaaagattcatttgggagtacgatcctacccttgagtctacttaccgtcaccaggccacaatcgacgacgaggtagtgagcatggagatactggatactgcaggccaagaggacacaatccagcgggaggggcacatgcgctggggtgaagggttcgttctggtctacgacataaccgatagggggagtttcgaagaagtactgcctctcaaaaacatcctcgatgaaattaagaaacccaaaaatgtgaccctgatcttggtggggaataaagccgacctggaccactccagacaggtttccacggaggagggagagaagttagccacggagctggcctgcgcattctatgagtgtagcgcgtgtacgggcgagggaaatattactgaaatcttctatgagctatgccgggaggttaggcgacgcaggatggtccaaggcaagactcgcaggcgcagctcgacgacacacgtgaagcaagctatcaacaaaatgctgaccaagattagttcttag

SEQ ID NO: 226121 - DNA, 2264 bp, Artificial Sequence
  derived and/or modified sequence
gcagtccctccgccgctagtcggagcgagcgcgagtgaggagacccccgccgggccactggcacttgcttctgcggcgagtcccacccacgaccgcagcccagcaactcgcaaacgcaacctgaagcctgggctgcgcagtgtgggagggcttcgcgatcttgggggacccattccgaacttgcagaggaccgtagctctcctggcctggagagtgtgaacaggattgtggactcttccaagattcacaatgatatggtgaatccaaagactggaaccaaaaagatttactcagtgctttagttttaacaacagtaaattgtctaccaacacccatcatggctaaaagtgcggaggtcaaactggcaatatttgggagagcaggcgtgggcaagtcagctcttgtagtgagatttctgaccaaacggttcatctgggaatatgatcccaccctcgaatcaacctaccgacaccaagcaaccatcgatgatgaagttgtttccatggagatactagacactgctggtcaggaagataccattcagagggaggggcacatgcgatggggggaaggctttgtgctggtctacgacattactgaccgaggaagttttgaggaagtgctgccacttaagaacatcctagatgagatcaaaaagcccaagaatgtgactctcatcttggttggaaacaaagctgacttggaccactccaggcaggttagcacagaagaaggagagaagctggccacagaattggcttgtgctttttacgagtgctctgcctgcactggagaagggaacatcacagagatattctatgaattgtgtcgagaggtgcgtcgccggaggatggtgcagggcaagacgaggcgacgcagctccaccacgcatgtcaagcaagccattaacaagatgctcaccaaaatcagtagttaggcagcccagctgaggtggaccaactaattggaaacactcttccccttctgttcccctttcaaaaataaaacaaaatattgcattctttgtttggattctgagaaatgtctgggcttcccattgtttctggcctctaataggttgggaagttttagcgtgttttatgcaatttcagtgctaacaatttcttcctttcctgcttgaataagatacactctaatggcatttgaacatgtaatcaccagagattctgaaatgactggtttatgttaagctatttttaggcatcttcaccttgctttaagtaggttgaagtttttgcaaaggcatttaaaaattcaatttcttgtcagatactacaaataattttcttaaaagtctaagatagcagaaaatacagtaaaaacacaggagaagaagctgagctattggaacaggaaatagaaggaactctagtttctgtttgaagtgaggattttctgaattatctaatatcatctaggttttctttaaaattttattttgttcttcagttcaagcatcttctcactaatgtttttcactataacagagaattcatttcaatttgagttggttctctcaatgatctattgatcattacaccctaactctccttccttggctcaaacaatattttccctataacaaaggcaataggacacaaaattcacatcctgctgggccttttttcatcaagtcagggtgatataaaaacattggaagtcttttcaccaaaccctgactttattgaatgctagtagaagatgtagaattagagacatctgatttgtttatcaccttagcagaaaaaccacagtccaaaagacaagcaaattaagaatggagcttaaccatgcctccattgggaagtctagactttgagccaggtacagtaagaaaaattagcctctgattcattaagtttgccacatgacttattttgatattttggatacattaactcacttaggagaattcagaaaagaatgggtgattaaagttcattacagctgaataaatgtgtctaaaacagactcttgtattctgaaagtacagtctacaactgataaaaccttatgattcttttctcccccattatgcccctatatatatcaagatttgggtactttattttagtagaaaatatatatcttttacatatgtatgtatttataaatgcatagatatatgtataaaaatttgtaagcgttagcggcattaattcaccaatgcatttggacaacttgatgtaactgactttattttatgtgactataataaaaagcataattttctcattctgtca

SEQ ID NO: 226122 - DNA, 655 bp, Artificial Sequence
  derived and/or modified sequence
ttttagtagagacggggtttcactgtgttagccaggatggtctcgatctcctgacctcgtgatccgcccgcctcggcctcccaaagtgctgggattacaggcgtcagccaccgcgcccggcctataatttttttttttaactccttcactgttgttggcagaatttagtttcttcctgttacaaggattgaggtcgccatttccttgctggtagtcacctgaggactgttcccagattctagagactgcctgcataccttggcttatcaccttccactgcctgcataccttggcttatgccctttctcctgcatcttccaagccagcaatggaagaggtaaccatccatcacggttttcccagaacaggctgatttgcgtcttctgtcctggcataaggatcccttcactctcggaagtgttccggattgtggactcttccaagattcacaatgatatggtgaatccaaagactggaaccaaaaagatttactcagtgctttagttttaacaacagtaaattgtctaccaacacccatcatggctaaaagtgcggaggtcaaactggcaatatttgggagagcaggcgtgggcaagtcagctcttgtagtgagatttctgaccaaacggttcatctgggaatatgatcccaccct

SEQ ID NO: 226123 - DNA, 2134 bp, Artificial Sequence
  derived and/or modified sequence
attggagttgactaatatgaatgtatgttattcaacccaaagagacatgaagaggcccaaaagtgactctctccattgccccactgcatgtgtttgtacactgaatgcttacagatagatggtaaatgattgtggactcttccaagattcacaatgatatggtgaatccaaagactggaaccaaaaagatttactcagtgctttagttttaacaacagtaaattgtctaccaacacccatcatggctaaaagtgcggaggtcaaactggcaatatttgggagagcaggcgtgggcaagtcagctcttgtagtgagatttctgaccaaacggttcatctgggaatatgatcccaccctcgaatcaacctaccgacaccaagcaaccatcgatgatgaagttgtttccatggagatactagacactgctggtcaggaagataccattcagagggaggggcacatgcgatggggggaaggctttgtgctggtctacgacattactgaccgaggaagttttgaggaagtgctgccacttaagaacatcctagatgagatcaaaaagcccaagaatgtgactctcatcttggttggaaacaaagctgacttggaccactccaggcaggttagcacagaagaaggagagaagctggccacagaattggcttgtgctttttacgagtgctctgcctgcactggagaagggaacatcacagagatattctatgaattgtgtcgagaggtgcgtcgccggaggatggtgcagggcaagacgaggcgacgcagctccaccacgcatgtcaagcaagccattaacaagatgctcaccaaaatcagtagttaggcagcccagctgaggtggaccaactaattggaaacactcttccccttctgttcccctttcaaaaataaaacaaaatattgcattctttgtttggattctgagaaatgtctgggcttcccattgtttctggcctctaataggttgggaagttttagcgtgttttatgcaatttcagtgctaacaatttcttcctttcctgcttgaataagatacactctaatggcatttgaacatgtaatcaccagagattctgaaatgactggtttatgttaagctatttttaggcatcttcaccttgctttaagtaggttgaagtttttgcaaaggcatttaaaaattcaatttcttgtcagatactacaaataattttcttaaaagtctaagatagcagaaaatacagtaaaaacacaggagaagaagctgagctattggaacaggaaatagaaggaactctagtttctgtttgaagtgaggattttctgaattatctaatatcatctaggttttctttaaaattttattttgttcttcagttcaagcatcttctcactaatgtttttcactataacagagaattcatttcaatttgagttggttctctcaatgatctattgatcattacaccctaactctccttccttggctcaaacaatattttccctataacaaaggcaataggacacaaaattcacatcctgctgggccttttttcatcaagtcagggtgatataaaaacattggaagtcttttcaccaaaccctgactttattgaatgctagtagaagatgtagaattagagacatctgatttgtttatcaccttagcagaaaaaccacagtccaaaagacaagcaaattaagaatggagcttaaccatgcctccattgggaagtctagactttgagccaggtacagtaagaaaaattagcctctgattcattaagtttgccacatgacttattttgatattttggatacattaactcacttaggagaattcagaaaagaatgggtgattaaagttcattacagctgaataaatgtgtctaaaacagactcttgtattctgaaagtacagtctacaactgataaaaccttatgattcttttctcccccattatgcccctatatatatcaagatttgggtactttattttagtagaaaatatatatcttttacatatgtatgtatttataaatgcatagatatatgtataaaaatttgtaagcgttagcggcattaattcaccaatgcatttggacaacttgatgtaactgactttattttatgtga

SEQ ID NO: 226124 - DNA, 2060 bp, Artificial Sequence
  derived and/or modified sequence
gaattcccaaatttcttttgtttaaggattgtggactcttccaagattcacaatgatatggtgaatccaaagactggaaccaaaaagatttactcagtgctttagttttaacaacagtaaattgtctaccaacacccatcatggctaaaagtgcggaggtcaaactggcaatatttgggagagcaggcgtgggcaagtcagctcttgtagtgagatttctgaccaaacggttcatctgggaatatgatcccaccctcgaatcaacctaccgacaccaagcaaccatcgatgatgaagttgtttccatggagatactagacactgctggtcaggaagataccattcagagggaggggcacatgcgatggggggaaggctttgtgctggtctacgacattactgaccgaggaagttttgaggaagtgctgccacttaagaacatcctagatgagatcaaaaagcccaagaatgtgactctcatcttggttggaaacaaagctgacttggaccactccaggcaggttagcacagaagaaggagagaagctggccacagaattggcttgtgctttttacgagtgctctgcctgcactggagaagggaacatcacagagatattctatgaattgtgtcgagaggtgcgtcgccggaggatggtgcagggcaagacgaggcgacgcagctccaccacgcatgtcaagcaagccattaacaagatgctcaccaaaatcagtagttaggcagcccagctgaggtggaccaactaattggaaacactcttccccttctgttcccctttcaaaaataaaacaaaatattgcattctttgtttggattctgagaaatgtctgggcttcccattgtttctggcctctaataggttgggaagttttagcgtgttttatgcaatttcagtgctaacaatttcttcctttcctgcttgaataagatacactctaatggcatttgaacatgtaatcaccagagattctgaaatgactggtttatgttaagctatttttaggcatcttcaccttgctttaagtaggttgaagtttttgcaaaggcatttaaaaattcaatttcttgtcagatactacaaataattttcttaaaagtctaagatagcagaaaatacagtaaaaacacaggagaagaagctgagctattggaacaggaaatagaaggaactctagtttctgtttgaagtgaggattttctgaattatctaatatcatctaggttttctttaaaattttattttgttcttcagttcaagcatcttctcactaatgtttttcactataacagagaattcatttcaatttgagttggttctctcaatgatctattgatcattacaccctaactctccttccttggctcaaacaatattttccctataacaaaggcaataggacacaaaattcacatcctgctgggccttttttcatcaagtcagggtgatataaaaacattggaagtcttttcaccaaaccctgactttattgaatgctagtagaagatgtagaattagagacatctgatttgtttatcaccttagcagaaaaaccacagtccaaaagacaagcaaattaagaatggagcttaaccatgcctccattgggaagtctagactttgagccaggtacagtaagaaaaattagcctctgattcattaagtttgccacatgacttattttgatattttggatacattaactcacttaggagaattcagaaaagaatgggtgattaaagttcattacagctgaataaatgtgtctaaaacagactcttgtattctgaaagtacagtctacaactgataaaaccttatgattcttttctcccccattatgcccctatatatatcaagatttgggtactttattttagtagaaaatatatatcttttacatatgtatgtatttataaatgcatagatatatgtataaaaatttgtaagcgttagcggcattaattcaccaatgcatttggacaacttgatgtaactgactttattttatgtgactataataaaaagcataattttctcat

SEQ ID NO: 226125 - DNA, 600 bp, Artificial Sequence
  derived and/or modified sequence
atggccaagagcgccgaggtgaagctggccatcttcggcagagccggcgtgggcaagagcgccctggtggtgagattcctgaccaagagattcatctgggagtacgaccccaccctggagagcacctacagacaccaggccaccatcgacgacgaggtggtgagcatggagatcctggacaccgccggccaggaggacaccatccagagagagggccacatgagatggggcgagggcttcgtgctggtgtacgacatcaccgacagaggcagcttcgaggaggtgctgcccctgaagaacatcctggacgagatcaagaagcccaagaacgtgaccctgatcctggtgggcaacaaggccgacctggaccacagcagacaggtgagcaccgaggagggcgagaagctggccaccgagctggcctgcgccttctacgagtgcagcgcctgcaccggcgagggcaacatcaccgagatcttctacgagctgtgcagagaggtgagaagaagaagaatggtgcagggcaagaccagaagaagaagcagcaccacccacgtgaagcaggccatcaacaagatgctgaccaagatcagcagctag

SEQ ID NO: 226126 - DNA, 120 bp, Artificial Sequence
  derived and/or modified sequence
atggccaagagcgccgaggtgaagctggccatcttcggcagagccggcgtgggcaagagcgccctggtggtgagattcctgaccaagagattcatctgggagtacgaccccaccctgtag

SEQ ID NO: 226127 - protein, 141 aa, Artificial Sequence
  derived and/or modified sequence
MPPFGYKTETSTAVEKKEKPLPRLNIHSGFWILASIVVTYYVDFFKTLKENFHTSSWFLCGSALLLVSLSIAFYCIVYLEWYCGIGEYDVKYPALIPITTASFIAAGICFNIALWHVWSFFTPLLLFTQFMGVVMFITLLG

SEQ ID NO: 226128 - DNA, 426 bp, Artificial Sequence
  derived and/or modified sequence
atgccccccttcggctacaagaccgagaccagcaccgccgtggagaagaaggagaagcccctgcccagactgaacatccacagcggcttctggatcctggccagcatcgtggtgacctactacgtggacttcttcaagaccctgaaggagaacttccacaccagcagctggttcctgtgcggcagcgccctgctgctggtgagcctgagcatcgccttctactgcatcgtgtacctggagtggtactgcggcatcggcgagtacgacgtgaagtaccccgccctgatccccatcaccaccgccagcttcatcgccgccggcatctgcttcaacatcgccctgtggcacgtgtggagcttcttcacccccctgctgctgttcacccagttcatgggcgtggtgatgttcatcaccctgctgggctag

SEQ ID NO: 226129 - DNA, 426 bp, Artificial Sequence
  derived and/or modified sequence
atgcctcctttcgggtacaaaaccgaaacctccacagccgtcgagaaaaaggaaaagcctttaccccggctaaacatacactcaggcttctggattcttgcatcaattgtggttacatactatgtcgacttctttaaaaccctcaaagagaatttccacacaagcagctggtttctgtgcggctcagctctgcttcttgtctcactatcgatcgccttctattgcattgtgtacctggaatggtactgcggcatcggcgagtacgatgtgaagtacccggcattgatacccattaccacagcctcctttatcgccgccggcatctgtttcaatatcgccctgtggcatgtgtggagttttttcacacccctgcttctgttcacacagttcatgggagtggtcatgttcattactcttcttggatag

SEQ ID NO: 226130 - DNA, 426 bp, Artificial Sequence
  derived and/or modified sequence
atgccacccttcggctacaagacagagaccagcacagctgtggagaagaaggagaagcccctgccccggctgaacatccacagcggcttctggatcctggccagcatcgtggtgacctactacgtggacttcttcaagaccctgaaggagaacttccacaccagctcctggttcctgtgtggcagcgccctgctgctggtgtccctgagcatcgccttctactgcatcgtgtacctggagtggtactgcggcattggagaatatgatgtgaagtacccagccctgatccccatcaccacagccagcttcatcgccgccggcatctgcttcaacatcgccctgtggcacgtgtggagcttcttcacccccctgctgctcttcacccagttcatgggcgtggtgatgttcatcaccctgctgggctag

SEQ ID NO: 226131 - DNA, 426 bp, Artificial Sequence
  derived and/or modified sequence
atgccccccttcggctacaagaccgagaccagcaccgccgtggagaagaaggagaaaccgctgccccgcctcaatattcacagcgggttctggatcctcgctagcatcgttgtgacctattacgttgacttctttaagacgctgaaggagaatttccacacgtcctcctggttcctgtgtggcagcgcgctgctgttggtttcactgtcgatagctttctattgtattgtctatctcgagtggtactgtggtatcggcgaatatgacgtaaaatacccagccctgattcctataacaactgcctcatttatcgccgccggtatttgcttcaatatcgccctgtggcacgtctggagcttctttacacccttgttactgttcacacagtttatgggagtggttatgttcataactctgctgggatag

SEQ ID NO: 226132 - DNA, 426 bp, Artificial Sequence
  derived and/or modified sequence
atgcctccattcgggtataagaccgagacatctacagctgttgagaagaaggagaaacccttacccaggctgaatattcactccgggttttggatccttgccagtatagtggtgacatactacgtcgacttctttaagacccttaaggaaaacttccacacatctagttggttcttatgtggttctgctctgctgttggtgagtctgagtatcgccttctattgcatcgtgtatctagaatggtactgtggaatcggtgagtatgatgtgaagtaccctgcattgatcccaatcacaactgcaagttttattgctgccggaatttgcttcaatatcgcactatggcatgtgtggtcatttttcacacccctgttactgtttacccaatttatgggcgtggtgatgtttataacactgcttgggtag

SEQ ID NO: 226133 - DNA, 1737 bp, Artificial Sequence
  derived and/or modified sequence
cggtaccaagatggactcctcgcgggcccggcagcagctccggcggcgattcctcctcctgccggacgccgaggcccagctggaccgcgagggtgacgccgggccgggtgaggcgcgcaccaagccgccccgaggttctcagaggcgaggcgtcggaaaacggccggcctccggcagccctggcccagtctggaaggactgagtttcggctttgcaagtcgaatatttaatgtcagggaagatccttagaatcgcggagtgctgtgcatcgtcatttcagctgcgcttcagaattctctggagagctgatttgacacctatttggaaatagcgattaaaattaaaaatacccaccagttttaagtcttaaggatttaccagaaacatgcgtgtaccgcagtgtacaatgatgtgcgcagtgtttcacttcaggattgcttgtaatagcgaattactggaaatatctgccttgcccgtcagcagaaagctgtttaagtaaatttgggtatatgtatacctgacacatcaggtcgactcgtatgtaccaatggggatgattttcaaagggaagtgtggaacactatggtatgccgccatttgggtacaaaacagaaacctccacagctgttgagaaaaaggagaaacctcttccaagacttaatatccattctggattctggattttggcatccattgttgtgacctattatgttgacttctttaaaacccttaaagaaaacttccacactagcagctggtttctctgtggcagtgccttgttgcttgtcagtttatcaattgcattttactgcatagtctacctggaatggtattgtggaattggagaatatgatgtcaagtatccagccttgatacccattaccactgcctcctttattgcagcaggaatttgcttcaacattgctttatggcatgtgtggtcgtttttcactccattgttgttgtttacccagtttatgggggttgtcatgtttatcacactccttggatgatttccgaagagacagggtcttctatgttgcccaggctgtctttgaactcctgggatcaagtgatcctcctgcctcagccttcgaagtagttgggactacaggcccacgccaccgtgcctggctggacatgtaaatttgaagtgaatggttaaacatccagctagctgaaagcatggcagaccctaacagaaaagctacagtgtgtttttgcagctatgaagtgaatggtttcctggggaaaattgtgactttgtataactgttgttgaaaccagaataaattatatttcacttgcatatgcataaattattaaaattttcagaagtcagtgatacagaagtactattttgcaatgttaatctgtttgagtctttggagaaagtggtttcattgtaggtacatagtgcactgttaatattttaaacaagtagttcactcttccatttaagggatagcagttccttgtataaaatgactggatgtgtataaaggaattatgttgtcatgtgcctttaaccagctttagtaattactataatctcatatttatgatagttttgttaggtgacaggaccaaatgaaaatattttatgttttctcatcactttagattttatcattatgtacattactgggtttttagcatttcctaatgtgaagttttaatcacttttaagtatacatttttttctgtatcatttaaataaaatatttttataacttt

SEQ ID NO: 226134 - protein, 637 aa, Artificial Sequence
  derived and/or modified sequence
MAGGAGWSGAPAALLRSVRRLREVFEVCGRDPDGFLRVERVAALGLRFGQGEEVEKLVKYLDPNDLGRINFKDFCRGVFAMKGCEELLKDVLSVESAGTLPCAPEIPDCVEQGSEVTGPTFADGELIPREPGFFPEDEEEAMTLAPPEGPQELYTDSPMESTQSLEGSVGSPAEKDGGLGGLFLPEDKSLVHTPSMTTSDLSTHSTTSLISNEEQFEDYGEGDDVDCAPSSPCPDDETRTNVYSDLGSSVSSSAGQTPRKMRHVYNSELLDVYCSQCCKKINLLNDLEARLKNLKANSPNRKISSTAFGRQLMHSSNFSSSNGSTEDLFRDSIDSCDNDITEKVSFLEKKVTELENDSLTNGDLKSKLKQENTQLVHRVHELEEMVKDQETTAEQALEEEARRHREAYGKLEREKATEVELLNARVQQLEEENTELRTTVTRLKSQTEKLDEERQRMSDRLEDTSLRLKDEMDLYKRMMDKLRQNRLEFQKEREATQELIEDLRKELEHLQMYKLDCERPGRGRSASSGLGEFNARAREVELEHEVKRLKQENYKLRDQNDDLNGQILSLSLYEAKNLFAAQTKAQSLAAEIDTASRDELMEALKEQEEINFRLRQYMDKIILAILDHNPSILEIKH

SEQ ID NO: 226135 - DNA, 1914 bp, Artificial Sequence
  derived and/or modified sequence
atggcaggcggggcaggctggagtggggcaccggcagccctgctccggagtgtgaggcgtctgcgcgaagtgttcgaggtgtgtggccgggacccagatggcttcctgcgggtagaaagggtggcggctttgggacttcgtttcggacaaggagaggaagtggaaaagctcgtgaaatacttggatcctaatgaccttgggcgaatcaattttaaggatttttgccgcggtgtcttcgcaatgaagggctgtgaggaactgctgaaggacgtactgtccgtggaatctgccggaacactgccttgcgcccctgaaattcccgattgcgttgaacaagggagtgaagtgactggaccaacatttgcagatggcgagctgattccgcgggagccgggtttcttccctgaggatgaagaagaggcgatgacattggctccccccgagggccctcaggaactgtacactgattctcccatggagtctactcagagtctggagggctctgtgggatctccagccgagaaggacggaggactgggcggcctgtttctgcctgaggataagtccttagtccatacaccctcaatgaccacgtcagacctgtcaacacacagtacaacttctctgataagcaacgaagaacaattcgaggattatggagaaggtgatgatgtggactgcgccccatcaagcccttgccccgacgatgaaactagaaccaatgtttactccgacctgggaagctccgtgtccagcagcgccggacaaacaccccggaagatgagacatgtgtacaacagcgagctgctagacgtctattgctcacagtgctgtaagaaaatcaatctcctgaatgatctcgaagcccgcctgaaaaacctaaaggccaactctcctaaccggaaaatttcttctacagccttcggcagacaactcatgcactccagcaacttttcctcctcgaatgggtctactgaggatctgtttcgagacagcattgactcctgcgataacgatattacggaaaaggtgtcatttctggagaagaaggtgaccgagctggagaatgacagcctgaccaatggcgatttgaagtccaagttgaagcaagagaatacacagctcgtccaccgagtgcacgagctcgaggagatggtgaaggaccaagaaacaacggctgagcaggccttagaggaggaggctagaaggcaccgtgaggcctacggaaagcttgagagagaaaaggcaaccgaggttgagcttctgaatgcccgagtacagcagcttgaagaggaaaacacagagctgagaacgacagtgacacgcttaaagtctcaaaccgagaagttggatgaggagcggcagcggatgtccgataggctcgaagatacctcactacgcctcaaggatgagatggatctgtacaaacgaatgatggataaattacgacagaaccgccttgagtttcagaaggagcgagaagctacgcaagaactcatagaggatctccgcaaagagctggagcacttacagatgtataaactagactgtgaacggcccggtcgtggacgctctgcttcctcagggctgggagagttcaacgcacgcgccagagaggttgaactggaacatgaggtcaagcggctcaaacaggaaaactacaagttgcgggaccagaatgatgacttgaacgggcagattttgtctctcagtctctacgaggcgaaaaatctcttcgctgcccagacaaaggcccaaagcctggccgccgaaattgacacagcttccagagatgagctgatggaggcactgaaagagcaagaggaaattaacttcaggttacggcagtacatggataagattatcctagccatcctggatcacaatccatccattctcgagatcaaacattag

SEQ ID NO: 226136 - DNA, 1914 bp, Artificial Sequence
  derived and/or modified sequence
atggcaggcggcgccggttggagcggtgcccccgccgcactcctgcggagtgtgcggaggctgcgggaggtctttgaagtttgcgggcgagaccctgacggctttctgcgggtcgaacgagtagccgccctagggctgcggtttggtcagggggaggaagtggagaaattggttaaatacctggatcccaacgatctgggtaggatcaacttcaaggacttttgtcgcggagtttttgcaatgaaaggatgcgaggagctcctgaaggatgtcctgtcagtggagagcgccggaacgctgccttgtgcgccggagatacccgactgcgtcgaacagggttccgaagtgaccggaccgacatttgcagacggagagcttatacctcgagagccggggttttttccagaggacgaagaagaggctatgaccctggctccccccgaaggccctcaggagctctacaccgactcacccatggagtcaacacagagtctggaggggtctgttgggtctccagcggagaaagacggggggctgggaggcctgttcctgccagaagacaaaagcctcgtacatacgccctccatgacgacgtctgacttatcaacacactccacaaccagcctcatttccaatgaggagcaatttgaagattacggcgagggtgatgatgtggactgcgcacctagcagcccctgccccgacgacgagacgaggaccaacgtgtattcggatctcggaagctccgtttcgagcagtgcaggccaaacgcctcggaagatgcggcatgtctacaacagcgaactgctggatgtctactgctctcagtgctgtaagaaaattaatcttctaaacgatctagaggcgcgcctcaaaaatctgaaagcaaatagcccgaacaggaaaatcagcagcaccgcatttggtcgtcaactgatgcattcttcaaattttagttcctccaacggaagcacggaagatctgtttcgcgacagcatagactcatgcgataacgatattaccgaaaaagtttcctttctggagaagaaggtcacagaattggagaatgactctctgaccaatggagacctcaagtccaagctgaagcaggagaacacccaattggtgcatcgggtccacgaactggaagagatggtgaaagaccaagaaacaaccgctgagcaggcccttgaggaagaggcccgccgacacagagaagcatatgggaagctggaacgggaaaaggccacagaggtagaactactcaacgcccgcgttcagcagctggaggaagaaaacacggaactgcgtactactgtgacgcggctcaagagtcagaccgagaaacttgatgaggagcgccagaggatgagcgacaggcttgaagatacttcactcagactgaaagacgagatggacctttataagaggatgatggacaagctgcgacagaaccggctcgaatttcaaaaggagagagaggctactcaggaactaatcgaggatttgagaaaagagctcgagcatctgcagatgtataaactggactgtgaacggcccggtagggggaggtcagcctccagtggacttggggagttcaatgcacgggccagggaggttgagttagagcatgaggtcaaacgcctgaaacaagagaattataagttgcgggatcagaacgatgaccttaacggccaaatcctgagtctgagtctttacgaggcgaaaaacttgttcgccgcccagaccaaagcccaaagcctagctgcggaaatcgatacggctagccgggacgagcttatggaagctttgaaggaacaggaagagattaacttccggctgagacagtacatggacaaaataattctggccattttggaccacaacccttcaatactggaaatcaaacactag

SEQ ID NO: 226137 - DNA, 1914 bp, Artificial Sequence
  derived and/or modified sequence
atggccggcggggccggctggagcggggccccagctgccctgctgcggtctgtgcggcggctgcgggaggtgtttgaggtgtgtggccgggaccctgatggcttcctgcgggtggagcgggtggccgccctgggcctgcgcttcggccagggcgaggaggtggagaagctggtgaagtacctggaccccaatgacctgggccgcatcaacttcaaggacttctgccggggcgtgtttgccatgaagggctgtgaggagctgctgaaggatgtgctgtctgtggagagcgctggcaccctgccctgtgcccctgagatcccagactgtgtggagcagggcagcgaggtgacaggccccacctttgctgatggagagctgatcccccgggagcccggcttcttcccagaagatgaggaggaggccatgaccctggcccctcctgagggcccccaggagctgtacacagacagccccatggagagcacccagagcctggagggctctgtgggcagccctgctgagaaggatggcggcctgggcggcctcttcctgcctgaggacaagagcctggtgcacacccccagcatgaccaccagtgacctgagcacccacagcaccaccagcctcatcagcaatgaggagcagtttgaagattatggagaaggagatgatgtggactgtgcccccagcagcccctgcccagatgatgagaccaggaccaacgtgtacagcgacctgggcagctctgtgagcagcagcgctggccagacccccaggaagatgagacatgtgtacaacagcgagctgctggatgtgtactgcagccagtgctgcaagaagatcaacctgctgaatgacctggaggcccggctgaagaacctgaaggccaacagccccaacaggaagatcagcagcacagccttcggccggcagctgatgcacagcagcaacttcagcagcagcaatggcagcacagaggacctcttccgggacagcattgacagctgtgacaatgacatcacagagaaggtgtccttcctggagaagaaggtgacagagctggagaatgacagcctgaccaatggagacctgaagagcaagctgaagcaggagaacacccagctggtgcaccgggtgcatgagctggaggagatggtgaaggaccaggagaccacagctgagcaggccctggaggaggaggcccggcggcaccgggaggcctacggcaagctggagcgggagaaggccacagaggtggagctgctgaatgcccgggtgcagcagctggaggaggagaacacagagctgcggaccaccgtgacccggctgaagagccagacagagaagctggatgaggagcggcagaggatgtctgaccggctggaggacaccagcctgcggctgaaggatgagatggacctgtacaagaggatgatggacaagctgcggcagaaccggctggagttccagaaggagcgggaggccacccaggagctgattgaggacctgaggaaggagctggagcacctgcagatgtacaagctggactgtgagcggcccggccggggccgcagcgccagcagcggcctgggggagttcaatgcccgggcccgggaggtggagctggagcacgaggtgaagaggctgaagcaggagaactacaagctgcgggaccagaatgatgacctgaatggccagatcctgagcctgagcctgtatgaggccaagaacctgtttgctgcccagaccaaggcccagagcctggccgctgagattgacacagccagcagagatgagctgatggaggccctgaaggagcaggaggagatcaacttccggctgcggcagtacatggacaagatcatcctggccatcctggaccacaaccccagcatcctggagatcaagcactag

SEQ ID NO: 226138 - DNA, 1914 bp, Artificial Sequence
  derived and/or modified sequence
atggccggcggcgccggctggagcggcgcccccgccgccctgctgagatccgtcagacgcctgagagaggtgtttgaggtgtgcggccgggatcctgacggcttcctgagggtggaacgtgtggcagctctcgggcttaggttcggacagggagaggaagtggaaaaactggtgaagtatctagacccaaacgacttagggaggatcaattttaaggatttttgccggggagtctttgctatgaaaggctgcgaggagctgctcaaggacgtactgtccgtagagtcagcgggcaccctaccttgcgcacccgaaatccccgattgcgttgaacaagggtctgaagtgacagggccaacctttgccgatggtgaactaataccccgagagcctggattctttcctgaggatgaggaagaagctatgacactcgcgcctcctgaagggccacaggaattgtatacagacagccctatggagagcacacaaagcctcgaaggctctgtgggtagccctgccgagaaggatggggggctgggcgggctctttctcccagaggataaatcgctggtgcatactccctctatgacaacatccgatctctcaacccactcaacaaccagtctgatatccaacgaagagcagtttgaggattatggggagggtgacgacgtggattgcgcaccctcgagcccatgcccggacgatgagactcgcaccaatgtctactcagacctaggtagttcagtcagcagctctgccgggcagacaccaagaaaaatgcgccacgtctataatagcgaactcctcgacgtgtattgttctcagtgttgcaaaaagattaatctgctgaatgatctcgaggctagactaaagaacctgaaggctaattcacccaatcgcaaaatatcttctaccgcgttcgggcgccagttaatgcacagctctaacttttcaagttcaaacgggagcaccgaagatcttttcagagattccattgactcatgcgacaatgatatcaccgagaaggttagctttctggaaaaaaaggtcaccgagctagaaaacgatagcctcactaacggagacctaaagtccaagctgaagcaggaaaacactcaattagttcacagggtgcacgagttggaggaaatggtaaaggaccaggaaactaccgccgagcaagcacttgaggaagaggctaggcggcaccgtgaggcttacggcaaattggaacgggagaaagcgaccgaagtcgaactgcttaacgcgagggtgcaacagctagaagaggaaaatacagaactgcgaacaaccgttactaggctgaagagtcagaccgagaagctggatgaagagagacagcgtatgtcggataggcttgaagacacatccctgcgtttaaaagacgagatggatctgtacaagcgtatgatggataaactacgacagaaccgcttggaattccagaaagagcgggaagccactcaggagctcatcgaggaccttcggaaggagctcgaacatcttcaaatgtataagctcgactgcgagcggccaggccggggccggtctgcatcgtcagggttgggtgaattcaacgcgagagccagagaggtagaactggagcacgaagtgaaacggctgaagcaagagaactataaattgcgggatcaaaacgacgatttgaacggtcagatcctcagcctaagcctgtacgaggccaagaacctgttcgccgcccaaaccaaggcacagtcccttgctgcagagatcgatacggcgagcagagatgaattgatggaagccctgaaagagcaagaggagatcaacttccggttacgccagtatatggataaaattattctagcgatcctcgaccacaacccgtcaatactcgaaatcaaacactag

SEQ ID NO: 226139 - DNA, 1914 bp, Artificial Sequence
  derived and/or modified sequence
atggccggcggcgccggctggagcggcgcccccgccgccctgctgcgaagtgtgcgtaggctccgggaagtcttcgaggtctgtggtcgcgaccctgacggtttcctaagagtagagcgggtggctgccttgggcctaagattcggacagggcgaagaggtggagaagctggttaagtacctggatcctaatgatctggggcgcattaatttcaaggatttttgtagaggggtgtttgctatgaaaggatgcgaggaactactaaaggatgtgctctccgtggaaagcgctggcactttaccttgcgcgccggaaatacccgactgcgttgagcagggttccgaggtaaccggacctacattcgctgatggggagctgatccctcgggagccaggattcttccctgaagacgaggaggaggccatgaccctcgccccaccagaggggccccaggagctgtacactgacagccctatggaatcaacacagagcctcgagggatccgtgggcagccctgccgagaaagatggtgggctaggaggactgttcctccctgaggataagagcttagtgcacacaccttcgatgactacttctgacctctccacacatagtacaaccagcctgatttccaacgaagagcagttcgaggactatggcgagggcgacgacgttgactgcgccccaagcagcccctgccccgatgatgagaccagaacaaatgtgtacagtgacctgggctcctctgtgtctagctcagctggacagaccccgaggaagatgaggcacgtatataactccgagctgctggacgtgtattgctcccagtgctgcaagaagatcaacctgcttaatgacttggaagctcggttgaaaaatctgaaggcaaacagcccaaacaggaaaatatccagcactgcatttggacgacagctcatgcactcttctaatttctccagctcaaatggctcaaccgaagacctctttcgggacagcatagacagctgcgacaatgatattacagagaaggtgtcatttctggagaaaaaggtgacagaactagagaatgattcgctaactaacggcgatctcaaatctaagctgaaacaggaaaacacccaactcgtccatcgcgtgcacgagctcgaagaaatggtgaaggaccaggagacaaccgctgaacaggcattggaggaggaagcccgccgtcacagggaagcctatggtaaactggagagggaaaaggccacagaggtagagttacttaatgccagggtccagcagctggaggaagagaatacagagctgagaacaacagttacacggctgaagagccagacagagaagctcgatgaagaacgccaacgaatgtccgatcggctggaggacacatcattgcgcctgaaagatgaaatggatttgtataagcgcatgatggacaagctgcgccagaaccgccttgagtttcagaaagagagggaggccacccaggagctgattgaggacctcaggaaggagttagagcatctgcagatgtacaagttagattgtgaaagacccggaaggggcagaagcgcatcaagtggcctgggcgagttcaatgcccgtgcccgcgaagttgagctcgaacacgaagtaaaacgcctgaagcaggaaaactataagctgcgggatcagaatgatgacctcaatgggcagattctctctctctcattgtacgaagccaagaacctgttcgccgctcagactaaggcccagagcctggccgccgaaatcgacactgcgtcacgagatgaactcatggaggctctcaaggaacaagaagaaatcaattttagactgcgtcagtacatggataaaatcattttggccatcctcgaccacaatccctccatcttagagatcaagcattag

SEQ ID NO: 226140 - DNA, 1914 bp, Artificial Sequence
  derived and/or modified sequence
atggcaggcggagccggatggagcggggcacctgccgctctcctgaggagcgttcgccgactgcgtgaagtttttgaggtgtgcgggagggaccctgacggtttcctgcgggtagaacgcgtggctgctcttggtttgaggttcggccagggggaagaagtggaaaagctggtgaagtacctggaccccaacgatttgggacgcatcaatttcaaggatttctgtaggggggtgtttgcaatgaagggatgtgaagagcttttgaaggacgtgctatcagtggaatccgccggtacgctgccctgcgcccctgaaatcccagattgcgtcgaacagggttccgaagtaacaggtccaacttttgcagacggagagctgatcccacgggagcccggttttttcccggaagacgaggaggaagcaatgacgctggcacctcccgaagggccacaggagctgtataccgattctcctatggaatcgacccaaagccttgaggggtcagtgggcagtccagccgagaaagacgggggactgggcggtctgttcctccctgaggataagtcactcgtgcacaccccctctatgactacgtccgaccttagcactcactcaacgacatccctgattagcaatgaagagcagttcgaggactacggggaaggagacgatgttgattgtgccccttccagcccgtgcccagatgatgaaacaagaaccaatgtttactccgatcttggttcttcagtctcatcatccgctggacaaacacctagaaagatgagacatgtgtacaatagtgagctgctcgatgtgtactgctcccagtgctgtaagaagatcaacctgttgaatgatctagaggcgaggctgaaaaatctaaaggccaattctccgaacaggaaaatctcatcaacagccttcggcagacagctcatgcatagttctaatttcagttccagcaacggtagcacggaagacctgttccgcgattccatagactcctgcgataacgatataaccgagaaggtgtcttttcttgagaaaaaagttaccgagttggaaaatgattccctgactaatggcgacctgaagagtaaactcaagcaagaaaatactcagctggtgcaccgcgtgcatgaattggaagagatggtcaaggaccaagagaccaccgcagaacaagctcttgaggaagaggctagaaggcatagggaggcgtatggcaagctggagcgggagaaggccacagaggtcgagctgctgaacgcaagggttcaacaactcgaggaggaaaataccgaactccggacaacagtgactaggcttaagtcccaaaccgagaagctggatgaagaaagacagaggatgagcgataggctagaggacaccagcctacggttgaaagatgaaatggacttatataagaggatgatggataagctgcgccagaatcgccttgagtttcaaaaggagagggaggctactcaagagctcatcgaggacctgaggaaggagctggagcacctgcagatgtataaacttgattgcgaaagacccggtagaggacggtccgcaagtagcggactcggtgagttcaacgcccgagctagggaggtcgagctggaacacgaggtcaagcgtctgaaacaggaaaactataagttgagagaccagaacgatgacctgaacgggcagatcctgagcttgtccctgtatgaggctaagaacttgttcgccgcacagaccaaagctcaatcccttgcagcggaaatagataccgccagcagggatgaactgatggaggcactcaaagaacaggaggaaattaattttcggctccgtcagtatatggacaagattattttagctattttggaccacaatccaagcatcctcgaaattaagcactag

SEQ ID NO: 226141 - DNA, 1914 bp, Artificial Sequence
  derived and/or modified sequence
atggctgggggagcaggctggtctggggctcccgcagcgctcctgcgatctgtccgcagattgagagaagtctttgaggtgtgcggcagggatcccgacggcttcctaagggttgagcgagtggcggcattgggattaaggtttggacagggtgaggaggtagaaaagctcgtcaagtacctggatccaaacgacctaggccgaataaattttaaagatttttgccgtggggtctttgcaatgaagggctgtgaggagttgttaaaggatgtgctgtcagtagagagtgctgggacactgccctgcgcacccgagattcccgactgtgtggagcaggggagtgaagtaacaggcccaacttttgcagacggggaactgatacccagagagccagggtttttccccgaagatgaggaagaggcaatgacattggcgcctcccgagggaccacaggaactgtacacagattcccccatggagtccacacaaagtctcgagggaagcgttggttccccagctgagaaggatggaggcctcggagggctgtttctcccagaagataaaagtctcgtccacaccccatccatgactacttcggacctttctacccatagcaccacatccctgattagcaacgaggaacaattcgaagattacggcgaaggagacgacgttgattgtgctcccagcagtccatgccctgatgatgaaacacgtacaaacgtatattccgaccttggaagtagcgtcagtagctctgccggtcagacaccgcgtaaaatgcgacatgtttacaactcggaactgcttgatgtgtactgctctcagtgctgcaagaaaattaatctgctcaatgatctggaggcgagactgaagaacctcaaggccaatagtcctaacagaaagatatcaagcacagccttcggcagacagctgatgcactcaagcaatttctcgtctagcaacgggtctacagaggatctttttagagactccatcgatagctgcgataacgatatcacggagaaagtatcctttctggagaagaaggttaccgagttggaaaacgacagccttaccaatggcgacctcaagtcaaagttgaaacaggaaaatacgcagttggtacatcgcgtacacgaactggaagagatggtgaaggaccaggaaacaaccgctgaacaagctctggaggaagaagctcggaggcatcgagaggcgtacggaaaactagagagagagaaggccactgaggtcgagttattgaatgcgagggtgcagcagctggaagaggaaaacaccgagctgcgtaccaccgtcacccggttgaaatcacaaactgagaaactcgacgaggagagacaacggatgagcgatagactcgaagatacttccttgcggctcaaggacgaaatggatctgtacaagcggatgatggataagctgcgacagaataggctggagtttcagaaggagagggaagctactcaggaattgatcgaagatctacggaaagaactggagcatttacagatgtacaaattggactgtgagaggcctggcagaggacggtcagccagctctgggttgggagagtttaatgcccgtgcacgtgaggttgaactggagcatgaggtcaaacgattgaaacaggaaaactacaaactgagagatcagaatgatgatctgaatggccagattttgtcactgtccctgtacgaggcaaagaatctttttgcggcacagacaaaggcacaatcccttgccgcagagatagacacggcctctagagatgagttgatggaggctttgaaggagcaagaggagattaacttccgcctcagacaatacatggataagataattttagccattctcgaccacaatccctccatcctggagattaagcattag

SEQ ID NO: 226142 - DNA, 8625 bp, Artificial Sequence
  derived and/or modified sequence
ccttcccctccccactcttctccttccctcccctcccctcccttcccctccggagcggctggggctgcggcgccgctgctgacacggatcggccgcggccgccaccgggcggaggctgcgcggcgcagacccagacgggcggccccggagggcgcgcggcgatggcggcggcgggcaggcggcgggcgcggcgggcgaggggtccgggctgagctgcgggccggcccggatggcgggcggcgcgggctggtcgggcgcccccgcggctctgctgcgctccgtgcgccgcctgcgcgaggtgttcgaggtgtgcggccgcgaccccgacggcttcctgcgcgtggagcgcgtcgcggcgctcggactgcgcttcggccagggcgaggaggtggaaaaacttgtgaaatatttggatcccaacgacctggggagaatcaacttcaaggacttttgccggggggtgttcgccatgaaagggtgcgaggagctgctgaaggatgtgctgtcggtggagagcgcggggacgctgccgtgcgcgccagagatcccagactgcgtggagcagggcagcgaggtcacaggccccacctttgctgatggcgagctcatccccagggaacccggcttttttcccgaggacgaggaggaggctatgacgctggcgccacctgagggcccccaggagttgtacacagacagccccatggagagcactcagagcctggaggggtctgtcgggagtcctgccgagaaggacgggggacttgggggcctgtttctgccagaagacaagtccctggtccacactccatccatgacgacctcagacctttctacacactccaccacctcgctcatcagcaatgaggagcagtttgaagactatggggagggtgacgatgtggactgtgcccccagcagcccttgccccgatgatgagaccaggaccaacgtctactcggacctggggtcttcggtgtcttccagtgcggggcagacgcctaggaaaatgcggcacgtgtacaacagcgaattgctagatgtttactgctctcaatgctgcaagaaaatcaacctgctcaatgacttggaagcccgactgaaaaacctgaaggccaacagccccaaccgaaagatctccagcacggcctttggacggcagctcatgcacagcagcaacttcagcagcagcaatggcagcaccgaagacctgttccgggacagcattgactcttgcgacaatgacatcacagagaaggtaagcttcctggaaaagaaggtgacagagctggagaatgacagcctgaccaatggggacctgaagagcaagctgaagcaagagaacacacagctggtgcacagggtgcatgagctggaggagatggtgaaggatcaggagaccacggccgagcaggctctggaggaggaggcgcggcgccaccgcgaggcctacggcaagctggagagggagaaggctaccgaggtggagctgctcaatgccagggtgcagcagttggaggaagaaaatacagagcttagaacaacagtgactcggctcaagtctcaaacagagaaactggatgaggagcggcagcgcatgtctgaccgtctggaggacaccagcctgcggctcaaagatgagatggacctgtacaagcgcatgatggacaagctgcgacagaaccgccttgagttccagaaggagcgggaggcgacgcaggagctcatcgaggacttgcggaaggagctggagcacctgcagatgtacaagctggactgcgagcggccaggcaggggccgcagtgcctcctctggcctaggcgagttcaatgccagggcccgcgaggtggagctcgagcacgaggtcaagcggctcaagcaggagaattataagctgcgggatcagaacgacgacttgaatgggcagattttgagcctcagcctctacgaagcaaaaaacctctttgctgcccagactaaagcccagtctctggctgcggagatagacaccgcctcgcgcgatgagctaatggaagccctgaaggagcaggaggagatcaacttccggctgaggcagtacatggacaagattatcctcgccatcctggaccacaatccctccatcctcgagatcaaacactaaggcacggggctggctgcagagcagccttaggaccctgggaccaagggcagaccctgcccaaggatgcaggcctaagccgggcctcacactcacactgtaaatgtctctctggccaccatgcgttacgtgtacccgtgtatatgtggggaggctgtgcacacgagcgaggggtgagtggccgtggctgtgggcagcatccacacggttagccgtgcatgcactttgtggcccctttgcaaggggcagagggtactggaagtgggaggaggcaaggtctgctatcaggagttactgtaaaaacaagaactggaagctcgtgtttccggtactgggtaaaatgattctacctctggggataaggattcacattcgctctagtacgatgggctctttcaccccactcctagtccccttgggagtgggagcaaaattgtgatctttcctaggagtttgaatgccccatatttgtgtcctcgccagctctttggccacctttcaagccccagtgttcaagctcagagaggatgaaggggcatctggagggtccatgagatggggccctcaccaaatgccttggccaccggccagcagccctctgtgatgtgtgtgcagagtgaacagaggactcaggtttcatagcagctagtgcggggcatcctcatcctgtacctatagagttcgtgcactcccccatccatgctacctacctccccgtttctgtttcagttttaagacaatgaagcagcattcactgcgtcattgtaacatgaagggataaaaatgaaggagaaggagggtttgggatgggtgtctaaggcaggagttgacatcgggcaaccaaagaaatgagttttggggaggaacacaactcccatcccagtcagtttccttcccatggctgcatcttaagatggatgcacggagaaaccgtctgcctggctccctgtcttcattctccacgcagcctggtgatggcaggcctgggtttggatttcagaatcctagctccgggctccactcgtgtggcagcaagactgcttcgttccagcgtttagaaacacacctgtatttgattctcagccaggggagcactcgctgcactggtgggaggcggttgggaaagttgcaggaaaaccttagtcttccatccttctgacccatggtggaaattcacaccatggatttttaatggatctttgttctaggcagctgggaatagacatggtacttaccttagagttttccaatttatctcaattttatatggcttgtgattcattttcttaatccaaatatatataaacgtgtgtggtcttattcttccccctgcagtttcttgctttcttcagcacatcttatagtatgagaaggaaggtttgggcatgttgggaagggcggtggagggggagttgcagaaagagagggcagtgagggtgaggagaggggatctggggacttgggtgtgacacctgcttgacagaggcagggctgtggccaggaccaaccttcaattccattccaatcagcctttgcatttgttggatctcgtggcttctttttaatcttttgttggggattagtttcatgctgcacataatggggttgcactggtctgacccaggactttggagccacccacactgggaagactaggctaggcagtcggtcttctaggagtttctcagccccttaggacgcgggtctccttgggctcccccaagggttctgcgaagaggcagtggaagaaggcatgaggagagggtctcttgagaatttgccaataggaaggagtggccacggctgaaaggaacaagacagatcctgacatagctttggcctgggtgttaggtcagaaggagtactggtgcgtgggggccttaccccagggttgagtattttatctgtaaaatgttatctgccctttggctgcattggaatttcagagaaggctgcagaggcctgggttacacagcctgagtcacaacgtgggaaggaatctctgccacgggaaaggtgggcggaagcagctggcagcctggggcgtgcttcaggctcctccctctaaggggcgccatgggaacaggctccggagggagccggcgtctgaaaggcccccgggacctgctgcagtgccagaggggcctctggagcaggcctggcttttaaatggggggctgaattccagctcacacacacctcaagtccaaccttactttcttcagccagaatacatttcttgtaaaacctggcttgttgcttggcttttaaagatggtgtatgtttgtaaaaatattcttctgggctcaaaagctagcttgagggggcagatgccccaggtgtcccagctccacagcccctggcagatcccagaccccttggtggcaggtcccagagcctaggtggtaggagcttgatctttgtttctgcccttacccctcagtagtggggctgcgaggtagtagacaggatgcccagttaagtttgaatttcagatagaaaataattttagaataaatatgttctatctaatacatgggacagatgttatttttagagataggatcttgctctgttgcccaggctggagtgtagtggtatgatcatagctcaccacaaccttgaactcccaggctcaagcgatcctcccgccttaactgcctgagtagctgggactacaggcatgcaccaccacgcccagctaatttttcttattttttgtagagacagggtctcactgtgttgcctcactcgagctgctgacctcaagtgatcctcccacctcagcctgccaaagcactgggattacaggcatgagccaccatgcctggccaggacatatttgaaatggggagattttaaaaattctgatgattagactgaatcctcagacgttctggtttgattgttgtgggtgtagcccaggcatgggattttttaaagagctgctcaggtaattccaatttaattgcgtgtcctacttgggttttttgtttgtttttattgtttttgctaaacctggcaaccctaccgagtagggattagcagtaacttatctgaaatttagaggtgttttgggggtggggcgagggtttctgtagtagactcagattttacatggccctgagctgcccttgcgttcagttggaagccacgcaaaatgaactgaaccaggagtgagcttcgtgtacattatctattagaaaatgaagtaccttctggttcagctagtccctgtgcgttgagaggctttaagaaacttctagtaaaaatgtttttttcttttagctttgaattggccagagtttatcctagattattttattttaaattggtagaattctttgcgaactgtcacagagaaattccttttcatgactttatttctgacctattaaaacatgaacaggccaggcatggtggctcacgcctgtaatcctagcacttgggaggcagtggcaggcggatcacttgagctcaggagtcctaaaccagcctgggcaacatagtgataccttgtctctaccaaaagttaaaaaaaaaaaaaaaaaagctcaagaacctgcacgagggcctaaaacagtgggctcagctttggctgtgcattggaatcacctggggagatttgtaagcttctgctgtctgggctgaacccccagaggttcggattgaattggtgtggggtgtggtccaggcatcgagatgtgtaaagacctccccaggtgatgatatgcagtccgaggttgagactgccctgtcctgcaaggtcgttggccagaggtagaggaaactggtcaaagtggctgttgggcttgtcaagcccgtggctgaatgacagtgagctctcttgctgggagggttccttttcctgttgttgaatggtcctggcctgcaggatgggaggccagatgccttcaggagctggtggatccagctgttctcaccagcctggaggttagcagaccagagtgggtgggcaggaccttggcctggtgcccctggaatcagtgggtggcatgtgttgggatatactggctacaggctcatctcaaagagcaggtagaacagagtcagcagggaactgacaggtggggctgtccccctgaaagcagccgcagaaacagctgccacctatttgcatagctgagcaggaggacatactgtctttgtgggttttgcttctggtctgtttcctgactgggttgataaagggagtcccagctcgttccctgttagccaaaccagcatcctactcacacaccggacactccaggtgctagtccactggtgctggtgttcaggggagttggggggggggggcgcggggacagaagcgcgggttcttggttccaatgagggacttagcagaagcctccaggggccagcagggccaggtgaaactgggagaaatgaagccctctgtgtcctgtgtgtgtggtggggtttaatgcattagcaaatttaaacttaaaaactaactctaggccgggcacggtggctcacacctgtaatcccagcactttgggaggccaaggcaggtggattgcctgagctcaggagttcgagaccagcctggacaacatggtgaaactcttgtctttatttttttaaaaaaacaaaaagtaactttcgatgtgatcataccaggaaagttttgcgtggtcaccatgccaagaaaatgactttggttgcccagcagatccacagcgactctttctcaagggctactgtggattctagattgaggaaaggggccacttaggactcagtgctggtatcctccacagtcctttctcccagactctggccctccctttgggacccaggaaatcccctctagggtgacgctgctggctaggaagactgaggtctgctgcgccaaggggcctcaagttagaagggccatgccgttcagtggatgactttgagcgctgatcctagggacctgccaggtcctcacttcctgccctgggtgcacacatgaatggggcagccagcaggaagcgggagaggctggaaccaggagcctgccctacctgcatggcaggacaactctgaggcccttctgccatattctctgctacccaccagagaaaataggctgccttctagaaagatttgtttctaaaagcgtagaccctggggaagtataatgtcaccatgctcaccaggcgaggtttcccatatgacctccctgccccgacctcgtaggttgctcctttccccatctgtaaggtagagatgtctgccccggagctaccagctggggatggcatccaggccatgtctcctgcaggatccaagtgctgttgtccccagggtgaccctgcctcctgctggggcccatccgctttgctgtgctgcacaggctgttttcatctgcatggtttggggtctttgtccttgtgccttttcttccccatcgccactgtacaggattttccacattgcccactgcctccttttctacatcgtctcatctccctggcctttcccgagccctgtaaatgtgtactttttcaacgtgcctcccccaggtgaggccagctctcccgggcacattcgtccacaaggatcaggccccacttacccttggctcgctcagcctgtagacttggtaactttgtacagaatctttcattattgtcttaagcatggggggctaggacccacttagtccctcctccagcctgcagctaatttaggagccttgcattccagaaaagggcaactttgtgtaaagcagcttctcccacagagctttccctgcattgttagtgatgtcgggcaaagcatcactctttaacctggggcattggccccagcagggatatcatgggaccgcagccgctccgtgcactgtctctgcccccagaggaagccctgtccatggttcctggtgcacggccacaggcctgccttgaggccaccacatctggtgtctagaacagctgcgggccccacttgggcagaaggaagaggtgctagctgctgcccctgcctgctgtgaacacctgcccagcccttccttgtctgctgaggtgctcagaccagagtgccattaaataccaactgatgtcacggagcggacggtgcattgccaaggactcacagctgtgggctcccttccagctcctcccactttcttggctgggtcttctgaggcctacgtggaatgaactacacatgtggcctcatgcccaagggtttgttagatggcctctgactctgtgggattcaacttgacttttttgccccaggaggctctgtctggaaacaggcttagctttagtgctggggtgggacctgccctgtgggccccagggaggggacagtgggggtgaggccctgaggctgtccagggtctgagctctttgcctccaacctgcttctgccccaaaaggaacaggctgttggtggcaggctcctcccggggagctgtactgtacagaccaaggtgtaaataaacagtttgctcttctcgc

SEQ ID NO: 226143 - DNA, 8629 bp, Artificial Sequence
  derived and/or modified sequence
ccttcccctccccactcttctccttccctcccctcccctcccttcccctccggagcggctggggctgcggcgccgctgctgacacggatcggccgcggccgccaccgggcggaggctgcgcggcgcagacccagacgggcggccccggagggcgcgcggcgatggcggcggcgggcaggcggcgggcgcggcgggcgaggggtccgggctgagctgcgggccggcccggatggcgggcggcgcgggctggtcgggcgcccccgcggctctgctgcgctccgtgcgccgcctgcgcgaggtgttcgaggtgtgcggccgcgaccccgacggcttcctgcgcgtggagcgcgtcgcggcgctcggactgcgcttcggccagggcgaggaggtagaaaaacttgtgaaatatttggatcccaacgacctggggagaatcaacttcaaggacttttgccggggggtgttcgccatgaaagggtgcgaggagctgctgaaggatgtgctgtcggtggagagcgcggggacgctgccgtgcgcgccagagatcccagactgcgtggagcagggcagcgaggtcacaggccccacctttgctgatggcgagctcatccccagggaacccggcttttttcccgaggacgaggaggaggctatgacgctggcgccacctgagggcccccaggagttgtacacagacagccccatggagagcactcagagcctggaggggtctgtcgggagtcctgccgagaaggacgggggacttgggggcctgtttctgccagaagacaagtccctggtccacactccatccatgacgacctcagacctttctacacactccaccacctcgctcatcagcaatgaggagcagtttgaagactatggggagggtgacgatgtggactgtgcccccagcagcccttgccccgatgatgagaccaggaccaacgtctactcggacctggggtcttcggtgtcttccagtgcggggcagacgcctaggaaaatgcggcacgtgtacaacagcgaattgctagatgtttactgctctcaatgctgcaagaaaatcaacctgctcaatgacttggaagcccgactgaaaaacctgaaggccaacagccccaaccgaaagatctccagcacggcctttggacggcagctcatgcacagcagcaacttcagcagcagcaatggcagcaccgaagacctgttccgggacagcattgactcttgcgacaatgacatcacagagaaggtaagcttcctggaaaagaaggtgacagagctggagaatgacagcctgaccaatggggacctgaagagcaagctgaagcaagagaacacacagctggtgcacagggtgcatgagctggaggagatggtgaaggatcaggagaccacggccgagcaggctctggaggaggaggcgcggcgccaccgcgaggcctacggcaagctggagagggagaaggctaccgaggtggagctgctcaatgccagggtgcagcagttggaggaagaaaatacagagcttagaacaacagtgactcggctcaagtctcaaacagagaaactggatgaggagcggcagcgcatgtctgaccgtctggaggacaccagcctgcggctcaaagatgagatggacctgtacaagcgcatgatggacaagctgcgacagaaccgccttgagttccagaaggagcgggaggcgacgcaggagctcatcgaggacttgcggaaggagctggagcacctgcagatgtacaagctggactgcgagcggccaggcaggggccgcagtgcctcctctggcctaggcgagttcaatgccagggcccgcgaggtggagctcgagcacgaggtcaagcggctcaagcaggagaattataagctgcgggatcagaacgacgacttgaatgggcagattttgagcctcagcctctacgaagcaaaaaacctctttgctgcccagactaaagcccagtctctggctgcggagatagacaccgcctcgcgcgatgagctaatggaagccctgaaggagcaggaggagatcaacttccggctgaggcagtacatggacaagattatcctcgccatcctggaccacaatccctccatcctcgagatcaaacactaaggcacggggctggctgcagagcagccttaggaccctgggaccaagggcagaccctgcccaaggatgcaggcctaagccgggcctcacactcacactgtaaatgtctctctggccaccatgcgttacgtgtacccgtgtatatgtggggaggctgtgcacacgagcgaggggtgagtggccgtggctgtgggcagcatccacacggttagccgtgcatgcactttgtggcccctttgcaaggggcagagggtactggaagtgggaggaggcaaggtctgctatcaggagttactgtaaaaacaagaactggaagctcgtgtttccggtactgggtaaaatgattctacctctggggataaggattcacattcgctctagtacgatgggctctttcaccccactcctagtccccttgggagtgggagcaaaattgtgatctttcctaggagtttgaatgccccatatttgtgtcctcgccagctctttggccacctttcaagccccagtgttcaagctcagagaggatgaaggggcatctggagggtccatgagatggggccctcaccaaatgccttggccaccggccagcagccctctgtgatgtgtgtgcagagtgaacagaggactcaggtttcatagcagctagtgcggggcatcctcatcctgtacctatagagttcgtgcactcccccatccatgctacctacctccccgtttctgtttcagttttaagacaatgaagcagcattcactgcgtcattgtaacatgaagggataaaaatgaaggagaaggagggtttgggatgggtgtctaaggcaggagttgacatcgggcaaccaaagaaatgagttttggggaggaacacaactcccatcccagtcagtttccttcccatggctgcatcttaagatggatgcacggagaaaccgtctgcctggctccctgtcttcattctccacgcagcctggtgatggcaggcctgggtttggatttcagaatcctagctccgggctccactcgtgtggcagcaagactgcttcgttccagcgtttagaaacacacctgtatttgattctcagccaggggagcactcgctgcactggtgggaggcggttgggaaagttgcaggaaaaccttagtcttccatccttctgacccatggtggaaattcacaccatggatttttaatggatctttgttctaggcagctgggaatagacatggtacttaccttagagttttccaatttatctcaattttatatggcttgtgattcattttcttaatccaaatatatataaacgtgtgtggtcttattcttccccctgcagtttcttgctttcttcagcacatcttatagtatgagaaggaaggtttgggcatgttgggaagggcggtggagggggagttgcagaaagagagggcagtgagggtgaggagaggggatctggggacttgggtgtgacacctgcttgacagaggcagggctgtggccaggaccaaccttcaattccattccaatcagcctttgcatttgttggatctcgtggcttctttttaatcttttgttggggattagtttcatgctgcacataatggggttgcactggtctgacccaggactttggagccacccacactgggaagactaggctaggcagtcggtcttctaggagtttctcagccccttaggacgcgggtctccttgggctcccccaagggttctgcgaagaggcagtggaagaaggcatgaggagagggtctcttgagaatttgccaataggaaggagtggccacggctgaaaggaacaagacagatcctgacatagctttggcctgggtgttaggtcagaaggagtactggtgcgtgggggccttaccccagggttgagtattttatctgtaaaatgttatctgccctttggctgcattggaatttcagagaaggctgcagaggcctgggttacacagcctgagtcacaacgtgggaaggaatctctgccacgggaaaggtgggcggaagcagctggcagcctggggcgtgcttcaggctcctccctctaaggggcgccatgggaacaggctccggagggagccggcgtctgaaaggcccccgggacctgctgcagtgccagaggggcctctggagcaggcctggcttttaaatggggggctgaattccagctcacacacacctcaagtccaaccttactttcttcagccagaatacatttcttgtaaaacctggcttgttgcttggcttttaaagatggtgtatgtttgtaaaaatattcttctgggctcaaaagctagcttgagggggcagatgccccaggtgtcccagctccacagcccctggcagatcccagaccccttggtggcaggtcccagagcctaggtggtaggagcttgatctttgtttctgcccttacccctcagtagtggggctgcgaggtagtagacaggatgcccagttaagtttgaatttcagatagaaaataattttagaataaatatgttctatctaatacatgggacagatgttatttttagagataggatcttgctctgttgcccaggctggagtgtagtggtatgatcatagctcaccacaaccttgaactcccaggctcaagcgatcctcccgccttaactgcctgagtagctgggactacaggcatgcaccaccacgcccagctaatttttcttattttttgtagagacagggtctcactgtgttgcctcactcgagctgctgacctcaagtgatcctcccacctcagcctgccaaagcactgggattacaggcatgagccaccatgcctggccaggacatatttgaaatggggagattttaaaaattctgatgattagactgaatcctcagacgttctggtttgattgttgtgggtgtagcccaggcatgggattttttaaagagctgctcaggtaattccaatttaattgcgtgtcctacttgggttttttgtttgtttttattgtttttgctaaacctggcaaccctaccgagtagggattagcagtaacttatctgaaatttagaggtgttttgggggtggggcgagggtttctgtagtagactcagattttacatggccctgagctgcccttgcgttcagttggaagccacgcaaaatgaactgaaccaggagtgagcttcgtgtacattatctattagaaaatgaagtaccttctggttcagctagtccctgtgcgttgagaggctttaagaaacttctagtaaaaatgtttttttcttttagctttgaattggccagagtttatcctagattattttattttaaattggtagaattctttgcgaactgtcacagagaaattccttttcatgactttatttctgacctattaaaacatgaacaggccaggcatggtggctcacgcctgtaatcctagcacttgggaggcagtggcaggcggatcacttgagctcaggagtcctaaaccagcctgggcaacatagtgataccttgtctctaccaaaagttaaaaaaaaaaaaaaaaaagctcaagaacctgcacgagggcctaaaacagtgggctcagctttggctgtgcattggaatcacctggggagatttgtaagcttctgctgtctgggctgaacccccagaggttcggattgaattggtgtggggtgtggtccaggcatcgagatgtgtaaagacctccccaggtgatgatatgcagtccgaggttgagactgccctgtcctgcaaggtcgttggccagaggtagaggaaactggtcaaagtggctgttgggcttgtcaagcccgtggctgaatgacagtgagctctcttgctgggagggttccttttcctgttgttgaatggtcctggcctgcaggatgggaggccagatgccttcaggagctggtggatccagctgttctcaccagcctggaggttagcagaccagagtgggtgggcaggaccttggcctggtgcccctggaatcagtgggtggcatgtgttgggatatactggctacaggctcatctcaaagagcaggtagaacagagtcagcagggaactgacaggtggggctgtccccctgaaagcagccgcagaaacagctgccacctatttgcatagctgagcaggaggacatactgtctttgtgggttttgcttctggtctgtttcctgactgggttgataaagggagtcccagctcgttccctgttagccaaaccagcatcctactcacacaccggacactccaggtgctagtccactggtgctggtgttcaggggagttggggggggggggcgcggggacagaagcgcgggttcttggttccaatgagggacttagcagaagcctccaggggccagcagggccaggtgaaactgggagaaatgaagccctctgtgtcctgtgtgtgtggtggggtttaatgcattagcaaatttaaacttaaaaactaactctaggccgggcacggtggctcacacctgtaatcccagcactttgggaggccaaggcaggtggattgcctgagctcaggagttcgagaccagcctggacaacatggtgaaactcttgtctttatttttttaaaaaaacaaaaagtaactttcgatgtgatcataccaggaaagttttgcgtggtcaccatgccaagaaaatgactttggttgcccagcagatccacagcgactctttctcaagggctactgtggattctagattgaggaaaggggccacttaggactcagtgctggtatcctccacagtcctttctcccagactctggccctccctttgggacccaggaaatcccctctagggtgacgctgctggctaggaagactgaggtctgctgcgccaaggggcctcaagttagaagggccatgccgttcagtggatgactttgagcgctgatcctagggacctgccaggtcctcacttcctgccctgggtgcacacatgaatggggcagccagcaggaagcgggagaggctggaaccaggagcctgccctacctgcatggcaggacaactctgaggcccttctgccatattctctgctacccaccagagaaaataggctgccttctagaaagatttgtttctaaaagcgtagaccctggggaagtataatgtcaccatgctcaccaggcgaggtttcccatatgacctccctgccccgacctcgtaggttgctcctttccccatctgtaaggtagagatgtctgccccggagctaccagctggggatggcatccaggccatgtctcctgcaggatccaagtgctgttgtccccagggtgaccctgcctcctgctggggcccatccgctttgctgtgctgcacaggctgttttcatctgcatggtttggggtctttgtccttgtgccttttcttccccatcgccactgtacaggattttccacattgcccactgcctccttttctacatcgtctcatctccctggcctttcccgagccctgtaaatgtgtactttttcaacgtgcctcccccaggtgaggccagctctcccgggcacattcgtccacaaggatcaggccccacttacccttggctcgctcagcctgtagacttggtaactttgtacagaatctttcattattgtcttaagcatggggggctaggacccacttagtccctcctccagcctgcagctaatttaggagccttgcattccagaaaagggcaactttgtgtaaagcagcttctcccacagagctttccctgcattgttagtgatgtcgggcaaagcatcactctttaacctggggcattggccccagcagggatatcatgggaccgcagccgctccgtgcactgtctctgcccccagaggaagccctgtccatggttcctggtgcacggccacaggcctgccttgaggccaccacatctggtgtctagaacagctgcgggccccacttgggcagaaggaagaggtgctagctgctgcccctgcctgctgtgaacacctgcccagcccttccttgtctgctgaggtgctcagaccagagtgccattaaataccaactgatgtcacggagcggacggtgcattgccaaggactcacagctgtgggctcccttccagctcctcccactttcttggctgggtcttctgaggcctacgtggaatgaactacacatgtggcctcatgcccaagggtttgttagatggcctctgactctgtgggattcaacttgacttttttgccccaggaggctctgtctggaaacaggcttagctttagtgctggggtgggacctgccctgtgggccccagggaggggacagtgggggtgaggccctgaggctgtccagggtctgagctctttgcctccaacctgcttctgccccaaaaggaacaggctgttggtggcaggctcctcccggggagctgtactgtacagaccaaggtgtaaataaacagtttgctcttctcgcctga

SEQ ID NO: 226144 - DNA, 1914 bp, Artificial Sequence
  derived and/or modified sequence
atggccggcggcgccggctggagcggcgcccccgccgccctgctgagaagcgtgagaagactgagagaggtgttcgaggtgtgcggcagagaccccgacggcttcctgagagtggagagagtggccgccctgggcctgagattcggccagggcgaggaggtggagaagctggtgaagtacctggaccccaacgacctgggcagaatcaacttcaaggacttctgcagaggcgtgttcgccatgaagggctgcgaggagctgctgaaggacgtgctgagcgtggagagcgccggcaccctgccctgcgcccccgagatccccgactgcgtggagcagggcagcgaggtgaccggccccaccttcgccgacggcgagctgatccccagagagcccggcttcttccccgaggacgaggaggaggccatgaccctggccccccccgagggcccccaggagctgtacaccgacagccccatggagagcacccagagcctggagggcagcgtgggcagccccgccgagaaggacggcggcctgggcggcctgttcctgcccgaggacaagagcctggtgcacacccccagcatgaccaccagcgacctgagcacccacagcaccaccagcctgatcagcaacgaggagcagttcgaggactacggcgagggcgacgacgtggactgcgcccccagcagcccctgccccgacgacgagaccagaaccaacgtgtacagcgacctgggcagcagcgtgagcagcagcgccggccagacccccagaaagatgagacacgtgtacaacagcgagctgctggacgtgtactgcagccagtgctgcaagaagatcaacctgctgaacgacctggaggccagactgaagaacctgaaggccaacagccccaacagaaagatcagcagcaccgccttcggcagacagctgatgcacagcagcaacttcagcagcagcaacggcagcaccgaggacctgttcagagacagcatcgacagctgcgacaacgacatcaccgagaaggtgagcttcctggagaagaaggtgaccgagctggagaacgacagcctgaccaacggcgacctgaagagcaagctgaagcaggagaacacccagctggtgcacagagtgcacgagctggaggagatggtgaaggaccaggagaccaccgccgagcaggccctggaggaggaggccagaagacacagagaggcctacggcaagctggagagagagaaggccaccgaggtggagctgctgaacgccagagtgcagcagctggaggaggagaacaccgagctgagaaccaccgtgaccagactgaagagccagaccgagaagctggacgaggagagacagagaatgagcgacagactggaggacaccagcctgagactgaaggacgagatggacctgtacaagagaatgatggacaagctgagacagaacagactggagttccagaaggagagagaggccacccaggagctgatcgaggacctgagaaaggagctggagcacctgcagatgtacaagctggactgcgagagacccggcagaggcagaagcgccagcagcggcctgggcgagttcaacgccagagccagagaggtggagctggagcacgaggtgaagagactgaagcaggagaactacaagctgagagaccagaacgacgacctgaacggccagatcctgagcctgagcctgtacgaggccaagaacctgttcgccgcccagaccaaggcccagagcctggccgccgagatcgacaccgccagcagagacgagctgatggaggccctgaaggagcaggaggagatcaacttcagactgagacagtacatggacaagatcatcctggccatcctggaccacaaccccagcatcctggagatcaagcactag

SEQ ID NO: 226145 - protein, 296 aa, Artificial Sequence
  derived and/or modified sequence
MCVRRSLVGLTFCTCYLASYLTNKYVLSVLKFTYPTLFQGWQTLIGGLLLHVSWKLGWVEINSSSRSHVLVWLPASVLFVGIIYAGSRALSRLAIPVFLTLHNVAEVIICGYQKCFQKEKTSPAKICSALLLLAAAGCLPFNDSQFNPDGYFWAIIHLLCVGAYKILQKSQKPSALSDIDQQYLNYIFSVVLLAFASHPTGDLFSVLDFPFLYFYRFHGSCCASGFLGFFLMFSTVKLKNLLAPGQCAAWIFFAKIITAGLSILLFDAILTSATTGCLLLGALGEALLVFSERKSS

SEQ ID NO: 226146 - DNA, 891 bp, Artificial Sequence
  derived and/or modified sequence
atgtgcgtgagaagaagcctggtgggcctgaccttctgcacctgctacctggccagctacctgaccaacaagtacgtgctgagcgtgctgaagttcacctaccccaccctgttccagggctggcagaccctgatcggcggcctgctgctgcacgtgagctggaagctgggctgggtggagatcaacagcagcagcagaagccacgtgctggtgtggctgcccgccagcgtgctgttcgtgggcatcatctacgccggcagcagagccctgagcagactggccatccccgtgttcctgaccctgcacaacgtggccgaggtgatcatctgcggctaccagaagtgcttccagaaggagaagaccagccccgccaagatctgcagcgccctgctgctgctggccgccgccggctgcctgcccttcaacgacagccagttcaaccccgacggctacttctgggccatcatccacctgctgtgcgtgggcgcctacaagatcctgcagaagagccagaagcccagcgccctgagcgacatcgaccagcagtacctgaactacatcttcagcgtggtgctgctggccttcgccagccaccccaccggcgacctgttcagcgtgctggacttccccttcctgtacttctacagattccacggcagctgctgcgccagcggcttcctgggcttcttcctgatgttcagcaccgtgaagctgaagaacctgctggcccccggccagtgcgccgcctggatcttcttcgccaagatcatcaccgccggcctgagcatcctgctgttcgacgccatcctgaccagcgccaccaccggctgcctgctgctgggcgccctgggcgaggccctgctggtgttcagcgagagaaagagcagctag

SEQ ID NO: 226147 - DNA, 468 bp, Artificial Sequence
  derived and/or modified sequence
atgatccccgacgtgatcagcgccctgctgctgctggccgccgccggctgcctgcccttcaacgacagccagttcaaccccgacggctacttctgggccatcatccacctgctgtgcgtgggcgcctacaagatcctgcagaagagccagaagcccagcgccctgagcgacatcgaccagcagtacctgaactacatcttcagcgtggtgctgctggccttcgccagccaccccaccggcgacctgttcagcgtgctggacttccccttcctgtacttctacagattccacggcagctgctgcgccagcggcttcctgggcttcttcctgatgttcagcaccgtgaagctgaagaacctgctggcccccggccagtgcgccgcctggatcttcttcgccaagatcatcaccgccggcctgagcatcctgctgttcgacgccatcctgaccagcgccaccaccggctag

SEQ ID NO: 226148 - DNA, 891 bp, Artificial Sequence
  derived and/or modified sequence
atgtgcgtgagacgctctctggttggtcttactttttgcacgtgttacctcgccagttacctaaccaacaagtatgtactctctgtactgaaattcacttatcccacactttttcagggctggcagacgctgatcggcggactgctgctgcatgtctcatggaaactggggtgggtggaaattaattctagttcgaggtcacacgtgctcgtctggttgcccgcatcagtcttgttcgtggggataatctacgccggtagtcgggctttgagtcggctggctatcccagtcttcctaactctgcacaacgtcgcagaggttattatctgtggatatcagaaatgttttcagaaggagaagacatccccagcgaagatttgctcggcattgttgctgttagccgccgccggttgtcttccttttaatgattctcagtttaaccctgacgggtatttttgggccataatccatctgttgtgcgtcggggcatataagatcctccagaagtcccaaaaaccctcagcgctcagtgacattgaccagcaatatctgaactacattttctccgtcgttctgttagctttcgccagtcatcccacgggtgatcttttcagtgtgctggattttcccttcctctatttctaccgattccacggctcctgttgcgcttccggtttccttggcttcttcttgatgttctctaccgtaaagctgaagaatctgctcgcccctgggcagtgcgcagcgtggattttctttgcgaagatcattaccgccgggctgagtattctgctctttgacgctattctgactagcgccactactggatgtctcctcctgggcgcacttggcgaagctctcctcgtttttagtgaaaggaaaagttcttag

SEQ ID NO: 226149 - DNA, 468 bp, Artificial Sequence
  derived and/or modified sequence
atgattccagacgtgatctccgctctcctcctcttggccgcagccggttgcctgccattcaacgactcccagttcaatcctgatgggtacttttgggccatcatccatctgctgtgcgtcggcgcctataaaatcctgcagaagagccagaagccctcagctttgtctgacattgaccagcaatatttgaactacatcttttctgtggtcctgctggcttttgcgtcacacccgaccggagatctgttctcggtccttgacttccctttcctgtatttctatcgattccacggaagctgctgcgccagtgggttcctaggttttttcctgatgttttcgacggtaaagctgaaaaaccttcttgcgcccggacagtgtgccgcctggattttttttgctaaaattatcaccgccggactttcgattctcctgtttgacgcgatcctgactagcgcgactaccggctag

SEQ ID NO: 226150 - DNA, 891 bp, Artificial Sequence
  derived and/or modified sequence
atgtgtgtgcggcgcagcctggtgggcctgaccttctgcacctgctacctggccagctacctgaccaacaagtatgtgctgtctgtgctgaagttcacctaccccaccctcttccagggctggcagaccctgattggaggcctgctgctgcacgtgtcctggaagctgggctgggtggagatcaacagcagcagccgcagccacgtgctggtgtggctgcctgcctctgtgctgtttgtgggcatcatctatgccggcagccgggccctgagccggctggccatccctgtgttcctgaccctgcacaacgtggccgaggtgatcatctgtggctaccagaagtgcttccagaaggagaagaccagccctgccaagatctgcagcgccctgctgctgctggccgccgccggctgcctgcccttcaatgacagccagttcaacccagatggctacttctgggccatcatccacctgctgtgtgtgggcgcctacaagatcctgcagaagagccagaagcccagcgccctgagtgacatcgaccagcagtacctgaactacatcttctctgtggtgctgctggcctttgccagccaccccaccggggacctcttctctgtgctggacttccccttcctgtacttctaccgcttccacggcagctgctgtgccagcggcttcctgggcttcttcctgatgttcagcacagtgaagctgaagaacctgctggcccctggccagtgtgccgcctggatcttctttgccaagatcatcacagctggcctgagcatcctgctgtttgatgccatcctgaccagcgccaccaccggctgcctgctgctgggcgccctgggggaggccctgctggtgttttctgagaggaagagcagctag

SEQ ID NO: 226151 - DNA, 468 bp, Artificial Sequence
  derived and/or modified sequence
atgatcccagatgtgatcagcgccctgctgctgctggccgctgctggctgcctgcccttcaatgacagccagttcaacccagatggctacttctgggccatcatccacctgctgtgtgtgggcgcctacaagatcctgcagaagagccagaagcccagcgccctgagtgacatcgaccagcagtacctgaactacatcttctctgtggtgctgctggcctttgccagccaccccactggagacctcttctctgtgctggacttccccttcctgtacttctaccgcttccacggcagctgctgtgccagcggcttcctgggcttcttcctgatgttcagcacagtgaagctgaagaacctgctggcccctggccagtgtgccgcctggatcttctttgccaagatcatcacagctggcctgagcatcctgctgtttgatgccatcctgaccagcgccaccaccggctag

SEQ ID NO: 226152 - DNA, 891 bp, Artificial Sequence
  derived and/or modified sequence
atgtgcgtgcggcggagcctggtgggcctgaccttctgcacctgctacctggcttcatacctcacaaataaatacgtactcagtgtgctgaagtttacttaccctacactattccagggatggcaaacattgataggcggcctcctgctgcatgtctcgtggaaactggggtgggttgagattaattctagttcacgaagtcatgttctagtgtggttgcccgccagcgtcctgtttgtgggcatcatatacgccggctccagggcgctctcccggttagcaataccagtattcctgacactgcacaacgtggccgaagtcattatctgtgggtaccagaagtgcttccagaaggagaaaacatcgcccgcgaagatatgctctgcactcttactgctcgccgctgccggctgtcttccctttaacgactcacagtttaatcccgacggttatttttgggctattatccatcttctgtgcgtcggggcgtacaagatactccagaagtctcagaagccgtcagctctgtctgacattgatcagcaatacctgaattacatcttctctgttgtactccttgcattcgcctcccacccaaccggggatctcttctctgtgctagactttccatttttgtatttctatcgttttcatggtagctgttgtgcatctggcttcttgggatttttcctgatgttctccacggttaaactgaaaaatttacttgcgcctggtcagtgtgcagcgtggatattcttcgccaagattatcaccgccgggctgtcaatcctgctatttgacgctatacttacttcggccacgaccggttgtttgctcctgggcgctctaggagaagcgctgttagtctttagcgagaggaagagttcatag

SEQ ID NO: 226153 - DNA, 468 bp, Artificial Sequence
  derived and/or modified sequence
atgatccccgacgtgatcagcgccctgctgctgctggccgccgccggatgtttgccattcaacgatagccaatttaacccagatggatatttttgggctatcatccatctgctgtgcgtgggcgcctacaagatcttgcaaaagtcacagaagccttcggcactatcggacatagatcagcagtacctcaattatatattcagcgtagttctgttggcattcgcttcccaccctaccggagacctgttctcggtgctagatttcccctttctgtatttttataggttccatggctcctgctgcgctagtggtttcctcgggttctttcttatgttctccactgtgaaattaaagaaccttttggctcccggtcagtgcgccgcttggatcttttttgccaagattattacagccggactgtccatcctattattcgacgccattctaacttctgctacaaccggatag

SEQ ID NO: 226154 - DNA, 891 bp, Artificial Sequence
  derived and/or modified sequence
atgtgcgtgagaagatcccttgtaggcttaacattctgtacctgttacttggcgagctatctaacaaataaatatgtgctgtctgtccttaaatttacatatcccacccttttccaaggatggcaaacccttatcgggggtctgctgttgcacgtgtcctggaaactaggttgggtggaaattaatagcagctcaaggtcccatgtgcttgtatggctgccagcatcagtgctgttcgttggaataatctacgctgggtctcgcgcattgtcaagactcgccatccctgtgttccttacccttcacaatgtggcagaagttatcatttgcggctatcaaaaatgctttcaaaaggagaagacatcccctgccaaaatctgctctgctttgttgctcttagcagcagcaggctgcctgcccttcaatgactctcagttcaatcccgatgggtacttctgggccattatccacctgctttgcgtgggggcatataaaatactacaaaagtcccagaagcctagcgccttatcagatattgaccagcaatatctgaattatatctttagtgtcgtgctgcttgccttcgcaagtcatcccactggcgaccttttttctgtgcttgactttcccttcttatacttttatagatttcatggtagttgctgtgcgtctggcttcctggggttcttccttatgttcagcacagtcaagttgaagaacctactagccccaggacagtgtgccgcatggatttttttcgctaagattattaccgctggattgagtatactcctgttcgacgccatcttaacaagcgccaccacgggctgtctgttgctaggagccctgggagaagccttgcttgtgttctcagagcgtaagagcagctag

SEQ ID NO: 226155 - DNA, 468 bp, Artificial Sequence
  derived and/or modified sequence
atgatcccagacgtcatttctgcgttgctccttcttgccgctgcaggctgtctcccgttcaatgattctcagttcaatccggacggatatttttgggctattattcaccttttatgtgtgggggcatacaaaatcctgcagaaaagccagaaaccaagcgccctgagcgatatagatcaacagtacctcaattatattttcagtgtcgtgctgctggcattcgcttcacatccaactggcgatctcttctccgtgctagactttcccttcctgtacttttataggttccatggatcctgttgcgccagcggtttcctcggattcttcttaatgttttcgaccgtcaaactcaagaatttgcttgccccaggacaatgtgctgcatggattttcttcgcgaaaattatcacagcaggacttagcatcctgttgttcgacgctattttaacttccgcaacaaccggctag

SEQ ID NO: 226156 - DNA, 2934 bp, Artificial Sequence
  derived and/or modified sequence
ccaggggatttgggcaggcaccgtggatccccgagaaggggacgagttgacagatgtgcgtgaggaggtctctggtcggcctcaccttttgtacctgctacctggcttcttacctcacgaacaagtatgtgctgtctgtcttgaaatttacctaccctacattattccaagggtggcagacgctcattggtggacttttgcttcatgtgtcctggaaactgggctgggtagagatcaacagcagttcaagatctcatgttcttgtgtggcttcctgcttcagtgctgtttgtgggtataatctatgctgggtccagagcattgtccagactggccattcctgtgtttctcactttgcataatgtagctgaagttatcatctgtgggtaccagaagtgttttcagaaagagaaaacatctcctgcaaagatctgtagtgccctcctcctcctggccgcagcaggatgccttcccttcaatgactcccagtttaatccagatggatatttttgggctataattcacttactctgtgtaggggcttataaaattctacagaagtcccagaaacccagtgcattaagtgacattgaccagcaatacttaaactatatattcagtgtggtgctcctggcatttgcatctcatcccacaggtgatctcttcagcgtcctggacttcccattcctgtacttctacagattccatggtagctgctgtgccagtggatttttgggattctttctcatgttcagtacagtgaagctaaaaaaccttctggccccagggcagtgtgcagcctggattttctttgctaagataatcacagctggcttatcaatattgctgtttgatgcgatcctgaccagtgcaaccacgggatgcctcctgctcggtgcgcttggagaggccttgctggttttctcagagcggaagagctcctgaacaagacggtcaagagaaagactcacaggctgctgcgggagaacagcttgtacacctgtgtacgagcccctggtctcatagctccctgttggatgtgtcagaaagaggaatgcaaggacagtgaggccaggtgggcagtgccatcaccctcacccaagtgaatgtggtggtggctgatgaggccgaggccctggtgcttcaaggagcaccctttctgggggtctgcaggtcactgcagaggagcggtctgttacatcttcccatttggagaacctctctcaaccgtgctgtagctggttctgcagaaacaggaagtacaggatttcatgggctggctctgctcgcctcgactgagcttcacacctctggatgccacatgctctctcccaaacactgctttcagtgcaaggtagtgggcctaaggggtttggttgtcttttttttttttcatttttaaaattttaaatttttatttattattattttttagagacaaggcctcactctatcgcctaggctgaagcacagtggtgcgatcacagctcgctacagccttgacctcctaggatcaagccatcctcctgcctcagcatccacagtagctgatgtgcaccaccagacccgtctcattttttctatttttattattttagagatggggatctcactgtgttggccaggctggtctcaaactcctgggctcaagcaatcctcccaccttggcctcaaagtattgagattacaggcatgagccactgcacccggcctttctcatttttatttttaaattgacagacgtaacagtgcgcatttatcacgcacaacacaatgctttgggaatggttaaatctagctcacaaatgcattacctcacacggttgtcatttttgtggtgaggcttggttgtatgttttgtttcattcatgtttttacatccttggagtctcctctgggtccgtcctttctttgctgtcatgctggcttgcctaaggcccaccgccacctgcgtacgagcattttaaactctagagtgagtgacagcctttttatggttggtgttactatttatttcctgcctctaaacttctcgtggtccttataaacttgtcaggatgtgtgttgcgttgaattctgcatgtcctttttttgcccaccctcaggttaagctggtactaacttatccccagaggaaacagggtttatgagcactgacagatgtcttccctgggcaaaaaaaaaaaaaatagtatatgtatacacacacacatacacatttatatttatatttcttaaagcttttaatccctttcattccctgatatctcagagatttcaaatcattgaacactgaagtatatttttcaggccagatgaaaaattgtattaaaaccctattcctggtcaggcgcagtggctcacgcctataatcccagcactttgggaggccgaagtaagcagatcacctgaggtcgggagttcaagacaaacctggccaacatggtgaaaccctgtctctactaaaactacaaaaaaattagcctgatgtggtgttgtgtgcctgtagtcccagctacttaggaggctgaggtaggagaattgcttgaacctgggaggcggaggttgcagtgagccaaaattacgccactgcactccagcctgggcaacagagcgagacagtctcaaaaacaacaacaacaacaaaaaccctattccttgcctttgtaggagtcaaaataaatgaacttcttttttcttttttttattattatactttaagttctggggtacacgtgcagaatgtgcaggtttgttacataggtatgcacgtgccatggtggtttgctgcacccatcaacctgtcacctacattaggtatttcccctaatgttatccctcccctagccctccatcccctgacaggccctggtgtgtgatgttcccctccctatgtccatgtgttctcattgctccaaaataaatgaatttacac

SEQ ID NO: 226157 - DNA, 1404 bp, Artificial Sequence
  derived and/or modified sequence
gctgctgctgcgggggtcgggcggcggccaggggatttgggcaggcaccgtggatccccgagaaggggacgagttgacagatgtgcgtgaggaggtctctggtcggcctcaccttttgtacctgctacctggcttcttacctcacgaacaagtatgtgctgtctgtcttgaaatttacctaccctacattattccaagggtggcagacgctcattggtggacttttgcttcatgtgtcctggaaactgggctgggtagagatcaacagcagttcaaggccattcctgtgtttctcactttgcataatgtagctgaagttatcatctgtgggtaccagaagtgttttcagaaagagaaaacatctcctgcaaagatctgtaggttgcaccttgaaagaacaagacaaaaccaaacttcaagactatcctcctgtttaaaaggagactagcaggtgtcaaagagaggcggtaaagctcatgatacctgatgtaatcagtgccctcctcctcctggccgcagcaggatgccttcccttcaatgactcccagtttaatccagatggatatttttgggctataattcacttactctgtgtaggggcttataaaattctacagaagtcccagaaacccagtgcattaagtgacattgaccagcaatacttaaactatatattcagtgtggtgctcctggcatttgcatctcatcccacaggtgatctcttcagcgtcctggacttcccattcctgtacttctacagattccatggtagctgctgtgccagtggatttttgggattctttctcatgttcagtacagtgaagctaaaaaaccttctggccccagggcagtgtgcagcctggattttctttgctaagataatcacagctggcttatcaatattgctgtttgatgcgatcctgaccagtgcaaccacgggatgacagaggaccagagggatggcacggagagtaggctccacacacagagagacattttctctttcaccagtgtacccaaggcaggatggcagtgcccagcacacagtaggtgctcaccaggctgcagagacggggtttcaccacgctgcccaggctggtcttgaacttctgagctcaagcgatccacttgcctcagcctcccaaagttatcggattacaggcatgagccaccatgcctggtccaaaacaatgcatgttaaaaacttagagcctggcacccagcaaacaatcaaggcatctattaccatcttatcatccttgtaactttatcatctcttctggaaatatgctccaacccagaagaatctacttcttagtctaaactttctgcgaccgtgttcctaaaatccagtgttcttttccagctatgaagtccacaacatgacctccctccaggtcctga

SEQ ID NO: 226158 - protein, 62 aa, Artificial Sequence
  derived and/or modified sequence
MDPRECVCMSGGICMCGDNCKCTTCNCKTYWKSCCPCCPPGCAKCARGCICKGGSDKCSCCP

SEQ ID NO: 226159 - DNA, 189 bp, Artificial Sequence
  derived and/or modified sequence
atggaccccagagagtgcgtgtgcatgagcggcggcatctgcatgtgcggcgacaactgcaagtgcaccacctgcaactgcaagacctactggaagagctgctgcccctgctgcccccccggctgcgccaagtgcgccagaggctgcatctgcaagggcggcagcgacaagtgcagctgctgcccctag

SEQ ID NO: 226160 - DNA, 189 bp, Artificial Sequence
  derived and/or modified sequence
atggatccccgcgagtgcgtttgcatgagtggggggatctgtatgtgcggagacaattgcaagtgtactacctgcaactgcaagacatattggaagagctgctgcccatgttgccctccaggttgtgcaaagtgtgccagggggtgcatctgtaagggtgggagcgataagtgcagctgttgtccttag

SEQ ID NO: 226161 - DNA, 189 bp, Artificial Sequence
  derived and/or modified sequence
atggaccccagagaatgtgtgtgcatgtctgggggcatctgcatgtgtggggacaactgcaagtgcaccacctgcaactgcaagacctactggaagagctgctgcccctgctgccccccaggctgtgccaagtgtgcccggggctgcatctgcaagggcggcagtgacaagtgcagctgctgcccctag

SEQ ID NO: 226162 - DNA, 189 bp, Artificial Sequence
  derived and/or modified sequence
atggacccccgggagtgcgtgtgcatgagcggcggcatctgcatgtgcggcgataattgcaagtgcactacatgtaactgcaaaacctactggaaaagttgttgcccctgctgccctcccggctgtgccaagtgcgcacgtggctgcatctgtaagggtggcagcgataagtgttcctgttgtccttag

SEQ ID NO: 226163 - DNA, 189 bp, Artificial Sequence
  derived and/or modified sequence
atggatcctcgggaatgcgtgtgcatgagcggaggcatctgcatgtgtggagacaattgcaagtgtacaacgtgtaattgcaagacctactggaagagctgttgtccatgttgtcctcctggttgcgccaagtgcgccagggggtgtatttgtaagggaggctctgataagtgctcatgctgtccttag

SEQ ID NO: 226164 - DNA, 294 bp, Artificial Sequence
  derived and/or modified sequence
atggggagcctctggctgctgctcactcagcctcccttccccagccgtgacagcactggagcctttcggacacctggaccatggaccccagggaatgtgtctgcatgtctggaggaatctgcatgtgtggagacaactgcaaatgcacaacctgcaactgtaaaacatattggaagagctgctgtccctgctgccccccgggctgtgccaaatgtgcccggggctgcatctgcaaaggaggctcagacaagtgcagctgctgcccatgaaagccatccatcgtgcccacccctt

SEQ ID NO: 226165 - protein, 133 aa, Artificial Sequence
  derived and/or modified sequence
MRMSLAQRVLLTWLFTLLFLIMLVLKLDEKAPWNWFLIFIPVWIFDTILLVLLIVKMAGRCKSGFDPRHGSHNIKKKAWYLIAMLLKLAFCLALCAKLEQFTTMNLSYVFIPLWALLAGALTELGYNVFFVRD

SEQ ID NO: 226166 - DNA, 402 bp, Artificial Sequence
  derived and/or modified sequence
atgagaatgagcctggcccagagagtgctgctgacctggctgttcaccctgctgttcctgatcatgctggtgctgaagctggacgagaaggccccctggaactggttcctgatcttcatccccgtgtggatcttcgacaccatcctgctggtgctgctgatcgtgaagatggccggcagatgcaagagcggcttcgaccccagacacggcagccacaacatcaagaagaaggcctggtacctgatcgccatgctgctgaagctggccttctgcctggccctgtgcgccaagctggagcagttcaccaccatgaacctgagctacgtgttcatccccctgtgggccctgctggccggcgccctgaccgagctgggctacaacgtgttcttcgtgagagactag

SEQ ID NO: 226167 - DNA, 402 bp, Artificial Sequence
  derived and/or modified sequence
atgagaatgtccctcgctcagagagttttactgacatggctgttcacactgttattcttgattatgctggtgctgaaactggacgagaaggcaccctggaactggtttctcattttcatacccgtatggatctttgacactatcctgctggtgctcctcatcgtgaagatggcgggacgatgtaagagtgggtttgaccccagacatggctcccataatatcaagaagaaagcatggtatctaattgctatgctgctgaaattggctttctgtcttgctctgtgcgccaagctcgaacaattcaccacgatgaatctgtcatatgtgtttattccgctttgggctctcctggccggggcgctcacggagctgggttacaatgtcttctttgtccgggattag

SEQ ID NO: 226168 - DNA, 402 bp, Artificial Sequence
  derived and/or modified sequence
atgaggatgagcctggcccagagggtgctgctgacctggctgttcaccctgctcttcctgatcatgctggtgctgaagctggatgagaaggccccctggaactggttcctgatcttcatccctgtgtggatctttgacaccatcctgctggtgctgctgattgtgaagatggccggccgctgcaagagcggctttgaccccaggcatggcagccacaacatcaagaagaaggcctggtacctgattgccatgctgctgaagctggccttctgcctggccctgtgtgccaagctggagcagttcaccaccatgaacctgtcctatgtgttcatccccctgtgggccctgctggccggggccctgacagagctgggctacaacgtgttctttgtgcgggactag

SEQ ID NO: 226169 - DNA, 402 bp, Artificial Sequence
  derived and/or modified sequence
atgcggatgagcctggcccagcgggtgctgctgacctggctgttcaccctcctgtttctgattatgctggtactgaagctcgacgagaaagccccctggaactggttcctcatattcatacctgtgtggatcttcgataccatattactggtgttgctgatcgtgaaaatggccggtagatgcaaatctgggttcgaccccagacatggtagccacaatatcaaaaagaaagcctggtacctgattgcaatgctgctaaagctggccttctgtctagccctttgcgctaagctggaacagttcacaaccatgaacctgtcctatgtattcatcccactctgggccctgttggctggtgcattaacggaactgggatataatgttttttttgtaagggactag

SEQ ID NO: 226170 - DNA, 402 bp, Artificial Sequence
  derived and/or modified sequence
atgaggatgtcactggcacagagagtccttttaacctggttgtttacactgttgttcctgatcatgcttgtgctcaaactggacgagaaggcgccatggaattggttcctgatctttatcccagtgtggatattcgataccattctgctcgtccttctgattgtgaaaatggccggtagatgtaaatccggcttcgacccccgacatggatctcacaacattaaaaagaaggcgtggtatctgatagctatgttactcaagctggctttctgtctcgccctctgtgccaaactagagcagttcacaaccatgaacctcagctatgttttcattccactttgggcactcctggccggagcgctaactgaactaggctataatgttttttttgtccgcgactag

SEQ ID NO: 226171 - DNA, 1023 bp, Artificial Sequence
  derived and/or modified sequence
aaaggtcggttggtttgcactggcggacaaatggtccaattaccgcggaaaagggacctctgaatccagattggcgtcctctctacctatagggtaggctcaggggcggtgagaaccagccccggatgtgggcgcggcactgaggtagaactgagagatcctctaccgcagtcgtttgaggaggcggaactgaagttttttcttaattatcatgtgacgggttctggatttaatggggggaaaagggcggaaaaggacaaggatccaaactggcgaatttgctgatcttcgcgtccctctccgctttccggccggcagcgctgccagggtatatttccttttttccgatcctgcaacagcctctttaaactgtttaaatgagaatgtccttggctcagagagtactactcacctggcttttcacactactcttcttgatcatgttggtgttgaaactggatgagaaagcaccttggaactggttcctcatattcattccagtctggatatttgatactatccttcttgtcctgctgattgtgaaaatggctgggcggtgtaagtctggctttgaccctcgacatggatcacacaatattaaaaaaaaagcctggtacctcattgcaatgttacttaaattagccttctgcctcgcactctgtgctaaactggaacagtttactaccatgaatctatcctatgtcttcattcctttatgggccttgctggctggggctttaacagaactcggatataatgtcttttttgtgagagactgacttctaagtacatcatctcctttctattgctgttcaacaagttaccattaaagtgttctgaatctgtcaagcttcaagaataccagagaactgagggaaaataccaaatgtagttttatactacttccataaaacaggattggtgaatcacggacttctagtcaacctacagcttaattattcagcatttgagttattgagatccttattatctctatgtaaataaagtttgttttggacctca

SEQ ID NO: 226172 - protein, 275 aa, Artificial Sequence
  derived and/or modified sequence
MPYANQPTVRITELTDENVKFIIENTDLAVANSIRRVFIAEVPIIAIDWVQIDANSSVLHDEFIAHRLGLIPLISDDIVDKLQYSRDCTCEEFCPECSVEFTLDVRCNEDQTRHVTSRDLISNSPRVIPVTSRNRDNDPNDYVEQDDILIVKLRKGQELRLRAYAKKGFGKEHAKWNPTAGVAFEYDPDNALRHTVYPKPEEWPKSEYSELDEDESQAPYDPNGKPERFYYNVESCGSLRPETIVLSALSGLKKKLSDLQTQLSHEIQSDVLTIN

SEQ ID NO: 226173 - DNA, 828 bp, Artificial Sequence
  derived and/or modified sequence
atgccctacgccaaccagcccaccgtgagaatcaccgagctgaccgacgagaacgtgaagttcatcatcgagaacaccgacctggccgtggccaacagcatcagaagagtgttcatcgccgaggtgcccatcatcgccatcgactgggtgcagatcgacgccaacagcagcgtgctgcacgacgagttcatcgcccacagactgggcctgatccccctgatcagcgacgacatcgtggacaagctgcagtacagcagagactgcacctgcgaggagttctgccccgagtgcagcgtggagttcaccctggacgtgagatgcaacgaggaccagaccagacacgtgaccagcagagacctgatcagcaacagccccagagtgatccccgtgaccagcagaaacagagacaacgaccccaacgactacgtggagcaggacgacatcctgatcgtgaagctgagaaagggccaggagctgagactgagagcctacgccaagaagggcttcggcaaggagcacgccaagtggaaccccaccgccggcgtggccttcgagtacgaccccgacaacgccctgagacacaccgtgtaccccaagcccgaggagtggcccaagagcgagtacagcgagctggacgaggacgagagccaggccccctacgaccccaacggcaagcccgagagattctactacaacgtggagagctgcggcagcctgagacccgagaccatcgtgctgagcgccctgagcggcctgaagaagaagctgagcgacctgcagacccagctgagccacgagatccagagcgacgtgctgaccatcaactag

SEQ ID NO: 226174 - DNA, 828 bp, Artificial Sequence
  derived and/or modified sequence
atgccgtatgcaaaccagcccacagtgaggattacagaacttactgatgagaacgtgaaatttattatagaaaatactgacctggctgttgctaacagcattcggagagtgttcattgcagaggtgcccataatagcaattgactgggttcagatcgacgctaatagcagtgtcttacacgacgaatttatcgctcacagactggggctgatacctcttatatctgatgatatcgtcgacaaattgcagtacagccgtgattgtacatgcgaggagttctgcccagagtgcagcgtggaattcacattagacgtgaggtgcaatgaagaccagacaagacatgttacctcccgggacctgatctcaaactccccaagagtgattcccgtcacgagtcggaatagggacaatgacccgaacgattatgtcgagcaggacgatatcctgattgtcaagctccgtaaagggcaagagttgagactgcgggcttacgccaagaaaggttttggaaaagagcatgctaagtggaaccctacagccggagtcgcctttgagtacgacccagacaatgcactgaggcacaccgtgtaccctaagccagaagaatggccaaaatcagaatatagcgaactcgatgaggacgaatcccaagccccatacgatccgaacggcaaaccggagcggttttactataacgtcgagtcctgcggctctctcaggcccgaaacaatcgtgctctccgcgctctctggacttaaaaagaagctgagcgacctacagacacaactctcccacgaaattcagagcgacgtgctgacaattaactag

SEQ ID NO: 226175 - DNA, 828 bp, Artificial Sequence
  derived and/or modified sequence
atgccctatgccaaccagcccaccgtgcgcatcacagagctgacagatgaaaatgtgaagttcatcatcgagaacacagacctggccgtggccaacagcatcagaagagtcttcatcgccgaggtgcccatcatcgccatcgactgggtgcagattgatgccaacagctctgtgctgcatgatgagttcatcgcccaccggctgggcctcatccccctcatcagtgatgacatcgtggacaagctgcagtacagccgggactgcacctgtgaggagttctgcccagagtgcagcgtggagttcaccctggatgtgcgctgcaatgaagaccagaccaggcatgtgaccagccgggacctgatcagcaacagccccagggtcatccctgtgaccagcaggaacagagacaatgaccccaatgactatgtggagcaggatgacatcctgattgtgaagctgaggaagggccaggagctgcggctgcgggcctatgccaagaagggctttgggaaggagcacgccaagtggaaccccacagctggggtggcctttgaatatgaccctgacaatgccctgcggcacacagtgtaccccaagccagaggagtggcccaagtctgagtacagcgagctggatgaagatgagagccaggccccctatgaccccaacgggaagccagagcgcttctactacaacgtggagagctgtggcagcctgcggcctgagaccatcgtgctgagcgccctgagcggcctgaagaagaagctgagtgacctgcagacccagctgagccatgagatccagagtgatgtgctgaccatcaactag

SEQ ID NO: 226176 - DNA, 828 bp, Artificial Sequence
  derived and/or modified sequence
atgccctacgccaaccagcccaccgtgcggatcaccgagctgaccgacgaaaacgttaagttcataattgagaacaccgaccttgcagtggctaattctattcgacgggtttttattgcagaagtgccaatcatcgcaatcgattgggtacagattgatgctaattcttctgtgttacatgatgaattcatcgcgcatcgcctaggattgattcctctcatttccgacgacatcgtcgacaagctgcaatactcccgcgactgtacatgtgaggagttctgtcccgaatgctctgtcgaatttacgcttgatgtccggtgcaacgaggaccagacacggcacgtgacttcgagggacttaatctcaaactctccgcgggtgataccagtcacgtcgagaaacagggacaatgatccgaacgattacgtcgagcaggacgatatcctgatcgtgaaactcagaaaggggcaagagctgcgactcagagcatatgcgaagaagggctttgggaaggaacacgccaagtggaaccctactgcgggagtggctttcgagtacgaccccgacaatgccctgagacatacggtttaccctaaacctgaggaatggcccaaatcagagtatagtgagcttgatgaagatgagtcacaggccccctatgatcctaatggaaagcccgaacggttttactacaacgttgagtcctgtggatcgctgcgacccgagaccatcgtgctgtccgccctatccggactgaaaaagaaactgagcgacctacagacgcagctgagccatgagatacagtctgacgtgctcacaattaattag

SEQ ID NO: 226177 - DNA, 828 bp, Artificial Sequence
  derived and/or modified sequence
atgccttatgcaaaccaacccaccgtgaggattacagaattaactgacgagaacgtcaagttcatcattgagaatactgacctggccgtggcaaattctattaggagagtattcatcgctgaggtccctatcattgcaattgactgggtgcagatcgatgctaatagtagcgtgttacatgatgagttcattgcgcaccgattgggactgatcccgctcatttcagatgatattgtggataagctccagtactcccgcgattgtacatgtgaggaattctgccctgagtgcagtgttgaattcactctggatgtacgatgcaatgaggaccagacccggcatgtgacatctcgggacttgatttctaattcacctcgagtcatcccagtgactagtcggaaccgggataatgatccaaatgactatgttgagcaggatgatattttaatagttaagctgcgcaaaggccaggagctacgactgcgggcatacgccaaaaaaggctttggaaaggagcacgccaagtggaacccgactgctggtgtagccttcgagtacgacccagataatgccttgaggcatacagtatacccgaagccggaggagtggcctaagtctgagtactctgagcttgatgaagacgaaagccaggcaccgtatgatccaaacggcaagcctgagcgtttctactacaacgtagaatcttgcgggagcttgagaccagagactattgtcctctctgcgctatctggcctgaaaaagaaactgtcagacctgcaaacacagctgagccacgagatacagagtgacgtactgacaattaattag

SEQ ID NO: 226178 - DNA, 2057 bp, Artificial Sequence
  derived and/or modified sequence
atggacagtacaaacagtactaccacgaacgtccctgcactcgtatctttgtttacaactgcaagtgtttctgcagtatgaattcttagaagtgttactgttaagtgaaggacgtatgcgtgttttgccaaactaccctccgagatagctgaatctggtacattttaaagcaggaggccgcagaagacgctcggcagttctggcctccgagcagcaggcggcgctgtgagtcgtctttgcggaagccgcggaggcctcgctgactgacttccggtgttggcggtggcgccgcgcagtcaccgcggagcagacgcggaggctggtggcccctgggcgagatgccgtacgccaaccagcctaccgtgcggatcacggagctcactgacgagaatgtcaagttcatcatcgagaacaccgacctggcggtggccaattcgattcggagggtcttcatcgctgaggttcccataatagccattgactgggttcagattgatgccaattcctcagttcttcatgatgaattcattgctcacaggcttggattaattcccctcattagtgatgacattgtggacaagctgcagtactctcgggactgcacatgtgaggagttctgccccgagtgctcggtggagttcaccctcgatgtgcggtgcaatgaagaccagacgcgacatgtcacgtctcgagacctcatctccaacagcccccgggtcattccggtgacatcccggaaccgagataatgaccccaatgactacgtggagcaggatgacatcctcatcgtcaagttgagaaagggccaggagctgagacttcgagcctatgccaaaaagggctttggcaaggagcatgccaagtggaaccctactgcaggggtggcttttgaatacgatccagacaatgccctgaggcacacagtgtaccccaagcccgaggaatggccaaagagtgagtactcggagctggatgaggatgagtcgcaggctccctatgaccccaacggcaagccagaaaggttttactacaatgtggagtcctgtggctctctgcgtcctgaaaccattgtcctgtcagccctctcaggattgaagaagaaactgagtgatttacaaactcaattaagccacgagatccagagtgatgtgctaaccataaattaactgcagcttgcctgcttcagcaaaaacggagattcaggccagcagctggatatgggggtctctcttcagactcttctcgtttctgagaatctagtctactgttggttgagcttcttggcaggacatcagtaccaactagaagtgggtcatagatagattaccagggatgcagtggtgtttaggcaggataggtctttactggccctgactgctgttaataattggcagcagtgctccccagatcccagaaggtccctgctggagtgtttccagtgcacctgtagggaaccaactagacttctctcctggttagtccagctctttactctaaaccctttctgtccaaaatgagtcattttcagttgtaccttagatgtctggtgttgaggatcaagtgccatagcctttattcagggggcctataaacccttccagttcttgccccagggctggcctgctagcgcttcaaattcccaggtgtccctaatttgagaagtaaccttttggaatagcattagaccctggctgtcccctccccaccaaataaacatgatatttcattctctgtccagcagtcatgaaccccttcacctccaatgacctgatcatttagtttggtgggggtgggggtgggggtgggggtggaagcagccgcaggagcaagggcccctcccacatacacaggaggagtatttcatttctccttaatgaaggctctggccctaacccctcagcactgtctccagataggaacatgcacaaagcagttaattaggcagcctggagaaaaccagagatccagtacagaaaggaaaggatatttattgattaacagaagttgtctttttaaaagtgtttatttttggcaataaagagcacaacataatctcc

SEQ ID NO: 226179 - protein, 910 aa, Artificial Sequence
  derived and/or modified sequence
MIDLSFLTEEEQEAIMKVLQRDAALKRAEEERVRHLPEKIKDDQQLKNMSGQWFYEAKAKRHRDKIHGADIIRASMRKKRPQIAAEQSKDRENGAKESWVNNVNKDAFLPPELAGVVEEPEEDAAPASPSSSVVNPASSVIDMSQENTRKPNVSPEKRKNPFNSSKLPEGHSSQQTKNEQSKNGRTGLFQTSKEDELSESKEKSTVADTSIQKLEKSKQTLPGLSNGSQIKAPIPKARKMIYKSTDLNKDDNQSFPRQRTDSLKARGAPRGILKRNSSSSSTDSETLRYNHNFEPKSKIVSPGLTIHERISEKEHSLEDNSSPNSLEPLKHVRFSAVKDELPQSPGLIHGREVGEFSVLESDRLKNGMEDAGDTEEFQSDPKPSQYRKPSLFHQSTSSPYVSKSETHQPMTSGSFPINGLHSHSEVLTARPQSMENSPTINEPKDKSSELTRLESVLPRSPADELSHCVEPEPSQVPGGSSRDRQQGSEEEPSPVLKTLERSAARKMPSKSLEDISSDSSNQAKVDNQPEELVRSAEDDEKPDQKPVTNECVPRISTVPTQPDNPFSHPDKLKRMSKSVPAFLQDEVSGSVMSVYSGDFGNLEVKGNIQFAIEYVESLKELHVFVAQCKDLAAADVKKQRSDPYVKAYLLPDKGKMGKKKTLVVKKTLNPVYNEILRYKIEKQILKTQKLNLSIWHRDTFKRNSFLGEVELDLETWDWDNKQNKQLRWYPLKRKTAPVALEAENRGEMKLALQYVPEPVPGKKLPTTGEVHIWVKECLDLPLLRGSHLNSFVKCTILPDTSRKSRQKTRAVGKTTNPIFNHTMVYDGFRPEDLMEACVELTVWDHYKLTNQFLGGLRIGFGTGKSYGTEVDWMDSTSEEVALWEKMVNSPNTWIEATLPLRMLLIAKISK

SEQ ID NO: 226180 - DNA, 2733 bp, Artificial Sequence
  derived and/or modified sequence
atgatcgacctgagcttcctgaccgaggaggagcaggaggccatcatgaaggtgctgcagagagacgccgccctgaagagagccgaggaggagagagtgagacacctgcccgagaagatcaaggacgaccagcagctgaagaacatgagcggccagtggttctacgaggccaaggccaagagacacagagacaagatccacggcgccgacatcatcagagccagcatgagaaagaagagaccccagatcgccgccgagcagagcaaggacagagagaacggcgccaaggagagctgggtgaacaacgtgaacaaggacgccttcctgccccccgagctggccggcgtggtggaggagcccgaggaggacgccgcccccgccagccccagcagcagcgtggtgaaccccgccagcagcgtgatcgacatgagccaggagaacaccagaaagcccaacgtgagccccgagaagagaaagaaccccttcaacagcagcaagctgcccgagggccacagcagccagcagaccaagaacgagcagagcaagaacggcagaaccggcctgttccagaccagcaaggaggacgagctgagcgagagcaaggagaagagcaccgtggccgacaccagcatccagaagctggagaagagcaagcagaccctgcccggcctgagcaacggcagccagatcaaggcccccatccccaaggccagaaagatgatctacaagagcaccgacctgaacaaggacgacaaccagagcttccccagacagagaaccgacagcctgaaggccagaggcgcccccagaggcatcctgaagagaaacagcagcagcagcagcaccgacagcgagaccctgagatacaaccacaacttcgagcccaagagcaagatcgtgagccccggcctgaccatccacgagagaatcagcgagaaggagcacagcctggaggacaacagcagccccaacagcctggagcccctgaagcacgtgagattcagcgccgtgaaggacgagctgccccagagccccggcctgatccacggcagagaggtgggcgagttcagcgtgctggagagcgacagactgaagaacggcatggaggacgccggcgacaccgaggagttccagagcgaccccaagcccagccagtacagaaagcccagcctgttccaccagagcaccagcagcccctacgtgagcaagagcgagacccaccagcccatgaccagcggcagcttccccatcaacggcctgcacagccacagcgaggtgctgaccgccagaccccagagcatggagaacagccccaccatcaacgagcccaaggacaagagcagcgagctgaccagactggagagcgtgctgcccagaagccccgccgacgagctgagccactgcgtggagcccgagcccagccaggtgcccggcggcagcagcagagacagacagcagggcagcgaggaggagcccagccccgtgctgaagaccctggagagaagcgccgccagaaagatgcccagcaagagcctggaggacatcagcagcgacagcagcaaccaggccaaggtggacaaccagcccgaggagctggtgagaagcgccgaggacgacgagaagcccgaccagaagcccgtgaccaacgagtgcgtgcccagaatcagcaccgtgcccacccagcccgacaaccccttcagccaccccgacaagctgaagagaatgagcaagagcgtgcccgccttcctgcaggacgaggtgagcggcagcgtgatgagcgtgtacagcggcgacttcggcaacctggaggtgaagggcaacatccagttcgccatcgagtacgtggagagcctgaaggagctgcacgtgttcgtggcccagtgcaaggacctggccgccgccgacgtgaagaagcagagaagcgacccctacgtgaaggcctacctgctgcccgacaagggcaagatgggcaagaagaagaccctggtggtgaagaagaccctgaaccccgtgtacaacgagatcctgagatacaagatcgagaagcagatcctgaagacccagaagctgaacctgagcatctggcacagagacaccttcaagagaaacagcttcctgggcgaggtggagctggacctggagacctgggactgggacaacaagcagaacaagcagctgagatggtaccccctgaagagaaagaccgcccccgtggccctggaggccgagaacagaggcgagatgaagctggccctgcagtacgtgcccgagcccgtgcccggcaagaagctgcccaccaccggcgaggtgcacatctgggtgaaggagtgcctggacctgcccctgctgagaggcagccacctgaacagcttcgtgaagtgcaccatcctgcccgacaccagcagaaagagcagacagaagaccagagccgtgggcaagaccaccaaccccatcttcaaccacaccatggtgtacgacggcttcagacccgaggacctgatggaggcctgcgtggagctgaccgtgtgggaccactacaagctgaccaaccagttcctgggcggcctgagaatcggcttcggcaccggcaagagctacggcaccgaggtggactggatggacagcaccagcgaggaggtggccctgtgggagaagatggtgaacagccccaacacctggatcgaggccaccctgcccctgagaatgctgctgatcgccaagatcagcaagtag

SEQ ID NO: 226181 - DNA, 2733 bp, Artificial Sequence
  derived and/or modified sequence
atgattgaccttagcttcttgaccgaggaagaacaggaggccataatgaaagtcctccaaagggacgcagcactgaagagagccgaggaggagagggtacggcatttaccagagaaaatcaaagacgaccagcagcttaaaaatatgagcggtcagtggttttacgaggcgaaagcaaagcggcaccgggataaaatccacggagccgatattatcagggcgtccatgaggaagaagcggccccagattgccgctgaacagtccaaggatcgtgagaacggcgccaaagagagctgggtgaataatgtgaacaaagatgcattcctgccacccgaattggccggagtcgtggaggagcctgaagaagacgctgctccagcttcaccgtcctcctccgtcgtgaatccagcttccagcgtgatagatatgtcccaggaaaacacacggaagcccaatgtgagcccggagaagcgcaagaaccctttcaattcaagcaaactccccgaaggccattcatcccaacagacgaaaaacgaacagtctaaaaatgggagaaccggcctgttccaaacaagcaaggaggacgagcttagcgagtccaaagagaagagcactgtcgctgacacgtctattcaaaagctcgagaagtcgaaacagaccctaccaggactgtccaacgggtctcagatcaaggcccccatcccgaaggcaaggaagatgatatacaagtctaccgacctgaacaaagatgataaccagtcttttccgcggcagcgcaccgacagccttaaggctagaggcgctcctagaggaatcctgaagcgcaactccagctcatcgagtaccgactcagagacccttagatacaaccacaatttcgagccaaagtccaaaatcgtgagtcctggtttaaccatccacgaacgcatcagcgagaaggaacattccctggaagataatagctccccaaattccctggaaccattgaagcacgttcgtttctctgccgttaaagacgaacttcctcagtccccggggctgatccacgggcgggaggtgggagaattctcggtactcgaatctgatcggttgaagaatggaatggaagatgccggcgatacggaggaatttcagtcagaccccaaaccttcgcaatataggaagccaagcttgtttcatcagagcacgagctcgccttatgtctctaaatctgagacccaccagcccatgacgtcagggagctttcccatcaatgggctgcactcacacagcgaagttctgaccgcaagaccacaatctatggagaacagtccgactattaacgaaccgaaggataagtccagcgaactgacccggcttgagtctgtcctgcccagaagtccggccgacgagctttctcattgcgttgaacctgaaccctctcaggtgcccggggggagtagtcgggaccgccagcaaggctctgaggaagagccatcccctgtacttaaaacactggaacgctccgctgctagaaaaatgccttccaagtcactggaggacatttccagcgattctagtaaccaggcgaaagtggacaaccagcctgaggagctagtccggagcgctgaagatgatgagaaaccagatcagaaaccagtgaccaacgagtgtgtacccaggatctccaccgtgcctacacagccagataatcctttctctcacccggacaaactgaagcgaatgtccaagtccgtccccgccttcttgcaggacgaggtcagtggcagcgtcatgtcagtttactctggtgattttgggaatctagaagtgaaggggaacatccaatttgccatcgaatatgtcgagtctctcaaggaactgcacgtattcgtggcacagtgcaaggatttggctgcggccgatgtcaagaaacagcgatccgacccttatgtgaaggcctacctgctgccagataagggaaagatgggcaaaaaaaaaaccttggtcgtcaaaaagaccctcaatcccgtgtacaacgaaatactacgctacaaaattgagaagcaaattctaaagacacaaaaactcaatctgtctatctggcatcgcgacaccttcaagcggaacagtttcctgggagaagttgaactggatctggagacttgggattgggataataaacaaaataagcaactgcgatggtaccccctgaagaggaagaccgccccagtggcgttggaggccgaaaacagaggggagatgaaattagccctccaatatgtccctgagccagtccctgggaagaagttacctactaccggcgaagtgcacatttgggtgaaagaatgtcttgatctccctctccttcgcgggagccacctgaattccttcgtcaaatgcacaatactcccagacacgagtcgtaaaagtcgccaaaagacccgggcggttggaaaaactaccaacccaatattcaatcacactatggtgtatgacggattcaggcccgaagatctcatggaagcttgcgtagaactgaccgtgtgggaccattataagctgaccaatcaattcctcggcggcctgaggatcggatttggcaccgggaaatcctacggcacagaagtggactggatggatagtacctcggaagaagtcgccctatgggagaagatggtgaattcccctaatacttggatcgaggctacactgccattaagaatgctactgattgcaaagattagtaaatag

SEQ ID NO: 226182 - DNA, 2733 bp, Artificial Sequence
  derived and/or modified sequence
atgatagatctctcctttctgacagaagaagaacaagaggcaattatgaaagtgctccagagggatgccgcgcttaagcgggccgaggaagagcgcgttaggcatttgccggaaaagatcaaagatgaccagcagctgaagaacatgagtgggcaatggttctatgaggcaaaagcgaaaagacacagagacaagatccacggcgcggacattattcgtgccagtatgcgcaagaagcgaccacagatcgccgccgagcagtccaaggatcgagagaacggcgcgaaggaatcttgggtgaataatgtgaacaaagacgcgttcctgccaccagagctcgccggtgttgtggaagaacctgaggaagacgcagccccggcaagccccagtagttcggtggtcaaccccgcttcatccgtgatcgatatgtcacaggagaacactcgcaaacctaatgtcagtcccgagaagcgcaaaaatcctttcaacagcagcaaactgccggaaggccactcgtctcaacagactaaaaacgagcagagcaagaacggtcgtaccggactatttcagacatccaaagaggacgagctcagtgagtctaaggagaagtcaacagtagctgacacatctatccaaaagctcgaaaaatccaagcagaccctgcccggattatcaaatgggtctcagatcaaggccccgattccaaaagcacggaaaatgatatataaaagcaccgacctcaataaagacgataatcagtcattcccacgacagagaacagatagcctgaaggcacgaggcgcacccagggggatcctgaagcggaactcaagctcgtcatccaccgattcggaaaccttgagatacaaccacaacttcgagcctaaatctaagatcgtgagccccgggctgaccattcatgagagaattagtgagaaggaacactcacttgaagataattctagcccaaactccctggagcctctaaaacacgtgcgctttagcgccgtgaaggatgagctgcctcagagtccgggtttgatccacggacgcgaggtgggagagttttcagtgctggagtctgatagactaaagaatgggatggaagatgccggagacacagaggaattccaatccgacccgaagccaagtcaatatcgtaagcccagcttatttcatcagagcacttcgagcccctatgtgtccaaaagcgagacgcaccagccgatgacgagtggctcattccctatcaacggactacatagccattccgaagtcctaactgctcgtccgcagtcaatggaaaactcgcccaccattaatgaacccaaggacaagagtagtgaactgactaggctggaaagcgtgctacctcggtccccagctgacgaactgagccattgtgtagagccggaaccgtcccaagtccctggaggtagctctcgagatcgtcagcagggctccgaggaagagcctagccctgtgttgaagacattggagcgctcagccgcccgcaagatgccaagcaagtcgttagaagacatcagcagtgacagctctaatcaggcaaaagtggacaatcagcctgaggaactcgtaaggtctgcagaagacgatgaaaaacctgatcagaagcccgtgaccaacgaatgtgtcccaaggatctctaccgtgcctacacagccagacaaccccttttcccaccctgacaaacttaaacggatgtcaaaatccgtgcccgcgtttctgcaggacgaggtgtctggatctgtaatgagcgtctattccggcgatttcgggaatctggaggtcaagggtaacattcagtttgccatcgaatacgtggagtccctaaaggaacttcacgtgttcgtagctcagtgcaaagacctggcagccgccgatgttaagaagcagcgctctgatccctatgtgaaggcctacctattaccagacaaagggaagatgggcaaaaaaaagaccctggtagtaaagaaaacattgaaccctgtgtataacgaaattctaaggtacaagatagaaaagcagatcctgaagacccagaagctcaacctgagtatttggcatcgggacacctttaagaggaactctttcctgggggaggtagagctggacctggaaacgtgggattgggacaataaacagaacaagcagctacgctggtaccccctgaagcgtaaaaccgcacccgtcgccctggaggcagagaaccgcggagaaatgaagcttgcccttcagtatgttcctgagccagttcccgggaaaaagctgcccacaaccggggaggtgcacatatgggtcaaagagtgcctggacctccctctcctgaggggctcccacctgaattcatttgtgaaatgtaccatccttccagatacctctcggaaatcgagacagaaaactagggccgtaggcaagaccactaacccaattttcaatcacaccatggtatatgacggatttcggccagaggacctgatggaagcctgtgtcgaactgacggtgtgggatcactacaagctcaccaaccagttcttggggggcctcaggattgggtttggcaccggcaaatcctatgggacagaggtggactggatggactccacgtctgaagaggtggctctgtgggaaaagatggtgaactccccgaacacgtggattgaggctaccttgccgctgcgcatgttgctcatcgccaagattagcaagtag

SEQ ID NO: 226183 - DNA, 2733 bp, Artificial Sequence
  derived and/or modified sequence
atgattgacctgtccttcctgacagaggaggagcaggaggccatcatgaaggtgctgcagagagatgctgccctgaagagagctgaggaggagcgggtgcgccacctgcctgagaagatcaaggatgaccagcagctgaagaacatgagcggccagtggttctatgaggccaaggccaagaggcaccgggacaagatccatggagctgacatcatccgggcctccatgaggaagaagaggccccagattgctgctgagcagagcaaggaccgggagaatggagccaaggagagctgggtgaacaacgtgaacaaggatgccttcctgcccccagagctggccggcgtggtggaggagcctgaggaggatgctgccccagccagccccagcagctctgtggtgaacccagccagctctgtgattgacatgagccaggagaacaccaggaagcccaacgtgtccccagagaagaggaagaaccccttcaacagcagcaagctgcctgagggccacagcagccagcagaccaagaatgagcagagcaagaatggaagaacaggcctcttccagaccagcaaggaggatgagctgtctgagagcaaggagaagagcacagtggccgacaccagcatccagaagctggagaagagcaagcagaccctgcccggcctgagcaatggcagccagatcaaggcccccatccccaaggccaggaagatgatctacaagagcacagacctgaacaaggatgacaaccagagcttcccccggcagaggacagacagcctgaaggcccggggggccccccggggcatcctgaagaggaacagcagcagcagcagcacagacagcgagaccctgcgctacaaccacaactttgagcccaagagcaagatcgtgtccccaggcctgaccatccacgagcgcatcagcgagaaggagcacagcctggaggacaacagcagccccaacagcctggagcccctgaagcacgtgcgcttctctgctgtgaaggatgagctgccccagagccctggcctcatccacggccgggaggtgggggagttctctgtgctggagagtgaccggctgaagaatggcatggaggatgctggggacacagaggagttccagagcgaccccaagcccagccagtacaggaagcccagcctcttccaccagagcaccagcagcccctacgtgtccaagtctgagacccaccagcccatgaccagcggcagcttccccatcaatggcctgcacagccacagcgaggtgctgacagcccggccccagagcatggagaacagccccaccatcaatgagcccaaggacaagagcagcgagctgacccggctggagagcgtgctgcccaggagccctgcagatgagctgagccactgtgtggagcctgagcccagccaggtgcctgggggcagcagccgggaccggcagcagggcagcgaggaggagcccagccctgtgctgaagaccctggagaggtctgctgccaggaagatgcccagcaagagcctggaggacatcagcagtgacagcagcaaccaggccaaggtggacaaccagcctgaggagctggtgcgctctgcagaagatgatgagaagccagaccagaagcctgtgaccaatgaatgtgtgccccgcatcagcacagtgcccacccagcctgacaaccccttcagccacccagacaagctgaagaggatgagcaagtctgtgcctgccttcctgcaggatgaggtgtctggctctgtgatgtctgtgtacagcggggactttggaaacctggaggtgaagggcaacatccagtttgccatcgagtatgtggagagcctgaaggagctgcacgtgtttgtggcccagtgcaaggacctggccgctgctgatgtgaagaagcagaggagtgacccctacgtgaaggcctacctgctgcctgacaagggcaagatgggcaagaagaagaccctggtggtgaagaagaccctgaaccctgtgtacaatgagatcctgcgctacaagattgagaagcagatcctgaagacccagaagctgaacctgagcatctggcaccgggacaccttcaagaggaacagcttcctgggggaggtggagctggacctggagacctgggactgggacaacaagcagaacaagcagctgcgctggtaccccctgaagaggaagacagcccctgtggccctggaggctgaaaatagaggagagatgaagctggccctgcagtatgtgcctgagcctgtgcctgggaagaagctgcccaccactggagaggtgcacatctgggtgaaggagtgcctggacctgcccctgctgcggggcagccacctgaacagctttgtgaagtgcaccatcctgcctgacaccagcaggaagagccggcagaagaccagggctgtgggcaagaccaccaaccccatcttcaaccacaccatggtgtatgatggcttccggcctgaggacctgatggaggcctgtgtggagctgactgtgtgggaccactacaagctgaccaaccagttcctgggcggcctgcgcatcggcttcggcaccgggaagagctatggaacagaggtggactggatggacagcaccagcgaggaggtggccctgtgggagaagatggtgaacagccccaacacctggattgaggccaccctgcccctgaggatgctgctgattgccaagatcagcaagtag

SEQ ID NO: 226184 - DNA, 2733 bp, Artificial Sequence
  derived and/or modified sequence
atgatcgacctgagcttcctgaccgaggaggagcaggaggccatcatgaaggttttgcagagagatgcagccctgaagcgagccgaggaggaaagggtgcgacacctgccggagaagatcaaggatgaccagcagttgaagaacatgagtggccaatggttctacgaagctaaggctaaacgccatagagacaaaatccacggagccgacattatcagagcctcaatgagaaagaaacgcccgcaaattgccgctgagcaatcgaaagatagggagaacggtgctaaggagagctgggtcaataacgtaaataaagacgcgtttctgcctcccgagctcgcaggggtggtcgaggagcctgaagaagacgcagcccccgcctcgcccagcagcagtgtcgtcaacccggcctccagcgtgattgacatgagccaagaaaacacgcgcaagcccaacgtttccccagaaaagaggaagaatcccttcaactcctcaaaactcccagaaggacactcgtcacagcaaaccaaaaatgagcagtctaaaaatggaagaactgggctgttccagacttctaaagaggacgaactttctgaaagcaaagaaaagtcaacagtggcagacacctctattcaaaaactcgaaaagagtaaacaaacgctgcctggactaagcaacggatcccagattaaagcaccaatcccaaaggcccgaaaaatgatttacaagtccaccgacctcaataaagatgataaccagagttttccccgccagcgtactgatagcctgaaagctcgaggtgcacctcggggaatcttgaaaaggaattcctcttctagctctacagatagtgagactctgcgctacaaccataatttcgaacccaagagtaaaatagtgagtcctggactgaccatccacgaaaggatctcagaaaaagagcacagccttgaagataattcctcaccaaattcattggaaccactcaagcacgttcggttctccgcagtaaaggacgagcttcctcagtcaccgggccttattcatgggcgggaggttggcgagttttcggtgctcgagtctgaccggttgaagaacggaatggaggatgccggagataccgaggaatttcaaagtgatccaaaaccttcacagtacagaaagccaagtctcttccatcaaagtacatcgtccccatacgtcagcaaaagtgaaacccaccagcccatgacttctgggagttttcctataaatggcctgcacagccactcagaggtgctgaccgcaagacctcagtccatggagaacagccccaccatcaatgaacctaaagacaaatctagcgagctaacgcggttggaatctgtactgcccagatcccctgcagacgagctgtcccactgtgtggagccggaaccttctcaggtgccaggtggatcctccagagaccggcagcaggggtccgaagaggaaccatcgccagttctaaagacgctggaaaggtccgccgctaggaaaatgccatccaaatccctcgaggacatctcctctgattcctccaatcaggccaaggtggataatcagccagaggaactagttaggagtgcagaagacgatgagaaaccagaccagaagcccgtgacaaacgagtgcgtgcccagaattagtacagtgcccacccagcctgataatccatttagccatccagacaagttaaaacgcatgtccaaaagtgtgcctgcatttttacaggacgaagtgtctggctccgtgatgagcgtctactcaggagacttcggaaacttggaagtgaagggcaacatccaattcgctatcgagtacgtcgagtcattgaaggagcttcacgtattcgtggcccagtgcaaagacctggcagccgccgacgtgaagaagcagcgcagcgacccttacgtgaaagcctacctactgccagataaggggaagatgggaaagaagaaaacacttgtcgttaagaaaacactcaatccggtgtataatgaaatactgcggtacaagattgaaaaacagatcctcaaaacgcagaaactgaacctgagtatctggcatagagacacatttaagaggaactcttttctgggcgaggtcgagctggaccttgagacctgggattgggacaacaagcagaataaacagctgagatggtacccactgaagagaaaaaccgctccagtggcattagaggctgagaacagaggagaaatgaagctggcattgcaatacgtgcctgaacctgtcccaggcaagaaattacccactaccggcgaagtgcacatttgggtgaaggagtgtctggacctgccccttctgagaggcagtcaccttaattcctttgttaaatgcactattcttcccgatacttcccggaagtcaagacaaaagacgcgtgctgtcggaaagaccacgaaccccatcttcaatcacacaatggtgtacgatggctttcggcctgaggacttaatggaggcttgcgttgagcttacagtgtgggaccactataagctgacaaatcagttcctggggggcctgcgcatcggattcgggacaggtaagtcctacgggacagaggtcgactggatggattcaacctctgaagaggtggcactgtgggagaaaatggtgaactcccccaacacctggattgaggcaacattgccattgcgtatgcttctcatagcgaagatctctaagtag

SEQ ID NO: 226185 - DNA, 2733 bp, Artificial Sequence
  derived and/or modified sequence
atgatcgacctgagcttcctgaccgaggaggagcaggaggccatcatgaaggtccttcagcgcgatgccgcactaaagagggcagaggaagagagggtgcggcaccttcccgaaaagattaaggatgatcagcagttgaagaacatgtctggccagtggttttacgaggctaaagctaaacgtcatagagataaaattcacggcgcggacattattagagcaagcatgagaaagaaacgcccccagatagccgccgagcagagcaaagaccgagagaatggtgccaaggaatcctgggtcaacaatgtcaataaggacgccttcctgccccccgaactggccggtgtggtggaggagcctgaagaagacgctgctcccgcatcccccagctcttccgttgtgaatcccgcttcatctgtcatcgacatgagccaggaaaatacaagaaagcccaatgtgagccctgaaaagaggaagaacccattcaacagttctaaactgccagagggccactcctcgcagcaaacgaagaatgagcagtcaaaaaacggtagaaccggcctgttccagacctccaaggaagatgagttgtcagaatccaaagaaaaatccaccgtcgctgatacctcaatccaaaagctcgaaaagtccaaacagaccttgcctggattgtctaatggctcccagatcaaagcgccaatcccaaaggcccggaagatgatatacaagtcaactgatctgaacaaagacgataatcaatccttcccccgtcagcgcactgattcgctcaaagcacgcggagccccgcgggggatactcaagcggaattcaagcagctctagtacagacagcgagaccttaagatataaccataacttcgaaccaaagagcaagattgtgtctcctggactcaccatccacgagcggatctccgagaaggaacactccttggaggacaacagctcaccgaacagtcttgagcctcttaaacacgtgcgcttctcagctgtgaaagacgaattaccccagtcaccaggtttgatccacggccgagaggtcggcgagttctccgtcctggagtcggatcgccttaagaatggaatggaggatgctggagacactgaggaatttcagtcagatccgaagccatcccagtacagaaaacctagcctgttccaccaaagcacgtcaagcccctacgtcagtaaatcggagacccatcagcccatgacatccggaagcttcccaataaacggcctgcatagtcattcggaggttctgactgcgcgcccgcagagcatggagaattcacccacaatcaatgaaccaaaggacaagtcaagcgagctgacccgactggagagcgtgctgccacgctcaccagccgacgaactgagccactgcgttgagccggagccaagccaggtgcctgggggttcgtcccgtgaccggcagcagggctcagaggaggagccaagccccgttttgaagacactggagcggagcgcggcccggaaaatgccaagtaagtccctggaggatataagtagcgatagctcgaatcaggccaaagttgacaatcaacccgaggaactcgtgcgatctgcagaagatgacgagaagccagaccaaaaacccgttaccaatgaatgtgtgcctcgcatcagcacagttcctacacagcccgataatccgtttagccacccagataagctgaagcgaatgagtaaaagcgtccctgcttttttgcaagatgaggtctctggctctgtgatgagcgtgtactcgggagattttggcaacctcgaggtgaaaggcaatattcagtttgccattgagtacgtcgagtccttaaaggagctccatgttttcgtcgcacagtgtaaggacttggcagccgcagacgtgaagaaacaaaggtccgacccctacgtgaaagcctacctgttgccggacaaaggaaaaatgggaaagaagaaaaccttagttgtcaagaaaaccttgaatccggtttataatgaaattctgcgctataaaatcgagaaacagattctcaagactcagaaacttaatttgagtatctggcatagagataccttcaagaggaactccttcctgggggaggttgaactggatcttgaaacttgggattgggacaacaaacagaacaagcagttgcgatggtatcctctcaaaaggaaaaccgcccctgtggctttggaggccgaaaaccggggcgagatgaaacttgctctccaatatgtccccgagcccgtgcccggcaagaagctgccaacgactggcgaggtccacatctgggtgaaagaatgcctggatcttcctttactaagaggctcgcacttaaatagcttcgtgaagtgcacaatcctgcctgacacgagccggaagtctcgccagaagacccgggctgtcggaaagaccacaaatccgatctttaatcatacaatggtatacgacggatttagacccgaagatctaatggaggcgtgcgtcgaactcaccgtttgggaccactacaaacttaccaatcagtttttaggggggctgcgtattggcttcggcaccggcaaaagctatggtaccgaggtggactggatggactccacaagcgaggaggtggcactttgggaaaagatggtgaacagtccaaacacgtggatcgaggcgacccttccactgaggatgctcctcatcgcaaagatcagtaagtag

SEQ ID NO: 226186 - DNA, 2733 bp, Artificial Sequence
  derived and/or modified sequence
atgatcgatctcagctttcttactgaggaagagcaggaagccatcatgaaagtgctgcagcgagatgctgctctgaaaagagccgaggaggagcgggtgcgccacctgcctgaaaaaattaaggatgaccagcagcttaaaaacatgtcggggcagtggttttatgaggctaaagcaaaacgacaccgcgacaaaattcacggagcggacataattagggcctctatgcgcaaaaaacgcccacagatagcggcagaacaatcaaaggatagagagaacggcgcaaaggagagctgggttaataacgtgaacaaggacgcatttctgccccctgaactggccggtgttgtcgaggaacctgaggaagatgctgcccctgctagtccgagctcctccgtagtaaatccagcaagttcagtcatcgatatgtcgcaggagaacactaggaaaccgaatgtctcgcctgagaagagaaaaaaccccttcaactcctccaagttaccagaagggcactcttcacaacagaccaaaaatgaacagtcaaaaaatggcaggacggggctatttcaaacatctaaggaagatgaattgagcgagagcaaagaaaagtcaaccgtagctgacacctctattcagaagctcgaaaagtccaaacaaacgcttccaggactgtctaacgggtctcagattaaggcgcctatcccgaaggctcgcaagatgatctacaagtcaacggacctcaacaaggacgataaccagtcatttccacggcaacgcacagattcgttgaaagccaggggcgctccaagaggaattctcaagcggaacagttcaagctcctcaacagactcagaaacacttcgctacaaccacaactttgagccgaaaagcaagatagtgagcccaggattaacaatccacgagagaatttccgagaaggaacacagcctggaagacaacagcagtcccaacagcctggagcccctaaagcatgtgagattctccgcggtcaaagatgagttaccccaaagcccgggactgattcacggtcgggaggtgggcgaatttagcgttctggagtccgaccggctcaagaatgggatggaggacgcaggcgatactgaagagtttcagagtgatcctaaaccctcccaatatcgcaaaccctccctctttcatcagtcaacttcttccccctatgtgagtaagtcagaaacccaccaaccgatgacctccggaagtttcccaatcaatggactgcactcgcactcagaggttttgacagccaggcctcaatctatggagaacagtccgacaataaacgaaccgaaggataagagttcagagcttacacgactggaatccgtgttgcccagatcaccggcagacgagctgagtcattgcgtagagccagagccttcccaagtgcctgggggttcaagcagggatcgacaacagggatctgaggaagaacctagtcctgtgctaaaaactttagaaagaagtgcggctagaaagatgccgagcaagagtctggaagatatttcttcagacagctcgaaccaggcaaaggtagataatcaacctgaggagctggtgagatcggccgaagatgatgaaaagccggaccagaaacctgtgaccaacgagtgcgtgccaaggatctctaccgtgcctacacagccggacaacccattttcccatcccgacaaactgaagcggatgagtaaatcagttcccgcattcctgcaggacgaagtcagtgggagcgtgatgtcagtttatagcggagatttcggcaatctggaggtgaaagggaacatacagttcgcaatcgagtacgtggagtccctgaaggagctgcatgtattcgtcgcacagtgcaaagatcttgccgctgctgatgtcaagaaacaaaggtcagacccatatgtgaaggcctacttgctccccgacaagggcaagatggggaagaagaagacactggtggtcaaaaaaacactgaatccagtgtacaatgagattctgaggtataagattgagaagcaaatccttaagacccaaaaactgaacctgtccatttggcatcgagataccttcaaacgaaactcattcctgggcgaggtggagttagacctggagacttgggactgggacaacaagcagaacaagcagctcaggtggtatcctttgaaacgaaaaaccgcccctgtggcactggaagcagaaaaccggggagagatgaagttggctctacagtacgtccctgagcctgtgccgggtaagaagttgccgaccacaggtgaagtccacatctgggttaaggagtgcctcgatctgccccttctccgcggttcacacttgaatagcttcgtcaaatgtaccatactgcccgatacgagccggaaatctagacagaagactcgcgctgtcgggaaaaccactaatcccatttttaatcatacaatggtatatgacgggttcagacctgaagatctcatggaggcatgcgtggagctcaccgtgtgggaccactacaaactaactaaccaattcctcggcggtctgagaatcggctttggtacaggaaagagttatggtactgaggtagattggatggacagcactagcgaggaagtggccctttgggaaaaaatggttaatagtcccaatacctggatagaagccaccctcccgcttcggatgctcctgattgctaagatctcaaaatag

SEQ ID NO: 226187 - DNA, 2733 bp, Artificial Sequence
  derived and/or modified sequence
atgatagacctatccttcttgacggaagaggagcaggaagccatcatgaaggtgcttcagagagatgctgcattaaagcgagccgaggaggaacgtgttcggcacctgcctgaaaaaataaaagatgaccagcagctaaaaaatatgagcggccagtggttctatgaagccaaagccaagcgccaccgggataaaatccatggtgctgatattattcgggctagcatgagaaagaagcgtccccagattgcagcagagcaatcgaaggatcgcgagaatggggctaaagagtcttgggtgaacaacgttaacaaagacgcgttcctgccgccagagctggcaggggtggtcgaggaacctgaagaagacgctgccccagcaagcccgtctagctccgtcgttaatccagccagttccgttatcgacatgtcccaggaaaataccagaaagcctaacgtttcaccagaaaaaagaaagaacccgtttaatagctccaaactgcctgagggacactcctctcagcaaactaaaaatgagcaaagcaaaaacggaagaactgggttgttccaaacaagcaaggaagacgaactgagcgaaagcaaagagaaatccactgtcgctgatacgagtatacagaaactcgagaagagcaaacaaacactacctgggctctcgaacggtagccagatcaaggcccctatacctaaggcgagaaaaatgatttataaatcaactgatcttaacaaggatgataatcagagtttccctagacagagaaccgattctctgaaggccaggggagcaccaaggggcatcctgaagcgtaacagctcatccagctctaccgatagtgagacactccgctataatcacaactttgaacccaagtctaaaatcgtgtcgcccggtcttactattcatgagagaatttcagagaaagagcacagtctggaggacaatagctctcctaacagcctggaaccactgaagcacgtccggttcagcgccgtgaaggatgaactgcctcagtcccctgggctgatccacggcagggaggtgggcgagtttagcgtgctagagagcgaccgcctgaagaatgggatggaagacgcaggggatactgaagagtttcagtcagaccccaagcctagccagtaccgcaaacctagcctgtttcaccagtctacttcgagcccttacgtgagcaagtctgagacccaccaacctatgacctccggctcgttcccaataaacggccttcacagccacagcgaggtcctgactgcgcgtcctcaatcaatggagaactcaccgactatcaatgagccgaaggataaatcttcggagctgacccgccttgaatcagttctgcccagatcccctgcagacgagttatcgcattgtgtcgagcccgaaccctctcaggtgcccggaggtagttcgcgggatagacagcagggttcggaggaagagccaagcccagttttgaaaaccctggaacgtagcgctgctcgcaagatgcctagcaagagcttggaggacataagctcggactcatctaaccaggcaaaagtggataaccagccggaggagttagtgcgcagcgccgaggatgacgagaagcctgaccagaagcccgtcacgaatgagtgcgtgcccagaatatcaactgtgcctacacagccagataatcccttcagccatcccgataagttgaaacggatgagtaaaagcgtccccgcttttttacaagacgaggtgtctggctcagtgatgagcgtttattccggtgacttcggtaacctagaggtgaagggcaatatacaatttgccattgaatacgtcgagagcctcaaggagctgcacgtgttcgttgcccagtgcaaggacttggctgccgcagacgtgaagaaacagagatcagacccttacgtgaaagcttacctgcttcctgacaaaggaaaaatgggaaagaaaaaaacactggtagtgaagaagacattgaacccagtgtataacgagatcctgcgctataaaatagaaaagcagatcctgaagacccaaaaactgaacctgtcaatttggcaccgggacacgtttaaacggaactccttcttaggcgaggttgaactggatctcgaaacctgggattgggataataaacagaacaagcaactccgatggtatccattgaagcgcaaaaccgcacctgtggccctggaggctgagaacagaggagagatgaagctcgcacttcagtacgttccagaacccgttcctggaaagaagctccccaccacaggagaggtgcacatctgggtgaaggagtgcttagatttgcctctgctgaggggcagtcacttaaactcctttgtgaagtgtacgatcctgccagacacaagccgcaagagccggcagaaaacacgggcagtggggaagactacaaaccctatcttcaaccacaccatggtatacgatggattcaggccagaagacctgatggaagcctgcgtggaattgacagtttgggatcactacaaattgacaaaccaattcctgggcggtctgcgcatcggctttgggactggaaagagctatgggaccgaggtggactggatggattccacgtctgaagaggttgccctctgggagaaaatggttaacagccccaatacttggatcgaagccactctacctctccgcatgttgctgatcgcaaaaatatccaaatag

SEQ ID NO: 226188 - DNA, 4275 bp, Artificial Sequence
  derived and/or modified sequence
gggcgacacccgggccgtgccgccagcgtccgtcgggagagtgaaggctcgcaacgccttgcccgggggaaggtaacgcgccgcgcccggggctgcgcggtttgcaccgccaggccgagggctgggggccagaagacaagagagacggcgaggcgcgctccctgcccggcagcgactcggaggtaggtgatgctctgatgctgctgcctcttatgaattgacgacaggtgcagagagagaataaactgtgtctaagactggaccagagagtgagtgtgctggaagccaccataggaacaagcgacctgtttggcaaggaatacagcatccttctgagagcctcttctcgacactatcccacagaccaggacttcctcatgggaaagagcacttaggatcttgctatcagctgccctaaacttttgctgagccaaaataagactttgatgcagaactgaacaagatatttcatttttgtgtgttttaatcttcctggttgcagtcttagttgttcagccctgagaattttgagccacatttgttgctattatttttgcatgcacttttcaaaatgattgacttaagcttcctgactgaagaggaacaagaggccatcatgaaggttttgcagcgggatgctgctctgaagagggccgaagaagagagagtcagacatttgcctgaaaaaattaaggatgaccagcagctgaagaatatgagtggccaatggttttatgaagccaaggcaaaaaggcacagggacaaaatccatggcgcagatatcatcagagcatctatgagaaagaagaggccccagatagcagctgagcagagtaaagacagagaaaatggggcaaaggaaagctgggtgaataatgtcaacaaagatgctttccttcctccagagctggctggcgttgtagaagagccagaagaagatgcagcaccagcaagcccgagttccagtgtggtaaatccagcttccagtgtgattgatatgtcccaggaaaacacaaggaaaccaaatgtgtctccagagaagaggaagaatccgtttaatagctccaagttgccagaaggtcactcatcacaacaaactaaaaatgaacagtcaaaaaatggaagaactggtttatttcagacttcaaaagaggatgaattgtcagagtcaaaagaaaagtcaactgtcgcagatacttcaatccaaaagttagagaaatcaaagcagactttgccaggcctttcaaatgggtcccaaatcaaggctccaatccccaaagccaggaagatgatctacaaatcaactgatttaaacaaagatgataaccagtcttttcctagacaaaggacagactccctgaaagcgagaggggctccgagagggatcctcaagcgcaactccagttccagtagcacagactcagaaacccttcgttataatcacaactttgaacccaaaagcaaaattgtgtcacctggcctaaccatccatgagagaatttctgagaaggagcattctttagaagacaactcttccccaaactccctggagccattaaagcatgtgagattctctgcagtgaaggatgagcttccacagagtcctgggctaatccatggtcgggaagtaggagaatttagtgttttagaatctgacagattgaaaaatggaatggaagatgcaggggacacagaagagtttcagagtgaccctaagccttctcaatacagaaagccttcgctttttcatcaatcaacctcaagcccatatgtatcaaaaagtgaaacacatcagccaatgacttctggttcttttccaattaatgggctgcattctcattcagaagttttaactgcaagaccacagtctatggagaattcaccaaccatcaatgaacccaaagataaatcatcagaattaacaaggcttgaatctgtattacccagaagccctgctgatgaactgtctcattgtgttgagcctgagccatctcaggtgccaggtggcagttctagagaccgtcagcaaggttcagaagaagaacccagtcctgttttgaaaactttggaaaggagtgccgctaggaaaatgccttccaaaagtctagaagacatttcatcagattcatcaaatcaagcaaaagtagataatcagccagaagaattagtgcgtagtgctgaagatgatgagaaaccagatcagaagccagttacaaatgaatgcgtaccaagaatttccacagtgcctacacaacctgataatccattttctcaccctgacaaactcaaaaggatgagcaagtctgttccagcatttctccaagatgaggtgagtggcagtgtgatgagtgtttatagtggagactttggcaatctggaagttaaaggaaatattcagtttgcaattgaatatgtggagtcactgaaggagttgcatgtttttgtggcccagtgtaaggacttagcagcagcggatgtaaaaaaacagcgttcagacccatatgtaaaggcctatttgctaccagacaaaggcaaaatgggcaagaagaaaacactcgtagtgaagaaaaccttgaatcctgtgtataacgaaatactgcggtataaaattgaaaaacaaatcttaaagacacagaaattgaacctgtccatttggcatcgggatacatttaagcgcaatagtttcctaggggaggtggaacttgatttggaaacatgggactgggataacaaacagaataaacaattgagatggtaccctctgaagcggaagacagcaccagttgcccttgaagcagaaaacagaggtgaaatgaaactagctctccagtatgtcccagagccagtccctggtaaaaagcttcctacaactggagaagtgcacatctgggtgaaggaatgccttgatctaccactgctaaggggaagtcatctaaattcttttgttaaatgtaccatccttccagatacaagtaggaaaagtcgccagaagacaagagctgtagggaaaaccaccaaccctatcttcaaccacactatggtgtatgatgggttcaggcctgaagatctgatggaagcctgtgtagagcttactgtctgggaccattacaaattaaccaaccaatttttgggaggtcttcgtattggctttggaacaggtaaaagttatgggactgaagtggactggatggactctacttcagaggaagttgctctctgggagaagatggtaaactcccccaatacttggattgaagcaacactgcctctcagaatgcttttgattgccaagatttccaaatgagcccaaattccactggctcctccactgaaaactactaaaccggtggaatctgatcttgaaaatctgagtaggtggacaaatatcctcactttctatctattgcacctaaggaatactacacagcatgtaaaagtcaatctgcatgtgcttctttgattacaaggcccaagggatttaaatataacaaaatgtgtaatttgtgactctaatattaaataagatatttgaacaagctaggaaaattgaatttctgctgctgcttcaaagaaaaagctgccccagagcattaaacatggggtattgttaagaagcaaaatgttcttgtttgccatcatgtgtttcacaccacaattctgtgccacagttaagagggtctggtacccttgcaggacctttgtaggttgtgggaaaaagtcgcagaaagatactcaaagtggagcagggaatggagacagacatcagtgatgataaaaaaaaaaatggaccttaagaaactatttactctgtaatctctaataaaatatggaattccatattagggcaatgagactgaaactactggtgtttttctgccttgagaaaacaaacagttaaaacaagcctcaaatgtattttagtgccacccactggccataggtacaattcagttgttggcttgttttgacttaattctaaaataggtctcaagcctgtatttttatgagtttatttttttaaaaccctgcatatatatgattgtttttcttataactttactatatgaaagcagcataagagtagtcacaaacatgttttgcaacaaagttttaattagaatgtaagttgctcagttatactgttcttcttatgtatgtaaaattttcgtattttgtaaaaacccttagaataaattatcatttgatttaaattgtattagaaaattagcgtgacttctcattttaaataaaatattttaggaattctaaacatct

SEQ ID NO: 226189 - DNA, 2733 bp, Artificial Sequence
  derived and/or modified sequence
atgattgacttaagcttcctgactgaagaggaacaagaggccatcatgaaggttttgcagcgggatgctgctctgaagagggccgaagaagagagagtcagacatttgcctgaaaaaattaaggatgaccagcagctgaagaatatgagtggccaatggttttatgaagccaaggcaaaaaggcacagggacaaaatccatggcgcagatatcatcagagcatctatgagaaagaagaggccccagatagcagctgagcagagtaaagacagagaaaatggggcaaaggaaagctgggtgaataatgtcaacaaagatgctttccttcctccagagctggctggcgttgtagaagagccagaagaagatgcagcaccagcaagcccgagttccagtgtggtaaatccagcttccagtgtgattgatatgtcccaggaaaacacaaggaaaccaaatgtgtctccagagaagaggaagaatccgtttaatagctccaagttgccagaaggtcactcatcacaacaaactaaaaatgaacagtcaaaaaatggaagaactggtttatttcagacttcaaaagaggatgaattgtcagagtcaaaagaaaagtcaactgtcgcagatacttcaatccaaaagttagagaaatcaaagcagactttgccaggcctttcaaatgggtcccaaatcaaggctccaatccccaaagccaggaagatgatctacaaatcaactgatttaaacaaagatgataaccagtcttttcctagacaaaggacagactccctgaaagcgagaggggctccgagagggatcctcaagcgcaactccagttccagtagcacagactcagaaacccttcgttataatcacaactttgaacccaaaagcaaaattgtgtcacctggcctaaccatccatgagagaatttctgagaaggagcattctttagaagacaactcttccccaaactccctggagccattaaagcatgtgagattctctgcagtgaaggatgagcttccacagagtcctgggctaatccatggtcgggaagtaggagaatttagtgttttagaatctgacagattgaaaaatggaatggaagatgcaggggacacagaagagtttcagagtgaccctaagccttctcaatacagaaagccttcgctttttcatcaatcaacctcaagcccatatgtatcaaaaagtgaaacacatcagccaatgacttctggttcttttccaattaatgggctgcattctcattcagaagttttaactgcaagaccacagtctatggagaattcaccaaccatcaatgaacccaaagataaatcatcagaattaacaaggcttgaatctgtattacccagaagccctgctgatgaactgtctcattgtgttgagcctgagccatctcaggtgccaggtggcagttctagagaccgtcagcaaggttcagaagaagaacccagtcctgttttgaaaactttggaaaggagtgccgctaggaaaatgccttccaaaagtctagaagacatttcatcagattcatcaaatcaagcaaaagtagataatcagccagaagaattagtgcgtagtgctgaagatgatgagaaaccagatcagaagccagttacaaatgaatgcgtaccaagaatttccacagtgcctacacaacctgataatccattttctcaccctgacaaactcaaaaggatgagcaagtctgttccagcatttctccaagatgaggtgagtggcagtgtgatgagtgtttatagtggagactttggcaatctggaagttaaaggaaatattcagtttgcaattgaatatgtggagtcactgaaggagttgcatgtttttgtggcccagtgtaaggacttagcagcagcggatgtaaaaaaacagcgttcagacccatatgtaaaggcctatttgctaccagacaaaggcaaaatgggcaagaagaaaacactcgtagtgaagaaaaccttgaatcctgtgtataacgaaatactgcggtataaaattgaaaaacaaatcttaaagacacagaaattgaacctgtccatttggcatcgggatacatttaagcgcaatagtttcctaggggaggtggaacttgatttggaaacatgggactgggataacaaacagaataaacaattgagatggtaccctctgaagcggaagacagcaccagttgcccttgaagcagaaaacagaggtgaaatgaaactagctctccagtatgtcccagagccagtccctggtaaaaagcttcctacaactggagaagtgcacatctgggtgaaggaatgccttgatctaccactgctaaggggaagtcatctaaattcttttgttaaatgtaccatccttccagatacaagtaggaaaagtcgccagaagacaagagctgtagggaaaaccaccaaccctatcttcaaccacactatggtgtatgatgggttcaggcctgaagatctgatggaagcctgtgtagagcttactgtctgggaccattacaaattaaccaaccaatttttgggaggtcttcgtattggctttggaacaggtaaaagttatgggactgaagtggactggatggactctacttcagaggaagttgctctctgggagaagatggtaaactcccccaatacttggattgaagcaacactgcctctcagaatgcttttgattgccaagatttccaaatga

SEQ ID NO: 226190 - DNA, 683 bp, Artificial Sequence
  derived and/or modified sequence
atatttgttaatgaccatgggtttgggaaggtgttagtcatgatcaagcaaaagtagataatcagccagaagaattagtgcgtagtgctgaagatgatgagaaaccagatcagaagccagttacaaatgaatgcgtaccaagaatttccacagtgcctacacaacctgataatccattttctcaccctgacaaactcaaaaggatgagcaagtctgttccagcatttctccaagatgaggtgagtggcagtgtgatgagtgtttatagtggagactttggcaatctggaagttaaaggaaatattcagtttgcaattgaatatgtggagtcactgaaggagttgcatgtttttgtggcccagtgtaaggacttagcagcagcggatgtaaaaaaacagcgttcagacccatatgtaaaggcctatttgctaccagacaaaggcaaaatgggcaagaagaaaacactcgtagtgaagaaaaccttgaatcctgtgtataacgaaatactgcggtataaaattgaaaaacaaatcttaaagacacagaaattgaacctgtccatttggcatcgggatacatttaagcgcaatagtttcctaggggaggtggaacttgatttggaaacatgggactgggataacaaacagaataaacaattgagatggtaccctctgaagcggaag

SEQ ID NO: 226191 - DNA, 1441 bp, Artificial Sequence
  derived and/or modified sequence
aaccctctaacccttgggagtctgtgtgcagcagtgatgtgagctgcatccgggctgaaatgggagctcccgctatggcactggctcaaggagctaatctaaagagaaaatcaagcaaaagtagataatcagccagaagaattagtgcgtagtgctgaagatgatgagaaaccagatcagaagccagttacaaatgaatgcgtaccaagaatttccacagtgcctacacaacctgataatccattttctcaccctgacaaactcaaaaggatgagcaagtctgttccagcatttctccaagatgaggtgagtggcagtgtgatgagtgtttatagtggagactttggcaatctggaagttaaaggaaatattcagtttgcaattgaatatgtggagtcactgaaggagttgcatgtttttgtggcccagtgtaaggacttagcagcagcggatgtaaaaaaacagcgttcagacccatatgtaaaggcctatttgctaccagacaaaggcaaaatgggcaagaagaaaacactcgtagtgaagaaaaccttgaatcctgtgtataacgaaatactgcggtataaaattgaaaaacaaatcttaaagacacagaaattgaacctgtccatttggcatcgggatacatttaagcgcaatagtttcctaggggaggtggaacttgatttggaaacatgggactgggataacaaacagaataaacaattgagatggtaccctctgaagcggaagacagcaccagttgcccttgaagcagaaaacagaggtgaaatgaaactagctctccagtatgtcccagagccagtccctggtaaaaagcttcctacaactggagaagtgcacatctgggtgaaggaatgccttgatctaccactgctaaggggaagtcatctaaattcttttgttaaatgtaccatccttccagatacaagtaggaaaagtcgccagaagacaagagctgtagggaaaaccaccaaccctatcttcaaccacactatggtgtatgatgggttcaggcctgaagatctgatggaagcctgtgtagagcttactgtctgggaccattacaaattaaccaaccaatttttgggaggtcttcgtattggctttggaacaggtaaaagttatgggactgaagtggactggatggactctacttcagaggaagttgctctctgggagaagatggtaaactcccccaatacttggattgaagcaacactgcctctcagaatgcttttgattgccaagatttccaaatgagcccaaattccactggctcctccactgaaaactactaaaccggtggaatctgatcttgaaaatctgagtaggtggacaaatatcctcactttctatctattgcacctaaggaatactacacagcatgtaaaagtcaatctgcatgtgcttctttgattac

SEQ ID NO: 226192 - protein, 365 aa, Artificial Sequence
  derived and/or modified sequence
MRRNTQDENMRKWFKVTIPYGIKYDKAWLMNSIQSNCSVPFTPVDFHYIRNRACFFVQVASAASALKDVSYKIYDDENQKICIFVSHFTAPYSVKNKLKPGQMEMLKLTMNKRYNVSQQALDLQNLRFDPDLMGRDIDIILNRRNCMAATLKITERNFPELLSLNLCNNKLYQLDGLSDITEKAPKVKTLNLSKNKLESAWELGKVKGLKLEELWLEGNPLCSTFSDQSAYVSAIRDCFPKLLRLDGRELSAPVIVDIDSSETMKPCKENFTGSETLKHLVLQFLQQSNLCKYFKDSRNIKILKDPYLQRKLLKHTKCPRNVDSLSALPETQHDFTSILVDMWYQTVNTCFLPRAGPESQSLRPL

SEQ ID NO: 226193 - DNA, 1194 bp, Artificial Sequence
  derived and/or modified sequence
atgaggcgaaatactcaggacgagaatatgagaaagtggttcaaggttaccatcccttatggtataaagtatgacaaggcctggctgatgaattcaatccagagcaactgtagtgtccctttcacccccgttgattttcactatatacgaaatagggcctgtttcttcgtgcaagtagcctctgctgcatctgcactgaaagatgtgtcttacaaaatatacgacgatgaaaaccagaagatctgtatctttgtgtctcactttacagctccctactcagttaagaataaactcaaaccgggacagatggaaatgcttaaactcacaatgaataagagatacaacgtcagtcaacaagctctcgatttgcagaacctgcgatttgatccagacctcatgggccgggatattgatattattctaaacaggagaaattgcatggcggctaccctgaagataaccgaacgcaattttcccgaactgctcagccttaacttatgcaataataaactttaccagctggatggattgagcgatatcaccgaaaaggctccgaaagtcaagactttaaacctctctaaaaacaaactggaatctgcttgggaacttggcaaggttaagggactcaagctggaagaactgtggctggaaggaaaccctctgtgttcaaccttttccgaccagagtgcctacgtgtcagctattagggattgcttcccaaagctgcttcgattagacggcagagagctcagcgcccccgttattgtcgatatcgatagtagcgagacaatgaaaccttgcaaggagaactttacgggctctgaaacccttaagcatctcgttttgcaattcctgcagcagtctaacctgtgcaaatacttcaaggacagtcgcaacatcaaaatcctgaaggatccctaccttcaacgaaagctactgaaacacaccaaatgcccccggaacgtggactccttatctgcactccctgagacccagcacgactttactagcatccttgtggacatgtggtaccaaaccgtgaacacctgctttctgcctagggcggggcctgaatcccagcgctggtggtgcctgctgagtctgaagtggaaggatggactccgcgtgctgatactaccgtcgtgcggcccgtcatcactcccacttgccgctattccagtgtgcgccagctag

SEQ ID NO: 226194 - DNA, 1194 bp, Artificial Sequence
  derived and/or modified sequence
atgaggcgcaacacacaggacgaaaacatgagaaaatggttcaaggtgacaatcccttacggcataaaatatgacaaggcgtggctcatgaacagtatacagagcaactgctcggtcccctttacgcctgtcgatttccattatatccgcaaccgagcatgctttttcgtccaggtggcctccgctgcctcagctctgaaggatgtgtcctacaagatctatgatgacgagaatcagaaaatctgtattttcgtgagtcacttcaccgctccatacagcgtgaaaaataagctcaagccagggcagatggagatgcttaagctcacaatgaacaagcggtataacgtgtctcaacaggctctggatcttcagaacctacgtttcgaccctgaccttatgggcagggacattgacataatcctgaatagaaggaattgtatggccgcgaccctcaagattactgagaggaattttcctgaactcctgagcctgaacctgtgcaataataagctgtaccagcttgatggcctctcagacatcaccgagaaggctccaaaagtgaaaaccctcaacctaagcaagaataagttagaatctgcgtgggagctggggaaggttaagggtttgaaactcgaagagctgtggttggaggggaaccccttgtgttcaaccttctccgaccagtctgcctatgtctccgcaattagggattgtttccctaagctgctgagattagatggacgggagctgtctgctccggttattgtggatatagattcttccgagacgatgaaaccttgtaaggagaactttaccgggagtgaaactctgaagcaccttgtccttcaattcctacaacagagcaacctctgcaaatacttcaaggactcaagaaatattaaaatactgaaggatccctatctgcagcggaagttgttaaaacacacgaagtgtccccgcaacgtggacagcttaagtgccctccctgagacccagcatgactttacctccatcctcgtggacatgtggtatcagactgtgaatacttgtttcttgccaagggccggtcccgaaagccagaggtggtggtgtttgctgagcctgaaatggaaggacggactccgggtgctgatactgccaagctgtggtccttcctccctgcccttggctgccatccccgtctgtgcgtcttag

SEQ ID NO: 226195 - DNA, 1098 bp, Artificial Sequence
  derived and/or modified sequence
atgcggagaaacacccaggacgaaaacatgaggaagtggtttaaagtgacaattccatacggtataaagtacgataaagcgtggttgatgaactccattcagtctaactgctcagtgcccttcactccggttgatttccactatatacgcaaccgggcctgttttttcgtacaggtcgcctccgcagcttcagcactgaaggacgtcagctataaaatctatgacgacgagaatcagaagatctgtattttcgtaagccacttcacggctccctactctgtgaagaataaactgaagcctgggcagatggagatgctaaaacttacgatgaacaaaaggtacaatgtctcccagcaggcactcgatcttcagaacctgagatttgaccctgatctgatgggccgagatatcgacattatactgaataggaggaattgcatggcagccactctcaaaattaccgaaagaaactttccagaactcctctcactcaatctgtgcaataacaagttatatcagctggatggtctctccgacattacggaaaaagcccccaaggtcaagacactgaacctgagcaagaacaagttagaaagcgcgtgggaattgggcaaggtgaaaggattaaagttagaagaattgtggctagaaggcaatcctttatgttctacctttagtgatcaaagcgcttatgtcagcgccatccgggattgcttcccaaaactcttgaggctggacgggcgtgagctcagcgcacccgtgatcgtggatatagattcctcagagaccatgaagccctgcaaggagaacttcaccggcagtgagacgctcaaacacttggtcctccagtttctgcagcagagcaatctgtgtaagtacttcaaggattctcgaaacataaaaatcttgaaggatccatacctgcagcggaagctccttaaacataccaagtgcccaaggaacgtggactctcttagtgccctccccgagacgcagcacgacttcacaagcatcttggttgatatgtggtatcagacagtcaatacctgctttctacccagggccggacctgaatctcagtctttgcggccactttag

SEQ ID NO: 226196 - DNA, 1098 bp, Artificial Sequence
  derived and/or modified sequence
atgcggcgcaatactcaggatgaaaatatgcgcaaatggtttaaggtgacgattccatacggcatcaagtatgacaaggcatggctgatgaactcaatccagtctaactgctcagtgccgtttactcccgtggacttccactacattagaaaccgcgcgtgtttctttgtacaggtggcttcagctgcctccgccctcaaagacgtgagttacaaaatctacgatgacgagaatcagaaaatctgtatcttcgtatcccacttcaccgccccttattcagtcaagaacaagctaaaaccagggcagatggagatgttaaagctaaccatgaacaaaagatacaatgtctctcaacaggctctggatctgcaaaaccttaggtttgaccctgacctcatgggcagagatattgacatcatactaaatcgccggaactgcatggccgctactctgaagatcacagagagaaattttccagagctactctcactcaatctgtgcaacaataagctctaccagctggacgggctcagtgatatcactgaaaaggctcctaaggtgaagactctgaatctatcaaagaataaactcgagtctgcttgggagctgggtaaagtgaaggggctgaagctagaagagttgtggctcgaaggcaatccactctgcagcacctttagcgaccagagtgcctacgtttccgctattagagactgtttccccaagttgctgcgcctggatgggcgtgaactttctgcccctgttatagtcgacattgactcttcagagactatgaagccgtgcaaagaaaattttaccggctctgagaccctgaagcaccttgtgcttcaatttttgcagcagagcaatttgtgcaaatactttaaggattccagaaacatcaaaatactgaaggacccttatctccaacgcaagctgctgaagcacacaaaatgccccaggaatgtggactccctatctgctctcccagagactcagcacgattttacttccattttggtggacatgtggtaccagacagtcaacacctgctttttaccgcgggctgggcctgaatcgcagagcttgagaccgctgtag

SEQ ID NO: 226197 - DNA, 1194 bp, Artificial Sequence
  derived and/or modified sequence
atgagaagaaacacccaggatgagaacatgaggaagtggttcaaggtgaccatcccctacggcatcaagtatgacaaggcctggctgatgaacagcatccagagcaactgcagcgtgcccttcacccctgtggacttccactacatccggaacagagcctgcttctttgtgcaggtggccagcgctgccagcgccctgaaggatgtgtcctacaagatctatgatgatgagaaccagaagatctgcatctttgtgagccacttcaccgccccctacagcgtgaagaacaagctgaagccaggccagatggagatgctgaagctgaccatgaacaagcgctacaacgtgtcccagcaggccctggacctgcagaacctgcgctttgatcctgacctgatgggccgggacatcgacatcatcctgaacagaagaaactgcatggccgccaccctgaagatcacagagaggaacttccctgagctgctgagcctgaacctgtgcaacaacaagctgtaccagctggatggcctgagtgacatcacagagaaggcccccaaggtgaagaccctgaacctgagcaagaacaagctggagagcgcctgggagctgggcaaggtgaagggcctgaagctggaggagctgtggctggagggcaaccccctgtgcagcaccttcagtgaccagagcgcctacgtgtctgccatccgggactgcttccccaagctgctgcggctggatggccgggagctgagcgcccctgtgattgtggacatcgacagcagcgagaccatgaagccctgcaaggagaacttcaccggcagcgagaccctgaagcacctggtgctgcagttcctgcagcagagcaacctgtgcaagtacttcaaggacagcaggaacatcaagatcctgaaggacccctacctgcagaggaagctgctgaagcacaccaagtgccccagaaatgtggacagcctgagcgccctgcctgagacccagcacgacttcaccagcatcctggtggacatgtggtaccagacagtgaacacctgcttcctgcccagggctggccctgagagccagcgctggtggtgcctgctgagcctgaagtggaaggatggcctgcgggtgctgatcctgcccagctgtggccccagcagcctgcccctggccgccatccctgtgtgtgccagctag

SEQ ID NO: 226198 - DNA, 1098 bp, Artificial Sequence
  derived and/or modified sequence
atgagaagaaacacccaggatgagaacatgaggaagtggttcaaggtgaccatcccctacggcatcaagtatgacaaggcctggctgatgaacagcatccagagcaactgcagcgtgcccttcacccctgtggacttccactacatccggaacagagcctgcttctttgtgcaggtggccagcgctgccagcgccctgaaggatgtgtcctacaagatctatgatgatgagaaccagaagatctgcatctttgtgagccacttcaccgccccctacagcgtgaagaacaagctgaagccaggccagatggagatgctgaagctgaccatgaacaagcgctacaacgtgtcccagcaggccctggacctgcagaacctgcgctttgatcctgacctgatgggccgggacatcgacatcatcctgaacagaagaaactgcatggccgccaccctgaagatcacagagaggaacttccctgagctgctgagcctgaacctgtgcaacaacaagctgtaccagctggatggcctgagtgacatcacagagaaggcccccaaggtgaagaccctgaacctgagcaagaacaagctggagagcgcctgggagctgggcaaggtgaagggcctgaagctggaggagctgtggctggagggcaaccccctgtgcagcaccttcagtgaccagagcgcctacgtgtctgccatccgggactgcttccccaagctgctgcggctggatggccgggagctgagcgcccctgtgattgtggacatcgacagcagcgagaccatgaagccctgcaaggagaacttcaccggcagcgagaccctgaagcacctggtgctgcagttcctgcagcagagcaacctgtgcaagtacttcaaggacagcaggaacatcaagatcctgaaggacccctacctgcagaggaagctgctgaagcacaccaagtgccccagaaatgtggacagcctgagcgccctgcctgagacccagcacgacttcaccagcatcctggtggacatgtggtaccagacagtgaacacctgcttcctgcccagggctggccctgagagccagagcctgcggcccctgtag

SEQ ID NO: 226199 - DNA, 1194 bp, Artificial Sequence
  derived and/or modified sequence
atgcggcggaacacccaggacgagaacatgcggaagtggttcaaggtaacaatcccgtatggcattaagtacgacaaagcatggctcatgaactccatacagtccaattgctccgtccctttcacccccgtcgacttccactacatccggaatcgcgcctgcttctttgtccaggtggcgagtgcagcttcagcactgaaggacgtgtcatacaagatctacgacgacgagaaccaaaagatctgtatctttgtcagtcatttcactgccccttattctgtaaagaacaagttgaaaccaggccagatggagatgcttaaattaaccatgaacaaaaggtataatgtgagccagcaagcattagatctccagaaccttaggttcgaccctgacctgatggggcgagacattgacataatcctgaaccgccggaactgcatggccgctaccctgaagatcactgaacgaaatttcccagaattgctgtccctgaacctttgcaacaacaagctgtaccagcttgatggtttgagcgatataacagagaaagcccccaaggtcaaaacgctgaatctctcaaagaacaagctcgagagcgcatgggagctcggaaaggtgaaagggctgaaactcgaggaactgtggctggaaggcaatcccttgtgtagtacattctcagaccaatcggcgtacgtgagcgccatccgggattgctttccaaagcttctaagactggatgggcgtgagcttagcgcccctgtgatagtggacattgacagcagcgaaacgatgaagccgtgtaaagagaatttcaccggcagcgagaccctcaaacatctcgttctccagttcctccagcagagtaacctctgcaaatactttaaagatagccgcaatattaaaatcctcaaggatccctatctgcagcgaaagctcctcaagcatactaagtgccccagaaatgtggattccctgtccgcattaccagagacacagcatgactttacatcaatccttgtggatatgtggtaccagacagtgaatacatgtttcctaccccgcgccggaccagagagccaaagatggtggtgcttgctatcactgaaatggaaagatggacttagagtgctcattttgccttcctgtggaccttcctccctgcccctcgcagcaatacccgtttgtgcctcctag

SEQ ID NO: 226200 - DNA, 1194 bp, Artificial Sequence
  derived and/or modified sequence
atgcggcggaacacccaggacgagaacatgcggaagtggttcaaggtcaccatcccatatggcattaagtacgacaaggcctggctcatgaactcaattcaatctaactgtagcgttccattcactcccgtggactttcactacatccgaaaccgggcttgttttttcgttcaagtcgcctccgctgcttccgcactgaaggatgtaagttataagatctatgatgatgaaaaccaaaaaatttgtatctttgttagccattttaccgctccatattctgtaaagaataagcttaagcctggccagatggaaatgttaaagctgactatgaataagcggtacaatgtctcccagcaagcactcgatttgcagaacctgaggtttgacccagaccttatggggagggatatagacatcattttaaataggcggaactgcatggctgctactctgaaaatcactgaacgtaacttcccagagctattgagtctcaacctgtgcaacaataagctgtatcagttggatggcctgagtgacattacggagaaagcgccaaaggtgaaaacactgaatctctccaaaaataagcttgaaagtgcctgggagcttggaaaggttaaaggccttaagctggaggagctgtggctggagggcaaccccctctgtagcacttttagtgaccaaagtgcttacgtgtcagccattagagactgctttcccaagctgctcaggctggacggtcgcgagctttccgcaccagtgattgtggatatcgactcttcggagacaatgaagccgtgtaaggaaaacttcacggggtcggagacgctcaaacatcttgtccttcagtttctccagcagagtaatctgtgcaagtatttcaaagactcgcgtaacataaaaattctcaaagatccttacttacagaggaagctgttaaagcacactaaatgtcctcgtaatgtagactcattgtctgctctgcccgaaactcagcatgactttacaagcatcctagtggacatgtggtatcagacggtaaacacttgtttcctgccgagggccgggccagagagccagaggtggtggtgtcttttgtccctgaagtggaaggacggcctccgagtgctgatcctcccctcctgtggcccctcgtctttaccactggcagccattcctgtttgcgcttcttag

SEQ ID NO: 226201 - DNA, 1098 bp, Artificial Sequence
  derived and/or modified sequence
atgcggcggaacacccaggacgagaacatgcggaagtggttcaaggttaccattccttacgggattaaatacgacaaggcttggctcatgaactctatccagagcaattgcagtgtcccatttacacccgtagacttccactacattagaaatagggcctgcttctttgtccaagtcgcctccgccgcctctgcgctgaaagatgtgtcctacaagatctacgacgacgagaatcagaaaatttgcatctttgtcagtcactttactgcaccgtactctgtgaagaacaagctgaagccaggccagatggagatgctcaagctgactatgaacaagcggtacaatgtgtcccagcaagctttggacctccagaacctgcgcttcgaccccgaccttatgggacgagacatcgatatcatattgaaccgccgaaactgcatggctgccactcttaagatcactgaacgtaacttccccgaactgctcagtctcaatctgtgtaacaataaactttatcagcttgacgggctgtcggatattacagagaaggcaccaaaggtgaaaaccttgaatctcagcaaaaataagctggaaagcgcctgggagctgggcaaagtaaaaggactcaaactggaggaactttggctggaaggaaatcctctgtgttctacattctccgaccagagtgcctacgtctctgctatccgggattgttttcctaaactgctgcgactggatggtagggaactcagtgctcccgtcattgtggacatcgatagcagtgaaaccatgaagccgtgcaaagagaatttcaccggatcagagacattgaaacaccttgtgctccagttcttacagcagtccaacctgtgtaaatattttaaggacagccgcaacattaaaattctgaaggacccttacctgcagcggaagttgctgaagcacaccaagtgtcccagaaacgtggattccctgtcagccctgccagagacacaacacgacttcactagtattctggtagacatgtggtatcagacagttaacacttgtttcttacctcgggccggtcctgaatcccagtctctccgacccctctag

SEQ ID NO: 226202 - DNA, 1098 bp, Artificial Sequence
  derived and/or modified sequence
atgcggcggaacacccaggacgagaacatgcggaagtggttcaaggtgaccattccctatggcattaaatacgataaggcatggcttatgaacagtattcaaagtaattgttcagttcctttcacaccagtggattttcactacattcgcaacagagcctgcttttttgtccaggtggcctctgctgctagcgcactgaaggatgtcagttacaagatctacgacgatgaaaaccagaaaatctgcattttcgtgtcccacttcacagccccatattccgtgaagaacaagctaaagcctggccagatggagatgctcaaactcactatgaacaagcgatataatgtgagccagcaggcccttgatcttcaaaatctgcgattcgacccagaccttatgggtagagacattgatatcattctcaacaggcgtaactgcatggcagcgaccctcaaaatcaccgagagaaattttccagagttgctctctttgaatctatgcaacaataagctgtaccagcttgacggacttagcgacattacggagaaagccccaaaagtcaaaaccctgaatctgagcaaaaataagttggagtccgcatgggaactcgggaaagtgaaaggactgaaattagaggaactgtggctggaggggaaccccttgtgcagtacgttctcggatcaatcggcatatgtctcagccattagggattgctttccaaagctccttcggctggacggccgggaactgtctgcacccgttattgttgacatcgacagttcagaaaccatgaaaccttgcaaggagaactttactgggtctgagacactgaaacatctcgtcctgcaattcctgcagcagtccaatctctgcaagtactttaaggactcccggaatattaagatcttgaaagacccttacctccagcggaagttgttaaaacatacaaaatgtccacgtaacgtcgactctttgtctgcactccctgagacacaacatgattttacatcaatcttggtggacatgtggtatcagaccgttaacacctgctttctgcctagggcagggcccgaaagccagagcctgagacctctgtag

SEQ ID NO: 226203 - DNA, 1348 bp, Artificial Sequence
  derived and/or modified sequence
acttctgccttcacgctgccaggagaatgatggaagcatggagatgagggatgtccacaaggaccgccaactaagacacactccttatagaatccaatgcaacaggaagctagtgaaatgacatagtgaagatcaaatccatattaccatttggagaaatagaaaacctccagagagaaaaatgaggcggaacacacaagatgaaaacatgaggaaatggttcaaggtcacaattccttatgggataaagtatgacaaggcatggctaatgaattcaatccagagcaattgcagtgtccccttcactccggttgatttccactacatccgaaatcgggcatgcttctttgtccaggttgctagtgctgcctctgcattgaaggatgtcagttataagatttatgatgatgagaaccaaaagatatgtatatttgtcagtcattttactgcgccctactctgtgaagaataagttgaagccaggccaaatggagatgctaaagctgaccatgaacaaacggtacaatgtctcccagcaagctcttgatctccagaatctccgctttgacccagacttgatgggccgtgacattgatataatcctgaatcgaagaaactgcatggctgccaccctgaagatcactgaaagaaatttccctgagctgttgtctttgaacttgtgcaacaacaaactgtaccagctggatggcctttctgacattacagagaaggctcccaaagtcaagaccctgaatctctccaaaaataagctggagtcggcgtgggagttgggcaaggtgaaagggctgaagctcgaagagctatggctagaagggaacccgttgtgcagcaccttctcggaccagtctgcctatgtaagtgccatccgggattgtttccccaagttgttacgcctggacggccgagagttatccgcaccagtgattgttgacattgacagctctgagacaatgaaaccctgcaaggaaaactttactggatctgagaccctaaagcatttagtcctgcaattcctgcagcagagcaacttgtgcaagtacttcaaggatagcaggaatataaaaattctcaaagacccctacctgcagaggaagctgctaaagcacacaaaatgtccacgaaacgtggactccctcagtgcattgcctgaaactcagcatgacttcacctccatcctggtggacatgtggtaccagaccgtgaacacctgcttcctccctcgggcaggcccagagagccagagcctaagaccactctaaggactggggttggaggcctggctgaccaagaagccaaagttaacttgcaggccacaggacatagccacc

SEQ ID NO: 226204 - DNA, 1194 bp, Artificial Sequence
  derived and/or modified sequence
atgcgccgaaacacacaggacgagaatatgagaaaatggttcaaagtcactattccttacggcatcaaatacgataaagcgtggcttatgaatagcatacaaagcaactgtagcgtaccctttacccccgttgactttcactacatcaggaaccgggcttgttttttcgtgcaagtggcctccgccgcttccgccctgaaggacgttagttataagatctacgatgacgaaaaccagaagatctgtatctttgttagtcacttcacagccccttatagcgtcaagaataagctgaagcccggacaaatggaaatgctaaagctcaccatgaacaagcggtacaacgtctcacagcaggccctggacctccagaacctgcgctttgatcctgaccttatggggagggacatcgatatcatccttaataggcgaaactgcatggccgcaactttgaaaatcactgagagaaactttcctgaactgcttagcctgaatctgtgtaataacaagctgtatcagttggacggtctctctgacatcacagaaaaggcccctaaagtcaagacccttaacctgtctaagaacaaattggagagtgcctgggagctgggaaaagtgaagggcttgaagcttgaggagttatggctggaaggaaacccgctctgctcaactttttccgatcagtcagcctacgtgagtgccatccgagactgttttccaaaactgttgcggttagatggcagagagctgagcgccccagttatcgttgatattgactctagcgagaccatgaaaccttgcaaggaaaactttaccggaagtgagactctcaagcacctggttttgcaatttcttcagcagagtaatctgtgtaagtactttaaggatagccgtaacataaagattctcaaagatccatacctacagcgcaaactgttgaagcatactaagtgcccaagaaacgtcgactccttatcagcactgccagaaacccagcacgacttcacatcaatcttggttgacatgtggtaccagactgtgaacacgtgcttcttgcctagagccggacccgagtctcagaggtggtggtgcctgctatcgctgaaatggaaagacggattgagagttttgatcctgccctcctgcggcccatcttcgctacctttggcagcaatcccagtgtgcgctagctag

SEQ ID NO: 226205 - DNA, 1194 bp, Artificial Sequence
  derived and/or modified sequence
atgcgaaggaacacccaggatgaaaatatgagaaagtggttcaaagtgaccatcccatatggcatcaagtacgataaagcatggctaatgaattcgattcagtcaaattgtagcgtgccatttaccccagtggatttccactatattaggaatagagcctgtttttttgtccaggtggcctcagctgcttcagccctcaaggatgtgagttacaaaatttacgacgacgaaaaccagaagatctgcatctttgtttcccacttcacagctccgtactccgtgaagaataagctgaaaccaggacagatggagatgttaaagctcaccatgaataaaagatataacgtgagccaacaggccctcgatttacagaacttgagatttgaccccgatctgatgggcagagacatcgatatcatactcaaccgcagaaattgtatggccgctaccctgaagatcacggaaagaaattttcccgaattgctgagcctcaatctgtgcaacaataagctttaccaactggacgggctgtcagacattacggagaaagctcccaaagtcaaaactctgaatttaagcaagaataagctggaatcagcatgggaactcggaaaggttaaggggctgaagctggaggagctttggctggaagggaatcctctttgttcaaccttttccgaccagtctgcttatgtttcggctattagggattgtttcccaaagctgctcagactcgatggtcgcgaactgagcgcccctgtcatagtggatatcgattcgtctgaaacaatgaaaccttgcaaagagaattttacaggcagcgagaccctcaagcatctggtactgcaattcttgcagcaaagcaacctgtgcaaatattttaaagacagccggaatataaaaattctgaaagacccttatctgcagcggaagttgctcaagcacaccaagtgcccaaggaatgtggattctctgagcgccctgcccgaaacacagcacgattttacatctatcttagttgacatgtggtaccaaacagtcaatacttgttttctgccgcgtgctgggcctgaatcccaacgatggtggtgtctgcttagcctgaagtggaaggatggcttacgcgtgctgatcctgccaagctgcggccctagcagcctgccactggcagctattcccgtatgtgcctcctag

SEQ ID NO: 226206 - DNA, 1098 bp, Artificial Sequence
  derived and/or modified sequence
atgcgtcgaaatacacaggacgagaatatgcgaaagtggttcaaggtgactattccctacggcatcaaatatgacaaggcctggctgatgaatagcatacagtcgaattgttctgtccccttcactccagtggatttccactatattcgcaacagagcgtgtttcttcgtccaggtggcctcggcggcttccgccctcaaagacgtatcatataagatctacgatgatgagaatcaaaagatatgcatatttgtgtcgcacttcactgccccatactctgtgaaaaacaagctgaagcctgggcaaatggagatgcttaagttaacaatgaataagcgatacaacgtttctcaacaagctcttgaccttcagaaccttcgcttcgacccagacctcatgggccgtgatatcgacatcatcctgaatcgacggaactgtatggctgcaactctgaagattaccgagaggaacttccctgagctgctgtctcttaatctctgtaacaacaaactgtatcagctcgacggactttctgatatcacagaaaaggcaccaaaagtaaagacactaaacctgagcaagaacaaactagagtctgcatgggagctgggcaaagtcaagggcctcaagttggaagaactctggctcgagggcaaccctctgtgttcaacattcagcgatcagtccgcatatgtatccgcgatacgagactgcttcccaaaactgcttaggttggacggcagagagctttctgcgcctgtaatagtcgacattgattctagcgaaacaatgaaaccctgcaaggagaactttacgggttcagagaccctcaaacatctggttctccagttcctgcagcagtccaacttgtgtaagtactttaaggactccagaaatattaagatactgaaagatccctacctgcaaagaaagctgctgaagcacacaaaatgccctagaaatgtcgactccctgtctgccctgcccgagactcagcacgactttacctctattcttgtggatatgtggtaccagacggtcaacacatgtttcctgcccagggccggtcctgaatctcagtccctgcgcccactgtag

SEQ ID NO: 226207 - DNA, 1098 bp, Artificial Sequence
  derived and/or modified sequence
atgagacgaaacacccaggatgagaatatgcgcaaatggttcaaggtcactatcccatatggcatcaagtatgataaagcatggttgatgaatagtatccaatctaattgtagtgtcccgtttaccccagtggatttccactatattaggaaccgggcttgttttttcgtgcaagtcgcatctgctgcttccgctctgaaagacgtttcctataagatctatgacgacgagaatcagaagatctgtatttttgtgagtcacttcaccgcaccttactccgtgaagaataagctaaagcccggacagatggagatgcttaagctcacaatgaataaacgctacaacgttagtcaacaggccttggacctgcagaacttgagatttgacccggacttgatgggtcgtgatattgatatcatcctgaacaggcgcaactgtatggccgctacactgaaaattacggagcgcaacttccccgaactccttagcctgaatctgtgcaataataaactgtaccagcttgatggtttgagcgacatcacagagaaggcaccgaaggtgaagactcttaacctatcaaaaaataaactcgaatcagcctgggaactaggcaaagtaaaggggctgaagcttgaggagctctggctcgaaggaaacccgttgtgttcaacgtttagcgaccagagcgcttacgtgtcagcaattcgggattgttttcccaaattgctgcggctcgatggacgggagctgagtgcacctgtgatcgtggatatcgatagcagcgagactatgaaaccatgtaaggaaaatttcaccggcagtgagactctgaaacatcttgtccttcagttcttacagcaaagcaatctgtgcaaatattttaaggatagcagaaatattaagatattgaaggacccctatctgcaacgcaaactgctcaagcacaccaagtgtcctcgaaatgtggattccttgagtgccctgccggagacccagcacgatttcacctctattctagtggacatgtggtaccagacagtgaacacatgttttctgccaagggccggaccggagtcacagtctctccgacctctgtag

SEQ ID NO: 226208 - DNA, 1194 bp, Artificial Sequence
  derived and/or modified sequence
atgagaagaaacacccaggacgagaacatgagaaagtggttcaaggtgaccatcccctacggcatcaagtacgacaaggcctggctgatgaacagcatccagagcaactgcagcgtgcccttcacccccgtggacttccactacatcagaaacagagcctgcttcttcgtgcaggtggccagcgccgccagcgccctgaaggacgtgagctacaagatctacgacgacgagaaccagaagatctgcatcttcgtgagccacttcaccgccccctacagcgtgaagaacaagctgaagcccggccagatggagatgctgaagctgaccatgaacaagagatacaacgtgagccagcaggccctggacctgcagaacctgagattcgaccccgacctgatgggcagagacatcgacatcatcctgaacagaagaaactgcatggccgccaccctgaagatcaccgagagaaacttccccgagctgctgagcctgaacctgtgcaacaacaagctgtaccagctggacggcctgagcgacatcaccgagaaggcccccaaggtgaagaccctgaacctgagcaagaacaagctggagagcgcctgggagctgggcaaggtgaagggcctgaagctggaggagctgtggctggagggcaaccccctgtgcagcaccttcagcgaccagagcgcctacgtgagcgccatcagagactgcttccccaagctgctgagactggacggcagagagctgagcgcccccgtgatcgtggacatcgacagcagcgagaccatgaagccctgcaaggagaacttcaccggcagcgagaccctgaagcacctggtgctgcagttcctgcagcagagcaacctgtgcaagtacttcaaggacagcagaaacatcaagatcctgaaggacccctacctgcagagaaagctgctgaagcacaccaagtgccccagaaacgtggacagcctgagcgccctgcccgagacccagcacgacttcaccagcatcctggtggacatgtggtaccagaccgtgaacacctgcttcctgcccagagccggccccgagagccagagatggtggtgcctgctgagcctgaagtggaaggacggcctgagagtgctgatcctgcccagctgcggccccagcagcctgcccctggccgccatccccgtgtgcgccagctag

SEQ ID NO: 226209 - DNA, 1098 bp, Artificial Sequence
  derived and/or modified sequence
atgagaagaaacacccaggacgagaacatgagaaagtggttcaaggtgaccatcccctacggcatcaagtacgacaaggcctggctgatgaacagcatccagagcaactgcagcgtgcccttcacccccgtggacttccactacatcagaaacagagcctgcttcttcgtgcaggtggccagcgccgccagcgccctgaaggacgtgagctacaagatctacgacgacgagaaccagaagatctgcatcttcgtgagccacttcaccgccccctacagcgtgaagaacaagctgaagcccggccagatggagatgctgaagctgaccatgaacaagagatacaacgtgagccagcaggccctggacctgcagaacctgagattcgaccccgacctgatgggcagagacatcgacatcatcctgaacagaagaaactgcatggccgccaccctgaagatcaccgagagaaacttccccgagctgctgagcctgaacctgtgcaacaacaagctgtaccagctggacggcctgagcgacatcaccgagaaggcccccaaggtgaagaccctgaacctgagcaagaacaagctggagagcgcctgggagctgggcaaggtgaagggcctgaagctggaggagctgtggctggagggcaaccccctgtgcagcaccttcagcgaccagagcgcctacgtgagcgccatcagagactgcttccccaagctgctgagactggacggcagagagctgagcgcccccgtgatcgtggacatcgacagcagcgagaccatgaagccctgcaaggagaacttcaccggcagcgagaccctgaagcacctggtgctgcagttcctgcagcagagcaacctgtgcaagtacttcaaggacagcagaaacatcaagatcctgaaggacccctacctgcagagaaagctgctgaagcacaccaagtgccccagaaacgtggacagcctgagcgccctgcccgagacccagcacgacttcaccagcatcctggtggacatgtggtaccagaccgtgaacacctgcttcctgcccagagccggccccgagagccagagcctgagacccctgtag

SEQ ID NO: 226210 - protein, 973 aa, Artificial Sequence
  derived and/or modified sequence
MSPVRRWGSPCLFPLQLFSLCWVLSVAQSKTVRYSTFEEDAPGTVIGTLAEDLHMKVSGDTSFRLMKQFNSSLLRVREGDGQLTVGDAGLDRERLCGQAPQCVLAFDVVSFSQEQFRLVHVEVEVRDVNDHAPRFPRAQIPVEVSEGAAVGTRIPLEVPVDEDVGANGLQTVRLAEPHSPFRVELQTRADGAQCADLVLLQELDRESQAAYSLELVAQDGGRPPRSATAALSVRVLDANDHSPAFPQGAVAEVELAEDAPVGSLLLDLDAADPDEGPNGDVVFAFGARTPPEARRLFRLDPRSGRLTLAGPVDYERQDTYELDVRAQDRGPGPRAATCKVIVRIRDVNDNAPDIAITPLAAPGAPATSPFAAAAAAAALGGADASSPAGAGTPEAGATSLVPEGAARESLVALVSTSDRDSGANGQVRCALYGHEHFRLQPAYAGSYLVVTAASLDRERIAEYNLTLVAEDRGAPPLRTVRPYTVRVGDENDNAPLFTRPVYEVSVRENNPPGAYLATVAARDRDLGRNGQVTYRLLEAEVGRAGGAVSTYVSVDPATGAIYALRSFDYETLRQLDVRIQASDGGSPQLSSSALVQVRVLDQNDHAPVLVHPAPANGSLEVAVPGRTAKDTVVARVQARDADEGANGELAFELQQQEPREAFAIGRRTGEILLTGDLSQEPPGRVFRALLVISDGGRPPLTTTATVSFVVTAGGGRGPAAPASAGSPERSRPPGSRLGVSGSVLQWDTPLIVIIVLAGSCTLLLAAIIAIATTCNRRKKEPYGASPGFGKEPAPPVAVWKGHSFNTISGREAEKFSGKDSGKGDSDFNDSDSDISGDALKKDLINHMQSGLWACTAECKILGHSDRCWSPSCSGPNAHPSPHPPAQMSTFCKSTSLPRDPLRRDNYYQAQLPKTVGLQSVYEKVLHRDYDRTVTLLSPPRPGRLPDLQEIGVPLYQSPPGRYLSPKKGANENV

SEQ ID NO: 226211 - DNA, 2922 bp, Artificial Sequence
  derived and/or modified sequence
atgagccccgtgaggcggtggggctcgccttgcctgtttccattacagcttttctccctgtgttgggtgttatccgtggcccagtctaagacagtgcgttactctacttttgaggaagacgcacccggtacagtgatagggactcttgctgaagacctccatatgaaggtttcgggagatacgtcttttcgcctgatgaaacagttcaacagctcgttgttgcgtgtgagggaaggtgacgggcaacttacagtgggggacgcggggctggatagagaaaggttatgtggtcaggcacctcagtgtgtgctggccttcgatgttgtctcgttcagccaggagcagttcagactggtacatgtggaagtcgaggtccgggacgtgaatgaccacgcacccaggtttccgcgtgcacaaatccctgtggaggtgagcgaaggcgctgccgtgggaacacgcatcccgctggaagtacccgtggacgaggatgtgggagccaacggattacagaccgttcgcttagcagagccacattctccctttagagtggagctgcagacaagggctgatggagcccaatgcgccgatctggttctgcttcaagagctcgacagagagtctcaggccgcgtactctctcgaactggtggcccaggacggaggaaggcctccaagaagtgccacagccgccctaagtgtgcgcgtccttgacgccaatgaccacagccctgcatttccacagggcgccgtggcggaagtggaactagccgaggacgcaccggttggctctctgttgctcgacttggacgcagcagatccagacgaaggacccaacggggacgtcgtgttcgcgtttggagcacggacgcctcctgaggcccggagattgtttagactcgaccccaggagcggacgacttactttggcgggcccggtggattatgagcgccaagacacgtacgagctggacgtcagagcgcaggacagaggcccaggaccaagagccgcgacatgtaaggtaattgtgagaatcagagatgtgaatgacaacgctcctgatatcgccatcactcccttagccgctccaggagccccagcaacttctccctttgccgccgctgccgcggctgccgccctgggcggggcagacgcctcttctcctgcaggcgccggaaccccagaagctggagcgacctcgttagttcccgaaggggctgcccgcgagtcactggtggctctggtgagcacgtcagatagggactccggcgctaacgggcaggttaggtgcgcactatatgggcacgagcacttccgtctacagcccgcctacgcggggtcttatttagtggtgactgcagccagcctggaccgcgaacggatcgctgaatataaccttactttggtcgccgaggacagaggagccccgcctctgagaacggtgcgaccctacaccgtccgggttggggatgagaatgataacgcccctctcttcacccgccctgtctacgaggtctctgtgagggaaaataaccctcctggcgcttacttagctacggtagccgccagggaccgggacctgggccgcaatggacaggtgacctacaggctccttgaagccgaagttggccgggcagggggggcggtgagcacttatgtctccgtcgatcccgctacaggggccatatacgcactgaggagtttcgattacgaaacgttgcgtcagctggacgtcaggattcaggcttcagatggaggatcacctcagctgagctccagtgcactggtacaggtcagggtccttgatcaaaatgaccacgcccctgtgttagtgcatcccgctcccgcaaacggctccttggaggtggcggtacctggccgaaccgctaaagacacggtggttgcaagggtccaagcccgcgatgccgacgagggcgccaacggggaactggcctttgaactgcagcagcaagagccaagggaagctttcgcgattggacgccgtacgggtgagatattgctgactggtgatttaagccaggagccacccggtagggtgttccgtgccctgctggtcatctccgacggaggccggcctccattgaccactactgctacagtgtcgttcgtcgttaccgccggtgggggtagggggccagctgccccagcttctgccggatcccctgagcggagtcgccccccaggttcgcgccttggtgtgtctggaagcgtcttacaatgggatacacctttgattgttatcattgtgctggctggctcctgcaccctgttgttggcagcaataatcgctattgctacaacctgcaacaggcggaagaaggagccctatggcgcaagcccgggattcggcaaggagcccgctccacctgtcgctgtgtggaagggtcatagctttaatactatctcgggacgcgaggctgagaagttttccggcaaggacagcggtaaaggggattcagacttcaatgattctgacagtgacatttccggcgacgctcttaaaaaggacttgattaaccatatgcagtcaggactgtgggcttgtacagccgagtgcaagatccttgggcacagtgatcggtgttggagtccttcttgcagcggacccaatgcacacccttctccccaccctccggcccagatgagtactttctgcaaatcaactagcctaccgagagacccattgcggcgcgataattattatcaagctcagctccccaaaacggtgggcttacaatccgtctacgagaaagtacttcaccgggactacgataggactgtcactctgctcagccccccaagaccgggacggctgcctgatctccaagagattggcgtgcctttataccagtccccccctggcaggtaccttagtcccaaaaagggagcaaacgagaatgtatag

SEQ ID NO: 226212 - DNA, 2922 bp, Artificial Sequence
  derived and/or modified sequence
atgagccctgtgcggcgctggggcagcccctgcctcttccccctgcagctgttcagcctgtgctgggtgctgtctgtggcccagagcaagacagtgcgctacagcacctttgaagaagatgcccctggcaccgtcatcggcaccctggccgaggacctgcacatgaaggtgtctggggacaccagcttccggctgatgaagcagttcaacagcagcctgctgcgggtgcgggagggagatggccagctgactgtgggagatgctggcctggaccgggagcggctgtgtggccaggccccccagtgtgtgctggcctttgatgtggtgtccttcagccaggagcagttccggctggtgcacgtggaggtggaggtgagagatgtgaatgaccacgccccccgcttcccccgggcccagatccctgtggaggtgtctgagggcgctgctgtgggcacccgcatccccctggaggtgcctgtggatgaagatgtgggcgccaacggcctgcagacagtgcggctggccgagccccacagccccttccgggtggagctgcagaccagggcagatggagcccagtgtgccgacctggtgctgctgcaggagctggaccgggagagccaggccgcctacagcctggagctggtggcccaggacggcggccggcccccaagaagtgccacagctgccctgtctgtgcgggtgctggatgccaatgaccacagccctgccttcccccagggcgctgtggccgaggtggagctggctgaagatgcccctgtgggcagcctgctgctggacctggatgctgctgaccctgatgagggccccaatggagatgtggtgtttgcctttggagcccggaccccacctgaggcccggcggctcttccggctggaccccaggagcggccgcctgaccctggccggccctgtggactatgaaaggcaggacacctatgagctggatgtgcgggcccaggaccggggccctggccccagggctgccacctgcaaggtgattgtgcgcatcagagatgtgaatgacaatgccccagacatcgccatcacccccctggccgcccctggggccccagccaccagcccctttgctgctgctgctgctgctgctgccctgggcggcgcagatgccagcagccctgctggggccggcaccccagaggccggggccaccagcctggtgcctgagggcgccgcccgggagagcctggtggccctggtgtccaccagtgaccgggacagcggggccaacggccaggtgcgctgtgccctgtatggccacgagcacttccggctgcagcctgcctatgccggcagctacctggtggtgacagctgccagcctggaccgggagagaattgctgagtacaacctgaccctggtggccgaggacagaggagccccacccctgaggacagtgcggccctacacagtgcgggtgggagatgaaaatgacaatgcccccctcttcaccaggcctgtgtatgaggtgtctgtgcgggagaacaaccccccaggggcctacctggccaccgtggccgcccgggaccgggacctgggcagaaatggccaggtgacctaccgcctgctggaggccgaggtgggccgggccggcggcgctgtgtccacctacgtgtctgtggaccctgccaccggggccatctatgccctgcggagctttgattatgagaccctgcggcagctggatgtgcgcatccaggccagtgatggcggcagcccccagctgagcagcagcgccctggtgcaggtgcgggtgctggaccagaatgaccacgcccctgtgctggtgcacccagccccagccaacggcagcctggaggtggccgtgcccggccgcacagccaaggacacagtggtggcccgggtgcaggccagagatgctgatgagggcgccaacggggagctggcctttgagctgcagcagcaggagccccgggaggcctttgccatcggccgcaggactggagagatcctgctgaccggggacctgagccaggagcccccaggccgggtcttccgggccctgctggtgatcagtgatggcggccggccccccctgaccaccacagccaccgtgtcctttgtggtgacagctgggggcggccggggccctgctgccccagccagcgctggcagccctgagaggagccggcccccaggcagccggctgggcgtgtctggctctgtgctgcagtgggacacccccctgattgtcatcatcgtgctggccggcagctgcaccctgctgctggccgccatcatcgccatcgccaccacctgcaacagaaggaagaaggagccctacggggccagccctggctttgggaaggagcccgcccctcctgtggccgtgtggaagggccacagcttcaacaccatcagcggccgggaggccgagaagttcagcggcaaggacagcggcaagggggacagcgacttcaatgacagcgacagcgacatctctggagatgccctgaagaaggacctgatcaaccacatgcagagcggcctgtgggcctgcacagctgagtgcaagatcctgggccacagcgaccgctgctggagccccagctgcagcggccccaatgcccaccccagcccccaccccccagcccagatgagcaccttctgcaagagcaccagcctgccccgggaccccctgcggcgggacaactactaccaggcccagctgcccaagacagtgggcctgcagagcgtgtatgagaaggtgctgcaccgggactatgacagaacagtgaccctgctgagcccccccaggcctggccgcctgcctgacctgcaggagattggagtgcccctgtaccagagccccccaggccgctacctgagccccaagaagggggccaatgaaaatgtgtag

SEQ ID NO: 226213 - DNA, 2922 bp, Artificial Sequence
  derived and/or modified sequence
atgagccccgtgcggcggtggggcagcccctgcctgttccccctgcagctcttctccctttgctgggtcctgagcgtcgcccaaagcaaaacggtgcgctacagcacatttgaggaggacgcgccgggcaccgtaataggaacgctggccgaggatctgcacatgaaagtgtccggcgacacttctttcaggcttatgaagcagttcaatagttctttactccgagtccgcgagggcgacggacagcttactgtgggggacgccggtcttgatcgggagaggctgtgcgggcaggccccacagtgcgttctggcatttgatgtcgtgtccttcagtcaggagcagtttagactggttcatgttgaggtggaggtgagagacgttaacgaccatgccccccgttttccccgggctcaaatacccgtcgaggtaagcgagggcgccgctgtgggtacacgtatacccctagaggtgcctgtggacgaagacgttggggcaaatggtctgcaaaccgttagactggcggaaccacactctccattccgcgtggagctccaaacccgcgctgacggcgcgcagtgtgccgatctcgtgctgctgcaggagctcgacagagagtcacaggccgcttactccctggaattggttgctcaggacgggggccgccccccacggtccgccacggccgctctcagtgtgagggtgctcgacgctaacgatcattctccagcattcccacagggtgccgtggcggaggtggaattagctgaggatgccccagtcggatctctgctccttgatttggacgccgctgatccagatgagggtcctaatggagatgtggtgtttgcgtttggagcgcggacacctcccgaagctagacgcctattccgcctggacccacggagcggacggctcactctggctggccctgttgattacgaacggcaggatacgtatgagctggacgtgagggcacaagaccgtggccccggaccgcgagcagcaacatgcaaggtcattgtgcggatccgcgatgtgaatgacaatgctccagacatagccataacacccttggcagcacctggggcccctgcaacaagtccctttgccgcagctgccgccgccgctgctttggggggcgctgatgccagttctcccgctggcgcaggtacccctgaagctggagctacatctctggtgccagaaggagcagcaagagaaagcctcgttgcccttgtgtcaacctcagatagagactccggggcaaatggtcaagtgaggtgtgcactttacggccatgaacactttcggctacagcccgcctatgcaggttcatatctggtcgtgactgcggcttctctagaccgcgagcgaatcgcggagtataacctcacactcgttgcagaggatagaggcgctcctcctctgcggacagtgcgcccgtataccgtccgcgtgggtgatgagaacgacaacgctcctctcttcactcgcccagtgtacgaagtgtcagtcagggaaaataaccccccgggggcctacctggcgaccgtggctgccagagatcgcgacctgggccgaaacgggcaggttacctatagacttctcgaggccgaggtcggtcgcgcggggggcgccgtcagcacttatgttagcgtggatcctgctaccggtgccatctacgcgctgaggagctttgactacgaaacgctccgccagctcgacgtccggatccaagcaagcgatggtgggagtccacagttatcatcctctgcccttgtccaggttagagttctggaccagaatgatcacgctcctgtgctggttcacccagcacccgccaacggcagcttggaggttgccgtgcccggaagaactgctaaggacaccgttgtggcccgcgtgcaggcacgagatgcagacgaaggcgctaacggagagctggcctttgagctgcagcaacaggaaccccgcgaagcctttgccatcggtaggaggaccggagaaatcttgctgacgggtgaccttagccaagaaccgccaggacgagtgttccgggccctgctggttatttcggacggcggcaggccaccacttactaccacagcaactgtttctttcgtggtgactgccgggggtgggaggggtcctgcggctcccgcatccgctggttctcctgagaggagtcggccccctggttcaagattaggtgtcagtggctccgtgctgcaatgggatacccctctgatcgtaatcattgtgctcgcaggcagttgtaccctgttattggcggccattatcgccattgccaccacttgtaacagacgcaagaaggagccttatggcgctagtccaggatttggtaaagagccagctccacccgtcgccgtgtggaaagggcatagctttaacacaattagcggccgagaggccgagaagttttctggcaaggactcaggcaaaggagatagtgattttaacgacagcgactcagacatttccggggacgcactcaagaaagatttaatcaaccatatgcagtccgggctgtgggcttgcaccgccgagtgcaaaatcttaggacatagcgatcggtgctggagtccttcatgttctgggccaaacgcccacccttcgccacacccacctgcccagatgtccaccttttgcaaatctactagtctcccgcgggaccctctgcgccgcgataactattaccaggctcagctgcctaaaaccgtgggactgcaatccgtgtacgaaaaggtgttacaccgcgactacgacaggactgtcacgttgctgtcccccccccgccccggtcggctccccgatttacaagagataggggttccactgtatcagtcaccaccaggtcgctacttgagtcctaaaaagggagccaacgagaatgtgtag

SEQ ID NO: 226214 - DNA, 2922 bp, Artificial Sequence
  derived and/or modified sequence
atgtctccggtccggcgatggggatccccgtgcctgtttccattgcagttgttctccctctgctgggttctctcagtcgctcagagcaagactgtgcggtactctacttttgaggaggatgcacctggaactgttatcggaacactggccgaggatctgcacatgaaagtctcgggggatacctccttcagactcatgaaacagttcaattcatctctgcttcgggttagagagggagatggccagttaactgtgggggatgccggactcgaccgtgagcggctgtgcggtcaagcaccacagtgtgttcttgcttttgacgtagtgtccttttcgcaggagcagtttaggctggtacatgtcgaggtggaagttcgcgatgtgaatgatcacgcaccacgcttccccagggcccaaatcccggtggaggtctctgagggagccgctgtaggtactagaatccccctggaagtacccgtggacgaggatgtcggggctaacggattgcagaccgtccggctagcagaacctcattcccctttcagagtggaactgcagacccgggcagatggggcacagtgtgctgacctggttctgcttcaagagctggacagagaaagtcaggccgcttacagcctggagctggtagcccaagatgggggacgcccacctagatctgctacagcagcccttagtgtccgggtgctggatgccaacgatcatagtcctgcctttcctcagggggcagtagcagaggtggaattagccgaggatgccccagtggggagcttactgctcgacctcgacgccgctgatcccgacgagggacccaatggcgatgttgtatttgcattcggagccagaacaccccctgaagccagacgtctctttcgcctggatcctaggtcaggacgcctgactctggcgggtccagtggactacgagaggcaggatacatacgagctggacgttagggcgcaggaccggggacccggtcctcgcgcagccacctgtaaagtcattgtgagaattcgggacgttaacgacaatgctcctgatatcgcgatcactccgctggctgccccaggggctccagcgacctcacccttcgccgctgcagccgcagctgcggcattaggaggagctgacgctagctctccagcaggagcgggaacacctgaagccggagcaacctctctggtcccggaaggagcagccagggaatccctcgttgccctggtgagtacatctgatcgtgattctggggcaaacggccaggtcaggtgtgctctgtatggacacgagcattttcgactgcagcctgcctacgccggaagttatctggtggtgaccgccgctagcctggatcgggagcgcatcgcagaatacaacctaactctggtagccgaggacaggggggcaccccctctgcggaccgtgcggccatacactgtacgggtgggagacgagaatgataatgcgccactgttcacgcgaccggtatacgaagtaagtgtgcgcgagaacaacccgccaggagcttatcttgccacagtagcggctagagatcgagaccttggaagaaacgggcaggtaacctatagactcctggaggccgaggtcgggagagcaggtggggctgtgagtacgtacgtgtccgtcgacccggctacaggtgctatttacgctctaagatccttcgactacgagacacttaggcaactggacgtacggatacaggccagtgacggcggaagtccccagctctcaagcagcgcactagtccaggtccgggttctcgaccagaacgaccacgcccctgtccttgtccaccccgcacccgctaacggttccctggaggtcgcagtgcccggtagaacggccaaagatactgtggtggcgagggttcaggcccgagacgccgacgaaggagccaacggggagctcgccttcgaactccagcagcaagaaccacgggaggcttttgctataggccgtaggaccggagagatcttgttgacgggcgatctgtctcaagagccgcctggcagagtttttagggcactgctggtgattagcgatggtggcagaccccctctgaccacaactgctacggtgtctttcgttgtcactgcgggaggcggtcgtggaccagctgctccggcatcagctggatctcctgaacggtcacgtccccctggctccagattaggagtttcgggctctgtactgcaatgggatactcctctgattgttattatcgttctggccggttcctgtactctgcttctggcagccatcatagcgatcgcaacaacttgcaaccggcgtaagaaagagccctacggggctagcccaggcttcggtaaggagccggctccccctgtggctgtctggaagggtcattctttcaacacaatctctgggagggaggccgagaagtttagtggaaaggatagcggcaagggggactccgactttaacgatagtgacagcgacattagcggtgatgcactaaagaaagatctgattaatcacatgcagtctgggttgtgggcctgtacagctgagtgtaaaatcctgggccacagtgaccggtgttggagcccctcatgctctggccctaacgcacacccaagcccccacccacccgctcagatgtccaccttttgcaaatccaccagcctgcctcgggatccgctgcgacgggacaattattaccaggctcagctgccaaagactgtgggcctacagagcgtttatgagaaggttcttcaccgggactacgacagaaccgtaactcttctgtctccaccgagacccggacgccttcctgaccttcaggagatcggagtcccactgtaccagagccccccaggcaggtacctgtctccaaagaaaggagcaaatgagaacgtgtag

SEQ ID NO: 226215 - DNA, 3570 bp, Artificial Sequence
  derived and/or modified sequence
gactgacgcccgacctggaaaccagagaagacttccttagcctttcggatcgcacttgaggctggaggcatgagtcctgtgaggcgttggggcagcccctgccttttccccttgcagctcttcagcctctgctgggtgctctcagtggcccagagcaaaacagtccgatacagcaccttcgaggaggatgcccccggcacggtcatcgggaccctggccgaggacctgcatatgaaagtatcgggtgacacaagcttccgcctgatgaagcaattcaacagctctctgctccgggtgcgcgaaggcgacgggcagctgaccgtcggggacgccggcctggaccgcgagcggctgtgtggccaggccccgcagtgcgtgctggccttcgatgtggtcagcttctcgcaggagcagttccggctggtgcacgtggaggtagaggtgagggacgtcaacgaccacgcgccgcgcttccccagggcccagatcccggtagaggtgtccgagggtgcggcagtgggcacgcgcatccccttggaggtgccggtggacgaggacgtgggcgccaacgggctgcagaccgtgcgcctggccgagccgcacagcccctttcgcgtggagctgcagacgcgagcggacggcgctcagtgcgcagacctggtgctgctgcaggagctggaccgcgagagccaggccgcctacagcctggagctggtggcccaggacggcggccgcccgccgcgctccgccacggctgccctcagcgtgcgcgtcctggatgcgaatgaccacagcccggccttcccgcagggcgccgtggccgaagtggagctggcggaagacgcgcccgtgggctccctgcttctcgacctggacgcagccgaccccgacgagggacctaacggcgacgtggtgttcgcatttggcgcccgcaccccgccggaggcgcgccgcctctttcggcttgacccgcgatcaggccgcctcaccctggccgggcccgtggactacgagcgtcaggacacctacgagctggacgtgcgggcgcaggaccgcggacccgggccccgcgctgccacctgcaaggtcatcgtgcgcatccgagacgtcaatgacaacgcacccgacatcgccatcaccccgctggccgccccaggcgcgccggcaacctcacccttcgccgctgccgccgccgccgctgcactcgggggagcggacgctagctcgccggcgggagccgggacgccggaggctggtgccacttcgctggtgccggagggggcggcgcgcgagagcctggtggccctggtcagcacctcggacagggactcgggcgccaacgggcaagtgcgctgcgccctctatgggcacgagcacttccggctgcagccggcctacgcgggcagctacctggtggtgaccgcggcgtcgctggaccgcgaacgcatcgccgagtacaacttgacgctggtggccgaggatcgcggcgcgcccccgctgcgcacagtgcggccctacacggtgcgtgtgggcgacgagaacgacaacgcgccgctcttcacgcggccggtctatgaggtgtcggtgcgcgagaacaacccgccaggcgcctacctggccacggtggccgcccgcgaccgggacctgggccgcaacggccaggtcacctaccggctgctggaggccgaggtgggccgcgccgggggcgccgtgtccacttatgtctcggtggacccagctaccggagccatctacgcgctgcgcagcttcgactatgagacgctgcgccaactcgacgttcgcatccaagctagcgacggcggctcccctcagctttccagcagcgccctagtgcaagtgcgcgtgctggaccagaacgaccatgcgccagtcctggtgcacccggcgccagccaatggctccctagaagtggcggtgcctgggcgcaccgcaaaggacacggttgtggcccgtgtgcaggcccgggatgcagacgagggagccaacggggagctggcgttcgagctgcagcagcaggagccgcgcgaagccttcgccatcggccgccgcacgggggagatactgctcaccggcgacctctcgcaggagccacccggtcgcgtgttcagggcgctcctggtcatatccgacggcggccgtcccccgctcaccaccaccgcaactgtcagcttcgtggtaacagcagggggcgggcgtgggccggctgcgcctgccagtgcaggaagcccggagcgttcccgcccgcctggctctcggctcggggtgtccgggtcggtgctgcaatgggacacgccgctgatcgtcatcatcgtgctggccgggagctgcacgctgctgctggccgccatcatcgccatcgccaccacctgcaaccgccgcaagaaggagccctacggtgcctccccgggttttggaaaggagccggcgccccctgtggcggtgtggaaaggacactccttcaacaccatttctggcagagaagcagagaagttcagcggcaaagacagcggtaaaggggacagtgatttcaacgacagcgattccgacatcagcggggacgctctgaaaaaggatctcatcaaccacatgcagagtggactgtgggcgtgcaccgctgagtgtaagatcctgggccactctgaccgctgctggagcccatcctgcagcgggcccaacgcacatccatcgcctcacccaccagcccagatgtcaaccttctgtaagagcacgtcactgcctcgggatcctctgcgcagggacaattactaccaggcccagctgcccaagacagtggggctgcagagcgtctatgagaaagtactgcacagagactatgacaggacagtcactctgctctcccctccccgtccagggaggctcccagacctgcaggagattggagtacccctctaccagtcccctcctggcaggtacctgtccccgaagaagggagccaatgaaaatgtgtaatcccatgctgcatgtcttcacacatatacaggtcactccgagaagcccctaagttattgaccggtttcagtgttgtatatataaatatgcaagatgtgccttacaatgaagttgttggaagctatttccaatcacattggtactgtttggtatttgcaaacaaaaatgtagttaatgtaatttttatgaaatgtgtgcagtatttaatttttcttatgctattgactttgatttcaattgcggcttgccattttcttagtgtttttaacctgtacattgtgtaatgtaatgtttgtatataatgaaattttgttatatttttatataataaaagctaaagtggaagttattgccaaaggaactgtctgtaagacaaaaaacaaaacatgttggaattacttaattgaaatttatctttcacctgaaacaacctagtgtttgagaaattttgccttgccaagtataacttgtatatcttgactctgtggtagatttcaagttcaatgttatttaattacatttggttttccgtaaaccgtgtcacttataagcacagtaataaaagatttgtcatgtgtt

SEQ ID NO: 226216 - DNA, 2922 bp, Artificial Sequence
  derived and/or modified sequence
atgagccccgtgagaagatggggcagcccctgcctgttccccctgcagctgttcagcctgtgctgggtgctgagcgtggcccagagcaagaccgtgagatacagcaccttcgaggaggacgcccccggcaccgtgatcggcaccctggccgaggacctgcacatgaaggtgagcggcgacaccagcttcagactgatgaagcagttcaacagcagcctgctgagagtgagagagggcgacggccagctgaccgtgggcgacgccggcctggacagagagagactgtgcggccaggccccccagtgcgtgctggccttcgacgtggtgagcttcagccaggagcagttcagactggtgcacgtggaggtggaggtgagagacgtgaacgaccacgcccccagattccccagagcccagatccccgtggaggtgagcgagggcgccgccgtgggcaccagaatccccctggaggtgcccgtggacgaggacgtgggcgccaacggcctgcagaccgtgagactggccgagccccacagccccttcagagtggagctgcagaccagagccgacggcgcccagtgcgccgacctggtgctgctgcaggagctggacagagagagccaggccgcctacagcctggagctggtggcccaggacggcggcagaccccccagaagcgccaccgccgccctgagcgtgagagtgctggacgccaacgaccacagccccgccttcccccagggcgccgtggccgaggtggagctggccgaggacgcccccgtgggcagcctgctgctggacctggacgccgccgaccccgacgagggccccaacggcgacgtggtgttcgccttcggcgccagaaccccccccgaggccagaagactgttcagactggaccccagaagcggcagactgaccctggccggccccgtggactacgagagacaggacacctacgagctggacgtgagagcccaggacagaggccccggccccagagccgccacctgcaaggtgatcgtgagaatcagagacgtgaacgacaacgcccccgacatcgccatcacccccctggccgcccccggcgcccccgccaccagccccttcgccgccgccgccgccgccgccgccctgggcggcgccgacgccagcagccccgccggcgccggcacccccgaggccggcgccaccagcctggtgcccgagggcgccgccagagagagcctggtggccctggtgagcaccagcgacagagacagcggcgccaacggccaggtgagatgcgccctgtacggccacgagcacttcagactgcagcccgcctacgccggcagctacctggtggtgaccgccgccagcctggacagagagagaatcgccgagtacaacctgaccctggtggccgaggacagaggcgccccccccctgagaaccgtgagaccctacaccgtgagagtgggcgacgagaacgacaacgcccccctgttcaccagacccgtgtacgaggtgagcgtgagagagaacaacccccccggcgcctacctggccaccgtggccgccagagacagagacctgggcagaaacggccaggtgacctacagactgctggaggccgaggtgggcagagccggcggcgccgtgagcacctacgtgagcgtggaccccgccaccggcgccatctacgccctgagaagcttcgactacgagaccctgagacagctggacgtgagaatccaggccagcgacggcggcagcccccagctgagcagcagcgccctggtgcaggtgagagtgctggaccagaacgaccacgcccccgtgctggtgcaccccgcccccgccaacggcagcctggaggtggccgtgcccggcagaaccgccaaggacaccgtggtggccagagtgcaggccagagacgccgacgagggcgccaacggcgagctggccttcgagctgcagcagcaggagcccagagaggccttcgccatcggcagaagaaccggcgagatcctgctgaccggcgacctgagccaggagccccccggcagagtgttcagagccctgctggtgatcagcgacggcggcagaccccccctgaccaccaccgccaccgtgagcttcgtggtgaccgccggcggcggcagaggccccgccgcccccgccagcgccggcagccccgagagaagcagaccccccggcagcagactgggcgtgagcggcagcgtgctgcagtgggacacccccctgatcgtgatcatcgtgctggccggcagctgcaccctgctgctggccgccatcatcgccatcgccaccacctgcaacagaagaaagaaggagccctacggcgccagccccggcttcggcaaggagcccgccccccccgtggccgtgtggaagggccacagcttcaacaccatcagcggcagagaggccgagaagttcagcggcaaggacagcggcaagggcgacagcgacttcaacgacagcgacagcgacatcagcggcgacgccctgaagaaggacctgatcaaccacatgcagagcggcctgtgggcctgcaccgccgagtgcaagatcctgggccacagcgacagatgctggagccccagctgcagcggccccaacgcccaccccagcccccacccccccgcccagatgagcaccttctgcaagagcaccagcctgcccagagaccccctgagaagagacaactactaccaggcccagctgcccaagaccgtgggcctgcagagcgtgtacgagaaggtgctgcacagagactacgacagaaccgtgaccctgctgagcccccccagacccggcagactgcccgacctgcaggagatcggcgtgcccctgtaccagagcccccccggcagatacctgagccccaagaagggcgccaacgagaacgtgtag

SEQ ID NO: 226217 - protein, 392 aa, Artificial Sequence
  derived and/or modified sequence
MVARVGLLLRALQLLLWGHLDAQPAERGGQELRKEAEAFLEKYGYLNEQVPKAPTSTRFSDAIRAFQWVSQLPVSGVLDRATLRQMTRPRCGVTDTNSYAAWAERISDLFARHRTKMRRKKRFAKQGNKWYKQHLSYRLVNWPEHPEPAVRGAVRAAFQLWSNVSALEFWEAPATGPADIRLTFFQGDHNDGLGNAFDGPGGALAHAFLPRRGEAHFDQDERWSLSRRRGRNLFVVLAHEIGHTLGLTHSPAPRALMAPYYKRLGRDALLSWDDVLAVQSLYGKPLGGSVAVQLPGKLFTDFETWDSYSPQGRRPETQGPKYCHSSFDAITVDRQQQLYIFKGSHFWEVAADGNVSEPRPLQERWVGLPPNIEAAAVSLNDGDFYFFKVQSV

SEQ ID NO: 226218 - protein, 225 aa, Artificial Sequence
  derived and/or modified sequence
MVARVGLLLRALQLLLWGHLDAQPAERGGQELRKEAEAFLEKYGYLNEQVPKAPTSTRFSDAIRAFQWVSQLPVSGVLDRATLRQMTRPRCGVTDTNSYAAWAERISDLFARHRTKMRRKKRFAKQGNKWYKQHLSYRLVNWPEHLRSRQFGAPCAPPSSCGATSQRWSSGRPQPQAPLTSGSPSSKGTTTMGWAMPLMAQGAPWRTPSCPAAAKRTSTKMSAGP

SEQ ID NO: 226219 - DNA, 1179 bp, Artificial Sequence
  derived and/or modified sequence
atggtggccagagtgggcctgctgctgagagccctgcagctgctgctgtggggccacctggacgcccagcccgccgagagaggcggccaggagctgagaaaggaggccgaggccttcctggagaagtacggctacctgaacgagcaggtgcccaaggcccccaccagcaccagattcagcgacgccatcagagccttccagtgggtgagccagctgcccgtgagcggcgtgctggacagagccaccctgagacagatgaccagacccagatgcggcgtgaccgacaccaacagctacgccgcctgggccgagagaatcagcgacctgttcgccagacacagaaccaagatgagaagaaagaagagattcgccaagcagggcaacaagtggtacaagcagcacctgagctacagactggtgaactggcccgagcaccccgagcccgccgtgagaggcgccgtgagagccgccttccagctgtggagcaacgtgagcgccctggagttctgggaggcccccgccaccggccccgccgacatcagactgaccttcttccagggcgaccacaacgacggcctgggcaacgccttcgacggccccggcggcgccctggcccacgccttcctgcccagaagaggcgaggcccacttcgaccaggacgagagatggagcctgagcagaagaagaggcagaaacctgttcgtggtgctggcccacgagatcggccacaccctgggcctgacccacagccccgcccccagagccctgatggccccctactacaagagactgggcagagacgccctgctgagctgggacgacgtgctggccgtgcagagcctgtacggcaagcccctgggcggcagcgtggccgtgcagctgcccggcaagctgttcaccgacttcgagacctgggacagctacagcccccagggcagaagacccgagacccagggccccaagtactgccacagcagcttcgacgccatcaccgtggacagacagcagcagctgtacatcttcaagggcagccacttctgggaggtggccgccgacggcaacgtgagcgagcccagacccctgcaggagagatgggtgggcctgccccccaacatcgaggccgccgccgtgagcctgaacgacggcgacttctacttcttcaaggtgcagagcgtgtag

SEQ ID NO: 226220 - DNA, 1179 bp, Artificial Sequence
  derived and/or modified sequence
atggtcgcgagggtgggattattgctcagggccctccagttgctgctgtggggccatctcgatgcacagccggcggaacgcggaggccaagaactacgaaaggaggctgaagcttttctggaaaagtacggatacttgaatgagcaagtccccaaggccccgacaagcactcgtttctccgacgccatccgagccttccagtgggtgagccaactgcccgtgtctggagtgctggaccgcgcaacactgcgacaaatgactcgcccccggtgtggcgtgacagacaccaacagttacgccgcctgggctgagcgtatctctgacctgttcgcgcgtcaccggactaaaatgcgacgtaaaaagaggtttgctaagcaaggcaataagtggtacaagcaacacctgtcatataggttagtgaactggcccgaacatcctgagcccgccgtgcggggcgcagtgcgcgcagcctttcagctatggtcaaatgtgtcagccctcgagttttgggaagcaccggcaaccgggcccgccgacattaggctgaccttcttccagggcgatcacaacgatggactggggaatgcattcgatggacccggtggtgctcttgctcatgcgttcctccctagacgcggtgaggcccatttcgaccaggacgagagatggagtctgtcccggcgccgtgggagaaacctgttcgtggtgctcgctcacgaaattggtcataccttgggtctgacacactctcctgcccccagggccttgatggctccttactataagcggctgggtagagatgccctgctctcctgggatgatgttctcgcagtgcagtccctctatggtaaaccattgggcggctcggtggccgtgcagcttcccgggaaactgttcaccgatttcgagacctgggactcttatagcccacagggacggcgccccgaaacacagggaccaaagtactgtcacagcagttttgacgcaatcaccgtagaccgccaacaacagctgtacatctttaagggatcccatttctgggaggtcgctgcggatggtaacgtgtcggaacccaggccacttcaggagagatgggttggcctgcccccaaatatcgaggccgcagcggtcagtttgaacgatggtgatttctattttttcaaagtgcaatccgtgtag

SEQ ID NO: 226221 - DNA, 1179 bp, Artificial Sequence
  derived and/or modified sequence
atggtggcccgggtgggcctgctgctgcgggccctgcagctgctgctgtggggccacctggatgcccagcctgctgagcggggcggccaggagctgaggaaggaggccgaggccttcctggagaagtatggctacctgaatgagcaggtgcccaaggcccccaccagcacccgcttcagtgatgccatccgggccttccagtgggtgtcccagctgcctgtgtctggagtgctggaccgggccaccctgcggcagatgacccggccccgctgtggggtgacagacaccaacagctatgctgcctgggccgagcgcatcagtgacctgtttgcccggcacaggaccaagatgaggaggaagaagagatttgccaagcagggcaacaagtggtacaagcagcacctgagctaccgcctggtgaactggccagagcaccctgagcctgctgtgagaggagctgtgcgggccgccttccagctgtggagcaatgtgtctgccctggagttctgggaggccccagccactggacctgctgacatccggctgaccttcttccagggcgaccacaatgatggcctgggcaatgcctttgatggccctgggggcgccctggcccacgccttcctgcccaggagaggagaggcccactttgaccaggatgagcgctggagcctgagcagaagaagaggaagaaacctgtttgtggtgctggcccatgaaattggccacaccctgggcctgacccacagccctgccccccgggccctgatggccccctactacaagaggctgggcagagatgccctgctgtcctgggatgatgtgctggccgtgcagagcctgtatggcaagcccctgggcggctctgtggccgtgcagctgcccgggaagctgttcacagactttgagacctgggacagctacagcccccagggcagaagacctgagacccagggccccaagtactgccacagcagctttgatgccatcaccgtggaccggcagcagcagctgtacatcttcaagggcagccacttctgggaggtggccgcagatggaaatgtgtctgagccccggcccctgcaggagcgctgggtgggcctgccccccaacatcgaggccgctgctgtgtccctgaatgatggagacttctacttcttcaaggtgcagagcgtgtag

SEQ ID NO: 226222 - DNA, 1179 bp, Artificial Sequence
  derived and/or modified sequence
atggtggcccgggtgggcctgctgctgcgggccctgcagctgctgttatgggggcacctggatgcccaacccgctgaaagggggggccaagagctgagaaaggaggccgaagcatttctggaaaagtacggctacctgaatgagcaggtccccaaggctccgacttctactcgctttagcgacgcgatacgcgccttccagtgggtatctcagcttccagtgtccggtgtactggatcgggccacactgcggcaaatgacccgaccccggtgcggagtaacggacacaaacagttacgctgcctgggctgagcggatttccgacctgtttgctagacatagaaccaagatgcggcggaaaaagcgctttgccaagcagggcaacaagtggtacaaacagcatctctcctatcgtttggttaattggcctgagcatccagagcccgccgtgcggggggccgttcgcgctgcatttcagctctggagcaacgtgtcggcactggaattctgggaggccccagccactggccccgccgacatcaggcttactttcttccagggtgatcataatgacggtctcggcaacgccttcgacggaccgggcggagcgcttgcacatgcctttctgccaagacgcggggaggcccactttgatcaagatgaacgttggagcctgtcaaggcgaagggggcgaaaccttttcgtggtgcttgcccacgaaatcggccatactctgggcctcacccatagccccgcaccgagggccctgatggcgccgtactataagcggctaggccgcgacgctctgctgtcctgggatgatgtgctcgccgtgcagagcctgtacggaaaacccctcggagggtctgtggctgtgcagcttccgggcaaactgtttactgattttgagacatgggacagctacagcccacagggccgcagacctgaaacacaaggacccaagtactgccattcatcatttgatgctataacagtggacaggcagcagcaactctacatttttaaggggagccatttttgggaggttgctgccgatggcaacgtatcagagccgagacccctgcaggaaaggtgggtcggactgccgccgaatatcgaagcagcagccgtatctttgaacgacggtgacttctatttttttaaagtccagagcgtctag

SEQ ID NO: 226223 - DNA, 1179 bp, Artificial Sequence
  derived and/or modified sequence
atggttgcacgcgtcggactgctgctgagggctctgcaactgctgctgtggggccacctggacgcccaaccagccgaacgagggggacaagagctgaggaaagaggcagaggcattcctggagaagtacggctaccttaatgaacaggtgcctaaggccccaacttccacaaggttctctgacgcaatccgagcattccagtgggtttcccagcttccagtgtcaggggtactggaccgagctactctgcgacagatgacccgccctcgatgcggggttacagatactaactcttacgccgcatgggcggagcgcatcagcgacctgtttgcaagacaccggacaaagatgcgtcgaaagaagagatttgccaagcaggggaacaagtggtacaaacagcatctatcctacaggctggtgaattggccagagcaccctgaaccagcggttaggggcgctgtgcgcgcagcctttcagttgtggagtaacgtttcagctctggagttctgggaagccccagcaacgggacctgcggacattcggttgaccttctttcaaggggatcataacgacggcttaggaaatgcatttgacgggcctggaggagccctcgcgcatgcttttctccctcgcagaggggaggcccacttcgaccaggacgaacgatggtcactgtcaaggcgaaggggcagaaacctgtttgtggtcctagctcacgagattggacataccctcgggttaacccacagcccagctccgagggccctaatggctccctactataagcgacttgggcgagacgcgctgttgtcctgggacgatgtgcttgctgttcagagtctttacggcaagccgctgggtggctcggtggcagtccagctgcctggcaagttgttcacagactttgagacctgggactcctacagtccacagggcagacggcctgagacccagggtcctaagtactgtcacagcagttttgatgctataactgtggaccgccagcagcagttgtatatcttcaagggatctcatttctgggaagtggccgcagacgggaacgtgtcagaaccaagaccactccaagagcgttgggtgggactgccaccaaatatagaagccgcagcagtgtccctgaacgatggggacttctacttttttaaagttcaaagcgtatag

SEQ ID NO: 226224 - DNA, 1179 bp, Artificial Sequence
  derived and/or modified sequence
atggtcgcaagagtaggcttgcttctacgtgcactgcagttgttgctctgggggcacctcgatgctcaacctgcagaacgtggcggacaggagctgagaaaagaggctgaagccttcctcgagaagtacggttacttaaatgagcaggtgcccaaagccccaacctcaacacgcttttcggatgcaatcagagccttccagtgggtgtcccaattaccagtctctggagtgcttgatagggcaactctgagacagatgactagacctaggtgcggcgtaacagacactaactcttatgcagcatgggcagaacgtatttctgatctttttgccagacacagaaccaaaatgcgacgcaagaagaggttcgccaagcagggaaataagtggtacaaacagcatctgtcatacaggttagtcaattggccggagcatccggagcctgctgtgaggggcgcggtcagagcagccttccaactgtggtcaaacgtgtcggcattagaattctgggaagccccagcaaccggtccagccgatatccgattgacgttctttcaaggggaccataacgatggactaggaaatgccttcgatgggcctggtggcgcgctggcccatgcgttcctgccgagaagaggagaagctcacttcgaccaggatgagagatggtccctgtccagacggcggggccgcaacttattcgtagtgctggcacacgaaattggtcataccctggggctcactcatagcccagcgccgagagctcttatggcaccatactacaaaagactgggcagggatgccttgctgagctgggatgatgtgctggccgtgcagtccctttatggcaagcctctaggaggatccgttgccgtgcagttgcctggtaaactcttcacagacttcgaaacttgggactcatattcccctcagggcagaaggcccgagacccaagggcctaagtattgtcatagttcttttgacgccatcaccgtggatcgacagcaacagctgtatatcttcaagggaagtcatttttgggaagtcgccgccgatgggaatgtaagcgaaccaagaccattacaggagaggtgggtcggcctgccgccaaacattgaggccgccgccgtcagcctaaacgatggggatttctatttttttaaggtccagtccgtctag

SEQ ID NO: 226225 - DNA, 1179 bp, Artificial Sequence
  derived and/or modified sequence
atggtggctagagtgggactactgttgcgtgcgctgcagttactgttatgggggcacctcgacgctcagcccgcagaaagaggaggccaagaactgcgcaaggaggccgaagccttcctagagaaatacggctacctgaacgaacaggtcccaaaagcacctacaagcacacggttctctgacgcaatacgggcctttcaatgggtgagccaacttccagtaagcggagttttggacagagcaaccctgcgacagatgactagacctaggtgtggcgtgaccgataccaacagttatgcagcttgggctgagaggataagcgatctgttcgctcgacacagaacaaagatgagacgtaagaagcgcttcgccaaacagggcaacaagtggtacaagcaacacctgagctaccgcctcgtgaattggccagaacaccccgaacccgccgtacggggtgcggttcgagctgcgttccaattatggtccaacgtctccgcacttgaattctgggaagccccggcaaccggccctgctgacattcgcctgacctttttccagggcgatcacaacgatggattgggtaacgccttcgatggacctggaggagctcttgcccatgccttcttacccagacgaggagaggcccatttcgaccaggatgaaagatggagcttgagtcgccgccgtggccggaacctgtttgtagtcttggcccatgaaatcggccatactctgggcctgacacactcaccagcccctcgggcactaatggccccctattacaaaagattagggcgggatgctttactgtcttgggacgatgtgctggcagtgcagtcattatacggaaaacccctggggggaagtgtcgctgtgcaactcccggggaaactgttcaccgatttcgagacttgggactcctattctcctcagggccgcagaccagagacccaaggacctaagtactgccacagctccttcgatgccatcaccgtagatcggcagcagcagctctacatatttaagggaagtcatttttgggaggtcgctgccgacgggaatgtcagtgaacctagacccctgcaggaaaggtgggtgggcctgcccccaaacattgaggctgccgcagtgagcctaaacgacggagatttttactttttcaaggtgcagtctgtgtag

SEQ ID NO: 226226 - DNA, 1438 bp, Artificial Sequence
  derived and/or modified sequence
tccctcggtccccggggccggcggacccgcgggcaggcactgcccgggctggacgacgtctggccggctcccggcgaagggcagcggaggagcggcccagagcgcgcagctagggcactggcgaaaccccgggacagtccctctccgtgcgggggcggcgcagagcagtcccatccccggggtcccgggcgcggctgactgccggctggttccctgcgcgcagtagctccccgagccgggctgcaccggaggcggcgagatggtcgcgcgcgtcggcctcctgctgcgcgccctgcagctgctactgtggggccacctggacgcccagcccgcggagcgcggaggccaggagctgcgcaaggaggcggaggcattcctagagaagtacggatacctcaatgaacaggtccccaaagctcccacctccactcgattcagcgatgccatcagagcgtttcagtgggtgtcccagctacctgtcagcggcgtgttggaccgcgccaccctgcgccagatgactcgtccccgctgcggggttacagataccaacagttatgcggcctgggctgagaggatcagtgacttgtttgctagacaccggaccaaaatgaggcgtaagaaacgctttgcaaagcaaggtaacaaatggtacaagcagcacctctcctaccgcctggtgaactggcctgagcatccggagccggcagttcggggcgccgtgcgcgccgccttccagttgtggagcaacgtctcagcgctggagttctgggaggccccagccacaggccccgctgacatccggctcaccttcttccaaggggaccacaacgatgggctgggcaatgcctttgatggcccagggggcgccctggcgcacgccttcctgccccgccgcggcgaagcgcacttcgaccaagatgagcgctggtccctgagccgccgccgcgggcgcaacctgttcgtggtgctggcgcacgagatcggtcacacgcttggcctcacccactcgcccgcgccgcgcgcgctcatggcgccctactacaagaggctgggccgcgacgcgctgctcagctgggacgacgtgctggccgtgcagagcctgtatgggaagcccctagggggctcagtggccgtccagctcccaggaaagctgttcactgactttgagacctgggactcctacagcccccaaggaaggcgccctgaaacgcagggccctaaatactgccactcttccttcgatgccatcactgtagacaggcaacagcaactgtacatttttaaagggagccatttctgggaggtggcagctgatggcaacgtctcagagccccgtccactgcaggaaagatgggtcgggctgccccccaacattgaggctgcggcagtgtcattgaatgatggagatttctacttcttcaaagtgcaatccgtttga

SEQ ID NO: 226227 - RNA, 1179 nt, Artificial Sequence
  derived and/or modified sequence
auggucgcaagaguaggcuugcuucuacgugcacugcaguuguugcucugggggcaccucgaugcucaaccugcagaacguggcggacaggagcugagaaaagaggcugaagccuuccucgagaaguacgguuacuuaaaugagcaggugcccaaagccccaaccucaacacgcuuuucggaugcaaucagagccuuccagugggugucccaauuaccagucucuggagugcuugauagggcaacucugagacagaugacuagaccuaggugcggcguaacagacacuaacucuuaugcagcaugggcagaacguauuucugaucuuuuugccagacacagaaccaaaaugcgacgcaagaagagguucgccaagcagggaaauaagugguacaaacagcaucugucauacagguuagucaauuggccggagcauccggagccugcugugaggggcgcggucagagcagccuuccaacuguggucaaacgugucggcauuagaauucugggaagccccagcaaccgguccagccgauauccgauugacguucuuucaaggggaccauaacgauggacuaggaaaugccuucgaugggccugguggcgcgcuggcccaugcguuccugccgagaagaggagaagcucacuucgaccaggaugagagauggucccuguccagacggcggggccgcaacuuauucguagugcuggcacacgaaauuggucauacccuggggcucacucauagcccagcgccgagagcucuuauggcaccauacuacaaaagacugggcagggaugccuugcugagcugggaugaugugcuggccgugcagucccuuuauggcaagccucuaggaggauccguugccgugcaguugccugguaaacucuucacagacuucgaaacuugggacucauauuccccucagggcagaaggcccgagacccaagggccuaaguauugucauaguucuuuugacgccaucaccguggaucgacagcaacagcuguauaucuucaagggaagucauuuuugggaagucgccgccgaugggaauguaagcgaaccaagaccauuacaggagaggugggucggccugccgccaaacauugaggccgccgccgucagccuaaacgauggggauuucuauuuuuuuaagguccaguccgucuag

SEQ ID NO: 226228 - RNA, 1179 nt, Artificial Sequence
  derived and/or modified sequence
augguggcuagagugggacuacuguugcgugcgcugcaguuacuguuaugggggcaccucgacgcucagcccgcagaaagaggaggccaagaacugcgcaaggaggccgaagccuuccuagagaaauacggcuaccugaacgaacaggucccaaaagcaccuacaagcacacgguucucugacgcaauacgggccuuucaaugggugagccaacuuccaguaagcggaguuuuggacagagcaacccugcgacagaugacuagaccuagguguggcgugaccgauaccaacaguuaugcagcuugggcugagaggauaagcgaucuguucgcucgacacagaacaaagaugagacguaagaagcgcuucgccaaacagggcaacaagugguacaagcaacaccugagcuaccgccucgugaauuggccagaacaccccgaacccgccguacggggugcgguucgagcugcguuccaauuaugguccaacgucuccgcacuugaauucugggaagccccggcaaccggcccugcugacauucgccugaccuuuuuccagggcgaucacaacgauggauuggguaacgccuucgauggaccuggaggagcucuugcccaugccuucuuacccagacgaggagaggcccauuucgaccaggaugaaagauggagcuugagucgccgccguggccggaaccuguuuguagucuuggcccaugaaaucggccauacucugggccugacacacucaccagccccucgggcacuaauggcccccuauuacaaaagauuagggcgggaugcuuuacugucuugggacgaugugcuggcagugcagucauuauacggaaaaccccuggggggaagugucgcugugcaacucccggggaaacuguucaccgauuucgagacuugggacuccuauucuccucagggccgcagaccagagacccaaggaccuaaguacugccacagcuccuucgaugccaucaccguagaucggcagcagcagcucuacauauuuaagggaagucauuuuugggaggucgcugccgacgggaaugucagugaaccuagaccccugcaggaaaggugggugggccugcccccaaacauugaggcugccgcagugagccuaaacgacggagauuuuuacuuuuucaaggugcagucuguguag

SEQ ID NO: 226229 - protein, 852 aa, Artificial Sequence
  derived and/or modified sequence
MAGALAGLAAGLQVPRVAPSPDSDSDTDSEDPSLRRSAGGLLRSQVIHSGHFMVSSPHSDSLPRRRDQEGSVGPSDFGPRSIDPTLTRLFECLSLAYSGKLVSPKWKNFKGLKLLCRDKIRLNNAIWRAWYIQYVKRRKSPVCGFVTPLQGPEADAHRKPEAVVLEGNYWKRRIEVVMREYHKWRIYYKKRLRKPSREDDLLAPKQAEGRWPPPEQWCKQLFSSVVPVLLGDPEEEPGGRQLLDLNCFLSDISDTLFTMTQSGPSPLQLPPEDAYVGNADMIQPDLTPLQPSLDDFMDISDFFTNSRLPQPPMPSNFPEPPSFSPVVDSLFSSGTLGPEVPPASSAMTHLSGHSRLQARNSCPGPLDSSAFLSSDFLLPEDPKPRLPPPPVPPPLLHYPPPAKVPGLEPCPPPPFPPMAPPTALLQEEPLFSPRFPFPTVPPAPGVSPLPAPAAFPPTPQSVPSPAPTPFPIELLPLGYSEPAFGPCFSMPRGKPPAPSPRGQKASPPTLAPATASPPTTAGSNNPCLTQLLTAAKPEQALEPPLVSSTLLRSPGSPQETVPEFPCTFLPPTPAPTPPRPPPGPATLAPSRPLLVPKAERLSPPAPSGSERRLSGDLSSMPGPGTLSVRVSPPQPILSRGRPDSNKTENRRITHISAEQKRRFNIKLGFDTLHGLVSTLSAQPSLKVSKATTLQKTAEYILMLQQERAGLQEEAQQLRDEIEELNAAINLCQQQLPATGVPITHQRFDQMRDMFDDYVRTRTLHNWKFWVFSILIRPLFESFNGMVSTASVHTLRQTSLAWLDQYCSLPALRPTVLNSLRQLGTSTSILTDPGRIPEQATRAVTEGTLGKPL

SEQ ID NO: 226230 - protein, 759 aa, Artificial Sequence
  derived and/or modified sequence
MAGALAGLAAGLQVPRVAPSPDSDSDTDSEDPSLRRSAGGLLRSQVIHSGHFMVSSPHSDSLPRRRDQEGSVGPSDFGPRSIDPTLTRLFECLSLAYSGKLVSPKWKNFKGLKLLCRDKIRLNNAIWRAWYIQYVKRRKSPVCGFVTPLQGPEADAHRKPEAVVLEGNYWKRRIELPPEDAYVGNADMIQPDLTPLQPSLDDFMDISDFFTNSRLPQPPMPSNFPEPPSFSPVVDSLFSSGTLGPEVPPASSAMTHLSGHSRLQARNSCPGPLDSSAFLSSDFLLPEDPKPRLPPPPVPPPLLHYPPPAKVPGLEPCPPPPFPPMAPPTALLQEEPLFSPRFPFPTVPPAPGVSPLPAPAAFPPTPQSVPSPAPTPFPIELLPLGYSEPAFGPCFSMPRGKPPAPSPRGQKASPPTLAPATASPPTTAGSNNPCLTQLLTAAKPEQALEPPLVSSTLLRSPGSPQETVPEFPCTFLPPTPAPTPPRPPPGPATLAPSRPLLVPKAERLSPPAPSGSERRLSGDLSSMPGPGTLSVRVSPPQPILSRGRPDSNKTENRRITHISAEQKRRFNIKLGFDTLHGLVSTLSAQPSLKVSKATTLQKTAEYILMLQQERAGLQEEAQQLRDEIEELNAAINLCQQQLPATGVPITHQRFDQMRDMFDDYVRTRTLHNWKFWVFSILIRPLFESFNGMVSTASVHTLRQTSLAWLDQYCSLPALRPTVLNSLRQLGTSTSILTDPGRIPEQATRAVTEGTLGKPL

SEQ ID NO: 226231 - DNA, 2559 bp, Artificial Sequence
  derived and/or modified sequence
atggcaggtgccctggctggtctggctgccggcctccaggttccacgggtggccccctcccccgattcagattcagatacagattcagaggatccttctctccggcggagcgcgggggggctgcttagatcgcaagtaatccattccggccactttatggtgagcagcccgcatagtgactcattgcctcggagacgggaccaggaggggtctgtgggcccgtcagacttcggacctaggagcattgatccaaccctgacgaggctgtttgagtgtttgagtcttgcttatagcggcaagcttgtgtccccaaaatggaagaattttaaaggcttgaagttattatgcagagataaaatcaggctgaataatgctatctggcgggcctggtacatccaatacgtgaagagaaggaaaagcccagtgtgcggatttgtgaccccactccagggaccagaggcagacgcccaccggaagcccgaggcagtcgtacttgagggtaactattggaagcgtcgaattgaggtggtcatgcgcgaataccataagtggcgaatctactacaagaaaagattaaggaaaccatccagggaagacgatctgttggcccccaagcaggccgagggtagatggcctccccctgaacagtggtgtaagcaacttttttcttccgtggtgccggtgctgctgggagacccagaggaggaacctggaggtaggcaactgttagatctgaattgttttctgtctgatatcagcgacaccctctttaccatgactcagtcaggcccatcccctctgcagctcccacccgaggacgcatatgtgggcaatgccgatatgattcagcctgatttgacacccctgcagcctagtctggacgacttcatggacatctccgacttcttcactaattctcggctgcctcagcctcccatgccttccaattttcctgagcccccctccttttccccggtagtggactcgttgttttcctctgggactcttggtcccgaagttccccctgccagctccgcaatgactcacctctccggccacagcagactccaagccaggaatagctgtcccgggcctttggactcaagcgcattcctcagctcagactttctcctgccggaggaccccaaacctcgcctgccacctccccccgttccccctcctctgctgcattatcctcctcctgcaaaggtccccggtttagagccctgcccacccccccccttcccccctatggctcctccaactgctctgctacaggaagaacccctgttctccccacggttcccatttcctaccgttccacctgcccccggcgtctcccccctgccggcgccggccgccttcccgcccacgcctcagagcgtccccagccctgctcccactccattccccatcgaactgctccccctcgggtattctgaaccggcttttgggccatgttttagtatgccccggggaaagccccccgccccttcacctagaggccagaaggcgtctcctcctaccctggccccagccaccgcttcacctcctaccactgctggaagcaataatccatgtctgactcagctcctgactgcagccaagcctgagcaagcactcgaaccacccctggtcagctcaacccttttacgttctcctggatcaccccaggaaaccgtcccggagtttccatgcacctttctgcctccaacccctgctcctacaccacctcgccccccacctggacctgctaccctggctccctctcggccactgctggtaccgaaggccgagcgactgagtccacccgcacctagcggcagcgagcgcagattgtccggggatctctccagcatgccaggccccggtactctcagcgttcgcgtgtctcctccccaacccattctgtcaagaggccggccggatagtaacaagaccgaaaataggagaattacgcacatttccgccgaacagaagagacggttcaacatcaaacttggctttgataccctgcacggcctagtgagcacactttccgcacaacctagtctaaaagtttcaaaggccacaaccctccagaaaacagctgaatatatcttgatgctgcagcaagaaagggccggcctgcaagaggaggcacagcagctgagggacgaaatcgaggagctaaacgcagctatcaatttgtgccaacaacaactgccagctacaggcgtacctatcacacaccaacgcttcgatcagatgagagacatgttcgatgactacgtgagaacacgcacactgcacaattggaaattctgggtgttttcaatcctgattcggcccctgtttgagtccttcaacgggatggtgtccacagcgagtgtccataccctcagacaaacctccctggcctggcttgatcagtactgtagcctgcccgctctcaggcccaccgtgctcaattctctgcgtcagcttggcacaagtacctccattctgaccgaccctggccgcattcccgaacaagcaacgcgcgccgtcaccgaggggacacttgggaagccactgtag

SEQ ID NO: 226232 - DNA, 2280 bp, Artificial Sequence
  derived and/or modified sequence
atggcaggcgccctggctggcctggctgcagggcttcaggtgccgagggtcgccccttcgcctgacagcgactcagacacggacagcgaggacccgagcctgcgcaggagcgctggaggcctgctgcgctctcaggtgatccacagcggccactttatggtgagctccccacattccgatagcttgcccagaaggagggatcaagagggatcggtcggacctagtgactttggccccaggtccattgatcccactcttacgcggctgtttgagtgcttgtctctggcctatagcggaaagcttgtaagccccaaatggaaaaacttcaagggtctgaagctgttgtgccgcgataagatacgcctcaacaacgcgatttggcgagcttggtacatccaatatgtaaaaagacgcaagtccccagtgtgcggattcgtgaccccccttcagggccccgaggcagacgcccaccgcaaacctgaggccgtagtgctcgaggggaactattggaaaagacggatcgagttaccccccgaagacgcttacgtggggaacgcagacatgattcaacctgacttgacgccattacagccctcccttgatgattttatggatatttccgatttttttacaaattcaaggctacctcagcccccaatgccctctaatttcccagagcccccaagttttagccccgtggtcgacagcttgttcagcagcggaacattggggcccgaggtgccacccgcctccagcgccatgactcatctaagcgggcacagccgactacaggcccggaacagctgccccggccccctggacagttcggcgtttctcagttcagactttcttttgccagaggatccgaaacccagactacctccgcctccagtcccaccaccattgttgcattaccctcccccagcaaaagtccctggtctggaaccctgcccaccgcccccatttcccccaatggctcctcctactgcccttttacaggaagaaccacttttctccccccggttcccgtttccaactgttccaccagcaccgggggtttcccctctgccagctcctgctgcgttccccccaacccctcaatctgtcccctcccctgcaccaaccccttttcccatcgaactactgcccctaggttacagcgagcctgcattcggcccttgcttttctatgcccaggggtaagcctcccgcaccctctccccgagggcaaaaggccagtcccccgacactggcccctgcgactgcgtcacccccaaccactgccggcagcaataatccctgtcttacccagctactgacagctgctaagcctgagcaggcgctggaaccgccactggtgagttccaccctgctgcgaagccccggatccccccaggaaaccgtgccagagtttccctgcacctttctgcccccaactcccgcccccacccctcctagaccccccccaggccccgcgacactggctccctcaaggcccctcttggtgcctaaggcagaacgactgtctccacccgcaccatccggcagcgaacgtcgcttatcaggggacctatcttccatgccagggccaggtaccttatccgtccgggtgtctccccctcagcctatcctcagcagaggtcgccctgactcaaataagactgaaaatcgacggatcacccatatctcggcggaacagaaaaggaggttcaatataaaattgggatttgatacgctgcacggcctggtcagtacgctcagtgcacaaccttccctcaaggtctctaaagctactacccttcagaaaacggccgaatatattctgatgctccagcaggagagggcggggcttcaggaggaagctcagcaacttcgggatgagattgaggaactgaacgccgcaatcaatctctgtcagcagcaacttcctgcaactggggtgcccattacgcaccagagatttgatcagatgcgcgacatgttcgatgactatgtacgcacaaggactcttcataattggaaattttgggtgttttccattttaatcaggcctctgtttgaaagcttcaatgggatggtgagtacagctagtgtgcacacactacgacaaactagtctggcctggttagaccaatattgtagcctgcccgccttgcggccaaccgtgttgaattctctgcgccagctcggcacgtccacgagcattcttaccgaccccggacgtattccagagcaggctactagagcagtcactgaaggcacccttggcaagcccctttag

SEQ ID NO: 226233 - DNA, 2559 bp, Artificial Sequence
  derived and/or modified sequence
atggccggggccctggccggcctggccgccggcctgcaggtgccccgggtggcccccagcccagacagcgacagcgacacagattctgaggaccccagcctgcggcgctctgctgggggcctgctgcggagccaggtgatccacagcggccacttcatggtgagcagcccccacagcgacagcctgcccaggagaagagaccaggagggctctgtgggccccagcgactttggccccaggagcattgaccccaccctgacccggctgtttgaatgtctgagcctggcctacagcggcaagctggtgagccccaagtggaagaacttcaagggcctgaagctgctgtgccgggacaagatccggctgaacaatgccatctggagggcctggtacatccagtatgtgaagaggaggaagagccctgtgtgtggctttgtgacccccctgcagggccctgaggctgatgcccacaggaagccagaggccgtggtgctggagggcaactactggaagaggcgcatcgaggtggtgatgagggagtaccacaagtggaggatctactacaagaagaggctgaggaagcccagccgggaggatgacctgctggcccccaagcaggccgagggccgctggcccccacctgagcagtggtgcaagcagctgttcagctctgtggtgcctgtgctgctgggggaccctgaggaggagcccggcggccggcagctgctggacctgaactgcttcctgagtgacatcagtgacaccctcttcaccatgacccagagcggccccagccccctgcagctgcccccagaagatgcctacgtgggcaatgctgacatgatccagcctgacctgacccccctgcagcccagcctggatgacttcatggacatcagtgacttcttcaccaacagccggctgccccagccccccatgcccagcaacttccctgagccccccagcttcagccctgtggtggacagcctcttcagcagcggcaccctgggccctgaggtgcccccagccagcagcgccatgacccacctgagcggccacagccggctgcaggccaggaacagctgccccggccccctggacagcagcgccttcctgagcagtgacttcctgctgcctgaggaccccaagccccggctgcccccacctcctgtgcccccacccctgctgcactacccacctccagccaaggtgcccggcctggagccctgccccccaccacccttcccccccatggccccacccacagccctgctgcaggaggagcccctcttcagcccccgcttccccttccccaccgtgcccccagcccctggggtgagccccctgcctgccccagctgccttcccccccaccccccagagcgtgcccagccctgcccccacccccttccccatcgagctgctgcccctgggctacagcgagcccgccttcggcccctgcttctccatgccccggggcaagcccccagcccccagcccccggggccagaaggccagcccccccaccctggccccagccacagccagcccccccaccacagctggcagcaacaacccctgcctgacccagctgctgacagctgccaagccagagcaggccctggagccccccctggtgagcagcaccctgctgcggagccctggcagcccccaggagaccgtgcctgagttcccctgcaccttcctgccccccaccccagcccccaccccaccccggcccccacctggccctgccaccctggcccccagccggcccctgctggtgcccaaggccgagcggctgagccccccagcccccagcggcagcgagcggcggctgagcggggacctgagctccatgcctggccctggcaccctgtctgtgcgggtgagccccccccagcccatcctgagccggggccgcccagacagcaacaagacagagaacagacgcatcacccacatctctgctgagcagaagaggcgcttcaacatcaagctgggctttgacaccctgcacggcctggtgtccaccctgagcgcccagcccagcctgaaggtgtccaaggccaccaccctgcagaagacagctgagtacatcctgatgctgcagcaggagcgggccggcctgcaggaggaggcccagcagctgagagatgaaattgaggagctgaatgctgccatcaacctgtgccagcagcagctgcctgccaccggggtgcccatcacccaccagagatttgaccagatgagggacatgtttgatgattatgtgaggaccaggaccctgcacaactggaagttctgggtgttcagcatcctgatccggcccctgtttgagagcttcaacggcatggtgtccacagcctctgtgcacaccctgcggcagaccagcctggcctggctggaccagtactgcagcctgcctgccctgcggcccaccgtgctgaacagcctgcggcagctgggcaccagcaccagcatcctgacagaccccggccgcatccctgagcaggccaccagggctgtgacagagggcaccctgggcaagcccctgtag

SEQ ID NO: 226234 - DNA, 2280 bp, Artificial Sequence
  derived and/or modified sequence
atggccggggccctggccggcctggccgccggcctgcaggtgccccgggtggcccccagcccagacagcgacagcgacacagattctgaggaccccagcctgcggcgctctgctgggggcctgctgcggagccaggtgatccacagcggccacttcatggtgagcagcccccacagcgacagcctgcccaggagaagagaccaggagggctctgtgggccccagcgactttggccccaggagcattgaccccaccctgacccggctgtttgaatgtctgagcctggcctacagcggcaagctggtgagccccaagtggaagaacttcaagggcctgaagctgctgtgccgggacaagatccggctgaacaatgccatctggagggcctggtacatccagtatgtgaagaggaggaagagccctgtgtgtggctttgtgacccccctgcagggccctgaggctgatgcccacaggaagccagaggccgtggtgctggagggcaactactggaagaggcgcatcgagctgcccccagaagatgcctacgtgggcaatgctgacatgatccagcctgacctgacccccctgcagcccagcctggatgacttcatggacatcagtgacttcttcaccaacagccggctgccccagccccccatgcccagcaacttccctgagcccccatccttcagccctgtggtggacagcctcttcagcagcggcaccctgggccctgaggtgcccccagccagcagcgccatgacccacctgagcggccacagccggctgcaggccaggaacagctgccccggccccctggacagcagcgccttcctgagcagtgacttcctgctgcctgaggaccccaagccccggctgcccccacctcctgtgcccccacccctgctgcactacccacctccagccaaggtgcccggcctggagccctgccccccaccacccttcccccccatggccccacccacagccctgctgcaggaggagcccctcttcagcccccgcttccccttccccaccgtgcccccagcccctggggtgagccccctgcctgccccagctgccttcccccccaccccccagagcgtgcccagccctgcccccacccccttccccatcgagctgctgcccctgggctacagcgagcccgccttcggcccctgcttctccatgccccggggcaagcccccagcccccagcccccggggccagaaggccagcccccccaccctggccccagccacagccagcccccccaccacagctggcagcaacaacccctgcctgacccagctgctgacagctgccaagccagagcaggccctggagccccccctggtgagcagcaccctgctgcggagccctggcagcccccaggagaccgtgcctgagttcccctgcaccttcctgccccccaccccagcccccaccccacccaggcctcctcctggccctgccaccctggcccccagccggcccctgctggtgcccaaggccgagcggctgagccccccagcccccagcggcagcgagcggcggctgagcggggacctgagctccatgcctggccctggcaccctgtctgtgcgggtgtccccaccccagcccatcctgagccggggccgcccagacagcaacaagacagaaaatcgccgcatcacccacatctctgctgagcagaagaggcgcttcaacatcaagctgggctttgacaccctgcacggcctggtgtccaccctgagcgcccagcccagcctgaaggtgtccaaggccaccaccctgcagaagacagctgagtacatcctgatgctgcagcaggagagagctggcctgcaggaggaggcccagcagctgagagatgaaattgaggagctgaatgctgccatcaacctgtgccagcagcagctgcctgccactggagtgcccatcacccaccagagatttgaccagatgagggacatgtttgatgattatgtgaggaccaggaccctgcacaactggaagttctgggtgttcagcatcctgatccggcccctgtttgagagcttcaacggcatggtgtccacagcctctgtgcacaccctgcggcagaccagcctggcctggctggaccagtactgcagcctgcctgccctgcggcccaccgtgctgaacagcctgcggcagctgggcaccagcaccagcatcctgacagatcctggccgcatccctgagcaggccaccagggctgtgacagagggcaccctgggcaagcccctgtag

SEQ ID NO: 226235 - DNA, 3278 bp, Artificial Sequence
  derived and/or modified sequence
ccccgcgctgcgcggagcagggaccaggcggttgcggcggcgacagccatggccggcgcgctggcaggtctggccgcgggcttgcaggtcccgcgggtcgcgcccagcccagactcggactcggacacagactcggaggacccgagtctccggcgcagcgcgggcggcttgctccgctcgcaggtcatccacagcggtcacttcatggtgtcgtcgccgcacagcgactcgctgccccggcggcgcgaccaggaggggtccgtggggccctccgacttcgggccgcgcagtatcgaccccacactcacacgcctcttcgagtgcttgagcctggcctacagtggcaagctggtgtctcccaagtggaagaatttcaaaggcctcaagctgctctgcagagacaagatccgcctgaacaacgccatctggagggcctggtatatccagtatgtgaagcggaggaagagccccgtgtgtggcttcgtgacccccctgcaggggcctgaggctgatgcgcaccggaagccggaggccgtggtcctggaggggaactactggaagcggcgcatcgaggtggtgatgcgggaataccacaagtggcgcatctactacaagaagcggctccgtaagcccagcagggaagatgacctcctggcccctaagcaggcggaaggcaggtggccgccgccggagcaatggtgcaaacagctcttctccagtgtggtccccgtgctgctgggggacccagaggaggagccgggtgggcggcagctcctggacctcaattgctttttgtccgacatctcagacactctcttcaccatgactcagtccggcccttcgcccctgcagctgccgcctgaggatgcctacgtcggcaatgctgacatgatccagccggacctgacgccactgcagccaagcctggatgacttcatggacatctcagatttctttaccaactcccgcctcccacagccgcccatgccttcaaacttcccagagccccccagcttcagccccgtggttgactccctcttcagcagtgggaccctgggcccagaggtgcccccggcttcctcggccatgacccacctctctggacacagccgtctgcaggctcggaacagctgccctggccccttggactccagcgccttcctgagttctgatttcctccttcctgaagaccccaagccccggctcccaccccctcctgtacccccacctctgctgcattaccctccccctgccaaggtgccaggcctggagccctgccccccacctcccttccctcccatggcaccacccactgctttgctgcaggaagagcctctcttctctcccaggtttcccttccccaccgtccctcctgccccaggagtgtctccgctgcctgctcctgcagccttcccacccaccccacagtctgtccccagcccagcccccacccccttccccatagagcttctacccttggggtattcggagcctgcctttgggccttgcttctccatgcccagaggcaagccccccgccccatcccctaggggacagaaagccagcccccctaccttagcccctgccactgccagtccccccaccactgcggggagcaacaacccctgcctcacacagctgctcacagcagctaagccggagcaagccctggagccaccacttgtatccagcaccctcctccggtccccagggtccccgcaggagacagtccctgaattcccctgcacattccttcccccgaccccggcccctacaccgccccggccacctccaggcccggccacattggccccttccaggcccctgcttgtccccaaagcggagcggctctcacccccagcgcccagcggcagtgaacggcggctgtcaggggacctcagctccatgccaggccctgggactctgagcgtccgtgtctctcccccgcaacccatcctcagccggggccgtccagacagcaacaagaccgagaaccggcgtatcacacacatctccgcggagcagaagcggcgcttcaacatcaagctggggtttgacacccttcatgggctcgtgagcacactcagtgcccagcccagcctcaaggtgagcaaagctaccacgctgcagaagacagctgagtacatccttatgctacagcaggagcgtgcgggcttgcaggaggaggcccagcagctgcgggatgagattgaggagctcaatgccgccattaacctgtgccagcagcagctgcccgccacaggggtacccatcacacaccagcgttttgaccagatgcgagacatgtttgatgactacgtccgaacccgtacgctgcacaactggaagttctgggtgttcagcatcctcatccggcctctgtttgagtccttcaacgggatggtgtccacggcaagtgtgcacaccctccgccagacctcactggcctggctggaccagtactgctctctgcccgctctccggccaactgtcctgaactccctacgccagctgggcacatctaccagtatcctgaccgacccgggccgcatccctgagcaagccacacgggcagtcacagagggcacccttggcaaacctttatagtcctggccagaccctgctgctcactcagctgccctgggggctgctttccctgggcacgggctccagggatcatctctgggcactcccttcctgccccaggccctggctctgcccttccctggggggtggagcagggtccaggtttcacacttgccacctcctggaggtcaagaagagcagagtccccgtccctgctctgccactgtgctccagcaccgtgaccttgggtgactcgtccgctgtctttggaccgctgtgtttcaatctgcaaaatggggatggggaaggttcaatcagcagatgacccccaggccttggcagctgtgacattgggggcctaggctggcaactccgggggctcaacggtggaaagaggaggatgctgtttctctgtcacctccacttgctccccgacaggtggggcacagacctctgttcctgagcagagaagcagaaaaggaggttccctctctctgctccttcactgctgacccagaggggctgcaggatggtttcccctgggagaggccaggagggcctgatcccaggagacaccagggccagagtgaccacagcagggcaggcatcatgtgtgtgtgtgtgtgtggatgtgtgtgtgtgggttttgtaaagaattcttgaccaataaaagcaaaaactgtctgctggtt

SEQ ID NO: 226236 - DNA, 2999 bp, Artificial Sequence
  derived and/or modified sequence
ccccgcgctgcgcggagcagggaccaggcggttgcggcggcgacagccatggccggcgcgctggcaggtctggccgcgggcttgcaggtcccgcgggtcgcgcccagcccagactcggactcggacacagactcggaggacccgagtctccggcgcagcgcgggcggcttgctccgctcgcaggtcatccacagcggtcacttcatggtgtcgtcgccgcacagcgactcgctgccccggcggcgcgaccaggaggggtccgtggggccctccgacttcgggccgcgcagtatcgaccccacactcacacgcctcttcgagtgcttgagcctggcctacagtggcaagctggtgtctcccaagtggaagaatttcaaaggcctcaagctgctctgcagagacaagatccgcctgaacaacgccatctggagggcctggtatatccagtatgtgaagcggaggaagagccccgtgtgtggcttcgtgacccccctgcaggggcctgaggctgatgcgcaccggaagccggaggccgtggtcctggaggggaactactggaagcggcgcatcgagctgccgcctgaggatgcctacgtcggcaatgctgacatgatccagccggacctgacgccactgcagccaagcctggatgacttcatggacatctcagatttctttaccaactcccgcctcccacagccgcccatgccttcaaacttcccagagccccccagcttcagccccgtggttgactccctcttcagcagtgggaccctgggcccagaggtgcccccggcttcctcggccatgacccacctctctggacacagccgtctgcaggctcggaacagctgccctggccccttggactccagcgccttcctgagttctgatttcctccttcctgaagaccccaagccccggctcccaccccctcctgtacccccacctctgctgcattaccctccccctgccaaggtgccaggcctggagccctgccccccacctcccttccctcccatggcaccacccactgctttgctgcaggaagagcctctcttctctcccaggtttcccttccccaccgtccctcctgccccaggagtgtctccgctgcctgctcctgcagccttcccacccaccccacagtctgtccccagcccagcccccacccccttccccatagagcttctacccttggggtattcggagcctgcctttgggccttgcttctccatgcccagaggcaagccccccgccccatcccctaggggacagaaagccagcccccctaccttagcccctgccactgccagtccccccaccactgcggggagcaacaacccctgcctcacacagctgctcacagcagctaagccggagcaagccctggagccaccacttgtatccagcaccctcctccggtccccagggtccccgcaggagacagtccctgaattcccctgcacattccttcccccgaccccggcccctacaccgccccggccacctccaggcccggccacattggccccttccaggcccctgcttgtccccaaagcggagcggctctcacccccagcgcccagcggcagtgaacggcggctgtcaggggacctcagctccatgccaggccctgggactctgagcgtccgtgtctctcccccgcaacccatcctcagccggggccgtccagacagcaacaagaccgagaaccggcgtatcacacacatctccgcggagcagaagcggcgcttcaacatcaagctggggtttgacacccttcatgggctcgtgagcacactcagtgcccagcccagcctcaaggtgagcaaagctaccacgctgcagaagacagctgagtacatccttatgctacagcaggagcgtgcgggcttgcaggaggaggcccagcagctgcgggatgagattgaggagctcaatgccgccattaacctgtgccagcagcagctgcccgccacaggggtacccatcacacaccagcgttttgaccagatgcgagacatgtttgatgactacgtccgaacccgtacgctgcacaactggaagttctgggtgttcagcatcctcatccggcctctgtttgagtccttcaacgggatggtgtccacggcaagtgtgcacaccctccgccagacctcactggcctggctggaccagtactgctctctgcccgctctccggccaactgtcctgaactccctacgccagctgggcacatctaccagtatcctgaccgacccgggccgcatccctgagcaagccacacgggcagtcacagagggcacccttggcaaacctttatagtcctggccagaccctgctgctcactcagctgccctgggggctgctttccctgggcacgggctccagggatcatctctgggcactcccttcctgccccaggccctggctctgcccttccctggggggtggagcagggtccaggtttcacacttgccacctcctggaggtcaagaagagcagagtccccgtccctgctctgccactgtgctccagcaccgtgaccttgggtgactcgtccgctgtctttggaccgctgtgtttcaatctgcaaaatggggatggggaaggttcaatcagcagatgacccccaggccttggcagctgtgacattgggggcctaggctggcaactccgggggctcaacggtggaaagaggaggatgctgtttctctgtcacctccacttgctccccgacaggtggggcacagacctctgttcctgagcagagaagcagaaaaggaggttccctctctctgctccttcactgctgacccagaggggctgcaggatggtttcccctgggagaggccaggagggcctgatcccaggagacaccagggccagagtgaccacagcagggcaggcatcatgtgtgtgtgtgtgtgtggatgtgtgtgtgtgggttttgtaaagaattcttgaccaataaaagcaaaaactgtctgctggtt

SEQ ID NO: 226237 - DNA, 2559 bp, Artificial Sequence
  derived and/or modified sequence
atggccggcgccctggccggcctggccgccggcctgcaggtgcccagagttgcgcctagtcctgactctgatagtgacacagactccgaagacccgtcactgagaaggagcgccggtggactgctgcgctcccaggtcatacactctgggcacttcatggtgtcatctccgcactccgactccctgccgcggcggcgggaccaggaggggtcagtgggaccctctgatttcggtcctcgatctatcgatccaactctgacgcggctgttcgagtgtctctcgctcgcttactctgggaagttggtaagccccaagtggaagaactttaagggcctgaaattgctgtgtcgtgacaagattaggctgaacaacgccatatggagagcatggtatatacagtacgtgaaaagaaggaaatcccctgtgtgtgggtttgttacccctctccaaggccctgaggccgatgctcaccgtaaaccagaagctgttgtactggaaggaaactactggaaacggaggatcgaggtcgtcatgagagagtaccacaagtggagaatatattacaagaagaggctccgaaaacctagcagagaagacgatctgctggcccccaagcaggcagaaggtaggtggcccccccccgaacagtggtgtaaacaactgttttcaagtgtcgtgcctgttcttctgggtgatccagaagaagaaccaggcggaagacagctgctagacctgaattgctttcttagcgacatcagtgatactctttttactatgactcagtctggtccctctcctctgcagctcccacccgaggacgcctatgttggaaacgccgacatgattcagccggatctgacacccctgcagccttccctagatgacttcatggacatctctgattttttcactaattctaggctgccacagcctccaatgccttctaacttcccagagccaccatccttctctcccgtagttgactctctattcagtagtggaaccctgggaccggaggtccctccagcatcttcagctatgactcatttgagcggacactccaggctgcaggcaagaaattcttgcccaggcccattagactcttccgcgttcctgagctctgattttctcctaccagaggaccctaagccacgactgccaccccccccggttcccccacccttactgcattatcctccccccgccaaagttcccggcctggagccttgtccccccccccccttcccccccatggcccccccaaccgccctgctgcaggaggagccgctgttcagcccacgtttcccatttcctaccgttccaccagccccaggcgtatcccctctgcccgcccctgccgcctttcccccaacaccgcagtccgtcccaagcccggcccctacacctttccccatcgagttgttgccactgggatatagtgaacctgcgttcggtccatgcttctccatgccacggggtaagccccccgctcctagcccacgggggcagaaagcctcccctccaactctcgctcctgctaccgcatccccacccacaacggctgggtccaacaatccctgcctgactcagcttctcacagccgcaaagcccgagcaagccctggaacctcccctggtcagctccacactcctgagaagccccggtagccctcaggaaaccgttccagagtttccctgcacatttttgcctcctactccggcccctacaccccctcgccctccaccagggccagcgactttagcccctagccgaccgctattagtacctaaagccgagcgactgagtccccctgccccgtccggctccgagagacgattgagcggagatctgagctccatgcccgggccggggaccctgtcagtgagggtgagcccaccccagcccatactgagcagaggccggccagatagcaacaagactgaaaacaggcgaatcacccacatctcggccgaacagaagagacgtttcaacatcaagcttggctttgacactctccacggcctggtcagcaccctgagtgcccagccatcactgaaggtctctaaggccaccacactgcagaagacggcagaatacatacttatgctgcaacaggagagggccgggttacaggaggaggcacagcaattacgggacgaaatcgaagagctgaacgccgccatcaatctctgccaacagcagctccctgccacgggcgttccgattacccaccagcggttcgatcaaatgcgggacatgtttgacgattatgtacgcactcggacactgcacaattggaaattttgggtgttctccattctgatacggcccttgtttgaatctttcaatggcatggtgagcacagcatccgtccacacccttaggcagacaagtcttgcttggttagaccagtactgctccctgcctgcattaagacccaccgtgctgaactctctcagacaactaggcaccagcacttcaatcctaactgaccctgggcggattccggaacaagccactagagcggtaaccgagggtactctgggcaagccattgtag

SEQ ID NO: 226238 - DNA, 2280 bp, Artificial Sequence
  derived and/or modified sequence
atggccggcgccctggccggcctggccgccggcctgcaggtgccccgcgtcgcccccagcccggactccgactctgacactgactctgaagacccatctctgagaagatccgccggggggcttctgcgctcgcaggtaattcattcgggacactttatggtgtctagcccccatagcgatagccttccccgaagacgtgatcaggaaggctccgttgggccctccgacttcggaccccgtagtatcgacccaacactgaccagactgtttgaatgtcttagcctcgcctattcaggcaaactggtttcacctaaatggaagaattttaaggggctgaaattgttatgtagggacaagatcagactaaacaacgccatctggagggcctggtatattcagtatgttaagagaaggaagagtccagtatgcggatttgtgactccactgcaggggccagaggcagatgcacaccggaaacctgaggcggtagtgctagaaggcaattactggaaacggcgcatcgagctgcctcccgaagacgcctacgtgggcaatgcggacatgattcaacctgatcttacaccgctgcagccgtctctagatgatttcatggacatctccgacttcttcaccaactcccggctgccgcagccacccatgccctcgaactttccggaacctccatccttctcaccagtagtggactcactgttctcttcggggaccctgggtcccgaagtgcctcccgcttctagcgcaatgacgcatctatccgggcattcaaggcttcaggcccgcaacagttgccccggcccactcgattctagcgcatttctatcctcggattttctcctgcccgaggacccaaaaccaagactgcctcccccacccgttccacccccacttttgcactacccacctccggcgaaggtgccgggactggaaccctgtcctcccccaccgttcccgcctatggctcctcctaccgctctgttacaggaggagcctctcttctctccacgctttccctttcctacagttccaccagctccaggcgtcagtcccctaccggcacccgccgcctttccaccaactccccaatctgtgccatctccagcccctactccattcccaatcgagcttttgcccctgggatactcagaaccggccttcggaccttgctttagcatgcccagaggaaagccccccgctccatcccctagaggccagaaggcttctcctcccactcttgccccggcgaccgcgtcccccccaactacagcaggtagcaacaatccttgcctgactcagctgttaacagctgcgaagcctgaacaggctctcgagccgcctctggttagcagtactctactccgcagcccaggctccccccaggagactgtgccagaattcccctgtacgtttttaccacctacccccgcccctacccccccaagaccaccccctggacctgctaccttggctccgagtcggccgctgctggtacctaaagcagaacgtcttagtcctcctgctccttcaggatcggaaagacggctgagcggggacttaagctccatgcctgggccggggaccctgtccgtgcgcgttagccccccgcaacccatcctgtctcgggggcggccagacagcaataaaactgagaatcgacgaatcacccacatcagcgcagaacagaaaagacgctttaacatcaaactgggttttgatacactgcacggacttgtgtctactctatcggctcagccctcgctcaaggtctccaaagcaaccacgctccagaagactgccgagtatatattgatgttgcagcaagagagagccggcctccaagaagaggcccaacagcttcgggatgagatcgaagaactcaacgccgccatcaatctctgccagcagcagctgcccgccactggagtccccattacccatcagaggtttgaccagatgagggacatgtttgacgattacgttagaacccggaccctgcacaactggaaattttgggtcttcagcatcctgattagaccactcttcgaaagcttcaacggcatggtaagcactgcttccgtgcataccctccgacaaacatccctcgcatggctggaccagtactgctcgcttcccgccctgagaccaactgtgctgaatagccttaggcagctcggtactagtacctctatcctgacagatcctgggcggatacccgagcaagccactcgcgccgtgaccgaaggcaccctgggcaagccattatag

SEQ ID NO: 226239 - DNA, 2559 bp, Artificial Sequence
  derived and/or modified sequence
atggcaggggctttagctggactggcagcaggcctccaggtgccacgcgttgcgccttcacccgattccgacagtgacactgactctgaagacccgagccttcgcagatctgccggtggcctgctgagatcgcaggttattcatagtggccacttcatggtcagctccccacacagcgacagccttccacgccgaagagaccaggaaggcagtgtagggccatctgacttcgggccacggagtatcgacccaaccctgacccgactctttgagtgcctgagtctcgcttacagcggtaagttggtcagtcccaagtggaagaactttaagggactgaagctgctatgtcgcgataagatacgtctgaacaatgccatctggcgagcctggtatatccagtacgtgaaacgacgtaaaagccccgtctgtgggtttgtgacacccctacaggggcctgaagcagacgcacacagaaagccagaagcagtggtgctggaaggaaattactggaaacgcaggattgaagtcgttatgagggagtaccacaagtggagaatttactataaaaagagattacgaaagcctagtcgtgaggacgacctcctggcacctaagcaggccgagggccgatggccgcctccagagcagtggtgtaagcaacttttctcgtccgtcgtgcccgttctgttgggagatcctgaggaagaacctgggggacgacagctgctggatttgaactgttttttgagcgatatctcagacacgctgttcaccatgacacagagcgggccaagcccgctgcagctgcctcctgaagatgcgtatgtcggcaatgccgacatgatccagccagacctgactcccctccaaccctcattggatgacttcatggatatatcggattttttcaccaactcacgcttgcctcagcctcccatgccttccaatttccccgaaccaccttcttttagtccagtcgtagactcgctctttagctcaggtacgctgggtcctgaagttcccccagccagttctgccatgactcacctgagtggtcattcacgccttcaggcccgaaatagctgcccgggtccacttgactcctcagcatttcttagctccgattttctcctgccggaggacccaaagcccagactcccacctccgcctgttcctccacccctgttacactatcccccacccgcaaaagtgcccggacttgagccttgtccaccccctccttttccacccatggcgcctcctactgctctcttacaggaagagcccttattttccccgcgattccctttccccaccgtgcctcctgctcccggagtttcacccctgcccgcacctgcagccttcccccctaccccccagtctgtaccaagccccgcaccaacccccttccctatcgaactactgcccctaggatacagtgagccggcttttggaccatgtttttccatgcccagggggaaaccgcctgctcctagtcctcgcggacagaaggcctcacctcctacccttgctcctgccactgctagccctccgacaacggcaggttccaacaacccgtgtctgacacaactgctgacagcagccaagcctgagcaagcccttgagcccccactcgtgtccagtacactgctgcggtcgccgggaagcccacaagaaaccgtgccagaattcccatgcaccttcctgccgcctacccccgcacctaccccaccccgaccacctcccggacccgctaccctggctccatcaagacccctactggtgccaaaggctgagcggctaagtcccccagcacctagtggctcggagcgaaggctcagcggggacctgtctagcatgcccggtcccggaacacttagcgtgcgagttagcccccctcagcctatactgtctcgaggtaggcctgattcaaataagaccgagaatcgtcgaatcacccatataagtgcagagcagaaacggcgttttaatatcaagttggggtttgacaccctgcatggcctcgtgtccactctaagtgcgcagccatcgctgaaagtgagcaaggcaacgacacttcagaagactgcagaatacatcctgatgttgcaacaggagagagccggactgcaagaagaagcacagcaactcagagacgaaattgaggagttaaacgccgcaatcaatctctgtcaacagcagctccccgctaccggagtcccaatcacacaccagcgattcgaccaaatgagggatatgtttgacgattacgttcgaacacgcactctgcataactggaagttttgggtgttctctatcctgatacggcctctgtttgaatcgttcaatggcatggtttcaacagctagcgtgcacacattgagacagacttctctcgcatggctggaccaatattgctccctgcctgctcttaggcctactgttctgaattccctgcgacagttggggacgtcaacctccattctgactgatcccggaagaataccagaacaagccactagggccgtgaccgaaggaacccttggtaaaccgctgtag

SEQ ID NO: 226240 - DNA, 2280 bp, Artificial Sequence
  derived and/or modified sequence
atggctggggcactggccggactggccgcaggactgcaggtgccaagggtggctccttcgcccgacagtgatagcgataccgattccgaggatccaagtctcagaagatcagctgggggactcctgcggagtcaagtcatccacagtggccattttatggtgtccagccctcatagcgactccctccccaggcggagagatcaggaaggctccgtgggacctagcgatttcgggccacgcagcatagacccaacactcactcggctgtttgagtgcctctctctggcctattcagggaagctcgttagtcctaaatggaagaactttaagggtctgaaactattgtgcagagataaaatcaggctcaacaacgcaatctggcgcgcttggtacatccagtacgttaagagacggaagagcccggtctgtggctttgttacgcctctgcagggacctgaggctgatgctcataggaagccagaagcagttgtcttagagggtaattattggaagaggagaattgaactccctcccgaagacgcgtacgtgggcaacgctgacatgattcaacctgatctaacacctctacagccttctctagacgatttcatggatatttctgatttctttacaaactctcggttaccccaaccaccaatgcccagcaacttccccgagccaccaagctttagccccgttgtggacagcctcttttcatcaggaaccttaggacccgaggtcccccctgcctccagcgccatgacacacctttcaggacattctcggctgcaggccaggaatagttgcccagggccactggactcgtccgcttttctgtcatccgactttctcttgccagaggatcccaagcctaggctgccgccaccacccgtaccgccaccattgctacactacccccctccagccaaagtgcctggtttggaaccatgtccacctcccccttttcccccaatggcgccaccgactgctctgctccaagaagagccgcttttttcaccacggtttccatttccgaccgttccaccggctcctggcgtcagcccacttccggcacccgctgcctttccaccaactcctcagtctgtgcccagtccggctcctactccattccccattgagttactgccgcttggatattcggagcctgccttcgggccatgtttttctatgcctcgcggaaagccacccgctccaagtccccgtggacagaaagcctcccctcccactttggctcccgcaactgcttcccccccaactaccgctggttcaaacaatccctgtctgactcagttactcacagcagctaagcccgagcaggctctggagcctcccttagtctcttcaacactgctgcggagcccgggaagtccccaggagaccgtacctgaattcccctgtacttttctgcctcccacccccgcacctacgccccctaggcccccaccaggccctgccaccctcgcaccttccagacccctgctcgtgcccaaggccgagcggctctctcccccagctcctagtgggtccgaaagacgcctttcaggagacctgtcatctatgcccggtcccggaaccctgtccgtccgagtctcgcctcctcagcctatccttagtaggggacgcccagactcgaacaagacagaaaataggagaatcacccacataagcgcagaacagaaacgacggtttaatatcaagcttgggtttgacacgctgcatggattagtgtcaacactaagtgctcaaccatcactgaaggtgtctaaggcaactacactgcagaagaccgctgagtatatcctgatgttgcagcaggagagagcaggcttgcaggaagaggctcagcagttacgggatgagatcgaggaactaaacgccgctattaatctctgtcagcagcaacttcctgccactggcgttccaatcacgcaccagcggttcgatcagatgagagacatgttcgatgattacgtgaggactcgcactctccataactggaaattttgggtcttttcaatcctcattaggccactgtttgagtcctttaatggcatggtgtccacagcctctgttcacaccctgaggcaaaccagtcttgcctggctcgaccagtactgctcgctcccagcacttcgcccaactgtcttgaactccctccggcagctcggaacaagcactagcattctcaccgacccaggaagaatacctgagcaggcaacccgggctgtgaccgaaggcacgctgggaaaaccactttag

SEQ ID NO: 226241 - DNA, 2559 bp, Artificial Sequence
  derived and/or modified sequence
atggccggcgccctggccggcctggccgccggcctgcaggtgcccagagtggcccccagccccgacagcgacagcgacaccgacagcgaggaccccagcctgagaagaagcgccggcggcctgctgagaagccaggtgatccacagcggccacttcatggtgagcagcccccacagcgacagcctgcccagaagaagagaccaggagggcagcgtgggccccagcgacttcggccccagaagcatcgaccccaccctgaccagactgttcgagtgcctgagcctggcctacagcggcaagctggtgagccccaagtggaagaacttcaagggcctgaagctgctgtgcagagacaagatcagactgaacaacgccatctggagagcctggtacatccagtacgtgaagagaagaaagagccccgtgtgcggcttcgtgacccccctgcagggccccgaggccgacgcccacagaaagcccgaggccgtggtgctggagggcaactactggaagagaagaatcgaggtggtgatgagagagtaccacaagtggagaatctactacaagaagagactgagaaagcccagcagagaggacgacctgctggcccccaagcaggccgagggcagatggcccccccccgagcagtggtgcaagcagctgttcagcagcgtggtgcccgtgctgctgggcgaccccgaggaggagcccggcggcagacagctgctggacctgaactgcttcctgagcgacatcagcgacaccctgttcaccatgacccagagcggccccagccccctgcagctgccccccgaggacgcctacgtgggcaacgccgacatgatccagcccgacctgacccccctgcagcccagcctggacgacttcatggacatcagcgacttcttcaccaacagcagactgccccagccccccatgcccagcaacttccccgagccccccagcttcagccccgtggtggacagcctgttcagcagcggcaccctgggccccgaggtgccccccgccagcagcgccatgacccacctgagcggccacagcagactgcaggccagaaacagctgccccggccccctggacagcagcgccttcctgagcagcgacttcctgctgcccgaggaccccaagcccagactgccccccccccccgtgcccccccccctgctgcactaccccccccccgccaaggtgcccggcctggagccctgcccccccccccccttcccccccatggccccccccaccgccctgctgcaggaggagcccctgttcagccccagattccccttccccaccgtgccccccgcccccggcgtgagccccctgcccgcccccgccgccttcccccccaccccccagagcgtgcccagccccgcccccacccccttccccatcgagctgctgcccctgggctacagcgagcccgccttcggcccctgcttcagcatgcccagaggcaagccccccgcccccagccccagaggccagaaggccagcccccccaccctggcccccgccaccgccagcccccccaccaccgccggcagcaacaacccctgcctgacccagctgctgaccgccgccaagcccgagcaggccctggagccccccctggtgagcagcaccctgctgagaagccccggcagcccccaggagaccgtgcccgagttcccctgcaccttcctgccccccacccccgcccccaccccccccagacccccccccggccccgccaccctggcccccagcagacccctgctggtgcccaaggccgagagactgagcccccccgcccccagcggcagcgagagaagactgagcggcgacctgagcagcatgcccggccccggcaccctgagcgtgagagtgagccccccccagcccatcctgagcagaggcagacccgacagcaacaagaccgagaacagaagaatcacccacatcagcgccgagcagaagagaagattcaacatcaagctgggcttcgacaccctgcacggcctggtgagcaccctgagcgcccagcccagcctgaaggtgagcaaggccaccaccctgcagaagaccgccgagtacatcctgatgctgcagcaggagagagccggcctgcaggaggaggcccagcagctgagagacgagatcgaggagctgaacgccgccatcaacctgtgccagcagcagctgcccgccaccggcgtgcccatcacccaccagagattcgaccagatgagagacatgttcgacgactacgtgagaaccagaaccctgcacaactggaagttctgggtgttcagcatcctgatcagacccctgttcgagagcttcaacggcatggtgagcaccgccagcgtgcacaccctgagacagaccagcctggcctggctggaccagtactgcagcctgcccgccctgagacccaccgtgctgaacagcctgagacagctgggcaccagcaccagcatcctgaccgaccccggcagaatccccgagcaggccaccagagccgtgaccgagggcaccctgggcaagcccctgtag

SEQ ID NO: 226242 - DNA, 2280 bp, Artificial Sequence
  derived and/or modified sequence
atggccggcgccctggccggcctggccgccggcctgcaggtgcccagagtggcccccagccccgacagcgacagcgacaccgacagcgaggaccccagcctgagaagaagcgccggcggcctgctgagaagccaggtgatccacagcggccacttcatggtgagcagcccccacagcgacagcctgcccagaagaagagaccaggagggcagcgtgggccccagcgacttcggccccagaagcatcgaccccaccctgaccagactgttcgagtgcctgagcctggcctacagcggcaagctggtgagccccaagtggaagaacttcaagggcctgaagctgctgtgcagagacaagatcagactgaacaacgccatctggagagcctggtacatccagtacgtgaagagaagaaagagccccgtgtgcggcttcgtgacccccctgcagggccccgaggccgacgcccacagaaagcccgaggccgtggtgctggagggcaactactggaagagaagaatcgagctgccccccgaggacgcctacgtgggcaacgccgacatgatccagcccgacctgacccccctgcagcccagcctggacgacttcatggacatcagcgacttcttcaccaacagcagactgccccagccccccatgcccagcaacttccccgagccccccagcttcagccccgtggtggacagcctgttcagcagcggcaccctgggccccgaggtgccccccgccagcagcgccatgacccacctgagcggccacagcagactgcaggccagaaacagctgccccggccccctggacagcagcgccttcctgagcagcgacttcctgctgcccgaggaccccaagcccagactgccccccccccccgtgcccccccccctgctgcactaccccccccccgccaaggtgcccggcctggagccctgcccccccccccccttcccccccatggccccccccaccgccctgctgcaggaggagcccctgttcagccccagattccccttccccaccgtgccccccgcccccggcgtgagccccctgcccgcccccgccgccttcccccccaccccccagagcgtgcccagccccgcccccacccccttccccatcgagctgctgcccctgggctacagcgagcccgccttcggcccctgcttcagcatgcccagaggcaagccccccgcccccagccccagaggccagaaggccagcccccccaccctggcccccgccaccgccagcccccccaccaccgccggcagcaacaacccctgcctgacccagctgctgaccgccgccaagcccgagcaggccctggagccccccctggtgagcagcaccctgctgagaagccccggcagcccccaggagaccgtgcccgagttcccctgcaccttcctgccccccacccccgcccccaccccccccagacccccccccggccccgccaccctggcccccagcagacccctgctggtgcccaaggccgagagactgagcccccccgcccccagcggcagcgagagaagactgagcggcgacctgagcagcatgcccggccccggcaccctgagcgtgagagtgagccccccccagcccatcctgagcagaggcagacccgacagcaacaagaccgagaacagaagaatcacccacatcagcgccgagcagaagagaagattcaacatcaagctgggcttcgacaccctgcacggcctggtgagcaccctgagcgcccagcccagcctgaaggtgagcaaggccaccaccctgcagaagaccgccgagtacatcctgatgctgcagcaggagagagccggcctgcaggaggaggcccagcagctgagagacgagatcgaggagctgaacgccgccatcaacctgtgccagcagcagctgcccgccaccggcgtgcccatcacccaccagagattcgaccagatgagagacatgttcgacgactacgtgagaaccagaaccctgcacaactggaagttctgggtgttcagcatcctgatcagacccctgttcgagagcttcaacggcatggtgagcaccgccagcgtgcacaccctgagacagaccagcctggcctggctggaccagtactgcagcctgcccgccctgagacccaccgtgctgaacagcctgagacagctgggcaccagcaccagcatcctgaccgaccccggcagaatccccgagcaggccaccagagccgtgaccgagggcaccctgggcaagcccctgtag

SEQ ID NO: 226243 - protein, 833 aa, Artificial Sequence
  derived and/or modified sequence
MAGALAGLAAGLQVPRVAPSPDSDSDTDSEDPSLRRSAGGLLRSQVIHSGHFMVSSPHSDSLPRRRDQEGSVGPSDFGPRSIDPTLTRLFECLSLAYSGKLVSPKWKNFKGLKLLCRDKIRLNNAIWRAWYIQYVKRRKSPVCGFVTPLQGPEADAHRKPEAVVLEGNYWKRRIEVVMREYHKWRIYYKKRLRKPSREDDLLAPKQAEGRWPPPEQWCKQLFSSVVPVLLGDPEEEPGGRQLLDLNCFLSDISDTLFTMTQSGPSPLQLPPEDAYVGNADMIQPDLTPLQPSLDDFMDISDFFTNSRLPQPPMPSNFPEPPSFSPVVDSLFSSGTLGPEVPPASSAMTHLSGHSRLQARNSCPGPLDSSAFLSSDFLLPEDPKPRLPPPPVPPPLLHYPPPAKVPGLEPCPPPPFPPMAPPTALLQEEPLFSPRFPFPTVPPAPGVSPLPAPAAFPPTPQSVPSPAPTPFPIELLPLGYSEPAFGPCFSMPRGKPPAPSPRGQKASPPTLAPATASPPTTAGSNNPCLTQLLTAAKPEQALEPPLVSSTLLRSPGSPQETVPEFPCTFLPPTPAPTPPRPPPGPATLAPSRPLLVPKAERLSPPAPSGSERRLSGDLSSMPGPGTLSVRVSPPQPILSRGRPDSNKTENRRITHISAEQKRRFNIKLGFDTLHGLVSTLSAQPSLKERAGLQEEAQQLRDEIEELNAAINLCQQQLPATGVPITHQRFDQMRDMFDDYVRTRTLHNWKFWVFSILIRPLFESFNGMVSTASVHTLRQTSLAWLDQYCSLPALRPTVLNSLRQLGTSTSILTDPGRIPEQATRAVTEGTLGKPL

SEQ ID NO: 226244 - DNA, 2502 bp, Artificial Sequence
  derived and/or modified sequence
atggccggcgctcttgctggcctggccgctggtttacaggtccctagagtggccccaagccctgacagcgacagcgacacagacagcgaagatccaagcttacggaggtcagctggaggcctgctgaggtctcaggttattcattctggacacttcatggtgtcttccccccacagcgacagcctgccccgccgacgcgaccaagaggggtctgtgggaccctcagacttcggacctaggtccatcgatcctacattgaccaggctgttcgaatgtctgagcttggcgtactcaggcaaattggtgagccctaaatggaaaaattttaagggcctgaagctcctctgtcgggataaaatccgacttaacaatgcgatttggagggcgtggtacattcagtacgtgaagcgtcggaagtcacccgtttgtgggtttgttacccctttgcagggccccgaggcagacgcgcaccgcaagccggaggccgtggtcttagaggggaactactggaagcgcagaatcgaagtcgtgatgagagaatatcacaaatggagaatttattacaagaagagactgaggaagccgtcacgggaagacgacttacttgctcctaagcaggccgaggggaggtggccaccgcccgaacaatggtgtaagcagctcttttcctctgtggtccctgttctcttgggcgatcccgaagaggagcccgggggacggcaactgctggacctgaattgcttcctgtccgacattagcgacacactgtttaccatgacccaatccgggccttcacctttacagctaccaccagaagacgcgtacgtcggtaatgctgatatgattcagccggacctcacccctctgcagcctagcctggatgattttatggatatatccgacttcttcactaattcccgactgccacagcccccaatgccctccaactttccagagcctccatcgtttagtcccgtcgtcgactccttgttctcttccggcactttaggacctgaagtaccgcccgcatcctccgccatgacacacttaagtggccacagtaggctgcaggcgagaaattcctgcccgggaccgctggatagttctgcattcttatcgtccgacttcctactgcccgaagatcccaaaccacggctgcctcctcctcctgttcctcctcctctgttgcattacccccccccggctaaagtgccgggcctggaaccttgccccccacccccctttcctcccatggcaccccccacagcactgctgcaggaagagcctctgtttagtccgcgatttcccttccccactgtacctccagcacccggagtcagccctcttcccgcgcccgccgctttccccccgacacctcagagcgttccaagtccagcccctactcccttccccatcgagctattacctcttggatactcagaacccgcctttggtccctgcttctcaatgccgcgaggaaagccgccagccccttcccccagaggacagaaagcgtctcctcccactttagcccccgctacggccagtccccctaccactgccgggtctaataatccctgtctgacccagctgctcactgctgctaaaccagagcaggccctcgaacctcccctggtgtccagtactctgctgcggagccccgggagccctcaggaaaccgtgcccgagtttccatgcacattcctaccaccaactccagcaccaacacccccacggcctcctccaggacccgctacattggcaccgtctcgcccactcttggttcccaaagccgaacgactcagccccccagccccgagcgggtctgagaggcggctgtcaggggatctgtcaagcatgccgggacccgggaccctctcggtgagagtctctccccctcaacccattctgagtcggggccggcctgactccaacaagacagaaaatcgaagaatcacacacataagcgctgaacagaaacggagatttaatattaagctgggattcgataccttacacggcctggtttctactctttctgcccagccaagcctgaaggagcgggccgggcttcaggaggaggcccagcagcttagggacgagattgaggaattaaatgccgccattaatttgtgtcaacaacagctccctgcaaccggggtgcctatcacacatcagcgattcgatcaaatgcgtgatatgtttgatgattacgtcagaaccagaaccctgcacaactggaagttttgggtgtttagcatccttatcagacctctgttcgaaagcttcaatggtatggtgtccacagcctccgttcataccctgcggcagacaagtctggcgtggctggaccagtactgtagtttgcctgctctgcgacctactgttctcaacagtctgcgccagctaggaactagcacgagcattttgaccgatcccggccgcattccggagcaggcaaccagagctgttaccgagggcacattggggaagccgctctag

SEQ ID NO: 226245 - DNA, 2502 bp, Artificial Sequence
  derived and/or modified sequence
atggccggggccctggccggcctggccgccggcctgcaggtgccccgggtggcccccagcccagacagcgacagcgacacagattctgaggaccccagcctgcggcgctctgctgggggcctgctgcggagccaggtgatccacagcggccacttcatggtgagcagcccccacagcgacagcctgcccaggagaagagaccaggagggctctgtgggccccagcgactttggccccaggagcattgaccccaccctgacccggctgtttgaatgtctgagcctggcctacagcggcaagctggtgagccccaagtggaagaacttcaagggcctgaagctgctgtgccgggacaagatccggctgaacaatgccatctggagggcctggtacatccagtatgtgaagaggaggaagagccctgtgtgtggctttgtgacccccctgcagggccctgaggctgatgcccacaggaagccagaggccgtggtgctggagggcaactactggaagaggcgcatcgaggtggtgatgagggagtaccacaagtggaggatctactacaagaagaggctgaggaagcccagccgggaggatgacctgctggcccccaagcaggccgagggccgctggcccccacctgagcagtggtgcaagcagctgttcagctctgtggtgcctgtgctgctgggggaccctgaggaggagcccggcggccggcagctgctggacctgaactgcttcctgagtgacatcagtgacaccctcttcaccatgacccagagcggccccagccccctgcagctgcccccagaagatgcctacgtgggcaatgctgacatgatccagcctgacctgacccccctgcagcccagcctggatgacttcatggacatcagtgacttcttcaccaacagccggctgccccagccccccatgcccagcaacttccctgagccccccagcttcagccctgtggtggacagcctcttcagcagcggcaccctgggccctgaggtgcccccagccagcagcgccatgacccacctgagcggccacagccggctgcaggccaggaacagctgccccggccccctggacagcagcgccttcctgagcagtgacttcctgctgcctgaggaccccaagccccggctgcccccacctcctgtgcccccacccctgctgcactacccacctccagccaaggtgcccggcctggagccctgccccccaccacccttcccccccatggccccacccacagccctgctgcaggaggagcccctcttcagcccccgcttccccttccccaccgtgcccccagcccctggggtgagccccctgcctgccccagctgccttcccccccaccccccagagcgtgcccagccctgcccccacccccttccccatcgagctgctgcccctgggctacagcgagcccgccttcggcccctgcttctccatgccccggggcaagcccccagcccccagcccccggggccagaaggccagcccccccaccctggccccagccacagccagcccccccaccacagctggcagcaacaacccctgcctgacccagctgctgacagctgccaagccagagcaggccctggagccccccctggtgagcagcaccctgctgcggagccctggcagcccccaggagaccgtgcctgagttcccctgcaccttcctgccccccaccccagcccccaccccaccccggcccccacctggccctgccaccctggcccccagccggcccctgctggtgcccaaggccgagcggctgagccccccagcccccagcggcagcgagcggcggctgagcggggacctgagctccatgcctggccctggcaccctgtctgtgcgggtgagccccccccagcccatcctgagccggggccgcccagacagcaacaagacagagaacagacgcatcacccacatctctgctgagcagaagaggcgcttcaacatcaagctgggctttgacaccctgcacggcctggtgtccaccctgagcgcccagcccagcctgaaggagagagctggcctgcaggaggaggcccagcagctgagagatgaaattgaggagctgaatgctgccatcaacctgtgccagcagcagctgcctgccactggagtgcccatcacccaccagagatttgaccagatgagggacatgtttgatgattatgtgaggaccaggaccctgcacaactggaagttctgggtgttcagcatcctgatccggcccctgtttgagagcttcaacggcatggtgtccacagcctctgtgcacaccctgcggcagaccagcctggcctggctggaccagtactgcagcctgcctgccctgcggcccaccgtgctgaacagcctgcggcagctgggcaccagcaccagcatcctgacagatcctggccgcatccctgagcaggccaccagggctgtgacagagggcaccctgggcaagcccctgtag

SEQ ID NO: 226246 - DNA, 3173 bp, Artificial Sequence
  derived and/or modified sequence
atggccggcgcgctggcaggtctggccgcgggcttgcaggtcccgcgggtcgcgcccagcccagactcggactcggacacagactcggaggacccgagtctccggcgcagcgcgggcggcttgctccgctcgcaggtcatccacagcggtcacttcatggtgtcgtcgccgcacagcgactcgctgccccggcggcgcgaccaggaggggtccgtggggccctccgacttcgggccgcgcagtatcgaccccacactcacacgcctcttcgagtgcttgagcctggcctacagtggcaagctggtgtctcccaagtggaagaatttcaaaggcctcaagctgctctgcagagacaagatccgcctgaacaacgccatctggagggcctggtatatccagtatgtgaagcggaggaagagccccgtgtgtggcttcgtgacccccctgcaggggcctgaggctgatgcgcaccggaagccggaggccgtggtcctggaggggaactactggaagcggcgcatcgaggtggtgatgcgggaataccacaagtggcgcatctactacaagaagcggctccgtaagcccagcagggaagatgacctcctggcccctaagcaggcggaaggcaggtggccgccgccggagcaatggtgcaaacagctcttctccagtgtggtccccgtgctgctgggggacccagaggaggagccgggtgggcggcagctcctggacctcaattgctttttgtccgacatctcagacactctcttcaccatgactcagtccggcccttcgcccctgcagctgccgcctgaggatgcctacgtcggcaatgctgacatgatccagccggacctgacgccactgcagccaagcctggatgacttcatggacatctcagatttctttaccaactcccgcctcccacagccgcccatgccttcaaacttcccagagccccccagcttcagccccgtggttgactccctcttcagcagtgggaccctgggcccagaggtgcccccggcttcctcggccatgacccacctctctggacacagccgtctgcaggctcggaacagctgccctggccccttggactccagcgccttcctgagttctgatttcctccttcctgaagaccccaagccccggctcccaccccctcctgtacccccacctctgctgcattaccctccccctgccaaggtgccaggcctggagccctgccccccacctcccttccctcccatggcaccacccactgctttgctgcaggaagagcctctcttctctcccaggtttcccttccccaccgtccctcctgccccaggagtgtctccgctgcctgctcctgcagccttcccacccaccccacagtctgtccccagcccagcccccacccccttccccatagagcttctacccttggggtattcggagcctgcctttgggccttgcttctccatgcccagaggcaagccccccgccccatcccctaggggacagaaagccagcccccctaccttagcccctgccactgccagtccccccaccactgcggggagcaacaacccctgcctcacacagctgctcacagcagctaagccggagcaagccctggagccaccacttgtatccagcaccctcctccggtccccagggtccccgcaggagacagtccctgaattcccctgcacattccttcccccgaccccggcccctacaccgccccggccacctccaggcccggccacattggccccttccaggcccctgcttgtccccaaagcggagcggctctcacccccagcgcccagcggcagtgaacggcggctgtcaggggacctcagctccatgccaggccctgggactctgagcgtccgtgtctctcccccgcaacccatcctcagccggggccgtccagacagcaacaagaccgagaaccggcgtatcacacacatctccgcggagcagaagcggcgcttcaacatcaagctggggtttgacacccttcatgggctcgtgagcacactcagtgcccagcccagcctcaaggagcgtgcgggcttgcaggaggaggcccagcagctgcgggatgagattgaggagctcaatgccgccattaacctgtgccagcagcagctgcccgccacaggggtacccatcacacaccagcgttttgaccagatgcgagacatgtttgatgactacgtccgaacccgtacgctgcacaactggaagttctgggtgttcagcatcctcatccggcctctgtttgagtccttcaacgggatggtgtccacggcaagtgtgcacaccctccgccagacctcactggcctggctggaccagtactgctctctgcccgctctccggccaactgtcctgaactccctacgccagctgggcacatctaccagtatcctgaccgacccgggccgcatccctgagcaagccacacgggcagtcacagagggcacccttggcaaacctttatagtcctggccagaccctgctgctcactcagctgccctgggggctgctttccctgggcacgggctccagggatcatctctgggcactcccttcctgccccaggccctggctctgcccttccctggggggtggagcagggtccaggtttcacacttgccacctcctggaggtcaagaagagcagagtccccgtccctgctctgccactgtgctccagcaccgtgaccttgggtgactcgtccgctgtctttggaccgctgtgtttcaatctgcaaaatggggatggggaaggttcaatcagcagatgacccccaggccttggcagctgtgacattgggggcctaggctggcaactccgggggctcaacggtggaaagaggaggatgctgtttctctgtcacctccacttgctccccgacaggtggggcacagacctctgttcctgagcagagaagcagaaaaggaggttccctctctctgctccttcactgctgacccagaggggctgcaggatggtttcccctgggagaggccaggagggcctgatcccaggagacaccagggccagagtgaccacagcagggcaggcatcatgtgtgtgtgtgtgtgtggatgtgtgtgtgtgggttttgtaaagaattcttgaccaataaaagcaaaaactgtctgctggtt

SEQ ID NO: 226247 - DNA, 2502 bp, Artificial Sequence
  derived and/or modified sequence
atggccggcgccctggccggcctggccgccggcctgcaggtgccccgcgttgccccatcacccgatagcgattctgatacggatagcgaggatccatccttgagacggtccgcaggcgggcttttacgtagccaggtcatccacagtggtcacttcatggtctcttcaccacacagcgatagcctcccgaggagaagggaccaagaagggtcagttggaccctccgattttggaccccggtccatagatcccaccctgactaggctctttgagtgtctgtctttggcatattctggcaagttggtttcacctaaatggaaaaattttaaaggcctcaagctgctttgccgcgacaaaatacgcctcaataatgccatctggcgggcatggtatatccagtatgtgaaaaggagaaagtcaccggtgtgtggtttcgtaacccctctgcaggggccagaggccgacgctcatcgcaaaccagaagccgtggttttggaaggaaactactggaaacggcgtatcgaagtcgtcatgagagagtatcacaagtggcggatttattacaagaagcggctgagaaagccttcgcgagaagatgacctgttagcaccgaagcaggcagagggccgctggccgccgcccgagcaatggtgtaaacagctattcagcagcgtggtcccagtgttgctgggagatcctgaagaggaaccaggcggaagacagttgctggacctcaactgcttccttagtgatatcagtgacaccctttttactatgacacagtcagggccctcccccctccaactgcctccggaagacgcttacgtaggaaatgcggatatgatccagccagatctcactcctctgcagccttccctcgacgatttcatggatatttctgatttctttaccaacagtagactcccccagccccccatgccaagcaacttccccgagcccccaagcttctcacctgtggtagattctctcttttcttctgggacacttggtcctgaggtcccgccagcctcctccgccatgacccacttgtcaggtcactcaaggcttcaggcgagaaacagctgtcctgggcctctggactcttccgccttcctgagctctgacttcttactgcctgaggatcccaaaccaagattgcctcctccaccagtcccaccccccctgctccattaccccccccctgctaaggtccccggcttagaaccctgtcctcccccccccttcccccccatggctcctccgacggctctgctgcaggaagaaccgctcttcagcccaaggttcccatttcccacagtcccacccgcacctggggtatccccgctccctgccccggctgcatttcctcctacaccgcagagcgtcccttctcccgcaccgaccccattccctatcgagctgctgcccctcggctacagcgaaccagccttcggcccgtgttttagtatgcctagaggcaaaccgcccgcccccagtcctcgggggcagaaggcctccccccccactctggccccagccacagcttcacccccgaccacagctgggagcaacaacccttgtctaactcagctgttaaccgcagcaaagcctgagcaagccctggagcctcctctagtaagctctacactcctgcggagtcccggctcaccacaggagaccgtgccggagttcccatgcactttccttccacctacgccagctccaaccccacctcgaccacccccaggaccagcaaccctcgccccatctaggccacttctggtgccaaaggcggagagactttcaccccctgctccgtccgggtccgagagaaggctgagcggtgatctgtcgagcatgccaggaccggggactttatccgtgagggtgtcaccacctcagcccattttatctcgcggaagacccgattcaaacaaaacggaaaacaggagaatcacacatatcagcgcggagcagaaaagaagatttaacattaagctcggctttgataccctccacgggctcgtttcaaccttgagcgcccagccatccctgaaggaaagggccgggctgcaggaggaggcccagcaactgagagacgagatcgaggagctcaatgccgcgatcaacttatgccaacagcagctccccgccaccggcgtgccaattacacaccagaggtttgaccagatgagggacatgtttgatgactatgtcagaaccagaaccctgcataattggaaattctgggtatttagcatcctgatccgccccctgtttgagtcattcaacggaatggtgtccacagccagtgtccacactctcaggcagaccagtctcgcatggctcgatcagtattgcagcctccctgcgctcaggccgacagttttgaattcgctccgacaactgggaacctctacttctatactgactgatccagggaggattcctgagcaggccacccgggccgtgactgaaggaactctgggcaagcccctctag

SEQ ID NO: 226248 - DNA, 2502 bp, Artificial Sequence
  derived and/or modified sequence
atggctggtgccctggccggactggccgcaggacttcaggtgcctcgcgtcgctccctcccctgattcagactctgacaccgacagtgaggacccctccctgcggagaagtgccggaggacttttacgtagccaggtgatacattcaggacacttcatggttagcagcccccacagcgactccctgcctaggaggagggatcaggagggtagtgttggaccatcagatttcggtccacggagcatagaccctaccctaaccagactattcgaatgtttgtcccttgcatattctgggaaactggtctctccaaaatggaaaaattttaaggggttaaagctactgtgccgcgacaagatccgactgaataacgctatctggagggcatggtatatccagtatgtgaagaggcgtaagtcacccgtctgcggttttgtgacccctctgcagggacccgaggccgacgcacacagaaaaccagaagcagtcgtcctcgaaggaaattattggaagagacggattgaggtggtgatgagagaataccacaagtggagaatttattataagaagaggttacgcaagccgtcacgagaagatgacttgttagctcctaagcaggctgaaggtcgatggcctcctcctgaacagtggtgtaaacagctgttcagttctgtggtccctgtactgcttggagatcccgaggaggagccagggggaaggcagctgctggacctcaattgtttcctctcagatattagtgacactcttttcacaatgacacaaagcggtcccagccccctgcaactgcctcctgaagatgcctacgttggaaatgcagatatgatccagccagatctgacacccttgcaaccaagtttagacgactttatggacatttccgacttcttcactaattcccgacttccacagcctcctatgccatcgaattttcctgagccccctagtttttctcccgtggttgatagtctgttcagcagtgggacacttggaccagaggtgccacccgcaagctcagctatgacacatctctcaggtcactcgagactgcaggccagaaattcttgccctggaccgctggacagctctgcattcctctcttcagactttttactgcccgaagatcctaagccgaggctgcctcctccacctgtgcctccccctctgctgcactatcctccgcctgccaaggtgcctggccttgagccttgccctccgccaccttttccgccaatggccccaccgacggctcttctgcaggaagagcccctgttcagtccaaggttcccatttccaacggtgcccccagcacctggagtgagcccgcttccggctcccgctgctttcccccctaccccacagtcagtcccatcacctgccccaaccccttttcccatcgaattgctcccactcgggtactccgaacctgcattcggaccctgttttagcatgccacgcggtaagccaccagccccatccccaaggggacagaaggcgtcgccccctaccctggcacctgcgaccgccagccctccgacaactgccggtagcaataatccttgccttacccagctgcttactgcagcaaagcctgaacaggcgctcgaacctccactggttagttccacactgctccggtcaccgggaagtccccaggagaccgttcccgaatttccctgtacctttctcccccctactccggcacccacaccacccagaccaccaccgggacctgccaccctcgcgccatccagaccactgttggtgcctaaggccgaacggctgagcccccctgccccatcaggatctgagcgacgacttagcggagatctgagctcgatgcccggacccggaactctttccgtccgggtgtccccgccacagcccatcctgagccgtggacggccagattcaaacaaaaccgagaataggcgcattactcatatcagcgcagaacagaaacgccgtttcaacattaagctcgggttcgataccctccatgggttggtttctacactttcagcccagccatccctgaaagagcgcgcaggcctacaggaagaggcccaacagttgcgtgatgagatcgaggagctgaacgccgcaatcaatctctgtcagcagcagctccccgcaacgggggtgcctattacgcaccaaaggttcgatcagatgcgagacatgttcgacgactatgtcaggacaaggacccttcacaactggaagttttgggtttttagcattctcattagacctctctttgagtctttcaacggaatggtgtctactgcctctgtccacacacttcgacagacctcgcttgcctggctggatcagtattgttcactgcccgcactgaggcccaccgtcctgaactcactcagacagctcggcacctccactagcatcctgacggacccaggacgcatcccagaacaggcaactagggccgtgactgaaggcactttgggcaagcctctgtag

SEQ ID NO: 226249 - DNA, 2502 bp, Artificial Sequence
  derived and/or modified sequence
atggccggcgccctggccggcctggccgccggcctgcaggtgcccagagtggcccccagccccgacagcgacagcgacaccgacagcgaggaccccagcctgagaagaagcgccggcggcctgctgagaagccaggtgatccacagcggccacttcatggtgagcagcccccacagcgacagcctgcccagaagaagagaccaggagggcagcgtgggccccagcgacttcggccccagaagcatcgaccccaccctgaccagactgttcgagtgcctgagcctggcctacagcggcaagctggtgagccccaagtggaagaacttcaagggcctgaagctgctgtgcagagacaagatcagactgaacaacgccatctggagagcctggtacatccagtacgtgaagagaagaaagagccccgtgtgcggcttcgtgacccccctgcagggccccgaggccgacgcccacagaaagcccgaggccgtggtgctggagggcaactactggaagagaagaatcgaggtggtgatgagagagtaccacaagtggagaatctactacaagaagagactgagaaagcccagcagagaggacgacctgctggcccccaagcaggccgagggcagatggcccccccccgagcagtggtgcaagcagctgttcagcagcgtggtgcccgtgctgctgggcgaccccgaggaggagcccggcggcagacagctgctggacctgaactgcttcctgagcgacatcagcgacaccctgttcaccatgacccagagcggccccagccccctgcagctgccccccgaggacgcctacgtgggcaacgccgacatgatccagcccgacctgacccccctgcagcccagcctggacgacttcatggacatcagcgacttcttcaccaacagcagactgccccagccccccatgcccagcaacttccccgagccccccagcttcagccccgtggtggacagcctgttcagcagcggcaccctgggccccgaggtgccccccgccagcagcgccatgacccacctgagcggccacagcagactgcaggccagaaacagctgccccggccccctggacagcagcgccttcctgagcagcgacttcctgctgcccgaggaccccaagcccagactgccccccccccccgtgcccccccccctgctgcactaccccccccccgccaaggtgcccggcctggagccctgcccccccccccccttcccccccatggccccccccaccgccctgctgcaggaggagcccctgttcagccccagattccccttccccaccgtgccccccgcccccggcgtgagccccctgcccgcccccgccgccttcccccccaccccccagagcgtgcccagccccgcccccacccccttccccatcgagctgctgcccctgggctacagcgagcccgccttcggcccctgcttcagcatgcccagaggcaagccccccgcccccagccccagaggccagaaggccagcccccccaccctggcccccgccaccgccagcccccccaccaccgccggcagcaacaacccctgcctgacccagctgctgaccgccgccaagcccgagcaggccctggagccccccctggtgagcagcaccctgctgagaagccccggcagcccccaggagaccgtgcccgagttcccctgcaccttcctgccccccacccccgcccccaccccccccagacccccccccggccccgccaccctggcccccagcagacccctgctggtgcccaaggccgagagactgagcccccccgcccccagcggcagcgagagaagactgagcggcgacctgagcagcatgcccggccccggcaccctgagcgtgagagtgagccccccccagcccatcctgagcagaggcagacccgacagcaacaagaccgagaacagaagaatcacccacatcagcgccgagcagaagagaagattcaacatcaagctgggcttcgacaccctgcacggcctggtgagcaccctgagcgcccagcccagcctgaaggagagagccggcctgcaggaggaggcccagcagctgagagacgagatcgaggagctgaacgccgccatcaacctgtgccagcagcagctgcccgccaccggcgtgcccatcacccaccagagattcgaccagatgagagacatgttcgacgactacgtgagaaccagaaccctgcacaactggaagttctgggtgttcagcatcctgatcagacccctgttcgagagcttcaacggcatggtgagcaccgccagcgtgcacaccctgagacagaccagcctggcctggctggaccagtactgcagcctgcccgccctgagacccaccgtgctgaacagcctgagacagctgggcaccagcaccagcatcctgaccgaccccggcagaatccccgagcaggccaccagagccgtgaccgagggcaccctgggcaagcccctgtag

SEQ ID NO: 226250 - protein, 850 aa, Artificial Sequence
  derived and/or modified sequence
MAGALAGLAAGLQVPRVAPSPDSDSDTDSEDPSLRRSAGGLLRSQVIHSGHFMVSSPHSDSLPRRRDQEGSVGPSDFGPRSIDPTLTRLFECLSLAYSGKLVSPKWKNFKGLKLLCRDKIRLNNAIWRAWYIQYVKRRKSPVCGFVTPLQGPEADAHRKPEAVVLEGNYWKRRIEVVMREYHKWRIYYKKRLRKPSREDDLLAPKQAEGRWPPPEQWCKQLFSSVVPVLLGDPEEEPGGRQLLDLNCFLSDISDTLFTMTQSGPSPLQLPPEDAYVGNADMIQPDLTPLQPSLDDFMDISDFFTNSRLPQPPMPSNFPEPPSFSPVVDSLFSSGTLGPEVPPASSAMTHLSGHSRLQARNSCPGPLDSSAFLSSDFLLPEDPKPRLPPPPVPPPLLHYPPPAKVPGLEPCPPPPFPPMAPPTALLQEEPLFSPRFPFPTVPPAPGVSPLPAPAAFPPTPQSVPSPAPTPFPIELLPLGYSEPAFGPCFSMPRGKPPAPSPRGQKASPPTLAPATASPPTTAGSNNPCLTQLLTAAKPEQALEPPLVSSTLLRSPGSPQETVPEFPCTFLPPTPAPTPPRPPPGPATLAPSRPLLVPKAERLSPPAPSGSERRLSGDLSSMPGPGTLSVRVSPPQPILSRGRPDSNKNRRITHISAEQKRRFNIKLGFDTLHGLVSTLSAQPSLKVSKATTLQKTAEYILMLQQERAGLQEEAQQLRDEIEELNAAINLCQQQLPATGVPITHQRFDQMRDMFDDYVRTRTLHNWKFWVFSILIRPLFESFNGMVSTASVHTLRQTSLAWLDQYCSLPALRPTVLNSLRQLGTSTSILTDPGRIPEQATRAVTEGTLGKPL

SEQ ID NO: 226251 - DNA, 2553 bp, Artificial Sequence
  derived and/or modified sequence
atggctggcgccctggccggcctagccgctggcctgcaagtacctcgggtcgcacctagtcccgacagtgattcagacacggattctgaagacccttctttgcgccgttcggccggtggtctgctacgctctcaagtcatccactctggtcatttcatggtttcgtctccccattcagactccctcccgcgacggcgagaccaagagggctccgtcggacctagtgacttcgggccccggtccatcgatcctacgctgacgagactgttcgagtgcctcagcctcgcttattccgggaaacttgtctcaccgaagtggaaaaatttcaaaggcctcaagctgctttgtcgggataaaattcgactgaacaacgcaatttggagagcgtggtacattcaatatgtcaaacgacgcaaaagccccgtctgcgggtttgtgacacctctgcagggccccgaggcggacgcccaccggaagcctgaagccgtggtgctcgagggcaattattggaaacgtcggattgaagtggtgatgcgcgaatatcataaatggcgtatatactataaaaaaagactaaggaagcctagcagggaggacgatttgttggcccccaagcaggctgagggaaggtggccaccaccagaacagtggtgcaagcagctgttctctagtgtggtgcccgttctcctcggcgatcctgaagaagagcccggcgggcgccaactactggatctgaactgcttcctttccgatatcagtgacacactgttcacgatgactcagtctggaccttcccccctccagctgccacccgaagacgcctacgttggaaacgcagatatgatccaaccagacctgaccccgcttcagccaagtctggacgacttcatggacattagcgacttcttcaccaacagtaggctaccccagccaccaatgccatctaattttccagagccgcccagcttcagccccgtcgttgattccttatttagcagtggtactctgggtccggaagtccccccagcatcttccgctatgacacatttgtccggccactctcgattgcaagctcgaaacagctgtccaggtcccctggacagtagcgcgttcctcagtagcgattttctgttaccagaagatcctaagccccgcctgcctcctcccccagtgcccccgccactcctccattacccgccacccgcgaaggtcccgggactcgagccttgtccgcctcccccattcccaccaatggcccctccgactgcccttcttcaggaggagccactgttctcaccgcgattccctttccccacagtgcctcctgccccaggagtgagtcctctgcccgcgcctgcagccttcccccccactccgcaatcagttcccagcccagccccaacgccgttccctatagagcttctgccgctgggatactccgagcccgcttttggcccatgcttctccatgcctagggggaaaccccccgcaccaagtcccagggggcaaaaggctagtccaccaacattggcccctgcaacagcctccccccccactactgcgggatcgaataacccctgcctaacccagctgctgactgctgccaagcccgagcaggctctggagcctcccctcgtctcatctacgctccttcgttccccgggctcacctcaggaaactgtgcctgaatttccttgcacctttctgccgcctacccccgcacctacacccccccgtcccccaccgggcccagcaacgctggcgccatctcggcctctactcgtgccaaaagcagaacgcttatcaccccctgccccaagcggctcagagagacggctgagtggagatttgagctccatgcccgggcctggaacattatcggttcgggtcagccctccacagcctatcttgtctcggggcaggccggatagcaacaaaaaccggcgcataacccatatctctgcagaacagaaacgcaggttcaatatcaagctaggttttgataccctgcatggcctggtgagcacactctccgcacagccgtctctcaaagtgtcgaaagctacaactcttcagaaaactgctgagtatatcctaatgctacagcaggagcgggccggactccaggaggaggcacagcagctgcgggatgaaattgaagagctgaacgccgccatcaacctgtgtcagcagcaattaccagccaccggggtccctatcacccatcagcgctttgaccagatgagggacatgtttgacgattatgtgaggactcggacactgcataactggaaattctgggtattctccatcttaatccggcccttgtttgagtcctttaacggcatggtgtcaactgcctccgtgcataccctccggcaaactagcttggcttggcttgatcaatattgttcactgcccgccttgcggcctactgtactcaacagccttagacagctggggacatcaaccagcatcctcacggaccccggccggattccagaacaggccacaagagcagtgactgagggcacgctggggaagccgttgtag

SEQ ID NO: 226252 - DNA, 2553 bp, Artificial Sequence
  derived and/or modified sequence
atggccggggccctggccggcctggccgccggcctgcaggtgccccgggtggcccccagcccagacagcgacagcgacacagattctgaggaccccagcctgcggcgctctgctgggggcctgctgcggagccaggtgatccacagcggccacttcatggtgagcagcccccacagcgacagcctgcccaggagaagagaccaggagggctctgtgggccccagcgactttggccccaggagcattgaccccaccctgacccggctgtttgaatgtctgagcctggcctacagcggcaagctggtgagccccaagtggaagaacttcaagggcctgaagctgctgtgccgggacaagatccggctgaacaatgccatctggagggcctggtacatccagtatgtgaagaggaggaagagccctgtgtgtggctttgtgacccccctgcagggccctgaggctgatgcccacaggaagccagaggccgtggtgctggagggcaactactggaagaggcgcatcgaggtggtgatgagggagtaccacaagtggaggatctactacaagaagaggctgaggaagcccagccgggaggatgacctgctggcccccaagcaggccgagggccgctggcccccacctgagcagtggtgcaagcagctgttcagctctgtggtgcctgtgctgctgggggaccctgaggaggagcccggcggccggcagctgctggacctgaactgcttcctgagtgacatcagtgacaccctcttcaccatgacccagagcggccccagccccctgcagctgcccccagaagatgcctacgtgggcaatgctgacatgatccagcctgacctgacccccctgcagcccagcctggatgacttcatggacatcagtgacttcttcaccaacagccggctgccccagccccccatgcccagcaacttccctgagccccccagcttcagccctgtggtggacagcctcttcagcagcggcaccctgggccctgaggtgcccccagccagcagcgccatgacccacctgagcggccacagccggctgcaggccaggaacagctgccccggccccctggacagcagcgccttcctgagcagtgacttcctgctgcctgaggaccccaagccccggctgcccccacctcctgtgcccccacccctgctgcactacccacctccagccaaggtgcccggcctggagccctgccccccaccacccttcccccccatggccccacccacagccctgctgcaggaggagcccctcttcagcccccgcttccccttccccaccgtgcccccagcccctggggtgagccccctgcctgccccagctgccttcccccccaccccccagagcgtgcccagccctgcccccacccccttccccatcgagctgctgcccctgggctacagcgagcccgccttcggcccctgcttctccatgccccggggcaagcccccagcccccagcccccggggccagaaggccagcccccccaccctggccccagccacagccagcccccccaccacagctggcagcaacaacccctgcctgacccagctgctgacagctgccaagccagagcaggccctggagccccccctggtgagcagcaccctgctgcggagccctggcagcccccaggagaccgtgcctgagttcccctgcaccttcctgccccccaccccagcccccaccccaccccggcccccacctggccctgccaccctggcccccagccggcccctgctggtgcccaaggccgagcggctgagccccccagcccccagcggcagcgagcggcggctgagcggggacctgagctccatgcctggccctggcaccctgtctgtgcgggtgagccccccccagcccatcctgagccggggccgcccagacagcaacaagaacagacgcatcacccacatctctgctgagcagaagaggcgcttcaacatcaagctgggctttgacaccctgcacggcctggtgtccaccctgagcgcccagcccagcctgaaggtgtccaaggccaccaccctgcagaagacagctgagtacatcctgatgctgcagcaggagcgggccggcctgcaggaggaggcccagcagctgagagatgaaattgaggagctgaatgctgccatcaacctgtgccagcagcagctgcctgccaccggggtgcccatcacccaccagagatttgaccagatgagggacatgtttgatgattatgtgaggaccaggaccctgcacaactggaagttctgggtgttcagcatcctgatccggcccctgtttgagagcttcaacggcatggtgtccacagcctctgtgcacaccctgcggcagaccagcctggcctggctggaccagtactgcagcctgcctgccctgcggcccaccgtgctgaacagcctgcggcagctgggcaccagcaccagcatcctgacagaccccggccgcatccctgagcaggccaccagggctgtgacagagggcaccctgggcaagcccctgtag

SEQ ID NO: 226253 - DNA, 3224 bp, Artificial Sequence
  derived and/or modified sequence
atggccggcgcgctggcaggtctggccgcgggcttgcaggtcccgcgggtcgcgcccagcccagactcggactcggacacagactcggaggacccgagtctccggcgcagcgcgggcggcttgctccgctcgcaggtcatccacagcggtcacttcatggtgtcgtcgccgcacagcgactcgctgccccggcggcgcgaccaggaggggtccgtggggccctccgacttcgggccgcgcagtatcgaccccacactcacacgcctcttcgagtgcttgagcctggcctacagtggcaagctggtgtctcccaagtggaagaatttcaaaggcctcaagctgctctgcagagacaagatccgcctgaacaacgccatctggagggcctggtatatccagtatgtgaagcggaggaagagccccgtgtgtggcttcgtgacccccctgcaggggcctgaggctgatgcgcaccggaagccggaggccgtggtcctggaggggaactactggaagcggcgcatcgaggtggtgatgcgggaataccacaagtggcgcatctactacaagaagcggctccgtaagcccagcagggaagatgacctcctggcccctaagcaggcggaaggcaggtggccgccgccggagcaatggtgcaaacagctcttctccagtgtggtccccgtgctgctgggggacccagaggaggagccgggtgggcggcagctcctggacctcaattgctttttgtccgacatctcagacactctcttcaccatgactcagtccggcccttcgcccctgcagctgccgcctgaggatgcctacgtcggcaatgctgacatgatccagccggacctgacgccactgcagccaagcctggatgacttcatggacatctcagatttctttaccaactcccgcctcccacagccgcccatgccttcaaacttcccagagccccccagcttcagccccgtggttgactccctcttcagcagtgggaccctgggcccagaggtgcccccggcttcctcggccatgacccacctctctggacacagccgtctgcaggctcggaacagctgccctggccccttggactccagcgccttcctgagttctgatttcctccttcctgaagaccccaagccccggctcccaccccctcctgtacccccacctctgctgcattaccctccccctgccaaggtgccaggcctggagccctgccccccacctcccttccctcccatggcaccacccactgctttgctgcaggaagagcctctcttctctcccaggtttcccttccccaccgtccctcctgccccaggagtgtctccgctgcctgctcctgcagccttcccacccaccccacagtctgtccccagcccagcccccacccccttccccatagagcttctacccttggggtattcggagcctgcctttgggccttgcttctccatgcccagaggcaagccccccgccccatcccctaggggacagaaagccagcccccctaccttagcccctgccactgccagtccccccaccactgcggggagcaacaacccctgcctcacacagctgctcacagcagctaagccggagcaagccctggagccaccacttgtatccagcaccctcctccggtccccagggtccccgcaggagacagtccctgaattcccctgcacattccttcccccgaccccggcccctacaccgccccggccacctccaggcccggccacattggccccttccaggcccctgcttgtccccaaagcggagcggctctcacccccagcgcccagcggcagtgaacggcggctgtcaggggacctcagctccatgccaggccctgggactctgagcgtccgtgtctctcccccgcaacccatcctcagccggggccgtccagacagcaacaagaaccggcgtatcacacacatctccgcggagcagaagcggcgcttcaacatcaagctggggtttgacacccttcatgggctcgtgagcacactcagtgcccagcccagcctcaaggtgagcaaagctaccacgctgcagaagacagctgagtacatccttatgctacagcaggagcgtgcgggcttgcaggaggaggcccagcagctgcgggatgagattgaggagctcaatgccgccattaacctgtgccagcagcagctgcccgccacaggggtacccatcacacaccagcgttttgaccagatgcgagacatgtttgatgactacgtccgaacccgtacgctgcacaactggaagttctgggtgttcagcatcctcatccggcctctgtttgagtccttcaacgggatggtgtccacggcaagtgtgcacaccctccgccagacctcactggcctggctggaccagtactgctctctgcccgctctccggccaactgtcctgaactccctacgccagctgggcacatctaccagtatcctgaccgacccgggccgcatccctgagcaagccacacgggcagtcacagagggcacccttggcaaacctttatagtcctggccagaccctgctgctcactcagctgccctgggggctgctttccctgggcacgggctccagggatcatctctgggcactcccttcctgccccaggccctggctctgcccttccctggggggtggagcagggtccaggtttcacacttgccacctcctggaggtcaagaagagcagagtccccgtccctgctctgccactgtgctccagcaccgtgaccttgggtgactcgtccgctgtctttggaccgctgtgtttcaatctgcaaaatggggatggggaaggttcaatcagcagatgacccccaggccttggcagctgtgacattgggggcctaggctggcaactccgggggctcaacggtggaaagaggaggatgctgtttctctgtcacctccacttgctccccgacaggtggggcacagacctctgttcctgagcagagaagcagaaaaggaggttccctctctctgctccttcactgctgacccagaggggctgcaggatggtttcccctgggagaggccaggagggcctgatcccaggagacaccagggccagagtgaccacagcagggcaggcatcatgtgtgtgtgtgtgtgtggatgtgtgtgtgtgggttttgtaaagaattcttgaccaataaaagcaaaaactgtctgctggtt

SEQ ID NO: 226254 - DNA, 2553 bp, Artificial Sequence
  derived and/or modified sequence
atggccggcgccctggccggcctggccgccggcctgcaggtgccccgcgtggcccctagtccagactcagattccgataccgacagcgaggacccctcactcagaaggtctgccggcggactgctcaggtcacaggtgatccactcagggcatttcatggtttcgtctccccacagtgacagcttaccacgaaggcgggaccaagagggctctgtgggaccaagcgatttcggcccccgcagtatcgatcccacactgacccggctctttgagtgcttgtcattagcctattcaggcaagttagtgtcacctaagtggaagaatttcaaaggattaaaacttctgtgccgggacaagattagactgaataatgcaatttggagggcatggtatatccagtacgtaaaaagacgtaagagccctgtgtgtgggttcgtcactccactgcaagggcctgaagcagatgcacacaggaagcccgaagcagttgtgttggaaggaaattactggaagcgcagaatcgaggtggtaatgagagagtaccataagtggagaatatattataaaaagcgcctgcggaagccctcacgcgaggacgacctgctggcccccaaacaggcagagggcagatggccgcccccagagcagtggtgtaaacagttgttcagcagtgtcgtgcccgtgttacttggggatccagaagaagagcctggtggccggcagctgctcgacctgaattgtttcttgtctgatattagtgacacgctattcactatgacacagtctgggccaagcccccttcaattgccaccggaagacgcttacgtaggaaatgcagatatgattcaaccggatttaaccccactgcagccaagtcttgatgatttcatggacatctccgattttttcacaaactctaggttgcctcagccaccaatgccttccaacttcccagagccccctagcttctctccagtcgtggacagcctgttttcatcaggcactctgggccctgaggtgcccccagccagctctgccatgacgcacctttcaggccacagtagactgcaagctcgtaattcatgcccaggaccccttgattcatctgctttcctctcgtccgactttctgctgcccgaggaccccaaacctcgattaccacctccccccgtgccaccccccctgttacattatcctccacctgcaaaggtccccgggttggaaccctgtccgccccccccattccctccgatggctccaccaacagctcttttacaagaggaacccctgttttcacccagattccccttccccactgtcccccccgctccaggggtgagccctctgcctgcgccagccgcttttcccccaaccccacagtctgtcccaagtccagctcccacaccctttccaattgaactgctgcctctgggctactccgagcccgcattcgggccatgtttttctatgccaagaggcaagcctcccgccccatctcctcgcgggcagaaggcaagcccacccaccctggctcctgccactgcgtctccccctacgactgctggctctaataacccttgcctgactcagctgctgacagcagcaaaaccagagcaggcgttggagcctcccctcgtgtcgagcaccctactccggagccccggctcccctcaggaaactgtgccagagtttccctgcacgtttctcccacctacccccgcgccaacacctcccaggccgccacctgggcctgcgaccctggctccctcacgccctctactggttccgaaagcggagaggctgagccccccagcccccagtggatcggagcggagactaagcggtgacctgagttcgatgcccggccctggaacgcttagcgtgagggtgtctccaccacaacccatcttgtctaggggccgacccgactcgaacaagaacaggaggattacacacattagtgctgagcagaagagaagatttaacattaaattagggtttgacacactgcacggtttggtgagcaccctctctgcgcagccttccttaaaggttagtaaggcgactacactgcagaaaactgccgagtatattttaatgctacagcaagagcgggccgggctccaagaggaagctcagcaactgcgagacgaaatcgaggagttgaacgccgccatcaacctgtgtcagcagcaactgccagctacaggtgtgccaataacacatcagaggttcgaccagatgagagatatgtttgacgactacgtcaggacccgcaccttgcacaactggaaattctgggtcttcagcatcctgatccgtcccctctttgagagcttcaatggcatggtgtctacagcctcggtacataccctgcggcagacttcactcgcttggctcgatcagtactgctccttacctgcactgcgacccacggtgcttaattcactccggcagttgggtacctccacaagcattctaactgacccaggaagaattcctgagcaggccacacgtgccgtgacagaggggactttgggcaagccactgtag

SEQ ID NO: 226255 - DNA, 2553 bp, Artificial Sequence
  derived and/or modified sequence
atggccggagccctggcagggctcgcggcaggactccaggtgccccgagtggctccctctcccgattcggactcagatactgacagtgaggatccatctctacgacggagcgcagggggtctcctaagaagtcaagtgatacattcgggccattttatggtctcctctccacactctgactctcttccacgtcgtagagatcaggaggggagtgtcggaccatctgacttcgggcctcggtctatcgaccctaccctgacgaggctgtttgaatgtctgtcgctggcatacagtggtaagctcgtgagcccaaagtggaaaaatttcaaggggctgaaacttctttgcagggataagatcagacttaataatgccatctggcgcgcttggtacatacagtacgtcaagcggaggaagagccccgtttgtgggttcgttacacctcttcaggggccagaggccgatgcacacagaaagcccgaagctgtggtcctggagggaaactactggaagcgacgtattgaagttgtgatgcgcgagtatcataaatggcgcatctactataaaaagcgcctgagaaagccttcccgcgaggatgatctgctggccccaaagcaggcggaaggacggtggccccctcctgagcagtggtgtaagcagctgttctcctccgttgtaccagtgctgctgggcgaccccgaggaagaaccgggaggacggcagctgctcgaccttaactgtttcctgtccgatatctcagatacactgtttaccatgacccagagcgggccttcgccattgcagctgccacccgaagacgcatacgtcggcaatgctgacatgatccagcccgacctgactcccctacagcctagtctagacgattttatggacatcagtgacttcttcacaaactccaggttaccgcagcctcctatgccgtcaaacttcccagagcccccatccttctctcctgtcgtggactccctgttttcatcggggaccctcggccctgaagtgcctccggctagctctgctatgacccatctaagcggacacagtaggttacaggccagaaattcttgccctggccctctggactcttccgcctttctgtctagcgattttctgttgcctgaagatcctaagcccagacttcctcccccacctgtaccgcctccgctgctccactatccgcctccagctaaggtcccaggactggaaccctgccctccccctccattcccccctatggcacccccaacagctctcctgcaggaggagccactgttttctccgcgattcccctttcccactgtgccgccagctcccggagtctcccctttgcccgctcctgctgcgtttccccctacaccccaatcggtaccttcacctgcacctacaccattccctatagagcttctgccccttgggtacagcgagcccgcttttgggccttgcttctccatgccgagggggaaacctccagccccttcccccaggggacagaaggcaagtccgccaacactcgcccctgcaacggctagcccacccaccacagccggatcgaacaatccttgtttaacacagctgctgacagccgcaaagcctgaacaagcactagagccacctttggtctcttccactctgctacggtcacctggaagcccacaagagacggttcccgagttcccctgtacgttccttccaccaaccccagctcccactccaccacggcctccacctgggcctgccacattggcgccatcacgaccactgctcgtgccaaaggccgagcggttatctcctcccgctccctctggctccgaaagaagactcagtggggatctatcttcgatgccaggccctggcacactcagcgttagagtgtcacctcctcagccaatcttgagcagaggtagacccgacagcaacaagaatagacggattacacatatttccgcagagcagaaaaggcggttcaacatcaaactaggatttgatactctgcacggacttgtgtccacactgtctgcccagcccagtctgaaggtctccaaggcgactacgctccagaagaccgccgagtacatactgatgctgcaacaggaaagagccggacttcaggaagaggcacagcagctcagggacgagatcgaggagctgaacgctgcaatcaatctctgtcaacagcagttgcccgcaaccggcgtccccatcacccatcaacggtttgatcaaatgagagatatgttcgacgattacgttcgcacccggacactgcataattggaaattttgggtgttctctattctgattagacctttgtttgagtcatttaacggcatggtctctacagccagcgtgcacactcttagacagactagtctggcttggctggaccagtactgtagtttacccgctctgcgacctacagtgctcaattctctacggcaattggggacctctacttccattttgacagacccgggtcggattcccgagcaggctacccgggcagtgaccgaaggcacgttgggcaaacccctgtag

SEQ ID NO: 226256 - DNA, 2553 bp, Artificial Sequence
  derived and/or modified sequence
atggccggcgccctggccggcctggccgccggcctgcaggtgcccagagtggcccccagccccgacagcgacagcgacaccgacagcgaggaccccagcctgagaagaagcgccggcggcctgctgagaagccaggtgatccacagcggccacttcatggtgagcagcccccacagcgacagcctgcccagaagaagagaccaggagggcagcgtgggccccagcgacttcggccccagaagcatcgaccccaccctgaccagactgttcgagtgcctgagcctggcctacagcggcaagctggtgagccccaagtggaagaacttcaagggcctgaagctgctgtgcagagacaagatcagactgaacaacgccatctggagagcctggtacatccagtacgtgaagagaagaaagagccccgtgtgcggcttcgtgacccccctgcagggccccgaggccgacgcccacagaaagcccgaggccgtggtgctggagggcaactactggaagagaagaatcgaggtggtgatgagagagtaccacaagtggagaatctactacaagaagagactgagaaagcccagcagagaggacgacctgctggcccccaagcaggccgagggcagatggcccccccccgagcagtggtgcaagcagctgttcagcagcgtggtgcccgtgctgctgggcgaccccgaggaggagcccggcggcagacagctgctggacctgaactgcttcctgagcgacatcagcgacaccctgttcaccatgacccagagcggccccagccccctgcagctgccccccgaggacgcctacgtgggcaacgccgacatgatccagcccgacctgacccccctgcagcccagcctggacgacttcatggacatcagcgacttcttcaccaacagcagactgccccagccccccatgcccagcaacttccccgagccccccagcttcagccccgtggtggacagcctgttcagcagcggcaccctgggccccgaggtgccccccgccagcagcgccatgacccacctgagcggccacagcagactgcaggccagaaacagctgccccggccccctggacagcagcgccttcctgagcagcgacttcctgctgcccgaggaccccaagcccagactgccccccccccccgtgcccccccccctgctgcactaccccccccccgccaaggtgcccggcctggagccctgcccccccccccccttcccccccatggccccccccaccgccctgctgcaggaggagcccctgttcagccccagattccccttccccaccgtgccccccgcccccggcgtgagccccctgcccgcccccgccgccttcccccccaccccccagagcgtgcccagccccgcccccacccccttccccatcgagctgctgcccctgggctacagcgagcccgccttcggcccctgcttcagcatgcccagaggcaagccccccgcccccagccccagaggccagaaggccagcccccccaccctggcccccgccaccgccagcccccccaccaccgccggcagcaacaacccctgcctgacccagctgctgaccgccgccaagcccgagcaggccctggagccccccctggtgagcagcaccctgctgagaagccccggcagcccccaggagaccgtgcccgagttcccctgcaccttcctgccccccacccccgcccccaccccccccagacccccccccggccccgccaccctggcccccagcagacccctgctggtgcccaaggccgagagactgagcccccccgcccccagcggcagcgagagaagactgagcggcgacctgagcagcatgcccggccccggcaccctgagcgtgagagtgagccccccccagcccatcctgagcagaggcagacccgacagcaacaagaacagaagaatcacccacatcagcgccgagcagaagagaagattcaacatcaagctgggcttcgacaccctgcacggcctggtgagcaccctgagcgcccagcccagcctgaaggtgagcaaggccaccaccctgcagaagaccgccgagtacatcctgatgctgcagcaggagagagccggcctgcaggaggaggcccagcagctgagagacgagatcgaggagctgaacgccgccatcaacctgtgccagcagcagctgcccgccaccggcgtgcccatcacccaccagagattcgaccagatgagagacatgttcgacgactacgtgagaaccagaaccctgcacaactggaagttctgggtgttcagcatcctgatcagacccctgttcgagagcttcaacggcatggtgagcaccgccagcgtgcacaccctgagacagaccagcctggcctggctggaccagtactgcagcctgcccgccctgagacccaccgtgctgaacagcctgagacagctgggcaccagcaccagcatcctgaccgaccccggcagaatccccgagcaggccaccagagccgtgaccgagggcaccctgggcaagcccctgtag

SEQ ID NO: 226257 - protein, 831 aa, Artificial Sequence
  derived and/or modified sequence
MAGALAGLAAGLQVPRVAPSPDSDSDTDSEDPSLRRSAGGLLRSQVIHSGHFMVSSPHSDSLPRRRDQEGSVGPSDFGPRSIDPTLTRLFECLSLAYSGKLVSPKWKNFKGLKLLCRDKIRLNNAIWRAWYIQYVKRRKSPVCGFVTPLQGPEADAHRKPEAVVLEGNYWKRRIEVVMREYHKWRIYYKKRLRKPSREDDLLAPKQAEGRWPPPEQWCKQLFSSVVPVLLGDPEEEPGGRQLLDLNCFLSDISDTLFTMTQSGPSPLQLPPEDAYVGNADMIQPDLTPLQPSLDDFMDISDFFTNSRLPQPPMPSNFPEPPSFSPVVDSLFSSGTLGPEVPPASSAMTHLSGHSRLQARNSCPGPLDSSAFLSSDFLLPEDPKPRLPPPPVPPPLLHYPPPAKVPGLEPCPPPPFPPMAPPTALLQEEPLFSPRFPFPTVPPAPGVSPLPAPAAFPPTPQSVPSPAPTPFPIELLPLGYSEPAFGPCFSMPRGKPPAPSPRGQKASPPTLAPATASPPTTAGSNNPCLTQLLTAAKPEQALEPPLVSSTLLRSPGSPQETVPEFPCTFLPPTPAPTPPRPPPGPATLAPSRPLLVPKAERLSPPAPSGSERRLSGDLSSMPGPGTLSVRVSPPQPILSRGRPDSNKNRRITHISAEQKRRFNIKLGFDTLHGLVSTLSAQPSLKERAGLQEEAQQLRDEIEELNAAINLCQQQLPATGVPITHQRFDQMRDMFDDYVRTRTLHNWKFWVFSILIRPLFESFNGMVSTASVHTLRQTSLAWLDQYCSLPALRPTVLNSLRQLGTSTSILTDPGRIPEQATRAVTEGTLGKPL

SEQ ID NO: 226258 - DNA, 2496 bp, Artificial Sequence
  derived and/or modified sequence
atggccggagctctggccggcttggctgccggcctgcaggtgcccagagttgcgccatctcctgacagtgattctgacacagattctgaagacccttcattaagacggagtgctgggggcctactgcgttcccaggtgatacattctggccatttcatggtgtctagtcctcactcagattccctccccaggcgacgagatcaagaggggtccgtaggaccctctgatttcggtccacggagcatagaccctacattaacacggctctttgagtgtttatcattggcttactctggtaagttagtgtccccaaagtggaagaattttaagggactcaaattgctttgccgggataagattaggctcaataacgctatctggcgcgcttggtacatacaatacgtgaaacggagaaaaagcccagtgtgcgggttcgtgacgcctttgcaggggcctgaagccgacgcccacagaaaacctgaggctgtggtgttagagggcaattattggaaacggcgaatagaggtggtgatgagggagtaccacaaatggcgcatctactacaaaaagcgtctccgaaagccctcccgggaagacgacctgctggcgccgaagcaggcagaagggaggtggccccctccagaacagtggtgtaagcagctcttcagctccgtcgtcccggtgctgctgggagatcctgaagaagagccaggaggcaggcagcttctcgatttgaattgtttcctgtcggatatatctgacaccctgttcaccatgacccaatcgggaccttcccctctgcagttacctcctgaggacgcctacgtgggcaacgctgatatgatccagccagacctgactcctctgcagcccagcctggatgacttcatggatatctccgacttttttaccaattctagactacctcagcctcccatgccctccaatttccccgagccccctagtttttcccctgttgttgactccctcttctccagcggcaccttgggtcccgaggtgccgcctgcctcttctgccatgactcatctctcaggacatagtaggctccaagcaaggaactcttgccctggtcctctcgatagtagcgcttttctgtcctccgattttttgttacctgaggacccgaaaccgcggctaccacctccgcccgtcccgccccccttgctacattaccccccgccagcgaaggtgcccggtcttgagccttgccctccccccccctttcctcctatggcccctcccacagcattacttcaagaagaacccctgttttcaccccgcttccctttccccactgtcccaccagcccctggagtttctccattgcctgccccagcagccttccctccaacaccccagagtgtgcccagtcctgcacccacgcctttccctatcgagctccttccgctgggctattctgagcccgccttcgggccttgtttctcaatgcccagagggaaacccccagcgccaagcccacgaggccagaaggcaagccccccgacacttgccccggccaccgccagtcccccaactaccgccggttccaacaacccatgtctgactcagctactcacagctgccaagccagagcaggccctcgaacctccgctggtgtcatcgactctgctacggtctcccgggtcccctcaggagacagtaccggaatttccttgtactttcctcccacccacccccgcacctacccccccccggcctcctcctgggcctgcaacacttgcaccttcacgtcctctgctggtcccaaaggctgaacggttaagtccacctgccccatcgggctccgagaggagactgtccggtgatttgtctagtatgccaggccccgggaccttgtctgtgagggtgtcgcccccgcagccaatcctgtcacgcggtcgccccgactcaaacaaaaatcgacggatcactcatattagcgccgaacagaagaggaggtttaacattaagctgggttttgataccctgcatggactggtgagtacccttagcgcccaacccagcctcaaagagcgcgctggacttcaggaagaggcacagcagctccgtgacgaaatcgaagagttgaacgctgccattaacctgtgccaacaacaactccccgcaacaggcgttcccattacccatcagcgctttgatcaaatgcgtgacatgtttgatgattacgtccgaaccaggaccctgcataattggaaattttgggtgttcagcattctaatccgccctctgttcgagtccttcaacggcatggtaagcacagcttccgttcacaccctgcgccagaccagtctggcctggcttgaccagtactgctctttgcctgcccttcgtccaaccgtattaaacagtctgcgccaattaggtacctctacgtccatactgaccgatcccggcaggataccagagcaggcaacaagggccgttactgaagggacgttgggaaagcctctttag

SEQ ID NO: 226259 - DNA, 2496 bp, Artificial Sequence
  derived and/or modified sequence
atggccggggccctggccggcctggccgccggcctgcaggtgccccgggtggcccccagcccagacagcgacagcgacacagattctgaggaccccagcctgcggcgctctgctgggggcctgctgcggagccaggtgatccacagcggccacttcatggtgagcagcccccacagcgacagcctgcccaggagaagagaccaggagggctctgtgggccccagcgactttggccccaggagcattgaccccaccctgacccggctgtttgaatgtctgagcctggcctacagcggcaagctggtgagccccaagtggaagaacttcaagggcctgaagctgctgtgccgggacaagatccggctgaacaatgccatctggagggcctggtacatccagtatgtgaagaggaggaagagccctgtgtgtggctttgtgacccccctgcagggccctgaggctgatgcccacaggaagccagaggccgtggtgctggagggcaactactggaagaggcgcatcgaggtggtgatgagggagtaccacaagtggaggatctactacaagaagaggctgaggaagcccagccgggaggatgacctgctggcccccaagcaggccgagggccgctggcccccacctgagcagtggtgcaagcagctgttcagctctgtggtgcctgtgctgctgggggaccctgaggaggagcccggcggccggcagctgctggacctgaactgcttcctgagtgacatcagtgacaccctcttcaccatgacccagagcggccccagccccctgcagctgcccccagaagatgcctacgtgggcaatgctgacatgatccagcctgacctgacccccctgcagcccagcctggatgacttcatggacatcagtgacttcttcaccaacagccggctgccccagccccccatgcccagcaacttccctgagccccccagcttcagccctgtggtggacagcctcttcagcagcggcaccctgggccctgaggtgcccccagccagcagcgccatgacccacctgagcggccacagccggctgcaggccaggaacagctgccccggccccctggacagcagcgccttcctgagcagtgacttcctgctgcctgaggaccccaagccccggctgcccccacctcctgtgcccccacccctgctgcactacccacctccagccaaggtgcccggcctggagccctgccccccaccacccttcccccccatggccccacccacagccctgctgcaggaggagcccctcttcagcccccgcttccccttccccaccgtgcccccagcccctggggtgagccccctgcctgccccagctgccttcccccccaccccccagagcgtgcccagccctgcccccacccccttccccatcgagctgctgcccctgggctacagcgagcccgccttcggcccctgcttctccatgccccggggcaagcccccagcccccagcccccggggccagaaggccagcccccccaccctggccccagccacagccagcccccccaccacagctggcagcaacaacccctgcctgacccagctgctgacagctgccaagccagagcaggccctggagccccccctggtgagcagcaccctgctgcggagccctggcagcccccaggagaccgtgcctgagttcccctgcaccttcctgccccccaccccagcccccaccccaccccggcccccacctggccctgccaccctggcccccagccggcccctgctggtgcccaaggccgagcggctgagccccccagcccccagcggcagcgagcggcggctgagcggggacctgagctccatgcctggccctggcaccctgtctgtgcgggtgagccccccccagcccatcctgagccggggccgcccagacagcaacaagaacagacgcatcacccacatctctgctgagcagaagaggcgcttcaacatcaagctgggctttgacaccctgcacggcctggtgtccaccctgagcgcccagcccagcctgaaggagagagctggcctgcaggaggaggcccagcagctgagagatgaaattgaggagctgaatgctgccatcaacctgtgccagcagcagctgcctgccactggagtgcccatcacccaccagagatttgaccagatgagggacatgtttgatgattatgtgaggaccaggaccctgcacaactggaagttctgggtgttcagcatcctgatccggcccctgtttgagagcttcaacggcatggtgtccacagcctctgtgcacaccctgcggcagaccagcctggcctggctggaccagtactgcagcctgcctgccctgcggcccaccgtgctgaacagcctgcggcagctgggcaccagcaccagcatcctgacagatcctggccgcatccctgagcaggccaccagggctgtgacagagggcaccctgggcaagcccctgtag

SEQ ID NO: 226260 - DNA, 3215 bp, Artificial Sequence
  derived and/or modified sequence
ccccgcgctgcgcggagcagggaccaggcggttgcggcggcgacagccatggccggcgcgctggcaggtctggccgcgggcttgcaggtcccgcgggtcgcgcccagcccagactcggactcggacacagactcggaggacccgagtctccggcgcagcgcgggcggcttgctccgctcgcaggtcatccacagcggtcacttcatggtgtcgtcgccgcacagcgactcgctgccccggcggcgcgaccaggaggggtccgtggggccctccgacttcgggccgcgcagtatcgaccccacactcacacgcctcttcgagtgcttgagcctggcctacagtggcaagctggtgtctcccaagtggaagaatttcaaaggcctcaagctgctctgcagagacaagatccgcctgaacaacgccatctggagggcctggtatatccagtatgtgaagcggaggaagagccccgtgtgtggcttcgtgacccccctgcaggggcctgaggctgatgcgcaccggaagccggaggccgtggtcctggaggggaactactggaagcggcgcatcgaggtggtgatgcgggaataccacaagtggcgcatctactacaagaagcggctccgtaagcccagcagggaagatgacctcctggcccctaagcaggcggaaggcaggtggccgccgccggagcaatggtgcaaacagctcttctccagtgtggtccccgtgctgctgggggacccagaggaggagccgggtgggcggcagctcctggacctcaattgctttttgtccgacatctcagacactctcttcaccatgactcagtccggcccttcgcccctgcagctgccgcctgaggatgcctacgtcggcaatgctgacatgatccagccggacctgacgccactgcagccaagcctggatgacttcatggacatctcagatttctttaccaactcccgcctcccacagccgcccatgccttcaaacttcccagagccccccagcttcagccccgtggttgactccctcttcagcagtgggaccctgggcccagaggtgcccccggcttcctcggccatgacccacctctctggacacagccgtctgcaggctcggaacagctgccctggccccttggactccagcgccttcctgagttctgatttcctccttcctgaagaccccaagccccggctcccaccccctcctgtacccccacctctgctgcattaccctccccctgccaaggtgccaggcctggagccctgccccccacctcccttccctcccatggcaccacccactgctttgctgcaggaagagcctctcttctctcccaggtttcccttccccaccgtccctcctgccccaggagtgtctccgctgcctgctcctgcagccttcccacccaccccacagtctgtccccagcccagcccccacccccttccccatagagcttctacccttggggtattcggagcctgcctttgggccttgcttctccatgcccagaggcaagccccccgccccatcccctaggggacagaaagccagcccccctaccttagcccctgccactgccagtccccccaccactgcggggagcaacaacccctgcctcacacagctgctcacagcagctaagccggagcaagccctggagccaccacttgtatccagcaccctcctccggtccccagggtccccgcaggagacagtccctgaattcccctgcacattccttcccccgaccccggcccctacaccgccccggccacctccaggcccggccacattggccccttccaggcccctgcttgtccccaaagcggagcggctctcacccccagcgcccagcggcagtgaacggcggctgtcaggggacctcagctccatgccaggccctgggactctgagcgtccgtgtctctcccccgcaacccatcctcagccggggccgtccagacagcaacaagaaccggcgtatcacacacatctccgcggagcagaagcggcgcttcaacatcaagctggggtttgacacccttcatgggctcgtgagcacactcagtgcccagcccagcctcaaggagcgtgcgggcttgcaggaggaggcccagcagctgcgggatgagattgaggagctcaatgccgccattaacctgtgccagcagcagctgcccgccacaggggtacccatcacacaccagcgttttgaccagatgcgagacatgtttgatgactacgtccgaacccgtacgctgcacaactggaagttctgggtgttcagcatcctcatccggcctctgtttgagtccttcaacgggatggtgtccacggcaagtgtgcacaccctccgccagacctcactggcctggctggaccagtactgctctctgcccgctctccggccaactgtcctgaactccctacgccagctgggcacatctaccagtatcctgaccgacccgggccgcatccctgagcaagccacacgggcagtcacagagggcacccttggcaaacctttatagtcctggccagaccctgctgctcactcagctgccctgggggctgctttccctgggcacgggctccagggatcatctctgggcactcccttcctgccccaggccctggctctgcccttccctggggggtggagcagggtccaggtttcacacttgccacctcctggaggtcaagaagagcagagtccccgtccctgctctgccactgtgctccagcaccgtgaccttgggtgactcgtccgctgtctttggaccgctgtgtttcaatctgcaaaatggggatggggaaggttcaatcagcagatgacccccaggccttggcagctgtgacattgggggcctaggctggcaactccgggggctcaacggtggaaagaggaggatgctgtttctctgtcacctccacttgctccccgacaggtggggcacagacctctgttcctgagcagagaagcagaaaaggaggttccctctctctgctccttcactgctgacccagaggggctgcaggatggtttcccctgggagaggccaggagggcctgatcccaggagacaccagggccagagtgaccacagcagggcaggcatcatgtgtgtgtgtgtgtgtggatgtgtgtgtgtgggttttgtaaagaattcttgaccaataaaagcaaaaactgtctgctggtt

SEQ ID NO: 226261 - DNA, 2496 bp, Artificial Sequence
  derived and/or modified sequence
atggccggcgccctggccggcctggccgccggcctgcaggtgcccagagtggccccatcccccgactcggactccgacactgatagcgaagacccctcgctaagacggtcggctggggggctgctcaggtcacaagtgattcacagtggccacttcatggttagttcgccacatagcgatagccttccaagaaggcgggaccaagaaggaagtgtaggccctagcgattttggtcccaggtctatcgatcccactctcacacgcctctttgaatgcctttctcttgcatattcgggcaaactagtttcacccaagtggaaaaactttaagggcctgaaactgctgtgtagggataagataaggcttaacaatgcaatatggcgagcttggtacattcagtacgttaagcgccgcaagagcccagtgtgcgggttcgtgactccactgcagggaccggaagcggacgcccatcggaaaccggaagccgtcgtgctggagggaaactattggaaacgcaggatcgaggtcgtgatgcgggaataccacaagtggcgaatttactataaaaagcgcctccggaagcccagcagggaggacgacttactggctcctaagcaggctgaaggcaggtggccaccacctgaacagtggtgcaagcagctcttctcatccgtcgtacccgtgttacttggggacccagaggaggaacctggcggtcgtcagctgctggatctgaattgcttcctgtcagatattagcgatacacttttcacaatgacacagtccggtccttctccactccagctcccacccgaagacgcgtacgtgggcaacgccgatatgatccagcctgatctcaccccactgcagcctagcctggatgactttatggacatcagtgactttttcaccaacagtcggctaccgcagccacccatgccatccaatttccccgagcctcctagtttttctcctgtggtggactcactgttttcttctgggactcttggacctgaggttccacctgctagttcagcgatgacacatctctctggccactccaggctgcaggctaggaattcctgccctgggcccctggatagctcggcatttctgtcctccgacttcctgctgccggaggacccaaaaccacgcttacctccacctcccgttccgccacccctgcttcactaccctccacctgccaaggttcccggcctggaaccttgccccccaccacctttccctcccatggcccctcctacggcgttgctgcaggaggagcctctgttcagcccacggttcccctttcccacggtccccccagcccctggagtctctccactgccggctcccgctgcgtttccccctactcctcagagtgtgccttccccagcccctacaccatttccgattgaactactccccctgggctactcagagcccgcctttgggccatgtttcagcatgccacgcgggaagccaccggcaccatctcccagaggtcaaaaagccagccctcctactcttgcccccgcaacagcatcccctccaacaactgccggctcgaataacccatgtctcacccaactcctgacagccgcaaaacccgagcaggcactggagccgccccttgtgtcctccacgcttttgcgctccccaggcagcccccaggaaactgtgcccgaatttccttgcacgtttctccctcctaccccagccccaactccacccagacctccgccgggacctgccacattggctccttcacgccccctgctagttccaaaagccgaaagactctcgcccccagcaccaagtgggtctgaacgccgcctcagtggcgatttgtcatcaatgccaggccccggtactttgagcgttagagtttcccctccgcaacctatcttgtcacgcggaagacccgactccaacaagaacagacgaatcactcatatttctgctgagcagaaacgtcgttttaacatcaagctgggctttgataccctgcacggcctggtgtcgactttaagcgcccaacccagccttaaggagcgggccggcctacaggaggaagctcagcagctgagggacgagatcgaggaactgaatgccgccataaatctctgccagcaacagctcccagctaccggcgtccctatcacacaccaacggttcgaccaaatgagggacatgttcgacgactatgtcagaaccagaaccctgcataactggaagttctgggttttcagcatcctcattcgccccctgttcgaatctttcaatggcatggtctcaaccgccagcgtacatactcttaggcaaacatctctggcttggttggaccagtattgctcactgcctgctctgaggcccaccgtcctgaacagcctgaggcaattggggacctcaacctctattctcaccgatcccggtagaattcccgaacaggcaacaagggccgtgacagagggaaccctcgggaaacccctttag

SEQ ID NO: 226262 - DNA, 2496 bp, Artificial Sequence
  derived and/or modified sequence
atggcgggtgcactggctgggctcgcggcaggtctgcaggtaccgagggtagctccttcaccagatagcgattccgacaccgattccgaagacccctccctaagacgtagtgccggtggccttcttagaagtcaggtcatccacagcggccactttatggtctctagcccccatagtgacagcttgccgagaaggcgggatcaggaaggaagcgtcggaccatcagatttcgggccaagaagtatcgacccaaccctcacccgtctgtttgaatgcttgtctttggcttatagcggtaaattggtcagcccaaaatggaaaaacttcaaggggctgaagctcctgtgtcgcgataaaatccgcttaaataatgcaatctggcgagcctggtatattcagtatgtgaagaggagaaaatcacctgtgtgcgggttcgttacaccgctccaaggtccagaggcagacgcccaccgaaagcccgaggctgttgtcctcgaaggaaattactggaaaaggcgtatcgaagtcgtgatgcgggagtatcacaagtggcgtatttactataagaaacgcctacggaagccgtctcgcgaggacgacctgttggccccaaaacaggccgaagggaggtggccccctccagagcagtggtgcaaacaactgttctcatccgtggtccccgtcctgctcggagaccccgaggaggagccgggaggccgtcagcttttagatctgaattgtttcctctctgacataagtgacacactgtttacgatgacacagtccgggccttcacctttgcagctacctcctgaagacgcctatgtcggcaatgctgatatgatccagccagatttgactcctctccagccatccctggatgacttcatggacatcagcgatttcttcactaattctagactcccgcagcctccaatgcctagcaatttccccgaacctccaagttttagccccgtcgtagatagtctctttagtagcggcacccttgggccagaggtacctcccgcttctagtgccatgactcacctgtctggacactcccgcctgcaagctcgcaatagctgtcctggccctttggattcaagcgccttcttgagcagcgactttctccttccagaggacccaaaacccaggttgcctccccctcccgttcctccaccattattgcactatcccccacccgcaaaagtccctggcttagagccctgtccaccccctccctttcctcctatggcccctcctactgcactcctgcaagaagagcccctattttcacccaggttcccatttcccacggtccctccagcccctggcgtctcccctttgccagctccagcagcgttcccacccactccccagtcggtgccctcacccgctcccacacctttccccattgaactcctgcctctgggctacagcgaaccggcttttggtccctgtttttctatgcccaggggaaaacccccagcccctagcccaaggggtcaaaaagcgtctccccctactctggccccagccacagcaagtcccccaactacggccggtagtaacaacccctgtctcacacaactgcttacagccgcaaagcccgagcaggcactggagcccccattagtgtcctccactctgttgcggtccccaggatcaccacaggaaacagtgccagaattcccgtgcaccttcttaccccctacccccgcaccgacaccaccacggcctcccccaggacctgccacccttgctccgtccagaccactactggttcccaaggctgagaggctctctccacctgcacctagtggcagtgagcgtagactgtccggagacctctcatccatgcctggacccggaacactgagtgtgcgggtctctccaccccaaccgatcctctctcggggacggcctgacagcaataaaaacaggaggattactcatatctctgccgagcagaaaaggcgcttcaatattaaactgggatttgatacattgcatggcctggtgtcgactttgtcagctcaaccttcgctaaaagagcgggctgggctgcaagaggaggcccaacagttgcgtgacgagatcgaggagctcaatgccgcaatcaatctgtgtcagcagcagctgcccgcaaccggcgtccccatcactcaccagcggtttgatcagatgagggacatgttcgacgattacgtaaggactcgcacgctgcacaattggaaattctgggttttcagcatactgattcgacccctgttcgagtccttcaacggtatggtcagcaccgcctcggtccacaccttgcgacaaactagcctggcctggctggatcagtactgcagcttaccggctctacgtccaaccgtgctgaacagccttcgccagctggggacgtcaacctcaatccttaccgaccctgggaggatcccagaacaggccacccgggcagtgacagagggaacgctgggaaagccattatag

SEQ ID NO: 226263 - DNA, 2496 bp, Artificial Sequence
  derived and/or modified sequence
atggccggcgccctggccggcctggccgccggcctgcaggtgcccagagtggcccccagccccgacagcgacagcgacaccgacagcgaggaccccagcctgagaagaagcgccggcggcctgctgagaagccaggtgatccacagcggccacttcatggtgagcagcccccacagcgacagcctgcccagaagaagagaccaggagggcagcgtgggccccagcgacttcggccccagaagcatcgaccccaccctgaccagactgttcgagtgcctgagcctggcctacagcggcaagctggtgagccccaagtggaagaacttcaagggcctgaagctgctgtgcagagacaagatcagactgaacaacgccatctggagagcctggtacatccagtacgtgaagagaagaaagagccccgtgtgcggcttcgtgacccccctgcagggccccgaggccgacgcccacagaaagcccgaggccgtggtgctggagggcaactactggaagagaagaatcgaggtggtgatgagagagtaccacaagtggagaatctactacaagaagagactgagaaagcccagcagagaggacgacctgctggcccccaagcaggccgagggcagatggcccccccccgagcagtggtgcaagcagctgttcagcagcgtggtgcccgtgctgctgggcgaccccgaggaggagcccggcggcagacagctgctggacctgaactgcttcctgagcgacatcagcgacaccctgttcaccatgacccagagcggccccagccccctgcagctgccccccgaggacgcctacgtgggcaacgccgacatgatccagcccgacctgacccccctgcagcccagcctggacgacttcatggacatcagcgacttcttcaccaacagcagactgccccagccccccatgcccagcaacttccccgagccccccagcttcagccccgtggtggacagcctgttcagcagcggcaccctgggccccgaggtgccccccgccagcagcgccatgacccacctgagcggccacagcagactgcaggccagaaacagctgccccggccccctggacagcagcgccttcctgagcagcgacttcctgctgcccgaggaccccaagcccagactgccccccccccccgtgcccccccccctgctgcactaccccccccccgccaaggtgcccggcctggagccctgcccccccccccccttcccccccatggccccccccaccgccctgctgcaggaggagcccctgttcagccccagattccccttccccaccgtgccccccgcccccggcgtgagccccctgcccgcccccgccgccttcccccccaccccccagagcgtgcccagccccgcccccacccccttccccatcgagctgctgcccctgggctacagcgagcccgccttcggcccctgcttcagcatgcccagaggcaagccccccgcccccagccccagaggccagaaggccagcccccccaccctggcccccgccaccgccagcccccccaccaccgccggcagcaacaacccctgcctgacccagctgctgaccgccgccaagcccgagcaggccctggagccccccctggtgagcagcaccctgctgagaagccccggcagcccccaggagaccgtgcccgagttcccctgcaccttcctgccccccacccccgcccccaccccccccagacccccccccggccccgccaccctggcccccagcagacccctgctggtgcccaaggccgagagactgagcccccccgcccccagcggcagcgagagaagactgagcggcgacctgagcagcatgcccggccccggcaccctgagcgtgagagtgagccccccccagcccatcctgagcagaggcagacccgacagcaacaagaacagaagaatcacccacatcagcgccgagcagaagagaagattcaacatcaagctgggcttcgacaccctgcacggcctggtgagcaccctgagcgcccagcccagcctgaaggagagagccggcctgcaggaggaggcccagcagctgagagacgagatcgaggagctgaacgccgccatcaacctgtgccagcagcagctgcccgccaccggcgtgcccatcacccaccagagattcgaccagatgagagacatgttcgacgactacgtgagaaccagaaccctgcacaactggaagttctgggtgttcagcatcctgatcagacccctgttcgagagcttcaacggcatggtgagcaccgccagcgtgcacaccctgagacagaccagcctggcctggctggaccagtactgcagcctgcccgccctgagacccaccgtgctgaacagcctgagacagctgggcaccagcaccagcatcctgaccgaccccggcagaatccccgagcaggccaccagagccgtgaccgagggcaccctgggcaagcccctgtag

SEQ ID NO: 226264 - DNA, 282 bp, Artificial Sequence
  derived and/or modified sequence
atggaattcgacttgaacgggaacggagacattgacattatgtctctcaaacgtatgctcgagaagttgggcgtgcctaagacacacctggagttaaagaagttaatcggggaggtgtcaagcggatcaggagagacattcagctatccggatttcttacggatgatgctggggaaacgttcagccatcttgaagatgatactgatgtatgaggaaaaagcccgtgagaaggagaaacctacaggtccacctgcgaagaaagctatctctgagctaccatag

SEQ ID NO: 226265 - DNA, 282 bp, Artificial Sequence
  derived and/or modified sequence
atggaatttgacctaaatggcaatggagacatcgatataatgtctctcaagcgtatgctggaaaagctgggggttccaaaaacgcacctggaactgaaaaagctgattggagaggtgagttctggaagcggcgaaacatttagctatccagacttcttgaggatgatgctcggcaaaaggagcgccatcctcaagatgatcctgatgtacgaagagaaggcaagagagaaagagaaacccaccgggcccccagccaagaaggccatctctgaactcccctag

SEQ ID NO: 226266 - DNA, 282 bp, Artificial Sequence
  derived and/or modified sequence
atggaattcgatttgaatggcaacggtgatattgatataatgagcctcaaacggatgcttgaaaagctaggtgtccctaagacccatctcgagcttaaaaagctgatcggcgaagtgtcttcagggtctggggagacattcagctaccccgatttccttcggatgatgctgggtaagcgcagcgctatcctgaagatgattctcatgtatgaagaaaaggcccgggagaaggagaagcctacaggaccccctgcgaagaaggctatctctgagctcccatag

SEQ ID NO: 226267 - DNA, 282 bp, Artificial Sequence
  derived and/or modified sequence
atggagttcgacttgaatggaaatggagatattgacatcatgagtctcaaaagaatgctggaaaagctgggagtgccaaagacccacctcgaattaaagaaattaatcggggaggtgtcatcagggtccggcgagacattcagctaccctgacttcctcagaatgatgctgggcaaaagatcggctatactgaagatgatcctgatgtacgaagagaaagcacgcgagaaagagaaacccactggcccccctgccaaaaaggctatcagtgagcttccatag

SEQ ID NO: 226268 - DNA, 282 bp, Artificial Sequence
  derived and/or modified sequence
atggaattcgacttgaatggcaatggcgacatcgatatcatgagcctgaagcgtatgttggaaaaactcggcgttcccaagacccatttggagctgaaaaagttaattggagaagtgtctagcggctctggggagacctttagctacccagacttcttgcggatgatgttgggtaagcggtccgcaatactgaagatgattttgatgtacgaagagaaggctcgcgagaaggaaaaaccaactggtcctcccgccaaaaaggccatttccgagctgccctag

SEQ ID NO: 226269 - DNA, 282 bp, Artificial Sequence
  derived and/or modified sequence
atggaattcgacctgaacggaaatggggacatcgacattatgtcactgaagcgcatgcttgagaagctcggtgttcctaaaactcatctcgagctcaagaaactgatcggtgaagttagttctggttctggtgaaacgtttagctatccagacttcctgcgcatgatgcttggtaaaaggtctgctatcttgaaaatgattctgatgtatgaagaaaaggcccgcgagaaggagaagccaacagggcctcccgccaaaaaggccattagtgagttgccttag

SEQ ID NO: 226270 - DNA, 282 bp, Artificial Sequence
  derived and/or modified sequence
atggagttcgatctgaacggcaatggtgacatagacattatgagcttaaagagaatgcttgagaaactcggcgtgccaaagactcacttggaacttaagaagctcatcggagaagtgagttctggatcgggggagaccttttcctaccctgatttcttgcgaatgatgctcggtaagcggtcggccattctgaagatgatcctcatgtacgaggagaaggcccgcgagaaagagaagccaaccggtcccccggccaaaaaagcaatttctgagctcccctag

SEQ ID NO: 226271 - DNA, 282 bp, Artificial Sequence
  derived and/or modified sequence
atggagtttgacctgaatggaaatggagacatcgacatcatgagcctgaagaggatgctggagaagctgggcgtgcccaagacccacctggagctgaagaagctgattggagaggtgagcagcggcagcggggagaccttctcctacccagacttcctgaggatgatgctgggcaagaggtctgccatcctgaagatgatcctgatgtatgaggagaaggcccgggagaaggagaagcccactggacctccagccaagaaggccatcagcgagctgccctag

SEQ ID NO: 226272 - DNA, 282 bp, Artificial Sequence
  derived and/or modified sequence
atggagttcgacctgaacggcaacggcgacatcgacatcatgagcctcaagcggatgcttgagaagcttggcgtgcctaaaacgcatctggagctgaaaaagcttattggagaagtctcaagcggaagcggggagaccttctcttatcccgacttcctgcgcatgatgctaggcaagcggagcgcaatcctgaagatgatccttatgtacgaggagaaagcaagagaaaaggagaaaccaaccggaccaccagctaaaaaggctatatccgaacttccatag

SEQ ID NO: 226273 - DNA, 282 bp, Artificial Sequence
  derived and/or modified sequence
atggagttcgacctgaacggcaacggcgacatcgacatcatgagcctgaaacgaatgcttgaaaagctgggcgtccctaagactcatctggaactcaaaaagctcattggcgaggtaagttcaggaagcggggagaccttttcctatcctgattttctgcgcatgatgctggggaaaagatccgcgatcctgaagatgatcttaatgtatgaagagaaagctagagagaaagagaaacccactggccccccagccaagaaagccatctcagaactcccgtag

SEQ ID NO: 226274 - DNA, 282 bp, Artificial Sequence
  derived and/or modified sequence
atggagttcgacctgaacggcaacggcgacatcgacatcatgagcctgaagcgcatgctcgaaaaactgggcgtcccaaagactcacctcgagttaaagaaactcatcggcgaagtttcgagtggtagtggagagactttttcttatcctgatttcctgcgcatgatgctgggcaaacgctcagcaatcctgaagatgatcctaatgtacgaggaaaaagcacgtgagaaagaaaagcctaccggtccacctgctaagaaagcaatctccgagttgccttag

SEQ ID NO: 226275 - DNA, 282 bp, Artificial Sequence
  derived and/or modified sequence
atggagttcgacctgaacggcaacggcgacatcgacatcatgagcttgaaaagaatgctggagaagcttggagtgccaaagacgcatttggaactaaaaaaattaataggggaggtgtcctctggctccggtgaaactttttcttacccagacttcctccgtatgatgctgggaaaaaggagcgctatccttaaaatgatcttaatgtatgaggaaaaggcccgcgaaaaggagaagcccactggacctcctgctaaaaaagcaatttcagaactaccctag

SEQ ID NO: 226276 - DNA, 282 bp, Artificial Sequence
  derived and/or modified sequence
atggagttcgacctgaacggcaacggcgacatcgacatcatgagccttaagcgcatgttggagaagttaggagtgcctaagacccacctcgaactcaagaaactcatcggagaggtctcatctggctcaggggagacattttcctaccccgattttttgaggatgatgctaggaaagcgctcagccatcttgaaaatgatcctcatgtatgaggaaaaggcccgcgagaaagaaaaacctactggccctcctgctaaaaaagccatttctgagctaccatag

SEQ ID NO: 226277 - DNA, 282 bp, Artificial Sequence
  derived and/or modified sequence
atggagttcgacctgaacggcaacggcgacatcgacatcatgagcctcaaaaggatgttagagaagctgggagtgcctaaaacacatctggagctgaagaagctgattggagaggtcagcagtggcagcggagaaacattctcttacccagacttcctcaggatgatgctaggcaagcgatccgccattctaaagatgatcctgatgtacgaagagaaggctagagagaaggaaaagcctaccggcccccctgctaaaaaagcaatctctgaactgccttag

SEQ ID NO: 226278 - DNA, 282 bp, Artificial Sequence
  derived and/or modified sequence
atggagttcgacctgaacggcaacggcgacatcgacatcatgagcctgaagaggatgcttgagaagctgggagtgccaaagactcatctggaattaaagaaactgattggcgaggtgagctctgggtcgggcgaaacattcagctatcccgattttttacggatgatgctgggtaagaggtctgcgatcttaaagatgatcctgatgtatgaagagaaggcaagggagaaggagaagcctacgggtccaccagctaagaaggcgatttctgagcttccatag

SEQ ID NO: 226279 - DNA, 282 bp, Artificial Sequence
  derived and/or modified sequence
atggagttcgaccttaacgggaacggcgacatcgacatcatgtccttgaagaggatgcttgagaaactgggagtccctaaaacccacctggagctcaaaaagctcatcggtgaggtgtcttcggggtctggagagacattctcctacccagactttctgaggatgatgctgggaaagagaagtgccatccttaagatgatcctgatgtacgaggaaaaggccagagaaaaagaaaagcccaccgggcctccagccaagaaggccattagcgaattaccctag

SEQ ID NO: 226280 - DNA, 282 bp, Artificial Sequence
  derived and/or modified sequence
atggagttcgacctcaacggcaacggcgacatcgacattatgagcttaaagcgcatgctcgagaagctaggcgtgcccaaaacgcacttggaactcaagaagctgatcggcgaggtgagtagcggctctggcgagacattttcttacccagactttcttcggatgatgctgggaaaaaggtcagccattcttaagatgattctaatgtatgaggaaaaagccagggagaaggaaaagccgacggggcctcccgctaagaaggcaatctcagagctcccttag

SEQ ID NO: 226281 - DNA, 282 bp, Artificial Sequence
  derived and/or modified sequence
atggaattcgatttgaatggcaacggagacattgatataatgagcttaaaacggatgctagagaagctgggcgtgccgaaaacacatctagagctcaagaagctcattggcgaggtgtcatctggctcgggggagaccttcagctaccccgatttcttgagaatgatgctgggaaaaagatccgcaatccttaaaatgatcctgatgtatgaggaaaaagctcgcgaaaaggaaaaacccaccggaccccctgccaagaaggcgatttcagaactaccttag

SEQ ID NO: 226282 - DNA, 282 bp, Artificial Sequence
  derived and/or modified sequence
atggagttcgacctgaacggtaacggagacatcgatataatgtccttgaagagaatgctagaaaaactgggtgtcccgaagacccatctagagcttaaaaaactcataggcgaggtctccagcggctccggggagacgttttcatatcccgattttctgcgaatgatgctggggaaaaggagtgcaatcctcaagatgatcctaatgtatgaggaaaaggccagggagaaggaaaaacctaccggtcctccagccaagaaagccattagtgagttgccatag

SEQ ID NO: 226283 - DNA, 282 bp, Artificial Sequence
  derived and/or modified sequence
atggagttcgacctgaatggtaatggggatatcgatatcatgagtctgaagagaatgcttgaaaaactgggcgtcccaaagacccacctggagttgaagaaactcataggggaagtctcctcgggcagcggcgagaccttcagctacccagacttcttgagaatgatgctaggcaagagatccgcaattctgaaaatgatcttgatgtacgaagagaaggcccgtgagaaagagaagcccactggccctcccgctaagaaagccatctcagaactgccgtag

SEQ ID NO: 226284 - DNA, 282 bp, Artificial Sequence
  derived and/or modified sequence
atggaattcgacctcaacggcaatggtgatatcgatattatgtctctgaagcggatgctggagaaactcggagttccgaagactcacctggaactgaagaagctgatcggcgaagtctctagcggcagcggcgagacattttcttatccagattttctgcggatgatgttgggtaaacggagcgcgatccttaagatgattctcatgtacgaagaaaaggccagagagaaagagaaacccactgggccaccagccaaaaaggcaatcagcgagttgccatag

SEQ ID NO: 226285 - DNA, 282 bp, Artificial Sequence
  derived and/or modified sequence
atggagtttgacttaaatggcaacggagacattgacataatgtctttgaagaggatgctcgagaaactgggcgtgccaaaaacacacttagaactgaaaaaactcataggcgaagtctcatcaggttcgggagagacgttttcctatcccgattttctgcgcatgatgctgggaaagcgcagtgcaatccttaaaatgatcttaatgtacgaagagaaggctcgagaaaaggaaaaacctactggcccacctgccaagaaagcgatcagtgaattgccttag

SEQ ID NO: 226286 - DNA, 282 bp, Artificial Sequence
  derived and/or modified sequence
atggagttcgacctgaacggcaacggcgacatcgacatcatgagcctgaagagaatgctggagaagctgggcgtgcccaagacccacctggagctgaagaagctgatcggcgaggtgagcagcggcagcggcgagaccttcagctaccccgacttcctgagaatgatgctgggcaagagaagcgccatcctgaagatgatcctgatgtacgaggagaaggccagagagaaggagaagcccaccggcccccccgccaagaaggccatcagcgagctgccctag

SEQ ID NO: 226287 - protein, 1243 aa, Artificial Sequence
  derived and/or modified sequence
MPKIVLNGVTVDFPFQPYKCQQEYMTKVLECLQQKVNGILESPTGTGKTLCLLCTTLAWREHLRDGISARKIAERAQGELFPDRALSSWGNAAAAAGDPIACYTDIPKIIYASRTHSQLTQVINELRNTSYRSRCRATLWVLETAPPRPTVLSPTRPKVCVLGSREQLCIHPEVKKQESNHLQIHLCRKKVASRSCHFYNNVEEKSLEQELASPILDIEDLVKSGSKHRVCPYYLSRNLKQQADIIFMPYNYLLDAKSRRAHNIDLKGTVVIFDEAHNVEKMCEESASFDLTPHDLASGLDVIDQVLEEQTKAAQQGEPHPEFSADSPSPGLNMELEDIAKLKMILLRLEGAIDAVELPGDDSGVTKPGSYIFELFAEAQITFQTKGCILDSLDQIIQHLAGRAGVFTNTAGLQKLADIIQIVFSVDPSEGSPGSPAGLGALQSYKVHIHPDAGHRRTAQRSDAWSTTAARKRGKVLSYWCFSPGHSMHELVRQGVRSLILTSGTLAPVSSFALEMQIPFPVCLENPHIIDKHQIWVGVVPRGPDGAQLSSAFDRRFSEECLSSLGKALGNIARVVPYGLLIFFPSYPVMEKSLEFWRARDLARKMEALKPLFVEPRSKGSFSETISAYYARVAAPGSTGATFLAVCRGKASEGLDFSDTNGRGVIVTGLPYPPRMDPRVVLKMQFLDEMKGQGGAGGQFLSGQEWYRQQASRAVNQAIGRVIRHRQDYGAVFLCDHRFAFADARAQLPSWVRPHVRVYDNFGHVIRDVAQFFRVAERTMPAPAPRATAPSVRGEDAVSEAKSPGPFFSTRKAKSLDLHVPSLKQRSSGSPAAGDPESSLCVEYEQEPVPARQRPRGLLAALEHSEQRAGSPGEEQAHSCSTLSLLSEKRPAEEPRGGRKKIRLVSHPEEPVAGAQTDRAKLFMVAVKQELSQANFATFTQALQDYKGSDDFAALAACLGPLFAEDPKKHNLLQGFYQFVRPHHKQQFEEVCIQLTGRGCGYRPEHSIPRRQRAQPVLDPTGRTAPDPKLTVSTAAAQQLDPQEHLNQGRPHLSPRPPPTGDPGSQPQWGSGVPRAGKQGQHAVSAYLADARRALGSAGCSQLLAALTAYKQDDDLDKVLAVLAALTTAKPEDFPLLHSNSMFVRPHHKQRFSQTCTDLTGRPYPGMEPPGPQEERLAVPPVLTHRAPQPGPSRSEKTGKTQSKISSFLRQRPAGTVGAGGEDAGPSQSSGPPHGPAASEWGL

SEQ ID NO: 226288 - DNA, 3732 bp, Artificial Sequence
  derived and/or modified sequence
atgcccaagatcgtgctgaacggcgtgaccgtggacttccccttccagccctacaagtgccagcaggagtacatgaccaaggtgctggagtgcctgcagcagaaggtgaacggcatcctggagagccccaccggcaccggcaagaccctgtgcctgctgtgcaccaccctggcctggagagagcacctgagagacggcatcagcgccagaaagatcgccgagagagcccagggcgagctgttccccgacagagccctgagcagctggggcaacgccgccgccgccgccggcgaccccatcgcctgctacaccgacatccccaagatcatctacgccagcagaacccacagccagctgacccaggtgatcaacgagctgagaaacaccagctacagaagcagatgcagagccaccctgtgggtgctggagaccgccccccccagacccaccgtgctgagccccaccagacccaaggtgtgcgtgctgggcagcagagagcagctgtgcatccaccccgaggtgaagaagcaggagagcaaccacctgcagatccacctgtgcagaaagaaggtggccagcagaagctgccacttctacaacaacgtggaggagaagagcctggagcaggagctggccagccccatcctggacatcgaggacctggtgaagagcggcagcaagcacagagtgtgcccctactacctgagcagaaacctgaagcagcaggccgacatcatcttcatgccctacaactacctgctggacgccaagagcagaagagcccacaacatcgacctgaagggcaccgtggtgatcttcgacgaggcccacaacgtggagaagatgtgcgaggagagcgccagcttcgacctgaccccccacgacctggccagcggcctggacgtgatcgaccaggtgctggaggagcagaccaaggccgcccagcagggcgagccccaccccgagttcagcgccgacagccccagccccggcctgaacatggagctggaggacatcgccaagctgaagatgatcctgctgagactggagggcgccatcgacgccgtggagctgcccggcgacgacagcggcgtgaccaagcccggcagctacatcttcgagctgttcgccgaggcccagatcaccttccagaccaagggctgcatcctggacagcctggaccagatcatccagcacctggccggcagagccggcgtgttcaccaacaccgccggcctgcagaagctggccgacatcatccagatcgtgttcagcgtggaccccagcgagggcagccccggcagccccgccggcctgggcgccctgcagagctacaaggtgcacatccaccccgacgccggccacagaagaaccgcccagagaagcgacgcctggagcaccaccgccgccagaaagagaggcaaggtgctgagctactggtgcttcagccccggccacagcatgcacgagctggtgagacagggcgtgagaagcctgatcctgaccagcggcaccctggcccccgtgagcagcttcgccctggagatgcagatccccttccccgtgtgcctggagaacccccacatcatcgacaagcaccagatctgggtgggcgtggtgcccagaggccccgacggcgcccagctgagcagcgccttcgacagaagattcagcgaggagtgcctgagcagcctgggcaaggccctgggcaacatcgccagagtggtgccctacggcctgctgatcttcttccccagctaccccgtgatggagaagagcctggagttctggagagccagagacctggccagaaagatggaggccctgaagcccctgttcgtggagcccagaagcaagggcagcttcagcgagaccatcagcgcctactacgccagagtggccgcccccggcagcaccggcgccaccttcctggccgtgtgcagaggcaaggccagcgagggcctggacttcagcgacaccaacggcagaggcgtgatcgtgaccggcctgccctacccccccagaatggaccccagagtggtgctgaagatgcagttcctggacgagatgaagggccagggcggcgccggcggccagttcctgagcggccaggagtggtacagacagcaggccagcagagccgtgaaccaggccatcggcagagtgatcagacacagacaggactacggcgccgtgttcctgtgcgaccacagattcgccttcgccgacgccagagcccagctgcccagctgggtgagaccccacgtgagagtgtacgacaacttcggccacgtgatcagagacgtggcccagttcttcagagtggccgagagaaccatgcccgcccccgcccccagagccaccgcccccagcgtgagaggcgaggacgccgtgagcgaggccaagagccccggccccttcttcagcaccagaaaggccaagagcctggacctgcacgtgcccagcctgaagcagagaagcagcggcagccccgccgccggcgaccccgagagcagcctgtgcgtggagtacgagcaggagcccgtgcccgccagacagagacccagaggcctgctggccgccctggagcacagcgagcagagagccggcagccccggcgaggagcaggcccacagctgcagcaccctgagcctgctgagcgagaagagacccgccgaggagcccagaggcggcagaaagaagatcagactggtgagccaccccgaggagcccgtggccggcgcccagaccgacagagccaagctgttcatggtggccgtgaagcaggagctgagccaggccaacttcgccaccttcacccaggccctgcaggactacaagggcagcgacgacttcgccgccctggccgcctgcctgggccccctgttcgccgaggaccccaagaagcacaacctgctgcagggcttctaccagttcgtgagaccccaccacaagcagcagttcgaggaggtgtgcatccagctgaccggcagaggctgcggctacagacccgagcacagcatccccagaagacagagagcccagcccgtgctggaccccaccggcagaaccgcccccgaccccaagctgaccgtgagcaccgccgccgcccagcagctggacccccaggagcacctgaaccagggcagaccccacctgagccccagacccccccccaccggcgaccccggcagccagccccagtggggcagcggcgtgcccagagccggcaagcagggccagcacgccgtgagcgcctacctggccgacgccagaagagccctgggcagcgccggctgcagccagctgctggccgccctgaccgcctacaagcaggacgacgacctggacaaggtgctggccgtgctggccgccctgaccaccgccaagcccgaggacttccccctgctgcacagcaacagcatgttcgtgagaccccaccacaagcagagattcagccagacctgcaccgacctgaccggcagaccctaccccggcatggagccccccggcccccaggaggagagactggccgtgccccccgtgctgacccacagagccccccagcccggccccagcagaagcgagaagaccggcaagacccagagcaagatcagcagcttcctgagacagagacccgccggcaccgtgggcgccggcggcgaggacgccggccccagccagagcagcggccccccccacggccccgccgccagcgagtggggcctgtag

SEQ ID NO: 226289 - DNA, 3732 bp, Artificial Sequence
  derived and/or modified sequence
atgcctaagatcgtgctgaatggagttacagttgattttcccttccagccttacaagtgtcagcaggaatatatgaccaaggttctcgagtgtttacagcaaaaagtaaatggaatcttggaatcgccaactggcacagggaaaaccctgtgtctcttgtgtaccactttagcttggagggaacacctcagagatggtatcagcgcacggaagattgcagagcgggctcagggcgagttgttcccagatcgagcgctgagcagttggggcaacgctgccgccgctgctggcgatcctatcgcatgttataccgacatccctaaaattatttatgcctccaggacccattcccagctcactcaagtcattaatgaactgagaaatacctcataccggagtcgctgccgagcaactttgtgggtgctggagactgccccacccaggcctacagtgctaagtcctacaagacccaaagtctgcgtgctgggcagtcgggaacagctatgcattcatcctgaagtgaaaaaacaagaaagcaaccaccttcagattcacttgtgtcgcaagaaagttgcgtcgcgctcgtgccatttttacaacaacgtagaagagaaatccttggagcaggaactggcttcgccgatcttggatatcgaggacctggtgaaaagcggcagcaagcacagagtgtgtccttattacctaagcagaaaccttaagcagcaggctgacattatctttatgccatacaattacctcctggacgccaaatcgaggcgtgcccacaacattgacttgaaaggcaccgtggtgatcttcgatgaagcccacaacgtggaaaagatgtgcgaagaatctgccagcttcgatctgaccccccatgacctggcctctggcctggacgtgatcgatcaggtactggaggagcagacaaaggccgcccagcagggagagccacatccagaatttagcgcagattcaccctcccccggactaaatatggagcttgaggacatagcaaagctgaagatgatccttcttagactggaaggcgctatagacgccgttgagcttcccggggacgattccggagtgacgaagccgggcagttacatcttcgagctcttcgccgaagcacagattactttccaaaccaagggatgcattctcgattctctggaccagataatacaacacctggccggtcgagccggagtgttcaccaacacagctggacttcagaaactggccgatatcatccagatagtcttctccgttgatccttccgaaggaagccccggatcccctgccggcctcggcgccttacaatcatataaggtccacattcaccctgacgctggtcacagacgaactgcccaaagatcggatgcctggtctaccacagccgcaagaaaaagggggaaagtgttaagctattggtgtttctcccctggccactcaatgcatgagctcgtgcggcagggagtgaggagtctgatattgacctctggaaccttggccccggtgtcgagtttcgctctcgagatgcagatcccattccctgtctgcctggaaaatccccatatcattgacaaacaccagatctgggtgggcgtggtcccacgcgggcccgacggggcacagctgtcctccgcgttcgacagaaggttttctgaggagtgcctgtcctctttggggaaagcgctgggaaacattgccagggtcgtgccatatggcttactgatcttctttccctcatatcccgtaatggaaaaatccttagaattctggagagcacgagacctggccagaaaaatggaggccttaaaaccgctgttcgtagagccccgttctaagggctctttctccgaaacaatctctgcttattacgcgagggtcgccgcccccgggtccactggagccacatttctcgccgtttgcagggggaaagcatctgaaggcctggactttagcgacaccaatggccgtggtgtcattgtgaccggactgccatatcccccccgtatggatccgagggttgtgctaaagatgcagtttttggatgagatgaagggacagggcggcgcaggcgggcaatttctttcaggtcaggagtggtatcgtcagcaagcgtcccgcgccgtcaatcaggctatcgggagggttattcggcaccggcaggactatggcgccgtgtttctgtgcgatcaccgatttgcctttgctgacgcaagagcccaactccctagctgggtgcgaccgcatgtccgtgtttacgacaatttcgggcatgtcattagggacgtggctcagttttttagggtagctgaacggaccatgcccgcccctgcccccagagccaccgccccttctgtccgtggcgaggacgccgtctcagaagcaaaatcacccggcccattcttctccacgcgaaaagcaaaatctctggacctgcacgtcccctccttgaagcaaagatccagtggtagtcccgccgcaggcgacccagagtcctcgctatgtgtggagtacgaacaggagcctgtccctgcaaggcaaagacctagagggctgcttgctgccctagagcattccgagcaacgcgcagggagtcccggggaggagcaggctcatagttgctcgacactctctttgctgtctgagaaaagacccgctgaggagccacggggaggaaggaagaaaatccggctcgtctcccatcccgaggagcccgtcgctggggcacaaactgatcgggccaagctcttcatggtagcagtcaaacaagaattatcccaggcgaacttcgcaacctttacgcaggctttgcaggactacaaggggagcgatgacttcgctgccctggctgcctgtttgggtcccctatttgcagaggaccctaagaagcataatctgctgcaaggcttctatcaatttgttagacctcatcacaagcagcagttcgaagaggtctgtatccagctcactggaagaggttgtgggtacagacctgaacactctatccctcgtaggcagagggcccaacctgtcctggaccccaccgggaggactgccccagatccgaaactgactgtgagcacagcagctgctcaacaactggacccacaggaacatttaaatcagggccgcccccacctgagccctagaccacctccgaccggcgaccctggttctcaaccccagtggggcagtggcgtgccaagagctgggaagcaggggcagcacgccgtaagtgcgtatctcgctgacgcccgtagagcgctgggcagcgcagggtgtagccagttactagccgcacttaccgcatataaacaggacgacgacctcgataaagtgctggcagtgttggccgcgctgaccacagctaaacctgaagacttccccctgctgcactctaactcaatgttcgtgcgaccacaccataaacagcgatttagccagacatgcacagaccttacaggaagaccataccctgggatggagccccccggtcctcaggaggagaggctggccgtaccaccagtcctcacacacagagctccccagccaggaccctcacgctccgaaaagacagggaagactcagtcaaagatctcctcttttctgaggcagaggccggcgggcacggtgggggctgggggagaggacgcaggccctagtcaatccagtgggccaccccatggacccgctgcctcagaatggggactttag

SEQ ID NO: 226290 - DNA, 3732 bp, Artificial Sequence
  derived and/or modified sequence
atgcccaagatcgtgctgaatggagtgacagtggacttccccttccagccctacaagtgccagcaggagtacatgaccaaggtgctggagtgcctgcagcagaaggtgaatggcatcctggagagccccaccggcaccgggaagaccctgtgcctgctgtgcaccaccctggcctggagggagcacctgagagatggcatcagcgccaggaagattgctgagcgggcccagggcgagctgttcccagaccgggccctgagctcctggggcaatgctgctgctgctgctggggaccccatcgcctgctacacagacatccccaagatcatctatgccagcaggacccacagccagctgacccaggtgatcaatgagctgaggaacaccagctaccgcagccgctgccgggccaccctgtgggtgctggagacagccccaccccggcccaccgtgctgagccccacccggcccaaggtgtgtgtgctgggcagccgggagcagctgtgcatccaccctgaggtgaagaagcaggagagcaaccacctgcagatccacctgtgcaggaagaaggtggccagccgcagctgccacttctacaacaacgtggaggagaagagcctggagcaggagctggccagccccatcctggacatcgaggacctggtgaagagcggcagcaagcaccgggtgtgcccctactacctgagcaggaacctgaagcagcaggccgacatcatcttcatgccctacaactacctgctggatgccaagagcagaagagcccacaacatcgacctgaagggcaccgtggtgatctttgatgaggcccacaacgtggagaagatgtgtgaggagagcgccagctttgacctgacccctcatgacctggccagcggcctggatgtgattgaccaggtgctggaggagcagaccaaggccgcccagcagggcgagccccaccctgagttctctgctgacagccccagccctggcctgaacatggagctggaggacatcgccaagctgaagatgatcctgctgcggctggagggcgccattgatgctgtggagctgcctggagatgattctggagtgaccaagccaggcagctacatctttgagctgtttgctgaggcccagatcaccttccagaccaagggctgcatcctggacagcctggaccagatcatccagcacctggccggccgggccggggtcttcaccaacacagctggcctgcagaagctggccgacatcatccagatcgtgttttctgtggaccccagcgagggcagccctggcagccctgctggcctgggcgccctgcagagctacaaggtgcacatccacccagatgctggccacagaagaacagcccagaggagtgatgcctggagcaccacagctgccaggaagaggggcaaggtgctgagctactggtgcttcagccctggccacagcatgcatgagctggtgcggcagggcgtgcgcagcctcatcctgaccagcggcaccctggcccctgtgtcctcctttgccctggagatgcagatccccttccctgtgtgcctggagaacccccacatcatcgacaagcaccagatctgggtgggcgtggtgccccggggcccagatggagcccagctgagcagcgcctttgaccggcgcttcagcgaggagtgcctgagcagcctgggcaaggccctgggcaacatcgcccgggtggtgccctacggcctgctgatcttcttccccagctaccctgtgatggagaagagcctggagttctggagggcccgggacctggccaggaagatggaggccctgaagcccctgtttgtggagcccaggagcaagggcagcttcagcgagaccatcagcgcctactatgcccgggtggccgcccctggcagcactggagccaccttcctggccgtgtgccggggcaaggccagcgagggcctggacttcagtgacaccaacggccggggcgtcatcgtgacaggcctgccctacccacccaggatggacccccgggtggtgctgaagatgcagttcctggatgagatgaagggccagggcggggccggcggccagttcctgagcggccaggagtggtaccggcagcaggccagcagagctgtgaaccaggccatcggccgggtcatccgccaccggcaggactatggagctgtgttcctgtgtgaccacagatttgcctttgctgatgcccgggcccagctgcccagctgggtgcggccccacgtgcgggtgtatgacaactttggccacgtgatcagagatgtggcccagttcttccgggtggccgagaggaccatgcctgccccagccccccgggccacagcccccagcgtgagaggagaagatgctgtgtctgaggccaagagccctggccccttcttcagcaccaggaaggccaagagcctggacctgcacgtgcccagcctgaagcagaggagcagcggcagccctgctgctggggaccctgagagcagcctgtgtgtggagtatgagcaggagcctgtgcctgcccggcagaggccccggggcctgctggccgccctggagcacagcgagcagagagctggcagccctggagaggagcaggcccacagctgcagcaccctgagcctgctgtctgagaagaggcctgctgaggagccccggggcggcaggaagaagatccggctggtgagccaccctgaggagcctgtggccggggcccagacagaccgggccaagctgttcatggtggccgtgaagcaggagctgagccaggccaactttgccaccttcacccaggccctgcaggactacaagggcagtgatgactttgctgccctggccgcctgcctgggccccctgtttgctgaggaccccaagaagcacaacctgctgcagggcttctaccagtttgtgcggccccaccacaagcagcagtttgaggaggtgtgcatccagctgaccggccggggctgcggctacagacctgagcacagcatcccccggcggcagagggcccagcctgtgctggaccccactggaagaacagccccagaccccaagctgactgtgtccacagctgctgcccagcagctggacccccaggagcacctgaaccagggccggccccacctgagcccccggcccccacccaccggggaccccggcagccagccccagtggggcagcggcgtgccccgggccggcaagcagggccagcacgctgtgtctgcctacctggctgatgcccggcgggccctgggcagcgctggctgcagccagctgctggccgccctgacagcctacaagcaggatgatgacctggacaaggtgctggccgtgctggccgccctgaccacagccaagccagaggacttccccctgctgcacagcaacagcatgtttgtgcggccccaccacaagcagcgcttcagccagacctgcacagacctgaccggccggccctacccaggcatggagcccccaggcccccaggaggagcggctggccgtgccccctgtgctgacccaccgggccccccagcccggccccagccgctctgagaagacaggcaagacccagagcaagatcagcagcttcctgcggcagaggcctgctggcaccgtgggcgccggcggggaggatgctggccccagccagagcagcggccccccccacggccctgctgccagcgagtggggcctgtag

SEQ ID NO: 226291 - DNA, 3732 bp, Artificial Sequence
  derived and/or modified sequence
atgcccaagatcgtgctgaacggcgtgaccgtggacttccccttccagccctacaagtgtcagcaagagtatatgaccaaagttctggagtgcttgcagcagaaggtgaacggaatactcgagtcaccgaccggtacaggaaaaacactgtgcctgctgtgtactactctagcctggcgcgaacacctgcgggatggcattagcgctcggaagattgctgagcgagcacagggtgagcttttcccagacagggctctgtcctcctgggggaatgctgctgccgcggccggtgatcccatcgcatgctacacagacatccccaaaatcatctatgcgtcgagaactcactcccaactcacccaggttattaatgaattgcgaaacacctcataccggagcagatgcagagcaaccctatgggtccttgagactgcccctcctagacccacagtactgtcacccacccgtccaaaggtgtgcgtcctggggagtagagagcaactgtgtatccaccccgaggtaaagaagcaagaatccaatcacctgcagatccatttatgccggaagaaggtcgccagccggtcctgtcacttctacaataacgtggaagaaaagtctctcgagcaggaacttgcatcccctattctggatattgaggacctggtgaagagtgggtctaagcatagagtgtgtccatactacctgagtcggaacttaaaacagcaggccgacatcattttcatgccttataactacttgctagatgctaaatctaggagagcccataacattgacttgaaaggcacagtggtgatcttcgatgaggctcataacgtggagaaaatgtgcgaagaatccgcctcttttgatttgacacctcatgacttggcaagtgggctggacgtaattgatcaggtactggaggaacagacaaaggcggcccaacagggagagccacaccctgaattcagcgccgactctccatctcccggactcaatatggagttagaagacatcgccaaacttaagatgatcttgctccggcttgagggagcaattgatgccgtggaactacccggggacgactctggggtcaccaagcccggcagttacatttttgagctgtttgcagaggctcagatcacctttcagacaaagggctgcatcctggatagtctggatcagataatccagcacttagccgggagagctggggtgttcactaatactgctggcctgcagaagctggcagacattattcagatagtattctcagtcgatccctctgaaggcagcccaggctctcccgccgggctcggagctcttcaatcctacaaggtgcacatccaccccgacgccgggcaccgacggactgcgcagagatctgatgcatggtctactactgccgctcgtaagcgcggaaaagtcctctcttactggtgctttagccctggccactcgatgcatgagcttgtcaggcaaggagttcgttctttgatactgacaagcgggactctggcccctgtgtcctccttcgctctagagatgcagatccccttccctgtttgcctggaaaatcctcatataatcgataagcatcaaatctgggttggcgtggtccctagggggcccgatggtgctcagctttctagtgcgtttgaccgtcggttttccgaagagtgtctctcttctttggggaaagctctgggtaatatcgctcgggtggtcccgtatggtctgcttatatttttccccagctaccccgtgatggagaaaagcctggagttctggcgggccagagatctggcaagaaagatggaggcgttgaagcccctatttgttgaaccccgtagcaagggaagcttctctgagaccataagtgcctattatgctcgcgtggctgcccctggaagtaccggggctacctttttggcagtgtgccggggcaaggccagcgagggccttgatttcagtgacactaatggtcgaggggtgattgtcaccggattgccctacccccctcgcatggatccaagagtagtcttgaaaatgcaattcttggatgaaatgaaagggcagggcggtgcaggaggtcagtttctctctggtcaggaatggtaccgtcagcaggcatcgagggccgtcaaccaggcaatcggcagggttatcaggcatcgccaggactatggcgctgtcttcctgtgtgaccacagattcgccttcgccgatgctagagcacagctgcctagttgggtgcggccccacgttcgggtgtatgataacttcggacatgtaattcgagacgtggcgcaattctttcgggtcgccgaaagaacaatgcctgcaccagcgccaagggcaacagcacctagcgtgcgtggagaagatgctgtttccgaagctaaatctccaggaccttttttctcaacaaggaaagcgaaaagcttggacctgcacgtgccatcactgaaacaacggtccagcggctctccggccgcaggggaccccgagtcctcactctgcgtggagtacgaacaagaacccgtacctgcccggcagaggccccggggcctgctggccgcactggagcactccgaacaacgcgcagggtcaccgggcgaagagcaggctcatagctgtagtacactgagcctgttatccgagaagcgacccgcagaggagccacgtggcggaagaaaaaagataaggcttgtttcacacccggaggagcctgtggctggcgctcaaaccgacagggcgaagctgtttatggtggccgtgaaacaggagctgagccaagccaactttgctactttcacccaggccctgcaggactataaggggtcagatgatttcgctgccttagccgcatgcttggggccgctgttcgcggaggatccaaaaaagcacaatctcttgcaggggttctaccagtttgtcagacctcaccataagcagcaatttgaggaagtttgcattcagcttacaggacgaggctgcgggtaccgacccgagcactcaattcctagacgccagagagcgcagcccgtgctagacccaacgggccgaacagccccagatcctaagcttaccgtaagtacggctgctgcccagcagctagatccccaggagcacctcaatcagggtcgaccacacctgtctccaagaccccccccgaccggggatcccggatcacaaccccagtgggggtccggcgtcccacgggctggcaagcagggccagcatgccgtgtccgcgtatcttgctgacgctcgaagggctttgggctccgcgggctgtagccagctgctcgctgctctgacagcctacaagcaggacgacgacctcgacaaagtgttagcggttctggcggccctcactactgccaaacccgaagacttccctctgttgcacagcaactccatgttcgtgcggccgcatcacaaacagagattcagtcaaacatgtactgatctcactggtcgaccctatccaggaatggagcctcccggacctcaagaagaacgcctcgctgtgccaccagtgcttacccacagggccccccaacccggccccagccgcagcgagaagacaggtaaaacacagtctaagatttcatctttcctgaggcagaggcccgcgggcaccgtgggtgccggtggcgaggatgcgggaccttctcagtcttcagggccacctcatgggcccgcagccagtgagtggggcctgtag

SEQ ID NO: 226292 - DNA, 3732 bp, Artificial Sequence
  derived and/or modified sequence
atgccaaagatcgtactgaatggtgtgactgtggactttccatttcagccatataagtgtcagcaggaatacatgaccaaagtgctggaatgcttgcagcaaaaggtcaatggaatactcgagagtcccaccggtacaggcaagaccctgtgcctgctgtgtactaccctggcatggagggaacacctccgggatgggatctcggccaggaaaatcgccgaaagagctcagggtgaactcttccccgacagggcactgtcttcctggggtaacgccgcagcggcagccggtgatccgatagcttgttacactgacatcccaaagattatctacgcaagcagaacacactctcaactgacacaggtcataaacgagctgagaaatactagttaccgtagccgctgccgggcaacgctgtgggttctggagacggctcctcccagacccaccgtgctaagccctacgcgacccaaggtatgtgtgcttgggtctcgcgaacagctgtgcattcatcccgaggtaaagaagcaagagtctaaccaccttcaaattcacctttgtcggaagaaggtggcttccagatcatgtcatttctacaataatgtagaagaaaagtcactggagcaggagctggccagcccaattctcgacattgaggacctcgtgaaaagtgggtctaagcatcgggtttgtccttactacctttcccgaaacttaaaacagcaggcagatattatctttatgccgtacaactatttgcttgacgctaagtcgcgcagagctcacaatatcgaccttaaaggtactgtggttatttttgatgaagcccataacgtcgaaaagatgtgtgaagagtcggcttcctttgacttaacaccgcacgacctggcctctggactggacgtaatcgaccaggtgcttgaggagcagacaaaagcggcacaacagggcgaacctcatccggagttcagcgctgacagccctagtccaggcctcaacatggagctagaggatattgctaaactcaagatgatccttttgagactcgaaggtgcaatcgacgccgtcgagctgccaggcgacgatagtggagtgactaaaccaggatcctacatctttgaattgtttgcagaggcccagatcacatttcagaccaaagggtgtatactggattccctggaccagattatacagcacctggctgggagagcaggagtttttacaaatacggctggtttgcagaagctagccgatatcatccagatagtgttcagcgtggacccatctgagggatcacctggtagtcctgccggactgggggcactccagagttataaagtccatatacaccctgatgcaggtcacaggcgcaccgcgcaacgcagcgacgcctggtccacaactgctgcacgcaagcgaggtaaggtgctcagctactggtgttttagccctggtcattcaatgcacgagctggtgagacagggtgtgagatcgctgattctgacgtctgggacactagctcctgtgtccagctttgctctggaaatgcagattccatttcctgtatgtttggaaaatccccatataatcgacaaacaccagatatgggtcggcgttgtgcccagggggcctgatggcgctcagctgagtagtgcttttgaccggagatttagcgaggagtgtctctcctcacttggaaaggccctcggtaacatcgccagagtggtaccttacgggcttctgatattcttcccaagctacccagtaatggagaaaagcttggaattctggcgtgccagggacctggctagaaaaatggaggctctcaagcccctgttcgtggagccaagatccaagggctctttctctgagacgatcagtgcttactacgctagagtggctgctcccggttctacgggagccactttcctcgcagtgtgcaggggcaaagccagcgaaggtctggacttttccgacactaacggcaggggcgtgatagtaactggactcccataccctccgaggatggaccccagggtagtgctgaaaatgcagttcctagatgaaatgaaggggcagggcggagcaggcggacagtttctgagtggccaggaatggtatcgccagcaggctagtcgggctgtgaatcaggcaattggcagggttattcgacaccgccaggattacggggcagtgtttctttgtgatcacagattcgcttttgccgatgccagggcccagctgcccagctgggttagaccccatgttcgggtctatgacaatttcggtcatgtaatcagagacgtggcacagttttttcgagtcgctgagcgtaccatgccggctccggctcctcgggcaaccgccccaagcgtccgaggcgaggatgccgtgtctgaggccaagtctcccggtccattctttagtacacggaaggctaagagtctggatctccacgtgcccagcctgaaacagcgatcctctggtagccctgctgcaggcgatccagagtcttctttgtgcgtggagtacgaacaggagcctgtgcctgcacgacagcgtcccagagggctgctggctgcactcgagcattcagagcagagggccggtagccctggggaggaacaagcccacagctgttcaactttgagtttactgagcgagaagcgtccagccgaggagccaagaggaggacggaaaaagataaggcttgtcagccaccccgaggaacctgttgccggtgcacagactgatagagctaaattgttcatggtggccgttaaacaagagctgtcccaggccaattttgccacctttactcaggcgctccaagattacaagggatcagatgattttgccgctcttgcagcctgtctaggtcctttatttgccgaagatccaaaaaagcacaaccttctgcagggcttttaccaattcgtgcggcctcatcataaacaacagttcgaagaagtgtgtatacagctgacaggccgtggctgcggatacagacccgagcacagtatcccacggcgacagagagcccagcctgtcttagaccctacagggaggaccgcacccgacccaaaacttacagtgtctacagctgctgcccaacagctggaccctcaggagcatttgaatcagggaagacctcatctttccccaaggcctcctcccaccggagacccgggatcccaaccacagtggggatcgggagtgccacgggcaggtaagcagggacagcatgcagtctccgcgtacctcgccgatgcaagaagggccctgggatctgctggatgcagccagctgctcgccgctcttacagcctataagcaggatgacgatctggacaaggtgctggcagttctggctgcgctgaccacagcgaaacccgaagattttccattattgcatagcaatagtatgttcgtccgacctcaccataagcaaagattcagccagacctgtactgatctgactggacgcccttaccctggaatggaacctcccggaccacaggaggaacggcttgccgtgccgcctgtgctgactcaccgcgctccgcaacctggcccttcgaggagtgagaaaacaggaaaaacccaatccaagatttcctcgtttcttaggcagagaccagcaggtactgtcggagcaggcggtgaggatgccggacctagccagtcatctgggccaccacacgggcctgccgcaagcgagtggggtctgtag

SEQ ID NO: 226293 - DNA, 4273 bp, Artificial Sequence
  derived and/or modified sequence
aacggaccggaagtggggggcggaagtgcagtgggctcagcgccgactgcgcgcctctgcccgcgaaaactctgagctggctgacagctggggacgggtggcggccctcgactggagtcggttgagttcctgagggaccccggttctggaaggttcgccgcggagacaagtgagcagtctgtgccatagggattctcgaagagaacagcgttgtgtcccagtgcacatgctcgcatcgcttaccaggagtgcccgagaccctaagatgttcggagtggttttttcgcacagacccgaatagcctgcccctcagccacgctctgtgcccttctgagaacaggctgatatgcccaagatagtcctgaatggtgtgaccgtagacttccctttccagccctacaaatgccaacaggagtacatgaccaaggtcctggaatgtctgcagcagaaggtgaatggcatcctggagagccctacgggtacagggaagacgctgtgcctgctgtgcaccacgctggcctggcgagaacacctccgagacggcatctctgcccgcaagattgccgagagggcgcaaggagagcttttcccggatcgggccttgtcatcctggggcaacgctgctgctgctgctggagaccccatagcttgctacacggacatcccaaagattatttacgcctccaggacccactcgcaactcacacaggtcatcaacgagcttcggaacacctcctaccgctcacgctgcagggccacgctgtgggtgttggagacagctcctcctcgacccacggtgctctctcccaccaggcctaaggtgtgtgtgctgggctcccgggagcagctgtgcatccatcctgaggtgaagaaacaagagagtaaccatctacagatccacttgtgccgtaagaaggtggcaagtcgctcctgtcatttctacaacaacgtagaagaaaaaagcctggagcaggagctggccagccccatcctggacattgaggacttggtcaagagcggaagcaagcacagggtgtgcccttactacctgtcccggaacctgaagcagcaagccgacatcatattcatgccgtacaattacttgttggatgccaagagccgcagagcacacaacattgacctgaaggggacagtcgtgatctttgacgaagctcacaacgtggagaagatgtgtgaagaatcggcatcctttgacctgactccccatgacctggcttcaggactggacgtcatagaccaggtgctggaggagcagaccaaggcagcgcagcagggtgagccccacccggagttcagcgcggactcccccagcccagggctgaacatggagctggaagacattgcaaagctgaagatgatcctgctgcgcctggagggggccatcgatgctgttgagctgcctggagacgacagcggtgtcaccaagccagggagctacatctttgagctgtttgctgaagcccagatcacgtttcagaccaagggctgcatcctggactcgctggaccagatcatccagcacctggcaggacgtgctggagtgttcaccaacacggccggactgcagaagctggcggacattatccagattgtgttcagtgtggacccctccgagggcagccctggttccccagcagggctgggggccttacagtcctataaggtgcacatccatcctgatgctggtcaccggaggacggctcagcggtctgatgcctggagcaccactgcagccagaaagcgagggaaggtgctgagctactggtgcttcagtcccggccacagcatgcacgagctggtccgccagggcgtccgctccctcatccttaccagcggcacgctggccccggtgtcctcctttgctctggagatgcagatccctttcccagtctgcctggagaacccacacatcatcgacaagcaccagatctgggtgggggtcgtccccagaggccccgatggagcccagttgagctccgcgtttgacagacggttttccgaggagtgcttatcctccctggggaaggctctgggcaacatcgcccgcgtggtgccctatgggctcctgatcttcttcccttcctatcctgtcatggagaagagcctggagttctggcgggcccgcgacttggccaggaagatggaggcgctgaagccgctgtttgtggagcccaggagcaaaggcagcttctccgagaccatcagtgcttactatgcaagggttgccgcccctgggtccaccggcgccaccttcctggcggtctgccggggcaaggccagcgaggggctggacttctcagacacgaatggccgtggtgtgattgtcacgggcctcccgtaccccccacgcatggacccccgggttgtcctcaagatgcagttcctggatgagatgaagggccagggtggggctgggggccagttcctctctgggcaggagtggtaccggcagcaggcgtccagggctgtgaaccaggccatcgggcgagtgatccggcaccgccaggactacggagctgtcttcctctgtgaccacaggttcgcctttgccgacgcaagagcccaactgccctcctgggtgcgtccccacgtcagggtgtatgacaactttggccatgtcatccgagacgtggcccagttcttccgtgttgccgagcgaactatgccagcgccggccccccgggctacagcacccagtgtgcgtggagaagatgctgtcagcgaggccaagtcgcctggccccttcttctccaccaggaaagctaagagtctggacctgcatgtccccagcctgaagcagaggtcctcagggtcaccagctgccggggaccccgagagtagcctgtgtgtggagtatgagcaggagccagttcctgcccggcagaggcccagggggctgctggccgccctggagcacagcgaacagcgggcggggagccctggcgaggagcaggcccacagctgctccaccctgtccctcctgtctgagaagaggccggcagaagaaccgcgaggagggaggaagaagatccggctggtcagccacccggaggagcccgtggctggtgcacagacggacagggccaagctcttcatggtggccgtgaagcaggagttgagccaagccaactttgccaccttcacccaggccctgcaggactacaagggttccgatgacttcgccgccctggccgcctgtctcggccccctctttgctgaggaccccaagaagcacaacctgctccaaggcttctaccagtttgtgcggccccaccataagcagcagtttgaggaggtctgtatccagctgacaggacgaggctgtggctatcggcctgagcacagcattccccgaaggcagcgggcacagccggtcctggaccccactggaagaacggcgccggatcccaagctgaccgtgtccacggctgcagcccagcagctggacccccaagagcacctgaaccagggcaggccccacctgtcgcccaggccacccccaacaggagaccctggcagccaaccacagtgggggtctggagtgcccagagcagggaagcagggccagcacgccgtgagcgcctacctggctgatgcccgcagggccctggggtccgcgggctgtagccaactcttggcagcgctgacagcctataagcaagacgacgacctcgacaaggtgctggctgtgttggccgccctgaccactgcaaagccagaggacttccccctgctgcacagcaacagcatgtttgtgcgtccacaccacaagcagcgcttctcacagacgtgcacagacctgaccggccggccctacccgggcatggagccaccgggaccccaggaggagaggcttgccgtgcctcctgtgcttacccacagggctccccaaccaggcccctcacggtccgagaagaccgggaagacccagagcaagatctcgtccttccttagacagaggccagcagggactgtgggggcgggcggtgaggatgcaggtcccagccagtcctcaggacctccccacgggcctgcagcatctgagtggggcctctaggatgtgcccagcctgccacaccgcctccaggaagcagagcgtcatgcaggtcttctggccagagccccagtgagtgcccacggaggcccccagcacacccaacgtggcttgatcacctgcctgtccagctctggtgggccaagaacccacccaacagaataggccagcccatgccagccggcttggcccgctgca

SEQ ID NO: 226294 - protein, 400 aa, Artificial Sequence
  derived and/or modified sequence
MLSNSQGQSPPVPFPAPAPPPQPPTPALPHPPAQPPPPPPQQFPQFHVKSGLQIKKNAIIDDYKVTSQVLGLGINGKVLQIFNKRTQEKFALKMLQDCPKARREVELHWRASQCPHIVRIVDVYENLYAGRKCLLIVMECLDGGELFSRIQDRGDQAFTEREASEIMKSIGEAIQYLHSINIAHRDVKPENLLYTSKRPNAILKLTDFGFAKETTSHNSLTTPCYTPYYVAPEVLGPEKYDKSCDMWSLGVIMYILLCGYPPFYSNHGLAISPGMKTRIRMGQYEFPNPEWSEVSEEVKMLIRNLLKTEPTQRMTITEFMNHPWIMQSTKVPQTPLHTSRVLKEDKERWEDVKEEMTSALATMRVDYEQIKIKKIEDASNPLLLKRRKKARALEAAALAH

SEQ ID NO: 226295 - DNA, 1203 bp, Artificial Sequence
  derived and/or modified sequence
atgctgagcaacagccagggccagagcccccccgtgcccttccccgcccccgccccccccccccagccccccacccccgccctgccccacccccccgcccagcccccccccccccccccccagcagttcccccagttccacgtgaagagcggcctgcagatcaagaagaacgccatcatcgacgactacaaggtgaccagccaggtgctgggcctgggcatcaacggcaaggtgctgcagatcttcaacaagagaacccaggagaagttcgccctgaagatgctgcaggactgccccaaggccagaagagaggtggagctgcactggagagccagccagtgcccccacatcgtgagaatcgtggacgtgtacgagaacctgtacgccggcagaaagtgcctgctgatcgtgatggagtgcctggacggcggcgagctgttcagcagaatccaggacagaggcgaccaggccttcaccgagagagaggccagcgagatcatgaagagcatcggcgaggccatccagtacctgcacagcatcaacatcgcccacagagacgtgaagcccgagaacctgctgtacaccagcaagagacccaacgccatcctgaagctgaccgacttcggcttcgccaaggagaccaccagccacaacagcctgaccaccccctgctacaccccctactacgtggcccccgaggtgctgggccccgagaagtacgacaagagctgcgacatgtggagcctgggcgtgatcatgtacatcctgctgtgcggctacccccccttctacagcaaccacggcctggccatcagccccggcatgaagaccagaatcagaatgggccagtacgagttccccaaccccgagtggagcgaggtgagcgaggaggtgaagatgctgatcagaaacctgctgaagaccgagcccacccagagaatgaccatcaccgagttcatgaaccacccctggatcatgcagagcaccaaggtgccccagacccccctgcacaccagcagagtgctgaaggaggacaaggagagatgggaggacgtgaaggaggagatgaccagcgccctggccaccatgagagtggactacgagcagatcaagatcaagaagatcgaggacgccagcaaccccctgctgctgaagagaagaaagaaggccagagccctggaggccgccgccctggcccactag

SEQ ID NO: 226296 - DNA, 1203 bp, Artificial Sequence
  derived and/or modified sequence
atgttgagcaactctcagggtcagtcacccccggtgccattcccagcccctgcaccacctccccaaccgcccacaccggcactgcctcaccctcccgctcagcctccgcctccaccaccccagcagtttccccagtttcacgtgaaatcagggctgcaaatcaaaaaaaatgctatcattgacgactataaagtgacatcccaagtgctaggcctaggaataaacggaaaggtgcttcaaatttttaataagcgcacccaggaaaagttcgccctgaaaatgctccaggattgccccaaagctcggagagaagtggagttgcattggagggcctcacagtgccctcacattgtaaggatagtggacgtatacgagaatctgtatgctggtcgcaagtgccttctgatagtcatggagtgtttggatggtggggagttgtttagccgaatacaagatagaggcgatcaggccttcactgagagggaggcaagtgagatcatgaagagcatcggtgaggccatccagtatctccattcaattaacatcgcccatcgggacgtcaagccggagaatcttctgtacactagcaaacgacccaatgccatcctgaaattgactgatttcgggtttgctaaggagacaactagtcacaattccctgactacgccctgttatactccatactatgttgcgcccgaggtactcggtccagaaaagtacgataagtcatgcgatatgtggagcctaggcgtaataatgtacatcttgttgtgcgggtatccgcctttttactcaaaccatggcctggccatcagtcctggcatgaagaccaggatccgaatggggcagtatgagttcccaaaccctgagtggtctgaagtctcggaggaggtcaaaatgctaattaggaaccttcttaagaccgaaccgactcaaaggatgacaattactgagttcatgaaccacccgtggatcatgcaatctaccaaggtccctcagactccattacacacaagcagagtcctgaaggaagacaaagaaagatgggaggacgtgaaggaagaaatgacaagcgccctggcgacgatgcgcgtcgattacgagcagatcaaaatcaaaaaaatcgaggatgcctctaatccactgctcttgaagcggcgcaaaaaagctcgggccctggaggccgccgccctggcccactag

SEQ ID NO: 226297 - DNA, 1203 bp, Artificial Sequence
  derived and/or modified sequence
atgctgagcaacagccagggccagagcccccctgtgcccttccctgccccagcccccccaccccagccccccaccccagccctgccccaccccccagcccagcccccacctcctccaccccagcagttcccccagttccacgtgaagagcggcctgcagatcaagaagaatgccatcattgatgactacaaggtgaccagccaggtgctgggcctgggcatcaatggcaaggtgctgcagatcttcaacaagaggacccaggagaagtttgccctgaagatgctgcaggactgccccaaggcccggcgggaggtggagctgcactggagggccagccagtgcccccacatcgtgcgcatcgtggatgtgtatgagaacctgtatgccggcaggaagtgcctgctgattgtgatggagtgcctggatggaggagagctgttcagccgcatccaggacagaggagaccaggccttcacagagcgggaggccagcgagatcatgaagagcatcggggaggccatccagtacctgcacagcatcaacatcgcccacagagatgtgaagccagagaacctgctgtacaccagcaagaggcccaatgccatcctgaagctgacagactttggatttgccaaggagaccaccagccacaacagcctgaccaccccctgctacaccccctactacgtggcccctgaggtgctgggccctgagaagtatgacaagagctgtgacatgtggagcctgggcgtcatcatgtacatcctgctgtgtggctacccacccttctacagcaaccacggcctggccatcagccctggcatgaagacccgcatccgcatgggccagtatgagttccccaaccctgagtggagcgaggtgtctgaggaggtgaagatgctgatccggaacctgctgaagacagagcccacccagaggatgaccatcacagagttcatgaaccacccctggatcatgcagagcaccaaggtgccccagacccccctgcacaccagccgggtgctgaaggaggacaaggagcgctgggaggatgtgaaggaggagatgaccagcgccctggccaccatgagggtggactatgagcagatcaagatcaagaagattgaagatgccagcaaccccctgctgctgaagaggaggaagaaggcccgggccctggaggccgccgccctggcccactag

SEQ ID NO: 226298 - DNA, 1203 bp, Artificial Sequence
  derived and/or modified sequence
atgctgagcaacagccagggccagagcccccccgtgcccttccccgccccagcaccccccccacagccgcccaccccagccctgccccacccccctgcccagcctcctccgcctccaccgcagcaatttccacagttccacgttaagtccggattacaaattaagaaaaacgcaatcatagacgattacaaagtgacatcccaggtactggggttgggaataaatggaaaggtgttgcagattttcaacaagcgcacacaagagaaatttgcactcaagatgctgcaagactgcccaaaggccagacgtgaggttgaactgcactggcgtgcgagtcaatgcccacatatcgtgcggattgtcgatgtctatgaaaacctctacgctggaagaaagtgtcttctgatagtcatggagtgtctggacgggggcgagcttttttcacgaatacaagatagaggcgaccaggctttcacagaacgcgaagcttcagaaattatgaagagcattggtgaggctatccaatacctgcactccatcaatatcgctcatagagacgtgaagccagagaacctgctgtacacttctaagcggccaaatgcaattctgaaactaaccgatttcggctttgctaaggagacgacctcccataactccctgaccactccatgttacacaccctactacgtggcccccgaagtcctggggcccgagaaatatgacaaaagctgcgacatgtggtcattgggggtgatcatgtatatccttttatgcgggtacccccctttctacagtaatcatggactggccatatccccggggatgaagacaagaattcgcatgggacaatatgagtttccaaacccagagtggagcgaagtgtctgaagaggtaaagatgctgataagaaacctcctaaaaacagagcctactcagaggatgacaatcactgagtttatgaaccacccatggattatgcaaagtacgaaggttccccaaaccccccttcatactagcagggtgctcaaagaagataaggagcgttgggaagacgtcaaggaagagatgacaagcgccttagccaccatgcgcgtggactatgaacaaatcaaaatcaagaagatcgaggacgcctcaaatccacttctgctcaagcgaaggaaaaaggccagggccctggaggctgctgcccttgctcactag

SEQ ID NO: 226299 - DNA, 2961 bp, Artificial Sequence
  derived and/or modified sequence
gagccagcggcgcgcggtgggacccacggagccccgcgacccgccgagcctggagccgggccgggtcggggaagccggctccagcccggagcgaacttcgcagcccgtcggggggcggcggggagggggcccggagccggaggagggggcggccgcgggcacccccgcctgtgccccggcgtccccgggcaccatgctgtccaactcccagggccagagcccgccggtgccgttccccgccccggccccgccgccgcagccccccacccctgccctgccgcaccccccggcgcagccgccgccgccgcccccgcagcagttcccgcagttccacgtcaagtccggcctgcagatcaagaagaacgccatcatcgatgactacaaggtcaccagccaggtcctggggctgggcatcaacggcaaagttttgcagatcttcaacaagaggacccaggagaaattcgccctcaaaatgcttcaggactgccccaaggcccgcagggaggtggagctgcactggcgggcctcccagtgcccgcacatcgtacggatcgtggatgtgtacgagaatctgtacgcagggaggaagtgcctgctgattgtcatggaatgtttggacggtggagaactctttagccgaatccaggatcgaggagaccaggcattcacagaaagagaagcatccgaaatcatgaagagcatcggtgaggccatccagtatctgcattcaatcaacattgcccatcgggatgtcaagcctgagaatctcttatacacctccaaaaggcccaacgccatcctgaaactcactgactttggctttgccaaggaaaccaccagccacaactctttgaccactccttgttatacaccgtactatgtggctccagaagtgctgggtccagagaagtatgacaagtcctgtgacatgtggtccctgggtgtcatcatgtacatcctgctgtgtgggtatccccccttctactccaaccacggccttgccatctctccgggcatgaagactcgcatccgaatgggccagtatgaatttcccaacccagaatggtcagaagtatcagaggaagtgaagatgctcattcggaatctgctgaaaacagagcccacccagagaatgaccatcaccgagtttatgaaccacccttggatcatgcaatcaacaaaggtccctcaaaccccactgcacaccagccgggtcctgaaggaggacaaggagcggtgggaggatgtcaaggaggagatgaccagtgccttggccacaatgcgcgttgactacgagcagatcaagataaaaaagattgaagatgcatccaaccctctgctgctgaagaggcggaagaaagctcgggccctggaggctgcggctctggcccactgagccaccgcgccctcctgcccacgggaggacaagcaataactctctacaggaatatattttttaaacgaagagacagaactgtccacatctgcctcctctcctcctcagctgcatggagcctggaactgcatcagtgactgaattctgccttggttctggccaccccagagtgggagaggctgggaggttgggaggctgtggagagaagtgagcaaggtgctcttgaacctgtgctcattttgcaattttatcagtaatttgacttagagtttttacgaaacctcttttgttgtccttgccccactcctctccaccagacgccttcctctctggatactgcaaaggcttgtggtttgttagagggtatttgtggaaactgtcatagggattgtccctgtgttgtcccatctgccctccctgtttctccacaacagcctggggttgtccccgctggctcacgcgttctgggagctcaaggccaccttggaggaggatgccacgcacttcctctctcggagccctcagacatctccagtgtgccagacaaataggagtgagtgtatgtgtgtgtgtgtgtgtgtgtgtgtgcacacgtgtgtatgagtgcgcagatctgtgcctgggatcgtgcatttgaggggccaggggcaggcagggctgcagagggagacggccctgctggggcttaggaaccttctcccttcttgggtctgccctgcccatactgagcctgccaaagtgcctgggaagcccacccagattctgaaacaggccctctgtggcctgtctctattagctgggttccgggaggcagagaggagtgaccgggcactggcactgcgatcaggaagactggacccccagcccccagggcccccctccccccacttagtgctggtcctaggtcctctgaggcactcatctactgaatgacctctctacttccccttcttgccattattaacccatttttgtttattttccttaaatttttagccatttctccatgggccaccgcccagctcatgtaggtgagcctgggcagcttctgttggcagagcttttgcatttcctgtgtttgtcctgggttctggggcatcagccagctaccccttgtgggcaaaggcagggccacttttgaagtcttccctcagatttccattgtgtggcctggtgggtcagggggagtctttgcaccaaagatgtcctgactttgcccccttgcccatcagccatttgccatcaccccaaacaactcagcttcggggccggtgaggggaggggcctcccccagcacagatgaggagcagctggggtaggctgtctgtgccatggccccccactcccccttcccttggagggagaggtggcaggaatacttcacctttcctctccctcaggggcaggtggtggaggggcgcccagggtcgtctttgtgtatgggggaaggcgctgggtgcctgcagcgcctcccttgtctcagatggtgtgtccagcactcgattgttgtaaactgttgttttgtatgagcgaaattgtctttactaaacagatttaatagttga

SEQ ID NO: 226300 - DNA, 1203 bp, Artificial Sequence
  derived and/or modified sequence
atgctctccaactctcagggacagagtcccccagtgccattccccgctccggcacccccaccccaaccacccactcccgctttgccacatcctcccgctcagccgcctcctccacctccacagcagtttccccagtttcacgtcaaaagcgggctgcagatcaaaaaaaacgctatcattgacgactacaaggtcacttcccaggttctgggcctcggtattaacggcaaagtgctgcagatttttaataagcgaacgcaggaaaaattcgccctcaaaatgcttcaggattgccccaaagccaggagagaggtggaacttcattggagagccagccagtgcccccacattgttcgcatcgtggacgtgtatgaaaacctgtacgctggtcgcaagtgccttctgattgtaatggagtgcctggatggcggagagcttttttcgaggatccaagaccggggagaccaagcatttaccgaacgagaagcatctgaaatcatgaaaagcattggcgaggccattcagtacctccactctatcaatatagcccaccgggatgtgaagccagaaaatctgctatacacctcaaaacgacctaatgccatccttaaactaactgattttggatttgctaaggaaacaacaagtcataactccttgactaccccatgttacaccccttattatgtcgcaccagaggtgctgggaccagaaaagtacgataagtcatgcgatatgtggtccctgggggttatcatgtacatccttctgtgtggctatcctcctttctattcaaatcatggccttgccattagtccgggaatgaagacccgcatccgcatggggcagtatgaattcccaaaccccgagtggtctgaggtgtctgaggaggtgaaaatgctaattagaaacttgcttaaaactgagcctactcagcggatgactatcaccgaatttatgaaccacccgtggatcatgcagagtaccaaagtgccacaaacaccgctgcatacttctagagtgcttaaagaggataaagagcgctgggaggacgttaaggaggagatgacatctgcacttgctacgatgcgtgtcgactatgagcagattaaaatcaagaagatagaagatgccagcaacccactcttgcttaaacgcagaaagaaggctcgcgcactcgaagcggcagccctggctcactag

SEQ ID NO: 226301 - protein, 1040 aa, Artificial Sequence
  derived and/or modified sequence
MIVLLLFALLWMVEGVFSQLHYTVQEEQEHGTFVGNIAEDLGLDITKLSARGFQTVPNSRTPYLDLNLETGVLYVNEKIDREQICKQSPSCVLHLEVFLENPLELFQVEIEVLDINDNPPSFPEPDLTVEISESATPGTRFPLESAFDPDVGTNSLRDYEITPNSYFSLDVQTQGDGNRFAELVLEKPLDREQQAVHRYVLTAVDGGGGGGVGEGGGGGGGAGLPPQQQRTGTALLTIRVLDSNDNVPAFDQPVYTVSLPENSPPGTLVIQLNATDPDEGQNGEVVYSFSSHISPRARELFGLSPRTGRLEVSGELDYEESPVYQVYVQAKDLGPNAVPAHCKVLVRVLDANDNAPEISFSTVKEAVSEGAAPGTVVALFSVTDRDSEENGQVQCELLGDVPFRLKSSFKNYYTIVTEAPLDREAGDSYTLTVVARDRGEPALSTSKSIQVQVSDVNDNAPRFSQPVYDVYVTENNVPGAYIYAVSATDRDEGANAQLAYSILECQIQGMSVFTYVSINSENGYLYALRSFDYEQLKDFSFQVEARDAGSPQALAGNATVNILIVDQNDNAPAIVAPLPGRNGTPAREVLPRSAEPGYLLTRVAAVDADDGENARLTYSIVRGNEMNLFRMDWRTGELRTARRVPAKRDPQRPYELVIEVRDHGQPPLSSTATLVVQLVDGAVEPQGGGGSGGGGSGEHQRPSRSGGGETSLDLTLILIIALGSVSFIFLLAMIVLAVRCQKEKKLNIYTCLASDCCLCCCCCGGGGSTCCGRQARARKKKLSKSDIMLVQSSNVPSNPAQVPIEESGGFGSHHHNQNYCYQVCLTPESAKTDLMFLKPCSPSRSTDTEHNPCGAIVTGYTDQQPDIISNGSILSNETKHQRAELSYLVDRPRRVNSSAFQEADIVSSKDSGHGDSEQGDSDHDATNRAQSAGMDLFSNCTEECKALGHSDRCWMPSFVPSDGRQAADYRSNLHVPGMDSVPDTEVFETPEAQPGAERSFSTFGKEKALHSTLERKELDGLLTNTRAPYKPPYLTRKRIC

SEQ ID NO: 226302 - protein, 1040 aa, Artificial Sequence
  derived and/or modified sequence
MIVLLLFALLWMVEGVFSQLHYTVQEEQEHGTFVGNIAEDLGLDITKLSARGFQTVPNSRTPYLDLNLETGVLYVNEKIDREQICKQSPSCVLHLEVFLENPLELFQVEIEVLDINDNPPSFPEPDLTVEISESATPGTRFPLESAFDPDVGTNSLRDYEITPNSYFSLDVQTQGDGNRFAELVLEKPLDREQQAVHRYVLTAVDGGGGGGVGEGGGGGGGAGLPPQQQRTGTALLTIRVLDSNDNVPAFDQPVYTVSLPENSPPGTLVIQLNATDPDEGQNGEVVYSFSSHISPRARELFGLSPRTGRLEVSGELDYEESPVYQVYVQAKDLGPNAVPAHCKVLVRVLDANDNAPEISFSTVKEAVSEGAAPGTVVALFSVTDRDSEENGQVQCELLGDVPFRLKSSFKNYYTIVTEAPLDREAGDSYTLTVVARDRGEPALSTSKSIQVQVSDVNDNAPRFSQPVYDVYVTENNVPGAYIYAVSATDRDEGANAQLAYSILECQIQGMSVFTYVSINSENGYLYALRSFDYEQLKDFSFQVEARDAGSPQALAGNATVNILIVDQNDNAPAIVAPLPGRNGTPAREVLPRSAEPGYLLTRVAAVDADDGENARLTYSIVRGNEMNLFRMDWRTGELRTARRVPAKRDPQRPYELVIEVRDHGQPPLSSTATLVVQLVDGAVEPQGGGGSGGGGSGEHQRPSRSGGGETSLDLTLILIIALGSVSFIFLLAMIVLAVRCQKEKKLNIYTCLASDCCLCCCCCGGGGSTCCGRQARARKKKLSKSDIMLVQSSNVPSNPAQVPIEESGGFGSHHHNQNYCYQVCLTPESAKTDLMFLKPCSPSRSTDTEHNPCGAIVTGYTDQQPDIISNGSILSNETKHQRAELSYLVDRPRRVNSSAFQEADIVSSKDSGHGDSEQGDSDHDATNRAQSAGMDLFSNCTEECKALGHSDRCWMPSFVPSDGRQAADYRSNLHVPGMDSVPDTEVFETPEAQPGAERSFSTFGKEKALHSTLERKELDGLLTNTRAPYKPPYLRKKQRC

SEQ ID NO: 226303 - DNA, 3123 bp, Artificial Sequence
  derived and/or modified sequence
atgatagtgctgcttttgtttgcattgctttggatggtggaaggcgtcttttcccagctacactacacggtgcaggaggaacaggagcacggtaccttcgtgggcaacatcgcagaggatctgggcctggacataactaaactctcagctcgaggatttcagaccgtgcccaactcacgaacaccctatttggatttgaacctggaaacgggtgtcttatacgtgaacgagaagatcgatcgcgagcaaatctgtaagcaaagtccgtcttgcgttcttcatctggaagtgttcctggaaaatcccctcgaactgtttcaagtcgaaattgaagttttagacattaatgataatcctccgagttttcccgaacctgatctgactgtggaaatatccgagagtgcgacccctggtactagatttcctctcgagagtgccttcgaccccgacgtaggcaccaacagcctgcgggattatgagatcactccaaactcgtatttctccctggatgtgcagacccagggggatggcaaccgctttgccgaattggtgctcgagaaacccctggatagggaacagcaggctgttcatcggtacgtgctcacggccgtggatggggggggcggaggtggcgtgggagagggagggggcggcggcggcggggcaggccttccgccgcagcagcagaggactggcaccgcactgttgaccattagggtcctggactccaatgataacgtacccgccttcgaccagcctgtgtataccgtctccttgcccgagaatagccctcccgggaccctcgttattcagctgaacgccaccgacccagatgaagggcaaaacggggaagtcgtgtattcattttcgtcacatatctctcctagggctcgagaactgtttggcctcagcccacgaaccgggcgcctcgaagtgagcggggagctcgattacgaagagagtcctgtctaccaggtctatgtgcaggctaaagacttgggtcccaacgctgtgcctgctcactgcaaagtgctcgtgagggtgctcgatgccaacgataatgctccagagatcagcttctcaacagtcaaggaggccgtctcagaaggagccgcccccgggaccgtcgtggcactgtttagcgtcaccgaccgcgactctgaagagaacgggcaagtgcagtgtgaactcctgggagatgtgccctttagattgaagtcatcattcaaaaactactatacaatcgtcactgaagccccgcttgatagagaggccggggacagctacaccttgactgtggtggcccgagatcgtggagaacccgcactgtcgacgtcgaaaagcatccaagtccaggtttctgatgtaaacgataacgccccgaggttttcgcagcctgtgtatgatgtttacgtcaccgaaaacaacgtgccaggtgcctacatctacgccgtgagcgccaccgaccgcgacgagggcgccaacgctcagctggcatactctatacttgaatgccagattcagggtatgtcggttttcacatacgtcagcatcaatagcgagaacggctacctgtacgcactgcgtagcttcgattatgagcagctcaaggacttctcatttcaggtcgaggccagggacgccggtagcccacaggcgctggccgggaatgccaccgtgaatatcttgatcgtggaccagaatgacaatgcccccgccattgtggcccctttgccaggacggaatggcaccccagcccgggaggttctacctagatctgcagagccaggctatttgctcacacgggtggccgcagttgatgctgacgatggagaaaacgcaaggctgacatattccattgtacgcgggaacgagatgaacctgttccggatggactggaggaccggggagttgcggaccgctaggcgcgtccctgcgaaacgcgatcctcagagaccttacgaacttgtcattgaagtgcgcgatcatggtcagccccctctctcctctaccgccactttagtggtacagctagtagacggggctgtcgagcctcagggcggggggggctccgggggggggggctctggcgaacaccagaggcctagcaggtcaggcggcggcgagacttcgcttgacttgacattaatcctgataatcgcgcttgggagcgtatccttcatttttctcctggcaatgatcgttctcgctgtgaggtgccaaaaggagaagaagttgaatatttacacgtgcctggcctccgattgttgcctctgctgctgttgctgcggcgggggggggtctacctgttgtgggcgccaggcacgggctaggaagaaaaagctcagcaagtctgatatcatgctcgttcagagttcaaacgtgccttccaatcccgctcaagtaccaattgaagaatcagggggcttcggtagccatcatcacaaccagaactactgctatcaagtctgtctcactcccgagagcgccaaaacggacctcatgtttctgaagccctgcagccccagccgaagcactgatactgaacataatccatgcggagcaattgtgaccggatatacagatcagcagcctgatatcattagtaatggatccatcctgagcaatgagactaagcaccagagggcagaactttcatatctggtagaccggcccagacgggttaactcaagcgccttccaagaggctgatatcgtctcatctaaggacagtggacacggcgactcagaacaaggcgattcggaccacgacgcaacaaatagagcacaaagcgcgggcatggacttatttagcaattgtactgaagaatgcaaggctttaggtcattccgacaggtgctggatgccgtcctttgtgcccagcgatggcaggcaggccgccgactacaggtctaacttgcacgtgcctggcatggacagcgtgcctgatacggaagtgtttgaaacacccgaagcacagcccggggcagaacggtccttctccactttcggcaaagaaaaggcattgcattccaccctcgagcggaaggaactcgacggattgctgactaatacccgcgcaccctacaagccaccctatctgacacggaaaaggatctgctag

SEQ ID NO: 226304 - DNA, 3123 bp, Artificial Sequence
  derived and/or modified sequence
atgatcgtgcttttactcttcgccctgctttggatggtagagggggttttctctcaattacactacaccgtgcaagaggagcaggagcacggaacattcgtcgggaatattgctgaagatctgggtttggatattacaaaattatcggcccgaggatttcagacagtgcctaactccagaaccccatacctggacctcaatctggaaacgggggtcttgtacgtgaatgaaaagattgatcgggaacagatctgtaagcagtctcccagttgcgtactccacttagaagtgttcctcgagaaccctctggagctattccaggtcgagatcgaagtgctggacatcaacgataaccccccttcctttccggagcccgatctgacagtcgaaatctccgaatccgctactcctgggactcggtttcccctggagagcgcttttgaccccgatgtgggtaccaactctcttcgcgactatgagattacacctaactcctatttcagtctagatgtgcagacacagggcgatggcaatagatttgcggaattggtgctagaaaagccactggatcgagagcagcaggcagtgcataggtatgtactgaccgcagtcgacggggggggcggaggaggcgttggcgaaggaggaggcggggggggcggagcaggcttacccccccaacagcagcggaccggaacagctcttctgactattcgcgttcttgacagcaacgataatgtgccggcattcgaccagccagtttacacagtgtcccttcctgagaattccccccccggaactctcgtgatccagttaaatgctacagatcccgacgaagggcagaacggtgaggtggtctactccttctctagtcacataagtcctagggcgcgcgagctgttcggactctctccgagaactggtcgcctcgaggtgtcaggagagctggattacgaagaatcccccgtataccaggtatatgtgcaggccaaagacctagggcccaatgcagtgcctgcccattgtaaggtgctagtccgtgtcctggacgccaatgacaatgcccccgagatttcatttagcaccgtgaaagaggcggtctctgagggcgcagctccgggaactgttgtggccctcttcagcgtgacggacagggacagtgaggagaacggacaggtgcagtgcgagttgttgggcgacgtaccgttccgcctaaagagctcttttaaaaattattacacaattgttacagaagcaccgctagatagggaggccggcgattcctatacactgacagtggtcgccagagatagaggcgagcctgcactgtcaacatctaagagtatacaggtccaggtgagtgacgtgaacgacaacgctccccgcttttcccagccagtatatgatgtgtacgttacagaaaacaacgtgccaggggcatacatctatgccgtgagtgctactgaccgggatgagggagctaacgcacagctagcctactcaatcctggagtgccagatccagggcatgtctgtttttacctacgtttctatcaactcagaaaatggttacctctatgcgctccggagctttgattacgagcagctgaaggacttttcctttcaggtggaggcaagggatgccggatcaccacaggctcttgcagggaatgctacagtgaacatactcatcgttgatcagaacgacaatgctcccgctatcgtcgctccactcccagggagaaacggaaccccagcacgagaagttctgcctcggagcgcagaacctggctatctgctgacacgagtcgcagctgtggatgctgatgatggcgaaaacgccaggctgacatactctatcgtgcgcggtaatgaaatgaacctgtttaggatggattggaggacaggggagctgcgcacggcccgccgcgtgccagccaagcgcgacccccaaagaccttacgagctcgtaatagaggtacgggaccacggccagccacccctgtccagcaccgccacattagtggtgcagctggtcgacggcgccgtggagccgcagggaggagggggctctggtggcggcggtagcggggagcaccagcggccttcccgcagtgggggcggcgagacatcacttgacctgactcttatcttgatcattgcattaggctccgtctcgtttatcttcctcctcgcaatgattgttctcgcagtcagatgtcagaaagaaaaaaagcttaatatttatacttgtttggccagtgactgttgtttgtgttgctgttgctgtggcggcggtggttcaacgtgctgcggtcgacaggcacgtgccagaaaaaaaaagctttctaagtccgacataatgttagtgcagtcgtctaatgtaccgtctaatccagcccaagtacccatcgaagagagcggcggcttcgggtctcaccatcacaaccagaactactgttatcaggtgtgtcttacccccgagagcgcaaagaccgacctaatgtttttgaagccctgttcaccaagtcggagtaccgacacagagcataacccatgcggcgctatcgtgacaggctataccgaccagcagcccgacattataagcaatggatccattctatcaaatgaaacaaagcaccagcgcgcagagttgagctacttggtggatagacccaggcgcgtgaactctagcgcatttcaagaggccgacatcgtgtccagtaaagattcaggacatggggacagcgagcagggcgattccgatcacgatgcaacaaatcgagcccagtccgcagggatggatctctttagcaactgtaccgaggagtgtaaggcattggggcattctgacaggtgttggatgccctcgtttgtcccttcagatggtcggcaagctgccgactaccgtagcaacctgcatgttcctggaatggacagcgtgcctgatacagaggtattcgaaactcctgaggcacagcctggcgccgaacgctcattttccacttttggcaaagaaaaggctctgcactctacattggagcgcaaggaattggacggcctgttaactaatacccgcgctccctataagccaccatatttacgcaaaaagcagaggtgttag

SEQ ID NO: 226305 - DNA, 3123 bp, Artificial Sequence
  derived and/or modified sequence
atgattgtgctgctgctgtttgccctgctgtggatggtggagggcgtcttcagccagctgcactacacagtgcaggaggagcaggagcacggcacctttgtgggcaacattgctgaggacctgggcctggacatcaccaagctgagcgcccggggcttccagacagtgcccaacagcaggaccccctacctggacctgaacctggagaccggggtgctgtatgtgaatgagaagattgaccgggagcagatctgcaagcagagccccagctgtgtgctgcacctggaggtgttcctggagaaccccctggagctgttccaggtggagattgaggtgctggacatcaatgacaaccccccatccttccctgagccagacctgactgtggagatcagcgagagcgccaccccaggcacccgcttccccctggagagcgcctttgatcctgatgtgggcaccaacagcctgcgggactatgagatcacccccaacagctacttcagcctggatgtgcagacccagggagatggcaacagatttgctgagctggtgctggagaagcccctggaccgggagcagcaggccgtgcacagatatgtgctgacagctgtggatggcggcggcggcggcggcgtgggggagggcggcggcggcggcggcggggccggcctgcccccccagcagcagaggactggaacagccctgctgaccatccgggtgctggacagcaatgacaacgtgcctgcctttgaccagcctgtgtacacagtgtccctgcctgagaacagccccccaggcaccctggtgatccagctgaatgccacagatcctgatgagggccagaatggagaggtggtgtacagcttcagcagccacatcagcccccgggcccgggagctgtttggcctgagccccaggacaggccgcctggaggtgtctggagagctggactatgaggagagccctgtgtaccaggtgtatgtgcaggccaaggacctgggccccaatgctgtgcctgcccactgcaaggtgctggtgcgggtgctggatgccaatgacaatgcccctgagatctccttcagcacagtgaaggaggccgtgtctgagggcgccgcccctggcaccgtggtggccctcttctctgtgacagaccgggacagtgaagaaaatggccaggtgcagtgtgagctgctgggagatgtgcccttccggctgaagagcagcttcaagaactactacaccatcgtgacagaggcccccctggaccgggaggccggggacagctacaccctgactgtggtggcccgggacagaggagagcccgccctgagcaccagcaagagcatccaggtgcaggtgtctgatgtgaatgacaatgccccccgcttcagccagcctgtgtatgatgtgtatgtgacagagaacaacgtgcctggggcctacatctatgctgtgtctgccacagacagagatgaaggagccaatgcccagctggcctacagcatcctggagtgccagatccagggcatgtctgtgttcacctacgtgtccatcaacagtgaaaatggctacctgtatgccctgcggagctttgattatgagcagctgaaggacttctccttccaggtggaggccagagatgctggcagcccccaggccctggccggaaatgccaccgtgaacatcctgattgtggaccagaatgacaatgccccagccatcgtggcccccctgcctggaagaaatggcaccccagcccgggaggtgctgcccaggtctgctgagcccggctacctgctgaccagggtggccgctgtggatgctgatgatggagaaaatgcccggctgacctacagcatcgtgagaggaaatgagatgaacctcttcaggatggactggaggactggagagctgaggacagcccggcgggtgcctgccaagagggacccccagaggccctatgagctggtgattgaggtgcgggaccacggccagccccccctgagcagcacagccaccctggtggtgcagctggtggatggagctgtggagccccagggcggcggcggcagcggcggcggcggcagcggggagcaccagaggcccagccgcagcggcggcggggagaccagcctggacctgaccctcatcctgatcatcgccctgggctctgtgtccttcatcttcctgctggccatgattgtgctggccgtgcgctgccagaaggagaagaagctgaacatctacacctgcctggccagtgactgctgcctgtgctgctgctgctgcggcggcggcggcagcacctgctgcggccggcaggcccgggccaggaagaagaagctgagcaagagtgacatcatgctggtgcagagcagcaatgtgcccagcaacccagcccaggtgcccatcgaggagagcggcggcttcggcagccaccaccacaaccagaactactgctaccaggtgtgcctgaccccagagagcgccaagacagacctgatgttcctgaagccctgcagccccagccgcagcacagacacagagcacaacccctgtggggccatcgtgacaggctacacagaccagcagcctgacatcatcagcaatggcagcatcctgagcaatgagaccaagcaccagagagctgagctgagctacctggtggaccggcccaggagagtgaacagcagcgccttccaggaggccgacatcgtgagcagcaaggacagcggccatggagacagcgagcagggcgacagcgaccatgatgccaccaacagagcccagagcgctggcatggacctcttcagcaactgcacagaggagtgcaaggccctgggccacagcgaccgctgctggatgcccagctttgtgcccagtgatggccggcaggccgctgactaccgcagcaacctgcacgtgcccggcatggacagcgtgcctgacacagaggtgtttgagaccccagaggcccagcccggggctgagaggagcttcagcaccttcggcaaggagaaggccctgcacagcaccctggagaggaaggagctggatggcctgctgaccaacacccgggccccctacaagccaccctacctgaccaggaagaggatctgctag

SEQ ID NO: 226306 - DNA, 3123 bp, Artificial Sequence
  derived and/or modified sequence
atgattgtgctgctgctgtttgccctgctgtggatggtggagggcgtcttcagccagctgcactacacagtgcaggaggagcaggagcacggcacctttgtgggcaacattgctgaggacctgggcctggacatcaccaagctgagcgcccggggcttccagacagtgcccaacagcaggaccccctacctggacctgaacctggagaccggggtgctgtatgtgaatgagaagattgaccgggagcagatctgcaagcagagccccagctgtgtgctgcacctggaggtgttcctggagaaccccctggagctgttccaggtggagattgaggtgctggacatcaatgacaaccccccatccttccctgagccagacctgactgtggagatcagcgagagcgccaccccaggcacccgcttccccctggagagcgcctttgatcctgatgtgggcaccaacagcctgcgggactatgagatcacccccaacagctacttcagcctggatgtgcagacccagggagatggcaacagatttgctgagctggtgctggagaagcccctggaccgggagcagcaggccgtgcacagatatgtgctgacagctgtggatggcggcggcggcggcggcgtgggggagggcggcggcggcggcggcggggccggcctgcccccccagcagcagaggactggaacagccctgctgaccatccgggtgctggacagcaatgacaacgtgcctgcctttgaccagcctgtgtacacagtgtccctgcctgagaacagccccccaggcaccctggtgatccagctgaatgccacagatcctgatgagggccagaatggagaggtggtgtacagcttcagcagccacatcagcccccgggcccgggagctgtttggcctgagccccaggacaggccgcctggaggtgtctggagagctggactatgaggagagccctgtgtaccaggtgtatgtgcaggccaaggacctgggccccaatgctgtgcctgcccactgcaaggtgctggtgcgggtgctggatgccaatgacaatgcccctgagatctccttcagcacagtgaaggaggccgtgtctgagggcgccgcccctggcaccgtggtggccctcttctctgtgacagaccgggacagtgaagaaaatggccaggtgcagtgtgagctgctgggagatgtgcccttccggctgaagagcagcttcaagaactactacaccatcgtgacagaggcccccctggaccgggaggccggggacagctacaccctgactgtggtggcccgggacagaggagagcccgccctgagcaccagcaagagcatccaggtgcaggtgtctgatgtgaatgacaatgccccccgcttcagccagcctgtgtatgatgtgtatgtgacagagaacaacgtgcctggggcctacatctatgctgtgtctgccacagacagagatgaaggagccaatgcccagctggcctacagcatcctggagtgccagatccagggcatgtctgtgttcacctacgtgtccatcaacagtgaaaatggctacctgtatgccctgcggagctttgattatgagcagctgaaggacttctccttccaggtggaggccagagatgctggcagcccccaggccctggccggaaatgccaccgtgaacatcctgattgtggaccagaatgacaatgccccagccatcgtggcccccctgcctggaagaaatggcaccccagcccgggaggtgctgcccaggtctgctgagcccggctacctgctgaccagggtggccgctgtggatgctgatgatggagaaaatgcccggctgacctacagcatcgtgagaggaaatgagatgaacctcttcaggatggactggaggactggagagctgaggacagcccggcgggtgcctgccaagagggacccccagaggccctatgagctggtgattgaggtgcgggaccacggccagccccccctgagcagcacagccaccctggtggtgcagctggtggatggagctgtggagccccagggcggcggcggcagcggcggcggcggcagcggggagcaccagaggcccagccgcagcggcggcggggagaccagcctggacctgaccctcatcctgatcatcgccctgggctctgtgtccttcatcttcctgctggccatgattgtgctggccgtgcgctgccagaaggagaagaagctgaacatctacacctgcctggccagtgactgctgcctgtgctgctgctgctgcggcggcggcggcagcacctgctgcggccggcaggcccgggccaggaagaagaagctgagcaagagtgacatcatgctggtgcagagcagcaatgtgcccagcaacccagcccaggtgcccatcgaggagagcggcggcttcggcagccaccaccacaaccagaactactgctaccaggtgtgcctgaccccagagagcgccaagacagacctgatgttcctgaagccctgcagccccagccgcagcacagacacagagcacaacccctgtggggccatcgtgacaggctacacagaccagcagcctgacatcatcagcaatggcagcatcctgagcaatgagaccaagcaccagagagctgagctgagctacctggtggaccggcccaggagagtgaacagcagcgccttccaggaggccgacatcgtgagcagcaaggacagcggccatggagacagcgagcagggcgacagcgaccatgatgccaccaacagagcccagagcgctggcatggacctcttcagcaactgcacagaggagtgcaaggccctgggccacagcgaccgctgctggatgcccagctttgtgcccagtgatggccggcaggccgctgactaccgcagcaacctgcacgtgcccggcatggacagcgtgcctgacacagaggtgtttgagaccccagaggcccagcccggggctgagaggagcttcagcaccttcggcaaggagaaggccctgcacagcaccctggagaggaaggagctggatggcctgctgaccaacacccgggccccctacaagccaccctacctgaggaagaagcagcgctgctag

SEQ ID NO: 226307 - DNA, 3123 bp, Artificial Sequence
  derived and/or modified sequence
atgatcgtgctgctgctgttcgccctgctgtggatggtggagggcgtgttcagccagcttcattacactgttcaggaagaacaggaacacggaactttcgtcggaaatatagctgaggatctgggattggatatcacaaaactgtcagcacgtggattccagactgtgcccaattctcgaacgccgtatttagacctgaatcttgaaacaggcgtcctgtatgttaatgagaagatcgaccgtgaacaaatttgtaaacagagtccaagctgtgtcctgcatctggaggtgttcctggagaacccgcttgagctgtttcaggtggaaattgaggtgcttgatattaacgataaccccccttcctttcccgagcccgacttaacagtcgagatttctgagagcgctacccctggaactcgcttccctctggagagcgcttttgatcccgacgtcggcacaaactctctgcgagactacgagatcacgcctaattcctatttctcactggacgtgcagacccaaggagatggcaatcgatttgcggaactcgttttggagaagccgttagaccgggaacaacaagctgtgcaccgctatgtgctaaccgccgttgacggtggaggaggtggaggcgtgggggaaggcggcggaggagggggcggggccggactcccaccacagcagcagcgcaccggtacagccctcctcaccattcgagtcctggactcaaatgataatgtgccagcttttgaccagccagtgtacaccgtgtctctaccagaaaactcacctccagggaccctcgtgatccagctaaacgccacggacccagatgaaggccaaaacggagaagtcgtgtacagctttagcagtcacatttctccacgggcccgtgagctgtttggcctgtccccccggactgggcggctggaagtctctggcgaacttgattacgaggagagccccgtgtatcaagtatacgttcaggcgaaggatctgggacccaatgccgtgcccgcccattgcaaggtgctggtacgcgtcctcgacgccaacgacaacgccccagagatttctttcagcactgtcaaggaggctgttagtgagggagcggcacctggcacggtggtggccctgtttagcgtgactgatagagacagcgaggagaacggtcaggttcagtgcgaattactgggcgacgttccatttcggcttaaaagctcttttaagaattactacacgatcgttaccgaggccccccttgatcgggaggcaggggattcttataccctgaccgtggttgcccgagaccggggggaaccagcactcagcacctctaagtccatacaagtgcaggtgagcgatgtgaacgacaacgcccctcgattttctcaacctgtctacgatgtgtacgtgacagagaacaacgttcccggtgcatacatatatgccgtctcagctactgaccgggacgaaggcgctaatgcccagctcgcatatagtatcctcgaatgccaaatacagggaatgtccgtatttacttacgtctcaattaactcagaaaacggctatctctacgctctgaggtctttcgactacgaacaattgaaggatttcagcttccaggtggaagcccgggacgcaggatcgcctcaagccctcgccggaaacgctaccgtgaacattctcattgtcgaccagaatgacaatgccccagctatcgtcgcccccttacctggacggaacgggacccccgctcgggaagtgctgccacggagtgcggagcctggttatctgctgacccgggtcgcggcggttgacgcagatgacggagagaatgccagactgacatattccatcgttcggggcaatgagatgaatctgttccggatggactggcgaactggcgagctgcgcacagctcggcgggtccctgcaaagagggatccacaacgcccgtacgagctggtgatagaggtgagagatcatggtcagcctccattgtccagtacagcaactctggtggtccagctcgttgatggagcagttgagcctcaaggcgggggggggtctggtgggggaggctctggggaacatcagcgcccatcccgctcaggcggaggcgagacttccctagatcttacacttattctgattatcgccctggggtcagtgtcattcatcttcttgctcgctatgatcgtccttgcggtgcgatgtcagaaagagaaaaaacttaacatctacacttgcttggccagtgactgttgcttgtgctgctgttgctgcggaggggggggaagtacctgctgcgggcggcaggctagggcaagaaaaaagaaactgagcaaaagcgatatcatgctggtgcaatcgagtaatgttccctcaaaccccgcacaagttcctattgaggaaagtgggggattcgggtcccaccatcacaaccagaactactgctaccaggtgtgccttacccctgagtcagctaaaacggatctgatgtttctcaaaccttgtagcccgtcccgcagcaccgatactgaacataacccttgcggcgctattgtgaccggttacacggaccagcagcctgacatcatcagcaacggtagtatcctctcaaacgaaactaaacaccagcgtgcggaattgtcctatctcgtcgaccggcctaggagggttaacagttcagcattccaggaagcggatatcgtctcatccaaagatagcgggcatggcgactccgaacaaggcgactcagatcatgatgccaccaacagggcacaatctgccgggatggatctgtttagcaactgtaccgaagaatgtaaagcactgggtcatagcgatcgatgctggatgccctcttttgtgcccagtgatggacgacaggcggctgattacagaagcaacttacatgtgcctggaatggactctgtccccgacactgaagttttcgagaccccagaagctcagcctggcgccgagagatcgttttccacttttgggaaggagaaggctttacacagcacgctggaacgaaaggagctggatggactactgactaatactcgggcgccttacaaacctccatacctgactcggaaaagaatttgctag

SEQ ID NO: 226308 - DNA, 3123 bp, Artificial Sequence
  derived and/or modified sequence
atgatcgtgctgctgctgttcgccctgctgtggatggtggagggcgtcttttctcagctgcactacaccgtacaggaggaacaagaacacgggacgtttgttggaaacatcgctgaggatttagggctggacatcactaaactgtccgcgaggggtttccaaacggtccctaactctaggactccctatttggatctcaacctggagacgggtgtgctgtacgtgaatgaaaaaatcgaccgcgagcagatatgcaagcagtctccgtcatgtgtgctgcacctcgaagttttcctcgaaaatccactggaactattccaggtggaaatcgaagtgctcgacataaatgacaatcctccttcctttcccgagccagatttaaccgtagagataagcgagtcagccaccccgggaactaggtttccattggaatccgcctttgaccccgacgtcgggaccaactctcttagagattacgaaattaccccaaattcctatttcagcctggatgtccagactcagggcgacggcaatagattcgccgagttggtgctcgaaaagcccctggatagggagcagcaggctgtgcaccgctatgtgctgaccgccgtcgatggtgggggaggcggcggtgttggcgaaggagggggcggaggaggaggcgccgggttgcctccccagcagcagaggacgggtactgcgttgctgactatccgagtgctggacagcaacgataatgtaccagccttcgaccagccagtgtataccgtaagtctgccggaaaattcccctccgggaacacttgtcatccagctcaatgccacagatccagatgagggacagaacggcgaagtggtgtattcttttagttcccacatctctcctcgggctcgagagctcttcggtctgagcccgcgcacaggacggctggaggttagtggcgagctggactacgaagaatctcctgtgtatcaggtatatgtgcaggcaaaagacctcggtcctaatgccgtccctgcccattgcaaagtgcttgtaagagtgctggacgcaaacgataatgccccagagatctcattcagcaccgtgaaggaagctgtaagcgagggcgccgctccagggacggtagtcgcacttttttcagtcacagacagggacagtgaagagaacgggcaggtgcagtgcgaattattgggcgacgttccattcagactgaaaagcagctttaaaaattactatacaatagtgaccgaagcaccactggaccgcgaggccggcgactcttataccctgaccgttgttgcgcgcgaccggggagagccagcactgtccacttcaaagagcattcaagtccaggtgagcgacgtcaacgataatgctccccgcttctcgcagcccgtttatgatgtgtatgtaacagaaaacaacgtgcctggggcctatatctatgccgttagcgctacagaccgggacgaaggggctaacgcgcaactggcctacagcatactcgagtgccaaatccagggcatgagtgtctttacttacgtgagcattaattcagaaaacggctatctgtacgcacttcgcagttttgactacgagcagctaaaagatttcagttttcaggtggaagcacgcgacgctggctctccccaggctcttgctggaaatgcgacggtgaatattctgatagtggatcagaacgataatgccccagccatagtggctcccctgcctggcaggaatggaacccccgccagggaggtgctgccacggtccgcggagccagggtacctgcttactagggtcgcggccgtggatgctgatgacggggagaacgcccgcttaacttattcaatcgtcagaggaaacgagatgaatttatttaggatggactggaggacgggcgagttacgcactgcacggagagtgccagccaagagagacccacagcggccatatgaactagtcattgaggtcagagatcatggccagcccccattatcatcaactgcaactcttgtggtgcagttagtggacggagccgtggagcctcagggcggcggcgggagtgggggcgggggctctggagagcaccagaggccctcccgctccggcggcggcgaaaccagtctggatctcactctaattctaataatagccttgggatcagtttcattcattttcctgctcgcgatgatagtgctggcggttcgatgtcagaaggaaaaaaagttgaatatctacacctgcctggcatcagattgctgcctttgctgttgctgttgcgggggaggaggaagcacctgctgtgggcgccaggcgagggccaggaagaaaaagttgtctaaatccgatattatgctggtgcagtcctccaacgtgccttccaatcctgcccaggtacccatcgaagaatcggggggatttgggtcccaccaccataaccagaactattgctatcaggtctgtctgacccctgagagcgcaaagaccgatttgatgttcttgaaaccgtgctccccctcaagatctaccgatactgagcataatccctgtggagcaatcgttactggttacaccgatcagcagccagatattatctccaacggctccatcctgtccaacgagactaaacatcagagagcagaactgagctacctggtggacaggccaaggagagtgaactcttccgcattccaagaagccgatatcgtgagttctaaggattcaggccacggcgactcagaacagggagattcagatcacgatgcaacaaatagagctcagtccgcaggaatggatctattttccaactgtaccgaagagtgcaaggcccttggtcactctgacagatgctggatgccaagttttgtgcccagcgatggacgccaggctgccgactatcgatcaaatcttcacgtccccgggatggacagcgttccggatactgaagtcttcgagacacccgaggcacaaccaggcgccgaacggagtttctctaccttcgggaaagagaaagccctccatagtacccttgaaagaaaagagctggacggactgttgaccaacacccgggcaccgtataagcccccgtatcttagaaagaagcaaaggtgctag

SEQ ID NO: 226309 - DNA, 3123 bp, Artificial Sequence
  derived and/or modified sequence
atgatcgtactgctactgtttgcgcttttatggatggtggagggagtgttttctcagctccattatacggtacaagaagagcaggaacatggcaccttcgtgggtaacatcgcggaggatctggggctggatatcactaagctctccgctagagggtttcagactgtacctaatagtagaactccctacctggatctcaatttggaaacaggtgtgctgtacgtgaacgagaagatcgatagagaacaaatttgcaaacagagccctagttgcgtcctgcatctggaggtttttctcgagaacccactcgagcttttccaggtggaaatcgaggtgctggatatcaatgacaatccacctagcttccccgaaccagacttgactgtagagatttccgaaagcgccacccctggcacgagattccccttagagtctgcattcgatccagatgtggggactaactcgcttcgtgattatgagattactccaaacagttacttctctctcgacgtgcagacccagggtgacggtaacagatttgcagagttggttctggagaagcctctggaccgcgaacagcaggccgtacaccgatacgtcctgaccgccgtcgacggagggggaggcggtggtgtgggcgagggcggtggaggaggcggaggagcaggacttcctccacagcaacaaagaaccggcacagctcttttgactattcgggttcttgatagcaacgataacgtcccagcttttgaccagcccgtctatacggtatcactgcccgaaaactccccaccgggtacgctggtgatccaactgaacgccaccgaccccgatgagggccagaacggcgaggtggtctactcgttttcatctcacatttcgccgagggcgagggagctctttggtctctcaccccgaaccggtagactcgaagtgtctggcgaactggattacgaggaaagcccggtctaccaggtgtacgtacaggctaaagacttaggtcccaatgccgttcctgcccactgtaaggtcttggtgcgcgttctggatgccaacgacaatgcaccagaaatcagcttcagcactgtgaaggaggctgtatctgaaggtgcggcacctgggacagtggttgccctgttttccgtgaccgatagagactcagaggagaacggccaagtgcagtgcgagcttctgggtgacgtccccttcaggctcaaaagttccttcaaaaactattacaccatcgtcaccgaagctccattggaccgggaagcgggtgattcctataccctgacggtggtggcacgtgatagaggcgaaccggcattgagcacatcaaaatccatccaggtgcaggtgagcgacgtaaacgataacgccccaagattttctcagcccgtatacgatgtctacgttacagagaacaacgtccctggggcttacatatacgctgtgtctgcaacggaccgtgatgagggcgcaaatgcccaacttgcttacagcatcctggaatgtcaaatccaggggatgtctgtgtttacatatgtcagcattaacagcgaaaatggttacctgtacgctctacgttcctttgattacgaacagcttaaggatttctccttccaggttgaagcaagagacgcgggttcaccgcaagccttggctggtaacgcaaccgtcaacatccttatcgttgatcaaaatgataatgctcctgccattgtagcaccacttccaggccgtaacggcactccggcaagagaggtgcttccaagaagtgccgagcccggatatctgcttacacgggtcgcggcagtggacgccgatgatggggaaaacgctcgcttgacgtattcaatcgtgaggggtaacgagatgaacctctttcgaatggactggcggacaggggaactgcgcactgctcggagggttcccgcaaagcgagacccccagaggccttatgagcttgttatcgaggtgcgggatcacggccagccccctctgagctcaactgccactcttgttgtgcagttggttgatggtgctgttgaaccacaaggaggaggcggttcaggcggaggcggatccggcgaacaccaacgacctagcaggtctgggggaggcgagaccagtctcgatctgacattgattctcatcattgccctgggctctgtaagtttcattttccttctggcgatgattgtattggccgtacggtgccaaaaggaaaagaaactgaatatatacacctgcctagcaagcgattgctgcctctgttgttgctgttgcggcggaggcggtagtacatgttgtggacggcaggccagagcccgtaagaagaagctcagtaagagtgatatcatgctggtgcaaagctctaacgtgcccagcaacccagcccaggttccaattgaggagtccggtggcttcggcagccaccatcacaatcaaaattactgctatcaagtgtgcctgacccctgagtccgctaaaacagatttaatgttcctgaaaccctgttcaccttccagatctacagacaccgagcataatccatgtggcgctattgtcactggatacactgatcagcaaccagacatcatttctaacggctccatactatccaacgagaccaagcatcagagagctgagctgtcatacttagtcgaccgcccacgcagagtaaatagcagtgcctttcaagaagcagatattgtgagttcaaaggactctggtcacggcgactcggagcagggcgactccgaccatgatgccacaaatagagcgcagtctgctggcatggatcttttttccaattgtactgaagaatgtaaggcgctgggacactccgacaggtgttggatgcctagtttcgtgccatctgatggccgtcaggccgctgactacagaagcaatcttcatgtgccgggtatggatagcgtgcccgatactgaagtatttgaaaccccagaggcacagccaggcgctgaacggtcctttagtacatttgggaaggagaaagcccttcatagcacgctggagcggaaagaactggacggtctcctaaccaacaccagggcgccttataagcccccttatctaactaggaaaaggatctgttag

SEQ ID NO: 226310 - DNA, 3123 bp, Artificial Sequence
  derived and/or modified sequence
atgatcgttctgttactgtttgctctgctctggatggtcgaaggagtgttttcccagctgcattacacagtacaggaggaacaggaacatgggacattcgttggcaatattgctgaagatctgggtctggatataaccaagttgagcgcccgagggtttcagactgtacccaattctagaacaccctacctcgacctgaacttagaaacaggcgtcctttatgtgaatgagaaaatagaccgcgaacagatttgtaagcagagcccttcctgtgttctgcacctggaggtcttcctcgagaatcccctggagctgttccaggtcgaaatcgaagtgctggatatcaatgacaacccgccatcattccctgagcccgacttaaccgttgagatatctgagagtgctacaccaggtacacgctttccgcttgaatccgcattcgacccagacgtgggcacaaattccctgagagactatgaaatcacacctaattcctacttctcattagatgtccagacacagggcgatggaaatcgcttcgcagaactcgtattggaaaaaccactggaccgcgaacaacaggctgttcaccggtacgttctcacagctgtcgacggtgggggtggtggcggagtgggtgagggtggcggaggcggtggtggagccggattgccgcctcagcagcaacggactggcacagcattactgaccatcagggtgttagacagcaacgataatgttcctgccttcgatcagcctgtctacactgtgagcctccccgagaactccccccctgggacgctggttattcagttgaatgcaacagaccctgatgaaggccagaacggtgaagttgtttattcttttagctcgcacatctctccccgagcacgggagcttttcggactgtcaccgagaactgggcgtctggaagtatccggggagctcgactacgaagagtcacctgtatatcaggtttatgttcaagcaaaggatctcggtcccaacgcagtcccagcccattgtaaggtcctggtccgcgtgctcgatgccaacgacaacgctcccgagatctcattttctaccgtcaaagaggcagtatccgagggtgccgctccgggtaccgtcgtggccttgttcagtgttaccgaccgggacagtgaagagaatggccaagtacagtgtgaattgctgggcgatgtcccttttcgattgaaatcttcgtttaagaactattacactattgtcactgaggcgccactggaccgcgaggctggagattcctacactctgacagttgtcgcccgagaccgaggcgagccggcattaagcactagtaaaagtatccaggtgcaggtgagcgacgtgaatgataatgcacctcggttctctcagccagtgtacgatgtgtatgtgactgagaataatgtcccaggggcttacatttatgcagtgagcgcaaccgacagagacgagggggctaacgctcaactggcatattctattctggagtgtcaaatacaggggatgtcggtctttacttacgttagcatcaattctgagaacggctatttgtacgcacttcgcagtttcgattacgagcagctgaaagacttttctttccaggttgaagccagagacgctggaagcccacaagcattggcgggaaatgccaccgtgaatattctaatcgttgatcagaacgacaacgctcccgctatcgtggccccactgcccggacgcaatgggactcctgccagagaggtgctgcccaggagtgcggaaccaggctacctgctgactcgcgtagccgctgtggacgcagatgacggagagaacgcgagactgacgtactccattgtgagaggtaatgaaatgaacctctttcgtatggattggagaaccggagaactgcgtactgctaggcgggtgccagccaagagagaccctcagcgcccttatgaattggtgattgaagtgcgggaccacgggcaaccgcctctatctagtaccgctactctggtcgtgcagctcgtagacggtgccgttgagccccaaggtgggggaggttcagggggaggaggttcaggcgaacatcagcggccttcccgctctggtggaggtgagacatccttagatctcacccttatcctgattatcgcactgggatctgtgtcctttatctttctactggcaatgatcgtactggccgtcaggtgtcagaaagagaagaagctcaacatatatacctgcctggcctctgattgctgcctctgctgttgttgttgcggtggtggtggctctacgtgttgtgggaggcaagctcgcgctagaaaaaaaaagctgagtaaatccgatatcatgctggtccaaagcagtaacgttccctctaatccagcacaggtcccaattgaggaaagcgggggttttgggtcccaccaccataatcagaattattgctatcaagtctgcctgaccccagaatccgccaagacagaccttatgttcctgaagccttgttcgccttcaagatccaccgataccgagcacaacccttgcggcgctattgtaacggggtacacggaccagcaaccagatataatatccaatggttcgattctgtctaatgagactaaacatcagcgcgctgaattgtcttaccttgtggacagaccaaggcgagtcaattcttctgcttttcaggaagctgacattgttagtagcaaggattcgggacacggagattcagaacagggcgacagcgaccatgacgctaccaatcgcgcacagtccgcaggaatggaccttttttctaactgcaccgaggagtgcaaggctcttggccactctgatcgctgttggatgccttcatttgttccatccgacggtagacaagctgcagattatcgctcaaatctgcacgtgcctgggatggattccgttcctgacactgaagtgtttgagacccccgaggcccagcctggcgctgaacggtcatttagtacatttggaaaagaaaaggccttgcatagtactctcgaaagaaaggagctggacgggcttctgaccaatacaagagcgccttacaagcccccatacctgcgcaaaaagcagaggtgctag

SEQ ID NO: 226311 - DNA, 5366 bp, Artificial Sequence
  derived and/or modified sequence
caggctcagaggctgaagcaggaggaaggaaggactggaaggaaaaagagacaggttagagggaaagaggcttgggaagaaaacagcagaaaagaaactgctcattacacttacagagaggcaagtaacggtggagatgaggacagagggaaccaagactctgaaagacaaaaaatacaaatagagcgaaagaggaaaaaaatgtcaagaagaacatccatccggagaaatgaagagaatgaaagttttaagctgcagagccgttctgtgcttttccggcacaaaattatatcgctgattttaagcccttttgcatttgccagccgttgacattaagaggcatgtttaacggtgccaacagcatctccttttccttctcctcttcctcttcttcttcttcctcctcctcctcctctttttcctcctcctcgttctcctcccatcagcaagaagacaaaccgaggacagtcttgaaatatcgaaatttcctctttgggatttgccagcgccaagactgtcggaataaaggacgctgactattgtattattgttattttattaattagtcagtggaaagattacagatgaggaaaggggacgcctgtcacccttcctgtgctaagatttaaaaaaaaatgaggctggattgcgggaagctctaaaatgaagcaaaaggagtaagatttttaaagacagaaagccacaggagcccccacgtagcgcacttttatttgtattttttcagatttttttttgtttcgtggtggtgggggaggtgattgggtggctgactggctgcgggaagctacttcctttccttttggagatgattgtgctattattgtttgccttgctctggatggtggaaggagtcttttcccagcttcactacacggtacaggaggagcaggaacatggcactttcgtggggaatatcgctgaagatctgggtctggacattacaaaactttcggctcgcgggtttcagacggtgcccaactcaaggaccccttacttagacctcaacctggagacaggggtgctgtacgtgaacgagaaaatagaccgcgaacaaatctgcaaacagagcccctcctgtgtcctgcacctggaggtctttctggagaaccccctggagctgttccaggtggagatcgaggtgctggacattaatgacaaccccccctctttcccggagccagacctgacggtggaaatctctgagagcgccacgccaggcactcgcttccccttggagagcgcattcgacccagacgtgggcaccaactccttgcgcgactacgagatcacccccaacagctacttctccctggacgtgcagacccagggggatggcaaccgattcgctgagctggtgctggagaagccactggaccgagagcagcaagcggtgcaccgctacgtgctgaccgcggtggacggaggaggtgggggaggagtaggagaaggagggggaggtggcgggggagcaggcctgcccccccagcagcagcgcaccggcacggccctactcaccatccgagtgctggactccaatgacaatgtgcccgctttcgaccaacccgtctacactgtgtccctaccagagaactctcccccaggcactctcgtgatccagctcaacgccaccgacccggacgagggccagaacggtgaggtcgtgtactccttcagcagccacatttcgccccgggcgcgggagcttttcggactctcgccgcgcactggcagactggaggtaagcggcgagttggactatgaagagagcccagtgtaccaagtgtacgtgcaagccaaggacctgggccccaacgccgtgcctgcgcactgcaaggtgctagtgcgagtactggatgctaatgacaacgcgccagagatcagcttcagcaccgtgaaggaagcggtgagtgagggcgcggcgcccggcactgtggtggcccttttcagcgtgactgaccgcgactcagaggagaatgggcaggtgcagtgcgagctactgggagacgtgcctttccgcctcaagtcttcctttaagaattactacaccatcgttaccgaagcccccctggaccgagaggcgggggactcctacaccctgactgtagtggctcgggaccggggcgagcctgcgctctccaccagtaagtcgatccaggtacaagtgtcggatgtgaacgacaacgcgccgcgtttcagccagccggtctacgacgtgtatgtgactgaaaacaacgtgcctggcgcctacatctacgcggtgagcgccaccgaccgggatgagggcgccaacgcccagcttgcctactctatcctcgagtgccagatccagggcatgagcgtcttcacctacgtttctatcaactctgagaacggctacttgtacgccctgcgctccttcgactatgagcagctgaaggacttcagttttcaggtggaagcccgggacgctggcagcccccaggcgctggctggtaacgccactgtcaacatcctcatagtggatcaaaatgacaacgcccctgccatcgtggcgcctctaccagggcgcaacgggactccagcgcgtgaggtgctgccccgctcggcggagccgggttacctgctcacccgcgtggccgccgtggacgcggacgacggcgagaacgcccggctcacttacagcatcgtgcgtggcaacgaaatgaacctctttcgcatggactggcgcaccggggagctgcgcacagcacgccgagtcccggccaagcgcgacccccagcggccttatgagctggtgatcgaggtgcgcgaccatgggcagccgcccctttcctccaccgccaccctggtggttcagctggtggatggcgccgtggagccccagggcgggggcgggagcggaggcggagggtcaggagagcaccagcgccccagtcgctctggcggcggggaaacctcgctagacctcaccctcatcctcatcatcgcgttgggctcggtgtccttcatcttcctgctggccatgatcgtgctggccgtgcgttgccaaaaagagaagaagctcaacatctatacttgtctggccagcgattgctgcctctgctgctgctgctgcggtggcggaggttcgacctgctgtggccgccaagcccgggcgcgcaagaagaaactcagcaagtcagacatcatgctggtgcagagctccaatgtacccagtaacccggcccaggtgccgatagaggagtccgggggctttggctcccaccaccacaaccagaattactgctatcaggtatgcctgacccctgagtccgccaagaccgacctgatgtttcttaagccctgcagcccttcgcggagtacggacactgagcacaacccctgcggggccatcgtcaccggttacaccgaccagcagcctgatatcatctccaacggaagcattttgtccaacgagactaaacaccagcgagcagagctcagctatctagttgacagacctcgccgagttaacagttctgcattccaggaagccgacatagtaagctctaaggacagtggtcatggagacagtgaacagggagatagtgatcatgatgccaccaaccgtgcccagtcagctggtatggatctcttctccaattgcactgaggaatgtaaagctctgggccactcagatcggtgctggatgccttcttttgtcccttctgatggacgccaggctgctgattatcgcagcaatctgcatgttcctggcatggactctgttccagacactgaggtgtttgaaactccagaagcccagcctggggcagagcggtccttttccacctttggcaaagagaaggcccttcacagcactctggagaggaaggagctggatggactgctgactaatacgcgagcgccttacaaaccaccatatttgacacggaaaaggatatgctagtcaattctacaggacttacctgaagcagcatgatttgcacaaagtcgaccaacaaaagcatcaacttttcaacttcattatcttggccatccagttagtcatgtgtaactgagtattagatttcggatggagtcatcatggccaattataggacctaattgctctcagcaggcctgagaaatgagttgaaatgtgcagaactgtagaaactttagaggcaacagattttgcctccccgatcagtgtgtgcctgtttacagcactatctatctttctctctccaaatgtcactgagccctttagatgtttatattcaccacgagaagccagtcataaagataaaggaaatttgtgcattataaatgcaatatcactgttttaaacttgactgttttatattatttttgtgtgatcaagtgttccgcaagctattccaactttacaagagaaattgtgattatgttcttttcacctgtgggttataaaaaatgttgtattctgaagacccacaaaatatcaaagacattctgtagtttatacaccgtgttgcaaagtgtttactgtactatttcaaagcttctaaataaatataaaatatatatattatattatataattttcctaaaatgtggtacaactcagttggtttttaaatggatgcatacagtccacatcatacaataaaataaaaggtaattcagggtcccaaagacaaacttactaagaaaaaatcattaatagttttctcccaatttccatatcttactcaaccgtgtttttccttgtttaaaagaaaatgatgctctaagctacaaaattttgtcaaaaactcatattgaattttcaatgccaaagatgtagctattgatgttatcagacagagcactgactatgtactatcaaactatctaacaatctgcataagtctgattctatttctatgactttgaatttagaatcacttaaagcttttataaagaatcgataaattcacctgtatttgttgttagaaaaaaactgggtgtctgtacattttgtggtgtaaaatatgtaattgaagattactattttaagaagtcatcagtcatatcactcacacagaattttattttacatagttttgtgacttaattacacatgaatataaaatctataattctatatgaatatatagagatatagaaacatctgaactggtaaagaataactataaaatatgaaagctctaaatttaaaataaatttagagatagaatcatggtacattattgtttcagtattccatgtgaaaattttatagcttaaatgtagtcagtgtttgattaatgaaaaaattcttcatgagtcagccttcaaaagttaagcttgccttttacttttatgtcaacaatattaattattaaatttagtaagacgca

SEQ ID NO: 226312 - DNA, 3946 bp, Artificial Sequence
  derived and/or modified sequence
caggctcagaggctgaagcaggaggaaggaaggactggaaggaaaaagagacaggttagagggaaagaggcttgggaagaaaacagcagaaaagaaactgctcattacacttacagagaggcaagtaacggtggagatgaggacagagggaaccaagactctgaaagacaaaaaatacaaatagagcgaaagaggaaaaaaatgtcaagaagaacatccatccggagaaatgaagagaatgaaagttttaagctgcagagccgttctgtgcttttccggcacaaaattatatcgctgattttaagcccttttgcatttgccagccgttgacattaagaggcatgtttaacggtgccaacagcatctccttttccttctcctcttcctcttcttcttcttcctcctcctcctcctctttttcctcctcctcgttctcctcccatcagcaagaagacaaaccgaggacagtcttgaaatatcgaaatttcctctttgggatttgccagcgccaagactgtcggaataaaggacgctgactattgtattattgttattttattaattagtcagtggaaagattacagatgaggaaaggggacgcctgtcacccttcctgtgctaagatttaaaaaaaaatgaggctggattgcgggaagctctaaaatgaagcaaaaggagtaagatttttaaagacagaaagccacaggagcccccacgtagcgcacttttatttgtattttttcagatttttttttgtttcgtggtggtgggggaggtgattgggtggctgactggctgcgggaagctacttcctttccttttggagatgattgtgctattattgtttgccttgctctggatggtggaaggagtcttttcccagcttcactacacggtacaggaggagcaggaacatggcactttcgtggggaatatcgctgaagatctgggtctggacattacaaaactttcggctcgcgggtttcagacggtgcccaactcaaggaccccttacttagacctcaacctggagacaggggtgctgtacgtgaacgagaaaatagaccgcgaacaaatctgcaaacagagcccctcctgtgtcctgcacctggaggtctttctggagaaccccctggagctgttccaggtggagatcgaggtgctggacattaatgacaaccccccctctttcccggagccagacctgacggtggaaatctctgagagcgccacgccaggcactcgcttccccttggagagcgcattcgacccagacgtgggcaccaactccttgcgcgactacgagatcacccccaacagctacttctccctggacgtgcagacccagggggatggcaaccgattcgctgagctggtgctggagaagccactggaccgagagcagcaagcggtgcaccgctacgtgctgaccgcggtggacggaggaggtgggggaggagtaggagaaggagggggaggtggcgggggagcaggcctgcccccccagcagcagcgcaccggcacggccctactcaccatccgagtgctggactccaatgacaatgtgcccgctttcgaccaacccgtctacactgtgtccctaccagagaactctcccccaggcactctcgtgatccagctcaacgccaccgacccggacgagggccagaacggtgaggtcgtgtactccttcagcagccacatttcgccccgggcgcgggagcttttcggactctcgccgcgcactggcagactggaggtaagcggcgagttggactatgaagagagcccagtgtaccaagtgtacgtgcaagccaaggacctgggccccaacgccgtgcctgcgcactgcaaggtgctagtgcgagtactggatgctaatgacaacgcgccagagatcagcttcagcaccgtgaaggaagcggtgagtgagggcgcggcgcccggcactgtggtggcccttttcagcgtgactgaccgcgactcagaggagaatgggcaggtgcagtgcgagctactgggagacgtgcctttccgcctcaagtcttcctttaagaattactacaccatcgttaccgaagcccccctggaccgagaggcgggggactcctacaccctgactgtagtggctcgggaccggggcgagcctgcgctctccaccagtaagtcgatccaggtacaagtgtcggatgtgaacgacaacgcgccgcgtttcagccagccggtctacgacgtgtatgtgactgaaaacaacgtgcctggcgcctacatctacgcggtgagcgccaccgaccgggatgagggcgccaacgcccagcttgcctactctatcctcgagtgccagatccagggcatgagcgtcttcacctacgtttctatcaactctgagaacggctacttgtacgccctgcgctccttcgactatgagcagctgaaggacttcagttttcaggtggaagcccgggacgctggcagcccccaggcgctggctggtaacgccactgtcaacatcctcatagtggatcaaaatgacaacgcccctgccatcgtggcgcctctaccagggcgcaacgggactccagcgcgtgaggtgctgccccgctcggcggagccgggttacctgctcacccgcgtggccgccgtggacgcggacgacggcgagaacgcccggctcacttacagcatcgtgcgtggcaacgaaatgaacctctttcgcatggactggcgcaccggggagctgcgcacagcacgccgagtcccggccaagcgcgacccccagcggccttatgagctggtgatcgaggtgcgcgaccatgggcagccgcccctttcctccaccgccaccctggtggttcagctggtggatggcgccgtggagccccagggcgggggcgggagcggaggcggagggtcaggagagcaccagcgccccagtcgctctggcggcggggaaacctcgctagacctcaccctcatcctcatcatcgcgttgggctcggtgtccttcatcttcctgctggccatgatcgtgctggccgtgcgttgccaaaaagagaagaagctcaacatctatacttgtctggccagcgattgctgcctctgctgctgctgctgcggtggcggaggttcgacctgctgtggccgccaagcccgggcgcgcaagaagaaactcagcaagtcagacatcatgctggtgcagagctccaatgtacccagtaacccggcccaggtgccgatagaggagtccgggggctttggctcccaccaccacaaccagaattactgctatcaggtatgcctgacccctgagtccgccaagaccgacctgatgtttcttaagccctgcagcccttcgcggagtacggacactgagcacaacccctgcggggccatcgtcaccggttacaccgaccagcagcctgatatcatctccaacggaagcattttgtccaacgagactaaacaccagcgagcagagctcagctatctagttgacagacctcgccgagttaacagttctgcattccaggaagccgacatagtaagctctaaggacagtggtcatggagacagtgaacagggagatagtgatcatgatgccaccaaccgtgcccagtcagctggtatggatctcttctccaattgcactgaggaatgtaaagctctgggccactcagatcggtgctggatgccttcttttgtcccttctgatggacgccaggctgctgattatcgcagcaatctgcatgttcctggcatggactctgttccagacactgaggtgtttgaaactccagaagcccagcctggggcagagcggtccttttccacctttggcaaagagaaggcccttcacagcactctggagaggaaggagctggatggactgctgactaatacgcgagcgccttacaaaccaccatatttgagaaaaaaacagagatgc

SEQ ID NO: 226313 - DNA, 3123 bp, Artificial Sequence
  derived and/or modified sequence
atgatcgtgctgctgctgttcgccctgctgtggatggtggagggcgtgttcagccagctgcactacaccgtgcaggaggagcaggagcacggcaccttcgtgggcaacatcgccgaggacctgggcctggacatcaccaagctgagcgccagaggcttccagaccgtgcccaacagcagaaccccctacctggacctgaacctggagaccggcgtgctgtacgtgaacgagaagatcgacagagagcagatctgcaagcagagccccagctgcgtgctgcacctggaggtgttcctggagaaccccctggagctgttccaggtggagatcgaggtgctggacatcaacgacaacccccccagcttccccgagcccgacctgaccgtggagatcagcgagagcgccacccccggcaccagattccccctggagagcgccttcgaccccgacgtgggcaccaacagcctgagagactacgagatcacccccaacagctacttcagcctggacgtgcagacccagggcgacggcaacagattcgccgagctggtgctggagaagcccctggacagagagcagcaggccgtgcacagatacgtgctgaccgccgtggacggcggcggcggcggcggcgtgggcgagggcggcggcggcggcggcggcgccggcctgcccccccagcagcagagaaccggcaccgccctgctgaccatcagagtgctggacagcaacgacaacgtgcccgccttcgaccagcccgtgtacaccgtgagcctgcccgagaacagcccccccggcaccctggtgatccagctgaacgccaccgaccccgacgagggccagaacggcgaggtggtgtacagcttcagcagccacatcagccccagagccagagagctgttcggcctgagccccagaaccggcagactggaggtgagcggcgagctggactacgaggagagccccgtgtaccaggtgtacgtgcaggccaaggacctgggccccaacgccgtgcccgcccactgcaaggtgctggtgagagtgctggacgccaacgacaacgcccccgagatcagcttcagcaccgtgaaggaggccgtgagcgagggcgccgcccccggcaccgtggtggccctgttcagcgtgaccgacagagacagcgaggagaacggccaggtgcagtgcgagctgctgggcgacgtgcccttcagactgaagagcagcttcaagaactactacaccatcgtgaccgaggcccccctggacagagaggccggcgacagctacaccctgaccgtggtggccagagacagaggcgagcccgccctgagcaccagcaagagcatccaggtgcaggtgagcgacgtgaacgacaacgcccccagattcagccagcccgtgtacgacgtgtacgtgaccgagaacaacgtgcccggcgcctacatctacgccgtgagcgccaccgacagagacgagggcgccaacgcccagctggcctacagcatcctggagtgccagatccagggcatgagcgtgttcacctacgtgagcatcaacagcgagaacggctacctgtacgccctgagaagcttcgactacgagcagctgaaggacttcagcttccaggtggaggccagagacgccggcagcccccaggccctggccggcaacgccaccgtgaacatcctgatcgtggaccagaacgacaacgcccccgccatcgtggcccccctgcccggcagaaacggcacccccgccagagaggtgctgcccagaagcgccgagcccggctacctgctgaccagagtggccgccgtggacgccgacgacggcgagaacgccagactgacctacagcatcgtgagaggcaacgagatgaacctgttcagaatggactggagaaccggcgagctgagaaccgccagaagagtgcccgccaagagagacccccagagaccctacgagctggtgatcgaggtgagagaccacggccagccccccctgagcagcaccgccaccctggtggtgcagctggtggacggcgccgtggagccccagggcggcggcggcagcggcggcggcggcagcggcgagcaccagagacccagcagaagcggcggcggcgagaccagcctggacctgaccctgatcctgatcatcgccctgggcagcgtgagcttcatcttcctgctggccatgatcgtgctggccgtgagatgccagaaggagaagaagctgaacatctacacctgcctggccagcgactgctgcctgtgctgctgctgctgcggcggcggcggcagcacctgctgcggcagacaggccagagccagaaagaagaagctgagcaagagcgacatcatgctggtgcagagcagcaacgtgcccagcaaccccgcccaggtgcccatcgaggagagcggcggcttcggcagccaccaccacaaccagaactactgctaccaggtgtgcctgacccccgagagcgccaagaccgacctgatgttcctgaagccctgcagccccagcagaagcaccgacaccgagcacaacccctgcggcgccatcgtgaccggctacaccgaccagcagcccgacatcatcagcaacggcagcatcctgagcaacgagaccaagcaccagagagccgagctgagctacctggtggacagacccagaagagtgaacagcagcgccttccaggaggccgacatcgtgagcagcaaggacagcggccacggcgacagcgagcagggcgacagcgaccacgacgccaccaacagagcccagagcgccggcatggacctgttcagcaactgcaccgaggagtgcaaggccctgggccacagcgacagatgctggatgcccagcttcgtgcccagcgacggcagacaggccgccgactacagaagcaacctgcacgtgcccggcatggacagcgtgcccgacaccgaggtgttcgagacccccgaggcccagcccggcgccgagagaagcttcagcaccttcggcaaggagaaggccctgcacagcaccctggagagaaaggagctggacggcctgctgaccaacaccagagccccctacaagcccccctacctgaccagaaagagaatctgctag

SEQ ID NO: 226314 - DNA, 3123 bp, Artificial Sequence
  derived and/or modified sequence
atgatcgtgctgctgctgttcgccctgctgtggatggtggagggcgtgttcagccagctgcactacaccgtgcaggaggagcaggagcacggcaccttcgtgggcaacatcgccgaggacctgggcctggacatcaccaagctgagcgccagaggcttccagaccgtgcccaacagcagaaccccctacctggacctgaacctggagaccggcgtgctgtacgtgaacgagaagatcgacagagagcagatctgcaagcagagccccagctgcgtgctgcacctggaggtgttcctggagaaccccctggagctgttccaggtggagatcgaggtgctggacatcaacgacaacccccccagcttccccgagcccgacctgaccgtggagatcagcgagagcgccacccccggcaccagattccccctggagagcgccttcgaccccgacgtgggcaccaacagcctgagagactacgagatcacccccaacagctacttcagcctggacgtgcagacccagggcgacggcaacagattcgccgagctggtgctggagaagcccctggacagagagcagcaggccgtgcacagatacgtgctgaccgccgtggacggcggcggcggcggcggcgtgggcgagggcggcggcggcggcggcggcgccggcctgcccccccagcagcagagaaccggcaccgccctgctgaccatcagagtgctggacagcaacgacaacgtgcccgccttcgaccagcccgtgtacaccgtgagcctgcccgagaacagcccccccggcaccctggtgatccagctgaacgccaccgaccccgacgagggccagaacggcgaggtggtgtacagcttcagcagccacatcagccccagagccagagagctgttcggcctgagccccagaaccggcagactggaggtgagcggcgagctggactacgaggagagccccgtgtaccaggtgtacgtgcaggccaaggacctgggccccaacgccgtgcccgcccactgcaaggtgctggtgagagtgctggacgccaacgacaacgcccccgagatcagcttcagcaccgtgaaggaggccgtgagcgagggcgccgcccccggcaccgtggtggccctgttcagcgtgaccgacagagacagcgaggagaacggccaggtgcagtgcgagctgctgggcgacgtgcccttcagactgaagagcagcttcaagaactactacaccatcgtgaccgaggcccccctggacagagaggccggcgacagctacaccctgaccgtggtggccagagacagaggcgagcccgccctgagcaccagcaagagcatccaggtgcaggtgagcgacgtgaacgacaacgcccccagattcagccagcccgtgtacgacgtgtacgtgaccgagaacaacgtgcccggcgcctacatctacgccgtgagcgccaccgacagagacgagggcgccaacgcccagctggcctacagcatcctggagtgccagatccagggcatgagcgtgttcacctacgtgagcatcaacagcgagaacggctacctgtacgccctgagaagcttcgactacgagcagctgaaggacttcagcttccaggtggaggccagagacgccggcagcccccaggccctggccggcaacgccaccgtgaacatcctgatcgtggaccagaacgacaacgcccccgccatcgtggcccccctgcccggcagaaacggcacccccgccagagaggtgctgcccagaagcgccgagcccggctacctgctgaccagagtggccgccgtggacgccgacgacggcgagaacgccagactgacctacagcatcgtgagaggcaacgagatgaacctgttcagaatggactggagaaccggcgagctgagaaccgccagaagagtgcccgccaagagagacccccagagaccctacgagctggtgatcgaggtgagagaccacggccagccccccctgagcagcaccgccaccctggtggtgcagctggtggacggcgccgtggagccccagggcggcggcggcagcggcggcggcggcagcggcgagcaccagagacccagcagaagcggcggcggcgagaccagcctggacctgaccctgatcctgatcatcgccctgggcagcgtgagcttcatcttcctgctggccatgatcgtgctggccgtgagatgccagaaggagaagaagctgaacatctacacctgcctggccagcgactgctgcctgtgctgctgctgctgcggcggcggcggcagcacctgctgcggcagacaggccagagccagaaagaagaagctgagcaagagcgacatcatgctggtgcagagcagcaacgtgcccagcaaccccgcccaggtgcccatcgaggagagcggcggcttcggcagccaccaccacaaccagaactactgctaccaggtgtgcctgacccccgagagcgccaagaccgacctgatgttcctgaagccctgcagccccagcagaagcaccgacaccgagcacaacccctgcggcgccatcgtgaccggctacaccgaccagcagcccgacatcatcagcaacggcagcatcctgagcaacgagaccaagcaccagagagccgagctgagctacctggtggacagacccagaagagtgaacagcagcgccttccaggaggccgacatcgtgagcagcaaggacagcggccacggcgacagcgagcagggcgacagcgaccacgacgccaccaacagagcccagagcgccggcatggacctgttcagcaactgcaccgaggagtgcaaggccctgggccacagcgacagatgctggatgcccagcttcgtgcccagcgacggcagacaggccgccgactacagaagcaacctgcacgtgcccggcatggacagcgtgcccgacaccgaggtgttcgagacccccgaggcccagcccggcgccgagagaagcttcagcaccttcggcaaggagaaggccctgcacagcaccctggagagaaaggagctggacggcctgctgaccaacaccagagccccctacaagcccccctacctgagaaagaagcagagatgctag

SEQ ID NO: 226315 - protein, 109 aa, Artificial Sequence
  derived and/or modified sequence
MKISVAAIPFFLLITIALGTKTESSSQTGGKPKVVKIQLKLVGGPYHPSECCFTYTTYKIPRQRIMDYYETNSQCSKPGIVFITKRGHSVCTNPSDKWVQDYIKDMKEN

SEQ ID NO: 226316 - DNA, 330 bp, Artificial Sequence
  derived and/or modified sequence
atgaaaatttctgtggccgcaatacccttcttcctcctgattactatagccctgggtaccaagactgagtccagcagccagaccggaggcaagcccaaggtggtcaagattcagttgaaattagttggtggcccctaccacccgtccgagtgttgtttcacctacacaacatacaagataccccggcagagaattatggactactacgagaccaactctcaatgtagcaaacccggtatcgtatttatcaccaaacgaggccatagcgtgtgcacaaacccctcagacaagtgggtgcaggactatatcaaggacatgaaagaaaattag

SEQ ID NO: 226317 - DNA, 330 bp, Artificial Sequence
  derived and/or modified sequence
atgaaaataagtgtggccgcaattccgtttttcctgctgatcaccattgcactcggaaccaagacagagagctcaagccaaaccgggggtaagcccaaagtcgttaagatccaactgaagctggtgggcggcccataccaccctagtgagtgctgctttacctataccacttataagataccccggcagcgcatcatggactattacgagaccaactcccagtgttcaaagcctggaatcgtgtttatcacgaaacgcggacatagcgtgtgcactaatccgtctgataagtgggtgcaggattatatcaaagatatgaaggagaattag

SEQ ID NO: 226318 - DNA, 330 bp, Artificial Sequence
  derived and/or modified sequence
atgaagatctctgtggccgccatccccttcttcctgctgatcaccatcgccctgggcaccaagacagagagcagcagccagacaggaggcaagcccaaggtggtgaagatccagctgaagctggtgggcggcccctaccaccccagcgagtgctgcttcacctacaccacctacaagatcccccggcagaggatcatggactactatgagaccaacagccagtgcagcaagccaggcatcgtgttcatcaccaagaggggccacagcgtgtgcaccaaccccagcgacaagtgggtgcaggactacatcaaggacatgaaggagaactag

SEQ ID NO: 226319 - DNA, 330 bp, Artificial Sequence
  derived and/or modified sequence
atgaagatcagcgtggccgccatccccttcttcctgctgatcaccatcgctttgggaacaaaaaccgaatcttcctcacagacaggcggtaagcccaaagtggtgaaaattcagctcaagctggtgggcggaccctatcatccctccgagtgctgtttcacatatacgacatacaagattcctcgacagcgcatcatggactactacgagacaaactctcagtgctcaaagcccggcatcgtatttataaccaagaggggccactcagtgtgcactaaccctagtgataagtgggttcaagactacatcaaggatatgaaagagaactag

SEQ ID NO: 226320 - DNA, 330 bp, Artificial Sequence
  derived and/or modified sequence
atgaagatcagcgtggccgccatccccttcttcctgctgatcaccattgctctgggtaccaaaaccgagtcgtcgagtcaaacagggggaaaaccaaaggtcgtcaaaatacaactgaagcttgttggaggcccatatcatccaagtgaatgttgtttcacctacacgacatacaagattccacgacaacgcataatggattactacgagaccaactcccagtgctctaagcctggcattgtgttcatcaccaagcgggggcactcggtctgcaccaatccttccgacaagtgggttcaggactatatcaaggatatgaaggaaaattag

SEQ ID NO: 226321 - DNA, 330 bp, Artificial Sequence
  derived and/or modified sequence
atgaagatcagcgtggcagccatccccttttttctgctgattaccattgcccttggtactaaaactgagagttccagccaaacaggcggaaagcctaaggtcgtgaaaatacaattaaagctcgtagggggtccctatcatcctagcgagtgttgtttcacgtacactacatacaagatccctaggcaacggattatggactattatgagactaactcccagtgtagtaaacccggaattgtatttatcacaaagaggggtcatagcgtctgcaccaacccttccgataagtgggtccaagactatatcaaggacatgaaagagaattag

SEQ ID NO: 226322 - DNA, 330 bp, Artificial Sequence
  derived and/or modified sequence
atgaagatatcagtcgccgctatccccttcttccttttgataacgatcgctctgggtaccaagacagaatctagcagtcagacaggtggaaagcctaaggtcgttaaaatccaattgaaactcgtcgggggaccctaccacccttcggaatgctgcttcacgtacaccacctacaaaatccctagacagagaattatggactactatgaaacaaattcacaatgctctaagccaggtatcgtgtttatcacgaagaggggtcactccgtgtgtaccaatccctccgataagtgggtgcaggactacatcaaggatatgaaggaaaattag

SEQ ID NO: 226323 - DNA, 554 bp, Artificial Sequence
  derived and/or modified sequence
tttctcaacaattcctcaccgcaggagcctctgaagctcccaccaggccagctctcctcccacaacagcttcccacagcatgaagatctccgtggctgccattcccttcttcctcctcatcaccatcgccctagggaccaagactgaatcctcctcacaaactggggggaaaccgaaggttgttaaaatacagctaaagttggtggggggaccttaccacccctcagagtgctgcttcacctacactacctacaagatcccgcgtcagcggattatggattactatgagaccaacagccagtgctccaagcccggaattgtcttcatcaccaaaaggggccattccgtctgtaccaaccccagtgacaagtgggtccaggactatatcaaggacatgaaggagaactgagtgacccagaaggggtggcgaaggcacagctcagagacataaagagaagatgccaaggccccctcctccacccaccgctaactctcagccccagtcaccctcttggagcttccctgctttgaattaaagaccactcatgctcttc

SEQ ID NO: 226324 - DNA, 1487 bp, Artificial Sequence
  derived and/or modified sequence
cctgctctaaatcttgtctcggtctctcactctgccttatacccctcagttgaattatttcttctgaggaggcaagaactgaggctgctgcagactgatatggattcaccactgctaacacctcctggttggaactacaggaatagaactggaaagggaaaaaaggcagcattcaccacatcccaatcctgaatccaagagtctaagatagtcccccactcctatctcaggcttagaggattagattaatctcctggagggaagactcttccttgaaacatttttttttatctgcctgtagctattgggataattcgggaaatccacagggacagttcaagtcatctttgtcctctactttctgttgcactctcagccttgttctctttttagaaactgcatggtaactattatatagctaaagaagagcattctgacctctgccctctgccctgggacttcctggatcctcctcttcttataaatacaagggcagagctggtatcccggggagccaggaagcagtgagcccaggagtcctcggccagccctgcctgcccaccaggaggatgaaggtctccgtggctgccctctcctgcctcatgcttgttgctgtccttggatcccaggcccagttcataaatgatgcagagacagagttaatgatgtcaaagcttccactggaaaatccagtagttctgaacagctttcactttgctgctgactgctgcacctcctacatctcacaaagcatcccgtgttcactcatgaaaagttattttgaaacgagcagcgagtgctccaagccaggtgtcatattcctcaccaagaaggggcggcaagtctgtgccaaacccagtggtccgggagttcaggattgcatgaaaaagctgaagccctactcaatataataataaagagacaaaagaggccagccacccacctccaacacctcctgagcctctgaagctcccaccaggccagctctcctcccacaacagcttcccacagcatgaagatctccgtggctgccattcccttcttcctcctcatcaccatcgccctagggaccaagactgaatcctcctcacaaactggggggaaaccgaaggttgttaaaatacagctaaagttggtggggggaccttaccacccctcagagtgctgcttcacctacactacctacaagatcccgcgtcagcggattatggattactatgagaccaacagccagtgctccaagcccggaattgtcttcatcaccaaaaggggccattccgtctgtaccaaccccagtgacaagtgggtccaggactatatcaaggacatgaaggagaactgagtgacccagaaggggtggcgaaggcacagctcagagacataaagagaagatgccaaggccccctcctccacccaccgctaactctcagccccagtcaccctcttggagcttccctgctttgaattaaagaccactcatgctcttc

SEQ ID NO: 226325 - DNA, 977 bp, Artificial Sequence
  derived and/or modified sequence
ggagccaggaagcagtgagcccaggagtcctcggccagccctgcctgcccaccaggaggatgaaggtctccgtggctgccctctcctgcctcatgcttgttgctgtccttggatcccaggcccagttcataaatgatgcagagacagagttaatgatgtcaaagcttccactggaaaatccagtagttctgaacagctttcactttgctgctgactgctgcacctcctacatctcacaaagcatcccgtgttcactcatgaaaagttattttgaaacgagcagcgagtgctccaagccaggtgtcatattcctcaccaagaaggggcggcaagtctgtgccaaacccagtggtccgggagttcaggattgcatgaaaaagctgaagccctactcaatataataataaagagacaaaagaggccagccacccacctccaacacctcctgagcctctgaagctcccaccaggccagctctcctcccacaacagcttcccacagcatgaagatctccgtggctgccattcccttcttcctcctcatcaccatcgccctagggaccaagactgaatcctcctcacaaactggggggaaaccgaaggttgttaaaatacagctaaagttggtggggggaccttaccacccctcagagtgctgcttcacctacactacctacaagatcccgcgtcagcggattatggattactatgagaccaacagccagtgctccaagcccggaattgtcttcatcaccaaaaggggccattccgtctgtaccaaccccagtgacaagtgggtccaggactatatcaaggacatgaaggagaactgagtgacccagaaggggtggcgaaggcacagctcagagacataaagagaagatgccaaggccccctcctccacccaccgctaactctcagccccagtcaccctcttggagcttccctgctttgaattaaagaccactcatgctcttc

SEQ ID NO: 226326 - DNA, 330 bp, Artificial Sequence
  derived and/or modified sequence
atgaagatcagcgtggccgccatccccttcttcctgctgatcaccatcgccctgggcaccaagaccgagagcagcagccagaccggcggcaagcccaaggtggtgaagatccagctgaagctggtgggcggcccctaccaccccagcgagtgctgcttcacctacaccacctacaagatccccagacagagaatcatggactactacgagaccaacagccagtgcagcaagcccggcatcgtgttcatcaccaagagaggccacagcgtgtgcaccaaccccagcgacaagtgggtgcaggactacatcaaggacatgaaggagaactag

SEQ ID NO: 226327 - protein, 93 aa, Artificial Sequence
  derived and/or modified sequence
MKISVAAIPFFLLITIALGTKTESSSRGPYHPSECCFTYTTYKIPRQRIMDYYETNSQCSKPGIVFITKRGHSVCTNPSDKWVQDYIKDMKEN

SEQ ID NO: 226328 - DNA, 282 bp, Artificial Sequence
  derived and/or modified sequence
atgaagatttctgtagcggccattccttttttcctactgatcacaattgcacttggaaccaaaaccgagtcatcaagccggggtccctatcacccatctgaatgttgtttcacctatacgacgtacaagatacctagacagcgcattatggactactatgaaacaaactcacagtgtagcaagcccggaatcgtgttcatcaccaaacggggccactcggtgtgcacaaacccaagcgacaagtgggttcaggactacatcaaagacatgaaggagaattag

SEQ ID NO: 226329 - DNA, 282 bp, Artificial Sequence
  derived and/or modified sequence
atgaagatctctgtggccgccatccccttcttcctgctgatcaccatcgccctgggcaccaagacagagagcagcagccggggcccctaccaccccagcgagtgctgcttcacctacaccacctacaagatcccccggcagaggatcatggactactatgagaccaacagccagtgcagcaagccaggcatcgtgttcatcaccaagaggggccacagcgtgtgcaccaaccccagcgacaagtgggtgcaggactacatcaaggacatgaaggagaactag

SEQ ID NO: 226330 - DNA, 282 bp, Artificial Sequence
  derived and/or modified sequence
atgaagatcagcgtggccgccatccccttcttcctgctgatcaccatcgctctcgggaccaaaaccgagtccagcagtcgcgggccctaccacccttcggagtgctgcttcacatatactacctataagatcccgagacagagaataatggattactacgaaactaactctcaatgctcgaagccgggtatcgttttcatcacgaagcgtgggcacagcgtgtgtactaacccatccgacaagtgggtacaggactacatcaaagacatgaaggaaaactag

SEQ ID NO: 226331 - DNA, 282 bp, Artificial Sequence
  derived and/or modified sequence
atgaagataagtgtcgcagcaatccctttttttctgcttatcacaatcgccctaggaacaaaaacagaatccagttcgcgcggaccatatcatcctagcgagtgctgttttacctacacaacgtataagatcccgcgtcaacgcattatggactactacgagaccaattcccaatgctcaaaacccggtatcgttttcatcacaaaaaggggacacagtgtctgtaccaacccatcagataagtgggtgcaggactatattaaggacatgaaggaaaactag

SEQ ID NO: 226332 - DNA, 850 bp, Artificial Sequence
  derived and/or modified sequence
ccgcaggagcctctgaagctcccaccaggccagctctcctcccacaacagcttcccacagcatgaagatctccgtggctgccattcccttcttcctcctcatcaccatcgccctagggaccaagactgaatcctcctcacggggaccttaccacccctcagagtgctgcttcacctacactacctacaagatcccgcgtcagcggattatggattactatgagaccaacagccagtgctccaagcccggaattgtcttcatcaccaaaaggggccattccgtctgtaccaaccccagtgacaagtgggtccaggactatatcaaggacatgaaggagaactgagtgacccagaaggggtggcgaaggcacagctcagagacataaagagaagatgccaaggccccctcctccacccaccgctaactctcagccccagtcaccctcttggagcttccctgctttgaattaaagaccactcatgctcttccctggcctcattcctttctacgggatttactcattggccatgcactgaggacaccagggtgtggcaccctcggcatcaagcctcgctctgcagaagttttgctggagcctggtacaaaaaataggtcaggcctgcaatgcaggtagtgagaagcagaaagtgagaaagaaaagcagtgtaaagaccgtctcctcctcagcaacaacagtagcagaccccgttttcttaatgctttctatactccaagcactctgctaggcagtctgtatgcattatcttatttaagcttcatgacaagtgtaaaagctacaaatcatcatttgattttttaggtaacacttcataaagggctctctatagca

SEQ ID NO: 226333 - DNA, 282 bp, Artificial Sequence
  derived and/or modified sequence
atgaagatcagcgtggccgccatccccttcttcctgctgatcaccatcgccctgggcaccaagaccgagagcagcagcagaggcccctaccaccccagcgagtgctgcttcacctacaccacctacaagatccccagacagagaatcatggactactacgagaccaacagccagtgcagcaagcccggcatcgtgttcatcaccaagagaggccacagcgtgtgcaccaaccccagcgacaagtgggtgcaggactacatcaaggacatgaaggagaactag

SEQ ID NO: 226334 - protein, 113 aa, Artificial Sequence
  derived and/or modified sequence
MKVSVAALSCLMLVAVLGSQAQFINDAETELMMSKLPLENPVVLNSFHFAADCCTSYISQSIPCSLMKSYFETSSECSKPGVIFLTKKGRQVCAKPSGPGVQDCMKKLKPYSI

SEQ ID NO: 226335 - protein, 61 aa, Artificial Sequence
  derived and/or modified sequence
  misc_feature (1)..(1): Xaa can be any naturally occurring amino acid
XCTSYISQSIPCSLMKSYFETSSECSKPGVIFLTKKGRQVCAKPSGPGVQDCMKKLKPYSI

SEQ ID NO: 226336 - DNA, 342 bp, Artificial Sequence
  derived and/or modified sequence
atgaaggttagcgtggcggccctgtcctgtttgatgcttgtcgctgtgctcggctctcaggcccaattcattaacgatgccgaaacagagttgatgatgtcgaaactcccattggagaacccagtggtactgaacagctttcatttcgcagccgactgttgcacgtcttacatttctcagagcatcccatgttctctgatgaagtcatactttgagacaagctccgagtgctcaaagcccggagttatcttcttaacaaaaaaaggccgacaagtctgtgctaagcctagtggacccggcgtccaagactgcatgaagaaattgaagccatacagtatatag

SEQ ID NO: 226337 - DNA, 186 bp, Artificial Sequence
  derived and/or modified sequence
tgatgtacatcttatatctcacaatccattccttgcagccttatgaaatcttattttgagacatcctctgagtgctctaaacctggggttatcttcctgacaaaaaagggaagacaggtgtgcgcaaaacccagcggacccggagtacaagattgtatgaagaaactgaagccctactctatctag

SEQ ID NO: 226338 - DNA, 342 bp, Artificial Sequence
  derived and/or modified sequence
atgaaagtctcagtggccgcgctgagctgcctgatgctggtagccgtgctggggtcccaggcacagttcataaacgatgctgaaaccgagctgatgatgtcgaaactgccactagaaaatcccgtcgtgttaaacagctttcattttgccgcggattgttgtaccagctacatcagccagtcaatcccatgcagtttgatgaagagttatttcgaaacatcttcagagtgcagcaagccgggcgtcattttcctaaccaaaaagggccgacaggtctgtgctaagccttccggtcctggcgtccaggactgcatgaaaaagctaaagccttactcgatctag

SEQ ID NO: 226339 - DNA, 342 bp, Artificial Sequence
  derived and/or modified sequence
atgaaggtctctgtcgcagccttatcgtgccttatgctcgtagccgtgcttggttctcaggcacagtttattaatgacgccgagaccgagctaatgatgtcaaagttacccctggagaatcctgtcgtgctgaactcattccactttgcggccgactgttgcacatcttacatctctcagtcaatcccttgctctcttatgaaatcttatttcgagacgagttcagaatgctccaaaccaggcgtaattttcctgacgaaaaagggcagacaagtgtgtgccaagcccagtgggccaggcgtgcaggattgcatgaagaaactcaaaccctattccatctag

SEQ ID NO: 226340 - DNA, 342 bp, Artificial Sequence
  derived and/or modified sequence
atgaaggtgtctgtggccgccctgagctgcctgatgctggtggccgtgctgggcagccaggcccagttcatcaatgatgctgagacagagctgatgatgagcaagctgcccctggagaaccctgtggtgctgaacagcttccactttgctgctgactgctgcaccagctacatcagccagagcatcccctgcagcctgatgaagagctactttgagaccagcagcgagtgcagcaagccaggagtcatcttcctgaccaagaagggccggcaggtgtgtgccaagcccagcggccctggggtgcaggactgcatgaagaagctgaagccctacagcatctag

SEQ ID NO: 226341 - DNA, 186 bp, Artificial Sequence
  derived and/or modified sequence
tgatgcaccagctacatcagccagagcatcccctgcagcctgatgaagagctactttgagaccagcagcgagtgcagcaagccaggagtcatcttcctgaccaagaagggccggcaggtgtgtgccaagcccagcggccctggggtgcaggactgcatgaagaagctgaagccctacagcatctag

SEQ ID NO: 226342 - DNA, 342 bp, Artificial Sequence
  derived and/or modified sequence
atgaaggtgagcgtggccgccctgagctgcctgatgctggtggccgtgctcgggtcccaggcccagtttatcaacgatgctgaaactgagctgatgatgtccaagctaccccttgagaatcctgtagtactgaactcatttcatttcgcggccgactgctgcacgtcctatatctctcagagcattccctgctccctgatgaagtcatacttcgaaactagtagcgagtgttccaagccaggagtcatcttcctgactaaaaagggaagacaagtctgcgctaaacctagtggacctggggtgcaggattgtatgaagaaactgaaaccctacagtatctag

SEQ ID NO: 226343 - DNA, 186 bp, Artificial Sequence
  derived and/or modified sequence
tgatgcaccagctacatcagccagagcatcccctgcagcctgatgaagtcctattttgaaacttcaagcgaatgcagtaagcctggagtcatcttcctcacaaagaagggccgtcaagtctgcgcgaagccttccggtcctggcgtgcaggattgtatgaaaaagttgaaaccctacagcatttag

SEQ ID NO: 226344 - DNA, 342 bp, Artificial Sequence
  derived and/or modified sequence
atgaaggtgagcgtggccgccctgagctgcctgatgctggtggccgtgcttggaagccaggcacagtttattaatgacgctgaaaccgaactgatgatgtcaaagctgcctctggagaacccagtggtgcttaactcattccactttgcggctgactgctgtacatcatatatcagtcagagtattccttgcagcctgatgaagtcttacttcgagacttccagcgaatgttccaaaccaggagtaattttcttaaccaaaaagggtcgacaggtttgtgccaaaccaagcggacccggcgtccaggattgcatgaagaagctaaagccatatagcatttag

SEQ ID NO: 226345 - DNA, 342 bp, Artificial Sequence
  derived and/or modified sequence
atgaaggtgagcgtggccgccctgagctgcctgatgctggtggccgtgctgggctcccaggcccagtttatcaacgacgctgagacagagctcatgatgagcaaacttcctctcgaaaatcccgtggttctgaattcatttcattttgcagccgactgctgcacgtcttatatcagtcagtcaatcccgtgctcacttatgaagtcttattttgagactagctcagaatgctcaaagcccggagtgatttttctaactaaaaaaggaagacaagtgtgcgcgaagccaagtggccctggcgttcaagattgtatgaagaagttaaagccctattcaatctag

SEQ ID NO: 226346 - DNA, 342 bp, Artificial Sequence
  derived and/or modified sequence
atgaaggtgagcgtcgccgctctctcttgtttgatgctcgttgcagttttgggttcccaggcccaattcattaatgacgcggaaaccgagttaatgatgtcaaaattaccactggaaaacccagtcgtgctgaactcgttccattttgctgccgattgttgcacgagctacattagtcagtctatcccctgttctctgatgaaatcctacttcgaaactagctcagagtgcagcaagccaggagtgatcttcctgaccaaaaaaggaagacaggtctgcgcaaaaccttccgggcctggggtgcaggattgtatgaaaaagctgaagccatacagcatttag

SEQ ID NO: 226347 - DNA, 186 bp, Artificial Sequence
  derived and/or modified sequence
taatgtacctcatatatatctcaaagcattccatgttctctgatgaaatcttactttgagacttcttctgagtgtagcaagcccggagtcatcttcctgaccaaaaagggacgtcaagtctgcgcgaagccaagcggtccgggagttcaggattgcatgaaaaagctgaaaccctactctatatag

SEQ ID NO: 226348 - DNA, 342 bp, Artificial Sequence
  derived and/or modified sequence
atgaaagtttctgtagcagccctttcatgcctaatgctagtagccgtcctgggcagtcaggcacagttcattaatgacgccgagaccgagctcatgatgagcaagctgccccttgaaaaccctgtcgtgctgaacagcttccactttgccgctgactgttgcacgagctacatctcacagagtattccatgctccctgatgaagagctacttcgagaccagctctgagtgctccaagcccggagtgatatttctaacaaagaaaggcagacaagtgtgtgcaaagccctccggacctggagtccaggattgcatgaagaaactcaagccatattcaatttag

SEQ ID NO: 226349 - DNA, 342 bp, Artificial Sequence
  derived and/or modified sequence
atgaaagtctcagtggccgcactttcttgcctgatgctcgtcgcagtgctcggatcgcaagctcagttcatcaatgacgcggagactgagcttatgatgtcaaagcttccgctggagaacccagtggtgctgaatagttttcacttcgccgctgattgctgtacgagctatatcagtcagtctattccctgctctcttatgaaatcatatttcgaaacctcctccgaatgctctaaaccaggggtaattttcttaaccaagaaaggtagacaagtgtgcgctaaaccttccggaccaggagtgcaggattgcatgaaaaaacttaagccttattctatctag

SEQ ID NO: 226350 - DNA, 342 bp, Artificial Sequence
  derived and/or modified sequence
atgaaagtttccgtcgctgccctttcttgtctcatgctggtcgccgttctgggctcccaggcacagtttatcaacgacgctgagaccgagctgatgatgagcaaactgcctctggaaaaccccgtggtgctaaactccttccattttgctgccgactgctgcacctcctatatttcccaatcaattccttgttctctgatgaaaagttacttcgaaacgagttccgagtgctccaagccaggagttatcttcctcacaaaaaaaggtagacaggtctgtgcaaaacccagcggccccggggtgcaggactgcatgaagaaactgaaaccttatagtatctag

SEQ ID NO: 226351 - DNA, 186 bp, Artificial Sequence
  derived and/or modified sequence
tgatgcactagctacatcagccagtccattccctgttcgttgatgaaatcatacttcgagactagttccgagtgctcaaaacccggcgttattttcctgactaaaaagggacgacaagtgtgtgcgaaaccaagcggcccaggcgtgcaagattgcatgaagaagcttaaaccatactccatatag

SEQ ID NO: 226352 - DNA, 342 bp, Artificial Sequence
  derived and/or modified sequence
atgaaggtatctgtggctgctctctcctgccttatgctcgtcgcggtgctaggctcccaggctcagttcatcaatgatgccgaaaccgaactaatgatgtccaaattaccactcgaaaacccagtcgtgttaaattcttttcatttcgctgccgactgttgcacatcttatatctcacagtctatcccctgctcactcatgaagtcctacttcgagacctcgtctgagtgtagtaagccaggggttattttcctgacgaagaagggacgtcaagtgtgtgctaaaccatcagggcccggcgtccaggattgcatgaagaaactgaaaccctatagtatctag

SEQ ID NO: 226353 - DNA, 342 bp, Artificial Sequence
  derived and/or modified sequence
atgaaagtatcagtggcagccctgtcctgtcttatgctggttgcagtgctgggtagccaagctcagtttattaacgacgccgagaccgagctcatgatgagtaaactcccgctagaaaaccccgtggtcctcaactctttccattttgcggcagattgctgcacctcatatatttctcaatcaattccttgctcactgatgaagagctactttgaaaccagctcagagtgctcaaaaccaggtgtgattttcttgacaaaaaaaggaaggcaggtatgcgcaaaaccctctggcccgggtgttcaagactgtatgaaaaagcttaaaccctattccatctag

SEQ ID NO: 226354 - DNA, 342 bp, Artificial Sequence
  derived and/or modified sequence
atgaaagtttccgtcgctgccctttcttgtctcatgctggtcgccgttctgggctcccaggcacagtttatcaacgacgctgagaccgagctgatgatgagcaaactgcctctggaaaaccccgtggtgctaaactccttccattttgctgccgactgctgcacctcctatatttcccaatcaattccttgttctctgatgaaaagttacttcgaaacgagttccgagtgctccaagccaggagttatcttcctcacaaaaaaaggtagacaggtctgtgcaaaacccagcggccccggggtccaggattgcatgaagaaacttaaaccctactcaatttag

SEQ ID NO: 226355 - DNA, 342 bp, Artificial Sequence
  derived and/or modified sequence
atgaaggtatctgtggctgctctctcctgccttatgctcgtcgcggtgctaggctcccaggctcagttcatcaatgatgccgaaaccgaactaatgatgtccaaattaccactcgaaaacccagtcgtgttaaattcttttcatttcgctgccgactgttgcacatcttatatctcacagtctatcccctgctcactcatgaagtcctacttcgagacctcgtctgagtgtagtaagccaggggttattttcctgacgaagaagggacgtcaagtgtgtgctaaaccatcagggcccggcgtccaagattgcatgaaaaagttaaagccctatagcatatag

SEQ ID NO: 226356 - DNA, 342 bp, Artificial Sequence
  derived and/or modified sequence
atgaaggtatcagtggccgctctaagttgccttatgctagtcgcggtcctcggcagccaggcccagttcatcaacgacgcagaaacagagcttatgatgagtaagctgccactggagaaccccgttgtcctaaattcgttccacttcgccgcagattgctgtacttcctacatctcgcagtctatcccctgttcacttatgaaaagctacttcgaaacctcttctgaatgctctaagccaggagtcatctttctcacaaagaaggggagacaagtatgcgccaagccttccggtccgggcgtccaagattgcatgaagaaactgaagccgtactccatttag

SEQ ID NO: 226357 - DNA, 542 bp, Artificial Sequence
  derived and/or modified sequence
ggagccaggaagcagtgagcccaggagtcctcggccagccctgcctgcccaccaggaggatgaaggtctccgtggctgccctctcctgcctcatgcttgttgctgtccttggatcccaggcccagttcataaatgatgcagagacagagttaatgatgtcaaagcttccactggaaaatccagtagttctgaacagctttcactttgctgctgactgctgcacctcctacatctcacaaagcatcccgtgttcactcatgaaaagttattttgaaacgagcagcgagtgctccaagccaggtgtcatattcctcaccaagaaggggcggcaagtctgtgccaaacccagtggtccgggagttcaggattgcatgaaaaagctgaagccctactcaatataataataaagagacaaaagaggccagccacccacctccaacacctcctgtgagtttcttggtctgaaatacttaaaaaatatatatattgttgtgtctggtaatgaaagtaatgcatctaataaagagtattcaattttttaa

SEQ ID NO: 226358 - DNA, 718 bp, Artificial Sequence
  derived and/or modified sequence
gctgcacctcctacatctcacaaagcatcccgtgttcactcatgaaaagttattttgaaacgagcagcgagtgctccaagccaggtgtcatattcctcaccaagaaggggcggcaagtctgtgccaaacccagtggtccgggagttcaggattgcatgaaaaagctgaagccctactcaatataataataaagagacaaaagaggccagccacccacctccaacacctcctagatctgagcctggaacaggtgttgcagagaagcagaaaaagagaggactcacaccagttgactcttgtggcatgattttggatgtggcattggagctggtctctctaggattctacctcggcctcccaggttcaagcaattctcctgcctcagcctccctactagctgggattacgtgcctgccaccagacctgactaatttctgtatttttagtagagacagggtttcgccttgttggtcaggctggtctcaaactcctaacctcagatgatccacccacctcggcctcccaaagtactggaattaacggcatgagccactgcactcagcctctacctacttttcaagccttcctgatactacctaaaatctttgcagtaaagtcctttttgcttaatcaaccagagtcagtttgtatagctttccaacaaaaaactccaactgatatgaacaataaactttctgggactttgaaggtctaaaaa

SEQ ID NO: 226359 - DNA, 929 bp, Artificial Sequence
  derived and/or modified sequence
ggagccaggaagcagtgagcccaggagtcctcggccagccctgcctgcccaccaggaggatgaaggtctccgtggctgccctctcctgcctcatgcttgttgctgtccttggatcccaggcccagttcataaatgatgcagagacagagttaatgatgtcaaagcttccactggaaaatccagtagttctgaacagctttcactttgctgctgactgctgcacctcctacatctcacaaagcatcccgtgttcactcatgaaaagttattttgaaacgagcagcgagtgctccaagccaggtgtcatattcctcaccaagaaggggcggcaagtctgtgccaaacccagtggtccgggagttcaggattgcatgaaaaagctgaagccctactcaatataataataaagagacaaaagaggccagccacccacctccaacacctcctgagcctctgaagctcccaccaggccagctctcctcccacaacagcttcccacagcatgaagatctccgtggctgccattcccttcttcctcctcatcaccatcgccctagggaccaagactgaatcctcctcacggggaccttaccacccctcagagtgctgcttcacctacactacctacaagatcccgcgtcagcggattatggattactatgagaccaacagccagtgctccaagcccggaattgtcttcatcaccaaaaggggccattccgtctgtaccaaccccagtgacaagtgggtccaggactatatcaaggacatgaaggagaactgagtgacccagaaggggtggcgaaggcacagctcagagacataaagagaagatgccaaggccccctcctccacccaccgctaactctcagccccagtcaccctcttggagcttccctgctttgaattaaagaccactcatgctcttc

SEQ ID NO: 226360 - DNA, 342 bp, Artificial Sequence
  derived and/or modified sequence
atgaaggtgagcgtggccgccctgagctgcctgatgctggtggccgtgctgggcagccaggcccagttcatcaacgacgccgagaccgagctgatgatgagcaagctgcccctggagaaccccgtggtgctgaacagcttccacttcgccgccgactgctgcaccagctacatcagccagagcatcccctgcagcctgatgaagagctacttcgagaccagcagcgagtgcagcaagcccggcgtgatcttcctgaccaagaagggcagacaggtgtgcgccaagcccagcggccccggcgtgcaggactgcatgaagaagctgaagccctacagcatctag

SEQ ID NO: 226361 - DNA, 186 bp, Artificial Sequence
  derived and/or modified sequence
tgatgcaccagctacatcagccagagcatcccctgcagcctgatgaagagctacttcgagaccagcagcgagtgcagcaagcccggcgtgatcttcctgaccaagaagggcagacaggtgtgcgccaagcccagcggccccggcgtgcaggactgcatgaagaagctgaagccctacagcatctag

SEQ ID NO: 226362 - RNA, 186 nt, Artificial Sequence
  derived and/or modified sequence
ugaugcacuagcuacaucagccaguccauucccuguucguugaugaaaucauacuucgagacuaguuccgagugcucaaaacccggcguuauuuuccugacuaaaaagggacgacaagugugugcgaaaccaagcggcccaggcgugcaagauugcaugaagaagcuuaaaccauacuccauauag

SEQ ID NO: 226363 - protein, 1337 aa, Artificial Sequence
  derived and/or modified sequence
MDLLSGTYIFAVLLACVVFHSGAQEKNYTIREEMPENVLIGDLLKDLNLSLIPNKSLTTAMQFKLVYKTGDVPLIRIEEDTGEIFTTGARIDREKLCAGIPRDEHCFYEVEVAILPDEIFRLVKIRFLIEDINDNAPLFPATVINISIPENSAINSKYTLPAAVDPDVGINGVQNYELIKSQNIFGLDVIETPEGDKMPQLIVQKELDREEKDTYVMKVKVEDGGFPQRSSTAILQVSVTDTNDNHPVFKETEIEVSIPENAPVGTSVTQLHATDADIGENAKIHFSFSNLVSNIARRLFHLNATTGLITIKEPLDREETPNHKLLVLASDGGLMPARAMVLVNVTDVNDNVPSIDIRYIVNPVNDTVVLSENIPLNTKIALITVTDKDADHNGRVTCFTDHEIPFRLRPVFSNQFLLETAAYLDYESTKEYAIKLLAADAGKPPLNQSAMLFIKVKDENDNAPVFTQSFVTVSIPENNSPGIQLTKVSAMDADSGPNAKINYLLGPDAPPEFSLDCRTGMLTVVKKLDREKEDKYLFTILAKDNGVPPLTSNVTVFVSIIDQNDNSPVFTHNEYNFYVPENLPRHGTVGLITVTDPDYGDNSAVTLSILDENDDFTIDSQTGVIRPNISFDREKQESYTFYVKAEDGGRVSRSSSAKVTINVVDVNDNKPVFIVPPSNCSYELVLPSTNPGTVVFQVIAVDNDTGMNAEVRYSIVGGNTRDLFAIDQETGNITLMEKCDVTDLGLHRVLVKANDLGQPDSLFSVVIVNLFVNESVTNATLINELVRKSTEAPVTPNTEIADVSSPTSDYVKILVAAVAGTITVVVVIFITAVVRCRQAPHLKAAQKNKQNSEWATPNPENRQMIMMKKKKKKKKHSPKNLLLNFVTIEETKADDVDSDGNRVTLDLPIDLEEQTMGKYNWVTTPTTFKPDSPDLARHYKSASPQPAFQIQPETPLNSKHHIIQELPLDNTFVACDSISKCSSSSSDPYSVSDCGYPVTTFEVPVSVHTRPPMKEVVRSCTPMKESTTMEIWIHPQPQSQRRVTFHLPEGSQESSSDGGLGDHDAGSLTSTSHGLPLGYPQEEYFDRATPSNRTEGDGNSDPESTFIPGLKKAAEITVQPTVEEASDNCTQECLIYGHSDACWMPASLDHSSSSQAQASALCHSPPLSQASTQHHSPRVTQTIALCHSPPVTQTIALCHSPPPIQVSALHHSPPLVQATALHHSPPSAQASALCYSPPLAQAAAISHSSPLPQVIALHRSQAQSSVSLQQGWVQGADGLCSVDQGVQGSATSQFYTMSERLHPSDDSIKVIPLTTFTPRQQARPSRGDSPIMEEHPL

SEQ ID NO: 226364 - DNA, 4014 bp, Artificial Sequence
  derived and/or modified sequence
atggacttgctctccggcacttacatcttcgctgtgctgctagcctgcgtcgttttccactctggagcccaggaaaaaaactacaccatcagggaggagatgccagaaaatgtgttaattggagacctcctgaaagatctaaatttgtcgctcatcccaaacaagtccctaaccaccgctatgcagttcaagctagtgtataagaccggggatgtccctctcatcaggattgaagaagatacaggagaaatatttactactggggcccggattgacagggagaagctgtgtgccggtattccaagggatgaacactgcttttacgaagtggaagtggcaattcttcccgatgaaatctttaggttggtgaagattagatttctgattgaagatatcaatgacaatgcacccctgttcccggccactgtgattaatattagcattcctgaaaatagcgccatcaactcaaaatatacactgcctgccgccgtggatccagacgtggggattaatggggtgcagaactatgaactaattaaatctcagaatatttttggccttgatgtgattgagaccccagagggcgacaaaatgccccagctgatcgtgcagaaagaactcgaccgggaggagaaggatacctacgtgatgaaagtaaaggttgaagatggggggtttccacagcgttcaagcactgcgatccttcaggtcagcgtcacagacacaaacgataatcatcccgtcttcaaagagaccgagatcgaggtctctattccagaaaatgcccccgtgggcacttctgtgactcagctccacgccactgacgcagacataggtgagaatgccaaaatccacttcagttttagcaatctagtctcaaacattgctcggagactgtttcatctcaacgcaacgactggtctaatcacaatcaaggaaccgctggatagagaagaaacacctaaccataagctgctggtgttggcctccgacggcggccttatgcccgcgagagccatggttcttgttaatgtcacagacgtgaacgataatgtgccaagtatcgatatcagatatatcgtgaacccggttaatgataccgtcgtattgagcgagaacatccccctaaatactaaaattgcactgataaccgttactgataaggacgccgatcataacggacgcgtcacatgcttcaccgaccatgaaattcccttccgcctgaggcccgtgttcagcaatcagtttttgctcgaaactgccgcatacctagactacgagagcaccaaagaatacgcaattaaactgctagctgccgacgccggcaaacctccgcttaatcagagcgcaatgttatttatcaaagtgaaagacgagaatgataacgctccagtgtttacacagtcctttgtgacggtttctatcccagagaataactccccaggaatccagctaactaaggtgtcagccatggatgctgactccgggccgaatgctaagatcaattacctgctcggccccgatgcaccgcccgagttcagtctggattgccggaccgggatgctgacggtggtgaagaagttggatcgggaaaaggaggataaatacctgttcaccattttggcaaaagataacggtgtgccgcccttaacttcaaacgttacagtgtttgtgtcgattatagatcagaatgacaactccccagtgtttacccacaacgagtataacttctacgttcctgagaacctgccccggcacgggaccgtgggcttaattacagtgacggatccagactacggggacaattcagctgtcaccttgagcatattagacgagaatgatgattttacaattgactcccagacgggtgttattaggcctaacatttccttcgacagggagaagcaagagtcctacacattttacgtgaaagcagaagatggaggacgggttagtcggagtagctccgccaaagtcactattaatgtcgtagacgtaaatgataataaacccgtgttcatagtcccaccttctaactgtagctatgaacttgtgttaccctcaaccaatcccggtacggttgtattccaggtcatcgctgtagacaacgacacaggtatgaacgctgaggtgcgctatagcattgtgggtggtaatactagggatctcttcgcgattgaccaggaaacagggaatattacattgatggaaaagtgcgacgtgaccgacctgggcctgcacagagtcctggtaaaagcaaatgatcttgggcagcctgattccttgttcagcgtggtcatcgtgaatctgttcgtcaatgagtccgtaaccaatgccaccctgattaatgagctcgtacggaaaagcactgaggcccctgtgaccccgaatacagagatcgcagacgtttcgtcgccgaccagtgattacgtaaagatccttgttgcggcagtagcgggaaccattacagtcgtggttgttatctttataacggccgtcgtgagatgccgtcaggctccgcacttaaaagccgcacagaaaaataagcaaaattcagaatgggctacacctaaccccgagaatcggcagatgattatgatgaagaaaaaaaaaaagaagaaaaagcactcccctaaaaacctcctcttgaattttgtcactattgaggagacaaaggccgatgatgtcgatagcgatgggaacagggtgaccctagatctacccatcgacctggaagagcagacgatggggaagtacaattgggtcacgacccctaccactttcaagcccgattccccagatctggccagacattacaaaagcgcttccccccagcctgctttccaaatccagcccgaaacccccttaaatagcaaacaccatattatccaagagttaccattagacaacacattcgtcgcttgtgacagtataagcaagtgctcctcgagctcctcagacccatacagcgttagcgactgcggctacccagtgacaacgtttgaagtaccggtgtctgtgcacacaagacctcccatgaaggaagtagtgaggtcttgcactccgatgaaagagagcactacaatggagatctggatccacccacagccgcagagtcaacggagagtcacctttcacctccccgagggatcgcaggagtcgagcagcgacggaggcctcggcgaccacgatgccggttctttgactagtacctcccacggcctcccgctggggtaccctcaggaagagtattttgacagggccactccgagcaaccgaaccgagggagacggaaattcagatccggaaagtacattcatacctggattgaagaaggccgctgagattactgtccagccaacggttgaggaagcaagcgacaactgcacccaagagtgtctgatctatggtcactctgacgcttgctggatgcccgcctccctcgatcatagtagctcatctcaggctcaagcctcagctctgtgccactccccacctctgtcacaagcctcgacccaacatcacagcccgcgagtgacgcagactatcgccctatgccactccccgcccgtcacacagactatcgctctctgtcattccccccctccaatccaggtatcagctctccaccacagtcccccactggtgcaggcaaccgcactccaccactcccctcctagtgcccaggcttctgcattgtgttattcacctccactggctcaggcagccgcaatctcacacagctctcctctgccacaggtgatcgcactccataggtcccaagcacagtcttccgtatccctccaacagggctgggtgcaaggcgctgatgggctatgttccgtagatcagggggtccaggggagcgcaacttctcagttctatacgatgtccgaaaggctgcacccatccgacgactcgatcaaagtcatcccgctaaccacatttacgcctcgccagcaggcacgtccaagcagaggggactccccaattatggaagaacaccctttgtag

SEQ ID NO: 226365 - DNA, 4014 bp, Artificial Sequence
  derived and/or modified sequence
atggacctgctgagcggcacctacatctttgctgtgctgctggcctgtgtggtgttccacagcggggcccaggagaagaactacaccatccgggaggagatgccagaaaatgtgctgattggagacctgctgaaggacctgaacctgagcctcatccccaacaagagcctgaccacagccatgcagttcaagctggtgtacaagacaggagatgtgcccctcatcagaattgaagaagatactggagagatcttcaccactggagccagaattgaccgggagaagctgtgtgccggcatccccagagatgagcactgcttctatgaggtggaggtggccatcctgcctgatgagatcttccggctggtgaagatccgcttcctgattgaggacatcaatgacaatgcccccctcttccctgccaccgtcatcaacatcagcatccctgagaacagcgccatcaacagcaagtacaccctgcctgctgctgtggaccctgatgtgggcatcaatggagtgcagaactatgagctgatcaagagccagaacatcttcggcctggatgtgattgagaccccagagggggacaagatgccccagctgattgtgcagaaggagctggaccgggaggagaaggacacctacgtgatgaaggtgaaggtggaggatggcggcttcccccagaggagcagcacagccatcctgcaggtgtctgtgacagacaccaatgacaaccaccctgtgttcaaggagacagaaattgaggtgtccatcccagaaaatgcccctgtgggcacctctgtgacccagctgcacgccacagatgctgacatcggggagaatgccaagatccacttctccttcagcaacctggtgagcaacatcgcccggcggctcttccacctgaatgccaccaccggcctcatcaccatcaaggagcccctggaccgggaggagacccccaaccacaagctgctggtgctggccagtgatggcggcctgatgcctgcccgggccatggtgctggtgaatgtgacagatgtgaatgacaacgtgcccagcattgacatccgctacatcgtgaaccctgtgaatgacacagtggtgctgtctgagaacatccccctgaacaccaagatcgccctgatcaccgtgacagacaaggatgctgaccacaacggccgggtgacctgcttcacagaccacgagatccccttccggctgcggcctgtgttcagcaaccagttcctgctggagacagctgcctacctggactatgagagcaccaaggagtatgccatcaagctgctggccgcagatgctgggaagccacccctgaaccagagcgccatgctgttcatcaaggtgaaggatgaaaatgacaatgcccctgtgttcacccagagctttgtgacagtgtccatccctgagaacaacagccctggcatccagctgaccaaggtgtctgccatggatgctgacagcggccccaatgccaagatcaactacctgctgggcccagatgcccctcctgagttcagcctggactgcaggacaggcatgctgactgtggtgaagaagctggaccgggagaaggaggacaagtacctgttcaccatcctggccaaggacaatggagtgccccccctgaccagcaatgtgacagtgtttgtgtccatcatcgaccagaatgacaacagccctgtgttcacccacaatgagtacaacttctacgtgcctgagaacctgcccaggcatggcaccgtgggcctcatcaccgtgacagatcctgactatggagacaacagcgctgtgaccctgagcatcctggatgaaaatgatgacttcaccatcgacagccagacaggagtcatccggcccaacatcagctttgaccgggagaagcaggagagctacaccttctacgtgaaggccgaggatggcggccgggtgagccgcagcagcagcgccaaggtgaccatcaacgtggtggatgtgaatgacaacaagcctgtgttcatcgtgccccccagcaactgcagctatgagctggtgctgcccagcaccaaccctggcaccgtggtgttccaggtgattgctgtggacaatgacaccggcatgaatgctgaggtgcgctacagcatcgtgggcggcaacacccgggacctgtttgccatcgaccaggagaccggcaacatcaccctgatggagaagtgtgatgtgacagacctgggcctgcaccgggtgctggtgaaggccaatgacctgggccagcctgacagcctcttctctgtggtgattgtgaacctgtttgtgaatgaatctgtgaccaatgccaccctcatcaatgagctggtgaggaagagcacagaggcccctgtgacccccaacacagaaattgctgatgtgagcagccccaccagtgactatgtgaagatcctggtggccgctgtggccggcaccatcaccgtggtggtggtgatcttcatcacagctgtggtgcgctgccggcaggccccccacctgaaggccgcccagaagaacaagcagaacagcgagtgggccacccccaaccctgagaaccggcagatgatcatgatgaagaagaagaagaagaagaagaagcacagccccaagaacctgctgctgaactttgtgaccatcgaggagaccaaggcagatgatgtggacagtgatggcaacagagtgaccctggacctgcccatcgacctggaggagcagaccatgggcaagtacaactgggtgaccacccccaccaccttcaagccagacagcccagacctggcccggcactacaagagcgccagcccccagcctgccttccagatccagcctgagacccccctgaacagcaagcaccacatcatccaggagctgcccctggacaacacctttgtggcctgtgacagcatcagcaagtgcagcagcagcagcagtgacccctacagcgtgtctgactgtggctaccctgtgaccacctttgaggtgcctgtgtctgtgcacaccaggcctcccatgaaggaggtggtgcgcagctgcacccccatgaaggagagcaccaccatggagatctggatccacccccagccccagagccagaggagagtgaccttccacctgcctgagggcagccaggagagcagcagtgatggcggcctgggggaccatgatgctggcagcctgaccagcaccagccacggcctgcccctgggctacccccaggaggagtactttgaccgggccacccccagcaacagaacagaaggagatggcaacagcgaccctgagagcaccttcatccctggcctgaagaaggctgctgagatcaccgtgcagcccaccgtggaggaggccagtgacaactgcacccaggagtgcctgatctacggccacagtgatgcctgctggatgcctgccagcctggaccacagcagcagcagccaggcccaggccagcgccctgtgccacagcccccccctgagccaggccagcacccagcaccacagcccccgggtgacccagaccatcgccctgtgccacagcccccctgtgacccagaccatcgccctgtgccacagccccccacccatccaggtgtctgccctgcaccacagcccccccctggtgcaggccacagccctgcaccacagccccccatctgcccaggccagcgccctgtgctacagcccccccctggcccaggccgccgccatcagccacagcagccccctgccccaggtgattgccctgcacaggagccaggcccagagctctgtgtccctgcagcagggctgggtgcagggcgcagatggcctgtgcagcgtggaccagggcgtgcagggcagcgccaccagccagttctacaccatgtctgagcggctgcaccccagtgatgacagcatcaaggtgatccccctgaccaccttcaccccccggcagcaggcccggcccagcagaggagacagccccatcatggaggagcaccccctgtag

SEQ ID NO: 226366 - DNA, 4014 bp, Artificial Sequence
  derived and/or modified sequence
atggacctgctgagcggcacctacatcttcgccgtgctgctggcctgcgtggtgttccactccggcgcacaagagaaaaactacactatccgggaggagatgcctgagaatgttctgattggtgacctgcttaaggacctgaacttgtcacttatcccaaacaaatctctgactacagccatgcaattcaaacttgtttataagaccggcgacgtacctcttatcagaatcgaggaggacacaggcgagatctttacaacaggggcacgtattgatagggaaaagctctgcgcaggaattccaagggacgagcactgcttctatgaggttgaggtggccattttgcctgatgaaatatttagactggtgaagatccggttcctgattgaggacatcaacgacaacgcacccctgttccctgcaacagttataaacatctccattccggagaactccgcaatcaatagcaaatacacactgcccgcagcagtggaccctgacgtgggtattaacggcgttcagaactacgagctgatcaaaagccagaatatctttggcctagatgttattgagacacctgaaggcgataagatgccgcagttaattgtccagaaagagctggaccgtgaagagaaagatacatatgtgatgaaggtgaaagttgaagacggaggcttcccacaaaggtctagtacagccattctccaggtgagcgtaaccgatacaaatgacaatcaccccgtgttcaaggagaccgagatcgaagtgtcgataccagaaaatgccccagtgggaacttctgtcacccagctgcacgcaaccgacgcagatatcggtgaaaatgccaaaattcacttttcttttagcaaccttgtgagcaatattgcacggcgcctttttcatttgaacgccacaactggtctgattactatcaaagaaccactggatagagaagagactcccaatcataagctgctggtgcttgcatccgacggagggctgatgccagcgagggccatggtgctggtcaacgtcactgacgtgaacgataatgtgcctagcattgacatccggtacatagttaacccagtcaatgataccgttgttctatccgaaaatattcctctcaatactaaaattgcccttattacagtcaccgacaaagatgcagaccataacgggagagtgacctgctttaccgatcacgagatcccttttcgccttcgccctgtgttcagtaaccaatttctcctagagactgctgcgtatctcgactatgaaagcactaaagagtacgcgatcaaactgctcgccgctgatgccggcaagcccccactgaatcagagcgccatgctttttattaaggtgaaggatgagaatgacaatgctccggtgtttacccagtcgttcgtaacagtctctatccctgagaataattcgccagggatccagctgactaaggtgtcagccatggacgccgattcggggcccaatgccaaaattaactacttgctgggaccagatgctccacccgagttttctctcgattgcagaaccgggatgctcacagtcgtcaagaagctggatagagagaaagaggataagtacttatttacaattctggccaaggacaacggagttcctccgctcacctccaatgtgacggtgttcgtgtccattatcgaccagaatgataactctcctgtcttcacccataatgagtacaacttctacgtcccggagaatttgcctcgacatggaactgtgggtttgattacagtcacggatccagattacggggacaatagtgcagtcacactctccattctcgacgaaaacgacgactttacaatcgatagtcagacaggggtcattagacccaatatttctttcgaccgagagaagcaggagtcctacacattttatgtgaaagccgaggacggtggccgggtgagtcggtcttcaagtgccaaagttacaattaacgttgtcgacgtgaatgataacaaaccagtcttcatcgtgcctcctagcaactgctcttatgaattagtacttccatccaccaatcccgggactgtggtttttcaggtgattgccgtcgataatgatacaggcatgaacgccgaggtccggtattccattgtgggtggcaatacccgtgatttgtttgccattgaccaggagaccgggaacattactctcatggagaagtgtgacgtcactgacctcggcctgcacagagtcttagttaaagcgaacgacttgggacagccagactctctttttagtgtggtgattgtgaacctttttgtgaacgagtcggtgactaatgccaccctgattaatgaattggtgaggaagtccaccgaggcccctgtgaccccaaacacagagatcgccgatgtttccagccctacaagcgattatgtgaaaattttggtcgcagctgtggcgggaacgatcacggtcgttgtcgtgattttcatcactgctgtcgtccgctgccgccaggcgcctcatttgaaagccgcccagaagaataagcagaacagcgagtgggcaacccctaaccccgagaacagacagatgattatgatgaaaaaaaaaaaaaagaaaaaaaaacatagccctaaaaatctcctgctgaacttcgtcacaatcgaagagacgaaggctgacgatgtggattcagacggcaaccgggttactctcgatttaccaattgatctggaagagcagactatgggtaagtataactgggtgaccactccaaccacttttaaaccagatagcccagacctggctaggcactataaatcagctagccctcaacccgcttttcagattcagcctgagaccccactgaatagcaagcaccacatcatacaagaattgcccctcgacaacacgttcgtcgcctgtgactcaatttctaaatgttcctcatcatcttccgacccctactctgttagcgattgcggatatccagtaacaactttcgaagtgcctgtgtctgtgcacacccggccccctatgaaagaggtcgtgcgaagttgtactcccatgaaggagagcaccacaatggagatctggatccacccccaaccacagtcgcaaagacgcgtaacgttccaccttcccgaggggtctcaggagtcctcctcagatggaggattgggtgatcacgatgcaggttctctcacaagcactagccatggcctgccattagggtacccacaggaggagtacttcgatcgtgcaacgccctctaataggacagagggcgatggtaatagcgatcctgaatccaccttcattcccggcctcaagaaagctgccgaaatcaccgtgcagccgacggtcgaggaggcttccgacaactgtacccaggaatgtttaatttatggccacagtgacgcctgctggatgccagcttctcttgaccacagtagctcatcacaggcccaggcgtctgccctgtgccattctcccccactatcacaggcttctacccaacatcactcccctagagtgacccagacaatcgcactgtgccattcccccccggttactcagactatcgctttatgccatagtccaccacctattcaagtgagcgctctgcaccacagtcctcccctggttcaggcgaccgcactacatcacagccccccttctgcacaagcctccgctctctgttactctccgccccttgcccaagccgcagccattagtcattcttcgcccctacctcaggtgatcgctttgcatcggagtcaggcgcaatcctccgtatcactgcagcagggctgggttcagggggctgacggactatgcagcgtcgatcagggcgtgcaaggttcagctaccagccaattctacaccatgagcgaacgactccacccttccgatgactcgattaaagtgattcccttaactacttttactccccgccagcaggcccggccctcacgtggggattcccccattatggaagagcaccccctttag

SEQ ID NO: 226367 - DNA, 4014 bp, Artificial Sequence
  derived and/or modified sequence
atggatctgctgtccggtacctatatttttgccgttctcctggcttgcgtggtcttccactcgggggctcaggaaaaaaattatacaatcagagaagaaatgccagaaaacgtactgattggtgacctgctcaaagaccttaatctctcactgatccccaataaatcattgaccactgccatgcagtttaagctcgtgtacaagacaggcgacgtcccacttattagaatcgaggaagacaccggagagatcttcactacgggtgccaggatcgatcgcgaaaaactgtgcgcaggtattccacgtgatgagcactgcttctatgaagttgaggtggcaatcttgccggatgagattttcaggctggtcaaaatccgattcctgatagaggacataaacgataacgccccactgtttcctgctaccgtaatcaacatcagtatcccggaaaattccgcgattaattcaaagtatacacttccagccgcagtggaccctgatgttggaatcaacggagtccagaactatgagctgatcaagtcccagaacatcttcggtcttgacgtgattgagacccctgagggggataagatgccgcagctcatcgtccagaaggaactggaccgggaagaaaaagatacatatgtaatgaaagtcaaagtggaggatggcggatttccacagcggagcagcaccgcgatattgcaggtgtccgtcacggacaccaacgacaatcacccggtgtttaaggagacagaaatcgaagtctccatacccgaaaacgcacccgtcgggacctccgttacccagttgcacgcgaccgatgcggacatcggggaaaatgcgaaaatccacttctcattcagtaatctggtgtctaatattgccaggagactatttcacctgaacgccactacaggcctgatcactatcaaggagcccctcgaccgcgaagagacgccaaatcataaattgctggtcctggctagcgatggcggtttgatgcctgctcgggctatggtcttggtgaatgtgacagatgtaaatgataacgtcccatcgatcgacattcgctacatcgtcaaccccgtgaacgataccgtggtcctatcggaaaacataccactgaacacaaagatagctctgataaccgtgaccgataaggatgccgatcacaacgggagggttacttgttttactgatcacgaaatacccttcaggctgagacctgtgttctcaaatcaattccttttagaaaccgccgcatacctcgactacgaatctaccaaggaatatgctataaaattactggccgctgacgcaggaaagccgcctttgaaccagtcagccatgctctttatcaaggtgaaggacgaaaatgacaacgccccagtgtttacacagagctttgtcactgtatcaatacccgagaataatagcccagggatccagttgaccaaagtcagcgcaatggacgcggattctggtcccaacgccaagatcaattaccttttaggacctgacgcccctcctgagtttagcctagactgcagaaccgggatgcttactgtggtcaagaaactagaccgggagaaagaagacaagtatctgtttacaatattagccaaggataatggcgtgccaccacttaccagtaacgtaactgtgttcgtaagcatcatcgatcaaaacgacaatagcccagtgtttacacacaatgaatacaatttttacgtgcccgagaacctgcctcggcacggaaccgtgggactgatcaccgtgactgaccccgactatggggacaatagtgcagtgacactctctatcctggacgagaacgacgatttcaccatagattctcagacaggagtgatcagaccgaacatcagcttcgaccgcgaaaagcaggagagctatactttttacgtgaaagcagaggatggtggccgtgtttctcggagctcatccgcaaaagtgaccattaacgttgtggatgttaacgacaataaacctgtttttatcgttcctccatctaattgtagttatgagctcgtgctgccaagtaccaatccaggcaccgtagttttccaggtgatcgccgtggataacgacacaggaatgaatgctgaggtcagatacagtatcgtcgggggaaatactcgcgatctcttcgctatcgatcaagaaacgggtaacattacactcatggaaaagtgtgatgtgaccgatctgggacttcaccgggttctggtcaaggcgaacgacctgggacaacctgatagcttgttcagtgtcgtgattgttaacctgttcgtgaacgagtccgtcacaaatgccacattgataaacgagcttgtgagaaagtctactgaagccccagttacccccaacacggaaattgcagacgtgtcctcacctacttcagactatgtgaagatcctggtggcagcagtcgctggtaccattaccgttgttgtcgtgatcttcataaccgctgtcgtgaggtgtagacaagcgccacacctcaaagctgcccagaagaataaacagaactcagaatgggccactcccaatccagaaaaccggcagatgattatgatgaagaagaaaaaaaagaagaagaagcactcccctaaaaaccttctgctgaactttgtgactatcgaggaaacgaaggccgatgatgttgatagcgatggcaatagagtgactctagacttacccatcgacttggaggagcagactatggggaagtacaattgggtaacaactccaaccacttttaaacccgactcacccgacttagctcggcactacaaatccgcctctccccagcccgcttttcagatccagcccgagacacctctgaatagcaagcatcacatcattcaggagttacccctcgacaacaccttcgtcgcatgtgactcgatctcaaaatgttccagttcgtcatccgatccctactcagtaagtgattgcggttatcctgttaccacgtttgaggtgcccgtgtccgtccacacacgacctccgatgaaggaagttgtccgctcgtgcaccccgatgaaggagtctacaactatggaaatatggattcatccccaaccccagagtcagcgaagggtgaccttccacttacctgaaggttcacaggaatcttcgagcgacgggggactaggggatcatgatgccggtagcttaacatcaacatcccacggactacccctgggctatccacaggaagaatattttgatcgggcaacgccgtctaacagaaccgaaggagacggtaatagcgaccctgagagcacatttatacctggtctgaagaaggccgctgaaataaccgtgcaaccgactgtcgaggaggctagcgataattgcacacaggaatgcctgatctacggccacagcgacgcttgttggatgccagccagcctggatcactcatcctcttcacaagcacaggcatcagcactctgtcattctccgcctctgagccaagcatcaacccagcatcactccccacgagtgacccagactatcgccttatgccactcaccgccagtgactcaaacaattgcactgtgccactctccaccccctatacaagtgagtgcactgcaccacagccctccccttgtgcaggccaccgctctgcaccactcccctccttcagctcaggcgtcagcactgtgttattcccctcccctcgcccaggccgctgcgatctcacattctagccccctgcctcaggtgattgcgctccatcgctcacaggcccagtcctcagtgagcttgcaacaggggtgggtgcaaggggcagatgggctatgttcagtggatcagggcgtgcaaggttccgccacatcacagttttacaccatgagcgagcgactgcatccaagtgatgactcgattaaagttattccactgacaaccttcacccccagacagcaggcacgtccaagcagaggggattcgcccatcatggaggagcacccactgtag

SEQ ID NO: 226368 - DNA, 4014 bp, Artificial Sequence
  derived and/or modified sequence
atggacctgctgagcggcacctacatcttcgccgtgctgctggcctgcgtggtgttccacagcggcgcccaggagaagaactacaccatcagagaggagatgcccgagaacgtgctgatcggcgacctgctgaaggacctgaacctgagcctgatccccaacaagagcctgaccaccgccatgcagttcaagctggtgtacaagaccggcgacgtgcccctgatcagaatcgaggaggacaccggcgagatcttcaccaccggcgccagaatcgacagagagaagctgtgcgccggcatccccagagacgagcactgcttctacgaggtggaggtggccatcctgcccgacgagatcttcagactggtgaagatcagattcctgatcgaggacatcaacgacaacgcccccctgttccccgccaccgtgatcaacatcagcatccccgagaacagcgccatcaacagcaagtacaccctgcccgccgccgtggaccccgacgtgggcatcaacggcgtgcagaactacgagctgatcaagagccagaacatcttcggcctggacgtgatcgagacccccgagggcgacaagatgccccagctgatcgtgcagaaggagctggacagagaggagaaggacacctacgtgatgaaggtgaaggtggaggacggcggcttcccccagagaagcagcaccgccatcctgcaggtgagcgtgaccgacaccaacgacaaccaccccgtgttcaaggagaccgagatcgaggtgagcatccccgagaacgcccccgtgggcaccagcgtgacccagctgcacgccaccgacgccgacatcggcgagaacgccaagatccacttcagcttcagcaacctggtgagcaacatcgccagaagactgttccacctgaacgccaccaccggcctgatcaccatcaaggagcccctggacagagaggagacccccaaccacaagctgctggtgctggccagcgacggcggcctgatgcccgccagagccatggtgctggtgaacgtgaccgacgtgaacgacaacgtgcccagcatcgacatcagatacatcgtgaaccccgtgaacgacaccgtggtgctgagcgagaacatccccctgaacaccaagatcgccctgatcaccgtgaccgacaaggacgccgaccacaacggcagagtgacctgcttcaccgaccacgagatccccttcagactgagacccgtgttcagcaaccagttcctgctggagaccgccgcctacctggactacgagagcaccaaggagtacgccatcaagctgctggccgccgacgccggcaagccccccctgaaccagagcgccatgctgttcatcaaggtgaaggacgagaacgacaacgcccccgtgttcacccagagcttcgtgaccgtgagcatccccgagaacaacagccccggcatccagctgaccaaggtgagcgccatggacgccgacagcggccccaacgccaagatcaactacctgctgggccccgacgccccccccgagttcagcctggactgcagaaccggcatgctgaccgtggtgaagaagctggacagagagaaggaggacaagtacctgttcaccatcctggccaaggacaacggcgtgccccccctgaccagcaacgtgaccgtgttcgtgagcatcatcgaccagaacgacaacagccccgtgttcacccacaacgagtacaacttctacgtgcccgagaacctgcccagacacggcaccgtgggcctgatcaccgtgaccgaccccgactacggcgacaacagcgccgtgaccctgagcatcctggacgagaacgacgacttcaccatcgacagccagaccggcgtgatcagacccaacatcagcttcgacagagagaagcaggagagctacaccttctacgtgaaggccgaggacggcggcagagtgagcagaagcagcagcgccaaggtgaccatcaacgtggtggacgtgaacgacaacaagcccgtgttcatcgtgccccccagcaactgcagctacgagctggtgctgcccagcaccaaccccggcaccgtggtgttccaggtgatcgccgtggacaacgacaccggcatgaacgccgaggtgagatacagcatcgtgggcggcaacaccagagacctgttcgccatcgaccaggagaccggcaacatcaccctgatggagaagtgcgacgtgaccgacctgggcctgcacagagtgctggtgaaggccaacgacctgggccagcccgacagcctgttcagcgtggtgatcgtgaacctgttcgtgaacgagagcgtgaccaacgccaccctgatcaacgagctggtgagaaagagcaccgaggcccccgtgacccccaacaccgagatcgccgacgtgagcagccccaccagcgactacgtgaagatcctggtggccgccgtggccggcaccatcaccgtggtggtggtgatcttcatcaccgccgtggtgagatgcagacaggccccccacctgaaggccgcccagaagaacaagcagaacagcgagtgggccacccccaaccccgagaacagacagatgatcatgatgaagaagaagaagaagaagaagaagcacagccccaagaacctgctgctgaacttcgtgaccatcgaggagaccaaggccgacgacgtggacagcgacggcaacagagtgaccctggacctgcccatcgacctggaggagcagaccatgggcaagtacaactgggtgaccacccccaccaccttcaagcccgacagccccgacctggccagacactacaagagcgccagcccccagcccgccttccagatccagcccgagacccccctgaacagcaagcaccacatcatccaggagctgcccctggacaacaccttcgtggcctgcgacagcatcagcaagtgcagcagcagcagcagcgacccctacagcgtgagcgactgcggctaccccgtgaccaccttcgaggtgcccgtgagcgtgcacaccagaccccccatgaaggaggtggtgagaagctgcacccccatgaaggagagcaccaccatggagatctggatccacccccagccccagagccagagaagagtgaccttccacctgcccgagggcagccaggagagcagcagcgacggcggcctgggcgaccacgacgccggcagcctgaccagcaccagccacggcctgcccctgggctacccccaggaggagtacttcgacagagccacccccagcaacagaaccgagggcgacggcaacagcgaccccgagagcaccttcatccccggcctgaagaaggccgccgagatcaccgtgcagcccaccgtggaggaggccagcgacaactgcacccaggagtgcctgatctacggccacagcgacgcctgctggatgcccgccagcctggaccacagcagcagcagccaggcccaggccagcgccctgtgccacagcccccccctgagccaggccagcacccagcaccacagccccagagtgacccagaccatcgccctgtgccacagcccccccgtgacccagaccatcgccctgtgccacagccccccccccatccaggtgagcgccctgcaccacagcccccccctggtgcaggccaccgccctgcaccacagcccccccagcgcccaggccagcgccctgtgctacagcccccccctggcccaggccgccgccatcagccacagcagccccctgccccaggtgatcgccctgcacagaagccaggcccagagcagcgtgagcctgcagcagggctgggtgcagggcgccgacggcctgtgcagcgtggaccagggcgtgcagggcagcgccaccagccagttctacaccatgagcgagagactgcaccccagcgacgacagcatcaaggtgatccccctgaccaccttcacccccagacagcaggccagacccagcagaggcgacagccccatcatggaggagcaccccctgtag

SEQ ID NO: 226369 - protein, 1037 aa, Artificial Sequence
  derived and/or modified sequence
MTVGFNSDISSVVRVNTTNCHKCLLSGTYIFAVLLVCVVFHSGAQEKNYTIREEIPENVLIGNLLKDLNLSLIPNKSLTTTMQFKLVYKTGDVPLIRIEEDTGEIFTTGARIDREKLCAGIPRDEHCFYEVEVAILPDEIFRLVKIRFLIEDINDNAPLFPATVINISIPENSAINSKYTLPAAVDPDVGINGVQNYELIKSQNIFGLDVIETPEGDKMPQLIVQKELDREEKDTYVMKVKVEDGGFPQRSSTAILQVSVTDTNDNHPVFKETEIEVSIPENAPVGTSVTQLHATDADIGENAKIHFSFSNLVSNIARRLFHLNATTGLITIKEPLDREETPNHKLLVLASDGGLMPARAMVLVNVTDVNDNVPSIDIRYIVNPVNDTVVLSENIPLNTKIALITVTDKDADHNGRVTCFTDHEIPFRLRPVFSNQFLLENAAYLDYESTKEYAIKLLAADAGKPPLNQSAMLFIKVKDENDNAPVFTQSFVTVSIPENNSPGIQLMKVSATDADSGPNAEINYLLGPDAPPEFSLDRRTGMLTVVKKLDREKEDKYLFTILAKDNGVPPLTSNVTVFVSIIDQNDNSPVFTHNEYKFYVPENLPRHGTVGLITVTDPDYGDNSAVTLSILDENDDFTIDSQTGVIRPNISFDREKQESYTFYVKAEDGGRVSRSSSAKVTINVVDVNDNKPVFIVPPYNYSYELVLPSTNPGTVVFQVIAVDNDTGMNAEVRYSIVGGNTRDLFAIDQETGNITLMEKCDVTDLGLHRVLVKANDLGQPDSLFSVVIVNLFVNESVTNATLINELVRKSIEAPVTPNTEIADVSSPTSDYVKILVAAVAGTITVVVVIFITAVVRCRQAPHLKAAQKNMQNSEWATPNPENRQMIMMKKKKKKKKHSPKNLLLNVVTIEETKADDVDSDGNRVTLDLPIDLEEQTMGKYNWVTTPTTFKPDSPDLARHYKSASPQPAFQIQPETPLNLKHHIIQELPLDNTFVACDSISNCSSSSSDPYSVSDCGYPVTTFEVPVSVHTRPTDSRT

SEQ ID NO: 226370 - DNA, 3114 bp, Artificial Sequence
  derived and/or modified sequence
atgactgtgggatttaactccgatatctcctcagtcgtgcgggtaaacacaactaactgccacaagtgcctactgtccggcacatatattttcgcagtgctgcttgtttgtgttgtcttccattccggtgctcaggagaaaaattatacaatccgtgaagaaatccctgaaaatgtcctgattggcaatttgttaaaggatctcaacctgtcactaattcccaacaagagtctgaccacaaccatgcagttcaagcttgtctacaaaacaggagatgtcccattaattcggattgaggaagacacgggagaaatatttacgaccggagctaggatcgatcgggagaagctgtgcgccggcatcccgcgagatgaacactgcttttatgaagtggaggtggccatcctgccagacgagatcttccggcttgtgaagatcagattccttatcgaagacattaatgataatgccccactgttcccagccactgtgattaacatcagtatacccgagaactcagcaatcaatagcaagtacacgctcccagccgctgtcgacccagacgttggaatcaacggagtgcagaattatgaactcatcaagtcccagaatattttcgggctggatgtgattgagacacccgaaggggacaagatgcctcagctcattgtgcagaaagaactggaccgcgaggaaaaagacacctacgtgatgaaagtgaaagtagaggatggcggattccctcaacgcagtagcaccgccatcctgcaggtctcggttactgacacaaacgataatcatcccgtgtttaaggagaccgagatcgaggtgagcatcccagagaatgctccagtgggtacatccgtgacacagcttcatgcaaccgacgcagacatcggcgagaacgcaaaaattcactttagcttttcaaacctggtgagcaatatcgctagaaggctgtttcacctcaacgccaccacaggcctgataacgatcaaggaaccccttgaccgggaggaaaccccaaatcataagctcttagtgctcgcctcagacggcggactgatgccagcaagagccatggtcctggttaacgtcaccgacgtcaatgacaacgttcctagcatcgatatccggtatatcgttaatcccgtaaacgacacggtggtcctgtccgagaatatcccccttaacacgaaaatcgcactgataacagtcacggataaagatgccgaccataacggccgagtgacttgctttaccgatcatgagattccattccgactgaggccagtgttctctaatcagtttttgctggagaacgccgcatacctggactacgagagcaccaaagaatatgcaattaagctgcttgctgccgacgcggggaagcctcccctcaatcaatccgctatgctctttattaaggtgaaagacgaaaatgacaacgcacctgtgttcactcagagtttcgtgactgtgtccattccggagaataacagtcccggcattcaacttatgaaggtctctgccaccgatgccgatagcggccctaacgctgagattaattatctactgggccctgacgctccacccgaattttccttagacagacggaccgggatgctcaccgtagtcaaaaagctggatcgggagaaagaagacaaatacctgttcaccatcctggccaaggacaatggagtgccgccactcacatccaatgtgactgtatttgtgtccatcatcgatcagaatgataacagtcccgtgtttacgcacaacgagtacaaattctacgttccggagaacctcccacgccacggcactgtcggccttatcacagtaacagatcctgattatggggacaactcagcagtcactctgtctattctggacgagaatgacgacttcaccatagatagtcaaaccggcgtgatccgtcctaacatcagttttgatcgagaaaagcaagagtcatatacattctacgtgaaggcagaggatggaggtcgggtgagtcgcagttcatcagccaaagtcacaattaacgtcgtcgacgtgaacgataacaaaccagtatttatcgtgccgccctacaattactcttatgaacttgttttacctagcacaaatcctggtacagtggtgtttcaggtcattgctgtcgacaacgataccggtatgaacgcagaagtacggtatagcatagtaggggggaacaccagagacctatttgctatcgaccaggaaacagggaacattaccctcatggaaaagtgcgatgtcacagatcttggactccaccgagtactcgtcaaggcaaacgacctgggccaacctgattctctgttttcagtcgttattgtgaacctgttcgtaaatgagtcagtgacaaacgccacattaattaacgagctcgtgagaaagtccattgaggccccagtaacacccaacacagaaatcgcagatgtttcctcacccacgtccgattatgtgaagatcttggtcgccgccgtggccgggacaatcacagtggtggtggtgatctttattacggccgtggtaagatgtcgccaggctcctcatcttaaggcagcccagaagaacatgcagaacagtgaatgggccacccctaaccccgaaaaccgtcagatgattatgatgaagaagaagaaaaaaaaaaagaagcattctcctaaaaacctcctcttgaatgtggtcactatagaagagacaaaggcggatgacgttgattctgatggcaatagggttacccttgatctgccaatcgatctggaagagcagactatgggcaaatataactgggtaaccacccctacgacctttaaacctgattcccccgatctggccagacactataagagcgctagtccacagccggctttccaaattcaacccgagaccccactgaacttaaagcaccacattatacaggaactacctttggacaatacatttgtcgcctgcgactcaatctctaattgctcctcgagcagtagcgacccctactctgtgagtgattgtggctaccctgtcacaaccttcgaagtgccagtgtctgtccacactcgtcccactgattctaggacgtag

SEQ ID NO: 226371 - DNA, 3114 bp, Artificial Sequence
  derived and/or modified sequence
atgacagtgggcttcaacagcgacatcagctctgtggtgcgggtgaacaccaccaactgccacaagtgcctgctgagcggcacctacatctttgctgtgctgctggtgtgtgtggtgttccacagcggggcccaggagaagaactacaccatccgggaggagatcccagaaaatgtgctgattggcaacctgctgaaggacctgaacctgagcctcatccccaacaagagcctgaccaccaccatgcagttcaagctggtgtacaagacaggagatgtgcccctcatccgcatcgaggaggacaccggggagatcttcaccaccggggccagaattgaccgggagaagctgtgtgccggcatccccagagatgagcactgcttctatgaggtggaggtggccatcctgcctgatgagatcttccggctggtgaagatccgcttcctgattgaggacatcaatgacaatgcccccctcttccctgccaccgtcatcaacatcagcatcccagaaaattctgccatcaacagcaagtacaccctgcctgctgctgtggaccctgatgtgggcatcaacggggtgcagaactatgagctgatcaagagccagaacatcttcggcctggatgtgattgagaccccagagggggacaagatgccccagctgattgtgcagaaggagctggaccgggaggagaaggacacctacgtgatgaaggtgaaggtggaggatggcggcttcccccagaggagcagcacagccatcctgcaggtgtctgtgacagacaccaatgacaaccaccctgtgttcaaggagacagaaattgaggtgtccatcccagaaaatgcccctgtgggcacctctgtgacccagctgcacgccacagatgctgacattggagaaaatgccaagatccacttctccttcagcaacctggtgagcaacatcgcccggcggctcttccacctgaatgccaccaccggcctcatcaccatcaaggagcccctggaccgggaggagacccccaaccacaagctgctggtgctggccagtgatggcggcctgatgcctgcccgggccatggtgctggtgaatgtgacagatgtgaatgacaacgtgcccagcattgacatccgctacatcgtgaaccctgtgaatgacacagtggtgctgtctgagaacatccccctgaacaccaagatcgccctgatcaccgtgacagacaaggatgctgaccacaacggccgggtgacctgcttcacagaccacgagatccccttccggctgcggcctgtgttcagcaaccagttcctgctggagaatgctgcctacctggactatgagagcaccaaggagtatgccatcaagctgctggccgcagatgctgggaagccacccctgaaccagagcgccatgctgttcatcaaggtgaaggatgaaaatgacaatgcccctgtgttcacccagagctttgtgacagtgtccatccctgagaacaacagccctggcatccagctgatgaaggtgtctgccacagatgctgacagcggccccaatgctgagatcaactacctgctgggcccagatgcccctcctgagttcagcctggacagaagaacaggcatgctgactgtggtgaagaagctggaccgggagaaggaggacaagtacctgttcaccatcctggccaaggacaacggggtgccccccctgaccagcaatgtgacagtgtttgtgtccatcatcgaccagaatgacaacagccctgtgttcacccacaatgagtacaagttctacgtgcctgagaacctgcccaggcatggaacagtgggcctcatcaccgtgacagatcctgactatggagacaacagcgctgtgaccctgagcatcctggatgaaaatgatgacttcaccatcgacagccagacaggagtcatccggcccaacatcagctttgaccgggagaagcaggagagctacaccttctacgtgaaggcagaagatggcggccgggtgagccgcagcagcagcgccaaggtgaccatcaacgtggtggatgtgaatgacaacaagcctgtgttcatcgtgcccccctacaactacagctatgagctggtgctgcccagcaccaaccctggcaccgtggtgttccaggtgattgctgtggacaatgacaccggcatgaatgctgaggtgcgctacagcatcgtgggcggcaacacccgggacctgtttgccatcgaccaggagactggaaacatcaccctgatggagaagtgtgatgtgacagacctgggcctgcaccgggtgctggtgaaggccaatgacctgggccagcctgacagcctcttctctgtggtgattgtgaacctgtttgtgaatgaatctgtgaccaatgccaccctcatcaatgagctggtgaggaagagcattgaggcccctgtgacccccaacacagaaattgctgatgtgagcagccccaccagtgactatgtgaagatcctggtggccgctgtggccggcaccatcaccgtggtggtggtgatcttcatcacagctgtggtgcgctgccggcaggccccccacctgaaggccgcccagaagaacatgcagaacagcgagtgggccacccccaacccagaaaatcggcagatgatcatgatgaagaagaagaagaagaagaagaagcacagccccaagaacctgctgctgaatgtggtgaccatcgaggagaccaaggcagatgatgtggacagtgatggcaacagagtgaccctggacctgcccatcgacctggaggagcagaccatgggcaagtacaactgggtgaccacccccaccaccttcaagccagacagcccagacctggcccggcactacaagagcgccagcccccagcctgccttccagatccagcctgagacccccctgaacctgaagcaccacatcatccaggagctgcccctggacaacacctttgtggcctgtgacagcatcagcaactgcagcagcagcagcagtgacccctacagcgtgtctgactgtggctaccctgtgaccacctttgaggtgcctgtgtctgtgcacacccggcccacagacagcaggacatag

SEQ ID NO: 226372 - DNA, 3114 bp, Artificial Sequence
  derived and/or modified sequence
atgaccgtgggcttcaacagcgacatcagcagcgtggtgcgggtgaataccaccaattgccacaaatgtctgctctctggaacatacatcttcgccgtcctgctagtgtgcgttgtgtttcattccggcgctcaggaaaagaattacactatcagggaggagatccctgagaacgtcttgattggcaatctgttgaaggacctgaacttgtctctaattccgaataaaagtctgacaaccacaatgcaatttaagcttgtatataagacgggcgatgtgccactaattcggattgaggaagataccggtgagatctttactaccggtgctagaatcgaccgcgagaagctgtgtgcgggcatacctcgagacgaacattgtttttacgaagtggaggttgccatccttccagacgaaatctttcggttggtcaagatccggttcctaattgaggacatcaatgacaatgctcccttgttcccagctaccgtcattaatatctccatccccgagaatagcgccatcaacagtaaatacaccctaccagccgctgtggacccagacgttggaattaacggggtccagaactatgaattaattaaatcgcagaatattttcgggttagacgtgattgagaccccagagggggataagatgcctcagctgatcgtgcaaaaagaactcgacagggaggagaaagatacctacgttatgaaggtgaaagtcgaagacggcggattccctcagcgttctagcacggcgattctgcaggtgagcgttactgacacgaatgacaaccaccccgtatttaaagagaccgaaatcgaggtctctattcccgagaatgcacccgtcggaacatccgttacccagctgcacgcaacagacgccgacattggtgagaacgccaagattcacttctctttttcaaacttagtgtccaatattgcaaggcgattgttccatttaaatgcgacgacaggcctgatcacaattaaggaaccactggacagggaagagactcccaaccataagctgctggtgctggcctccgatggcggcctgatgcctgcacgcgccatggttctggtgaacgttacagatgtaaacgataacgtgccctccatcgacatacggtacatagtgaatcctgtgaatgatacggtcgtcctttcagaaaacattcctctgaacactaagatcgcgctgattactgtcaccgacaaggatgcagatcacaacggcagagtgacttgctttacagaccatgaaatcccctttaggctccggccggtattctccaaccagtttcttcttgaaaacgcggcgtacctcgactacgaaagcactaaggagtatgccataaagttgcttgctgctgatgcggggaagcctcccctgaatcagtccgccatgctgttcattaaggtcaaggacgaaaacgataacgctccagtcttcacgcaaagctttgtgaccgttagtattccagagaataattcccccgggattcagctcatgaaggtgagtgcaacagatgcagactcaggcccaaacgctgaaatcaactatttgttaggtccggacgccccccccgaattttctctggacaggcggaccggcatgctgaccgtcgtgaaaaaactggaccgcgaaaaggaagacaaatatctgttcaccatcctggctaaggacaatggagtacctccattaacatcaaatgtcactgtctttgtgagcatcattgaccagaacgacaacagccctgtgttcacacacaacgaatacaaattttacgtaccagagaatctgccacgacatggtacagttggattaattacagtgacggaccctgattacggggataactcagccgtgacacttagtattctggacgagaatgacgattttacaatcgatagccagacaggcgtcatccgccccaatatcagttttgatagagaaaaacaggagagttatactttttacgtaaaggccgaagacggggggcgagttagtcggtccagtagtgctaaagtgactatcaatgtcgtcgatgtgaatgataataaacccgtgtttattgtccctccctacaattattcatacgagctggtattgcctagcaccaaccctggcacagtggtttttcaggttatcgccgtcgacaacgacaccggaatgaacgctgaggtgcgatattctatcgtgggtggaaacaccagagatctgtttgccattgatcaagagaccgggaacatcacactcatggaaaagtgcgacgtcaccgatctggggctccatagggtgctggtcaaggcaaatgacctcggccagcccgacagcctctttagtgtcgtgatcgtcaacctgttcgttaatgagtccgtaactaacgccacactgatcaacgagcttgtgcggaagtcaatcgaggccccagtgacaccgaacaccgagatcgccgatgtttcatcccctaccagcgattacgtgaagatcttggtggcggctgtggcgggaacgatcacggtcgtcgtagtgattttcattacggctgtggtgaggtgtcggcaggccccacatcttaaggcagcgcaaaagaacatgcagaactctgaatgggcaacgccaaacccggagaatagacaaatgatcatgatgaagaagaagaaaaaaaaaaagaaacatagccccaaaaacttactcctgaacgtggtgaccatcgaggaaaccaaggctgacgacgttgacagtgacggcaaccgcgtgaccctggatctccctatagatctcgaggagcagaccatgggaaagtacaattgggttaccacccccactacttttaaacccgactccccagatctagctcgccactacaaatcagctagtccacaaccagcattccagatccagcccgaaactccactgaacttgaagcaccacatcatccaggagctaccactggacaatacctttgttgcatgtgattccatctctaactgtagttcatcctccagtgacccatactcggtttcagactgtggctatcccgtgacaaccttcgaggtgccagtctccgttcatacacggccaacagatagtaggacatag

SEQ ID NO: 226373 - DNA, 3114 bp, Artificial Sequence
  derived and/or modified sequence
atgactgtgggcttcaatagtgacatcagcagcgttgtccgggttaatacgaccaattgccacaagtgcctcctgtcaggcacatacattttcgccgtgctcctggtttgcgttgtttttcactccggtgcccaggagaaaaattacactatccgcgaggagatccctgagaacgtactcattggcaatctccttaaggatctgaacttatcgctgattcctaacaagagcctcactacaactatgcagttcaagttggtttacaagacaggcgacgttcctctgattaggatcgaagaagacacaggcgaaatcttcacaacaggggctagaatagatcgtgagaagttatgcgctgggatcccgagggacgagcactgcttctatgaagtggaggttgccattctccccgacgagattttccggctagtgaaaatcagatttttaatagaagacatcaatgacaatgcgcctctcttcccagccacagtcattaacatttcgatccctgaaaactcagcaattaacagcaaatacaccctacctgcggcagtggatcctgacgtgggcattaacggagttcagaactacgaacttatcaagtctcagaacatttttgggttggatgtcatcgagacaccggaaggtgacaagatgccccagttgattgtacaaaaggaactggatcgtgaagagaaagacacttatgtcatgaaggtgaaggtcgaggacgggggttttccccagcggtcctcaacagccatcctgcaagtgtctgtgacggacacaaacgacaaccaccctgtgttcaaggagaccgagatcgaggtgtcgatccccgaaaatgctccagtgggaacctctgtcacccagctgcatgctaccgacgctgatattggggaaaacgctaaaattcacttcagcttctctaacttggtgtccaacatagctcgtagacttttccatctaaatgcgacaaccggtttgatcactataaaagagcccctggatcgggaggaaaccccaaaccacaaactacttgtgctggcgtctgacggcggactgatgcccgctcgggctatggtcctggtgaatgtgaccgacgtgaacgataacgttccctcaatcgacatcaggtacatagtcaaccctgtaaatgacaccgttgtgctgagtgagaacatcccactgaacaccaaaatcgcgctcattactgtcaccgacaaggacgccgatcataacggacgagttacctgttttaccgaccatgagatcccttttagactccggcctgtgttcagcaaccagttcctgcttgaaaatgcagcttatctcgactacgaatctaccaaagagtacgcgattaaactgcttgcggctgacgcaggtaaaccacctctaaaccagtcggccatgcttttcattaaggtaaaggatgaaaatgataacgcgcctgtgttcacacagtcctttgtgacagtatcaatccctgaaaacaacagccctgggatccagctcatgaaagtaagcgcaacagatgccgacagcggtcccaatgcagagattaattaccttctaggccctgatgctccccctgaattttccttggacagaagaacaggcatgcttactgtggtaaaaaaactggacagggaaaaggaagataaatacctgttcaccatcctcgccaaagataatggagtgccccctttgaccagcaatgtgacggtgttcgtctccattatcgaccagaatgacaattcaccagtattcacccacaacgagtacaaattttatgtcccggagaacctgcctaggcatggcacagtgggacttattacagtaactgaccccgattacggagacaatagcgctgtaacactctccatcctggacgaaaatgatgactttaccatcgattcgcaaaccggagtaatccgaccaaatatttccttcgaccgcgaaaagcaggagagttacactttttatgtaaaggcagaggatgggggaagggtgtccagatcttccagcgccaaagtaaccataaacgtagttgatgttaatgataacaaacccgtgtttattgttccgccatacaattacagctatgaattggttctgcccagcaccaatcccggaacagtggtattccaagtaattgccgtggataatgacacaggcatgaatgcagaggtccggtactctatagtggggggtaatacacgggatctattcgcaatcgatcaggaaactggaaacattaccctgatggagaagtgtgacgtgacagatcttggccttcaccgagtgttagtcaaggccaacgacctgggtcaacctgactcgctcttttccgtggtgatagtcaatttattcgtaaacgagtcggttacaaacgctacactgattaatgagctggtccggaagtctatagaggcccctgttacacctaacacagaaattgcagatgtttcttcccccactagtgactatgtaaaaattctggtggcagcagttgctggcactattacagtcgttgtggtgatttttataacagctgtggttcggtgtagacaggctcctcatctgaaagcggcacagaaaaacatgcagaacagcgagtgggcaacacccaaccctgagaatcgccaaatgatcatgatgaaaaaaaagaagaaaaagaaaaaacacagtcctaaaaacttattgctcaacgtggtgaccatcgaagaaacgaaagccgacgatgttgactccgatggcaatagggtgaccctagatttgccaatagaccttgaggagcagactatgggcaagtacaactgggtaactacccccacaacgtttaaacctgacagtcctgatctggctcgtcactataagtccgcttcaccacagccggctttccagattcagcctgaaacgccccttaatctgaagcaccacatcattcaagaactgccactggataacaccttcgtggcctgtgacagcatttctaactgtagttccagctcttctgacccctacagtgtgtctgactgtggctatccagtcactacattcgaggtgcctgtgtcggtgcatactcggccaacagatagccgaacctag

SEQ ID NO: 226374 - DNA, 4710 bp, Artificial Sequence
  derived and/or modified sequence
cccctttctccccctctgttaagtccctccccctcgccattcaaaagggctggctcggcactggctccttgcagtcggcgaactgtctgggcgggaggagccgtgagcagtagctgcactcagctgcccgcgcggcaaagaggaaggcaagccaaacagagtgcgcagagtggcagtgccagcggcgacacaggcagcacaggcagcccgggctgcctgaatagcctcagaaacaacctcagcgactccggctgctctgcggactgcgagctgtggcggtagagcccgctacagcagtcgcagtctccgtggagcgggcggaagccttttttctccctttcgtttacctcttcattctactctaaaggcatcgttattaggaaaatcctgttgtgaataagaaggattccacagatcacataccagagcggttttgcctcagctgctctcaactttgtaatcttgtgaagaagctgacaagcttggctgattgcagtgcactatgaggactgaatgacagtgggttttaattcagatatttcaagtgttgtgcgggttaatacaacaaactgtcacaagtgtttgttgtccgggacgtacattttcgcggtcctgctagtatgcgtggtgttccactctggcgcccaggagaaaaactacaccatccgagaagaaattccagaaaacgtcctgataggcaacttgttgaaagaccttaacttgtcgctgattccaaacaagtccttgacaactactatgcagttcaagctagtgtacaagaccggagatgtgccactgattcgaattgaagaggatactggtgagatcttcactaccggcgctcgcattgatcgtgagaaattatgtgctggtatcccaagggatgagcattgcttttatgaagtggaggttgccattttgccggatgaaatatttagactggttaagatacgttttctgatagaagatataaatgataatgcaccattgttcccagcaacagttatcaacatatcaattccagagaactcggctataaactctaaatatactctcccagcggctgttgatcctgacgtaggcataaacggagttcaaaactacgaactaattaagagtcaaaacatttttggcctcgatgtcattgaaacaccagaaggagacaagatgccacaactgattgttcaaaaggagttagatagggaagagaaggatacctatgtgatgaaagtaaaggttgaagatggtggctttcctcaaagatccagtactgctattttgcaagtaagtgttactgatacaaatgacaaccacccagtctttaaggagacagagattgaagtcagtataccagaaaatgctcctgtaggcacttcagtgacacagctccatgccacagatgctgacataggtgaaaatgccaagatccacttctctttcagcaatctagtctccaacattgccaggagattatttcacctcaatgccaccactggacttatcacaatcaaagaaccactggatagggaagaaacaccaaaccacaagttactggttttggcaagtgatggtggattgatgccagcaagagcaatggtgctggtaaatgttacagatgtcaatgataatgtcccatccattgacataagatacatcgtcaatcctgtcaatgacacagttgttctttcagaaaatattccactcaacaccaaaattgctctcataactgtgacggataaggatgcggaccataatggcagggtgacatgcttcacagatcatgaaattcctttcagattaaggccagtattcagtaatcagttcctcctggagaatgcagcatatcttgactatgagtccacaaaagaatatgccattaaattactggctgcagatgctggcaaacctcctttgaatcagtcagcaatgctcttcatcaaagtgaaagatgaaaatgacaatgctccagttttcacccagtctttcgtaactgtttctattcctgagaataactctcctggcatccagttgatgaaagtaagtgcaacggatgcagacagtgggcctaatgctgagatcaattacctgctaggccctgatgctccacctgaattcagcctggatcgtcgtacaggcatgctgactgtagtgaagaaactagatagagaaaaagaggataaatatttattcacaattctggcaaaagataatggggtaccacccttaaccagcaatgtcacagtctttgtaagcattattgatcagaatgacaatagcccagttttcactcacaatgaatacaaattctatgtcccagaaaaccttccaaggcatggtacagtaggactaatcactgtaactgatcctgattatggagacaattctgcagttacgctctccattttagatgagaatgatgacttcaccattgattcacaaactggtgtcatccgaccaaatatttcatttgatagagaaaaacaagaatcttacactttctatgtaaaggctgaggatggtggtagagtatcacgttcttcaagtgccaaagtaaccataaatgtggttgatgtcaatgacaacaaaccagttttcattgtccctccttacaactattcttatgaattggttctaccgtccactaatccaggcacagtggtctttcaggtaattgctgttgacaatgacactggcatgaatgcagaggttcgttacagcattgtaggaggaaacacaagagatctgtttgcaatcgaccaagaaacaggcaacataacattgatggagaaatgtgatgttacagaccttggtttacacagagtgttggtcaaagctaatgacttaggacagcctgattctctcttcagtgttgtaattgtcaatctgttcgtgaatgagtcagtgaccaatgctacactgattaatgaactggtgcgcaaaagcattgaagcaccagtgaccccaaatactgagatagctgatgtatcctcaccaactagtgactatgtcaagatcctggttgcagctgttgctggcaccataactgtcgttgtagttattttcatcactgctgtagtaagatgtcgccaggcaccacaccttaaggctgctcagaaaaacatgcagaattctgaatgggctaccccaaacccagaaaacaggcagatgataatgatgaagaaaaagaaaaagaagaagaagcattcccctaagaacctgctgcttaatgttgtcactattgaagaaactaaggcagatgatgttgacagtgatggaaacagagtcacactagaccttcctattgatctagaagagcaaacaatgggaaagtacaattgggtaactacacctactactttcaagcctgacagccctgatttggcccgacactacaaatctgcctctccacagcctgccttccaaattcagcctgaaactcccctgaatttgaagcaccacatcatccaagaactgcctctcgataacacctttgtggcctgtgactctatctccaattgttcctcaagcagttcagatccctacagcgtttctgactgtggctatccagtgacaaccttcgaggtacctgtgtccgtacacaccagaccgactgattccaggacatgaactattgaaatctgcagtgagatgtaactttctaggaacaacaaaattccattccccttccaaaaaatttcaatgattgtgatttcaaaattaggctaagatcattaattttgtaatctagatttcccattataaaagcaagcaaaaatcatcttaaaaatgatgtcctagtgaaccttgtgctttctttagctgtaatctggcaatggaaatttaaaatttatggaagagacagtgcagcgcaataacagagtactctcatgctgtttctctgtttgctctgaatcaacagccatgatgtaatataaggctgtcttggtgtatacacttatggttaatatatcagtcatgaaacatgcaattacttgccctgtctgattgttgaataattaaaacattatctccaggagtttggaagtgagctgaactagccaaactactctctgaaaggtatccagggcaagagacatttttaagaccccaaacaaacaaaaaacaaaaccaaaacactctggttcagtgttttgaaaatattgactaacataatattgctgagaaaatcatttttattacccaccactctgcttaaaagttgagtgggccgggcgcggtggctcacgcctgtaattccagcactttgggaggccgaggcgggtggatcacgaggtcaggatattgagaccatcctggctaacatggtgaaaccccatctccactaaaaatacaaaaaattagctgggcgtggtggcgggcgcctgtagtcccagctactcgggaggctgaggcaggagaatggcgtgaacccgggaggcggagcttgcagtgagccgagatggcgccactgcactccagcctgggtgacagagcaagactctgtctcaaaaagaaaaaaatgttcagtgatagaaaataattttactaggtttttatgttgattgtactcatgctgttccactccttttaattattaaaaagttatttttggctgggtgtggtggctcatacctgtaatcccagcactttgggaggccgaggcgggtggatcacctgaggtcaggagttcaagaccagtctggccaacat

SEQ ID NO: 226375 - DNA, 3114 bp, Artificial Sequence
  derived and/or modified sequence
atgaccgtgggcttcaacagcgacatcagcagcgtggtgagagtgaacaccaccaactgccacaagtgcctgctgagcggcacctacatcttcgccgtgctgctggtgtgcgtggtgttccacagcggcgcccaggagaagaactacaccatcagagaggagatccccgagaacgtgctgatcggcaacctgctgaaggacctgaacctgagcctgatccccaacaagagcctgaccaccaccatgcagttcaagctggtgtacaagaccggcgacgtgcccctgatcagaatcgaggaggacaccggcgagatcttcaccaccggcgccagaatcgacagagagaagctgtgcgccggcatccccagagacgagcactgcttctacgaggtggaggtggccatcctgcccgacgagatcttcagactggtgaagatcagattcctgatcgaggacatcaacgacaacgcccccctgttccccgccaccgtgatcaacatcagcatccccgagaacagcgccatcaacagcaagtacaccctgcccgccgccgtggaccccgacgtgggcatcaacggcgtgcagaactacgagctgatcaagagccagaacatcttcggcctggacgtgatcgagacccccgagggcgacaagatgccccagctgatcgtgcagaaggagctggacagagaggagaaggacacctacgtgatgaaggtgaaggtggaggacggcggcttcccccagagaagcagcaccgccatcctgcaggtgagcgtgaccgacaccaacgacaaccaccccgtgttcaaggagaccgagatcgaggtgagcatccccgagaacgcccccgtgggcaccagcgtgacccagctgcacgccaccgacgccgacatcggcgagaacgccaagatccacttcagcttcagcaacctggtgagcaacatcgccagaagactgttccacctgaacgccaccaccggcctgatcaccatcaaggagcccctggacagagaggagacccccaaccacaagctgctggtgctggccagcgacggcggcctgatgcccgccagagccatggtgctggtgaacgtgaccgacgtgaacgacaacgtgcccagcatcgacatcagatacatcgtgaaccccgtgaacgacaccgtggtgctgagcgagaacatccccctgaacaccaagatcgccctgatcaccgtgaccgacaaggacgccgaccacaacggcagagtgacctgcttcaccgaccacgagatccccttcagactgagacccgtgttcagcaaccagttcctgctggagaacgccgcctacctggactacgagagcaccaaggagtacgccatcaagctgctggccgccgacgccggcaagccccccctgaaccagagcgccatgctgttcatcaaggtgaaggacgagaacgacaacgcccccgtgttcacccagagcttcgtgaccgtgagcatccccgagaacaacagccccggcatccagctgatgaaggtgagcgccaccgacgccgacagcggccccaacgccgagatcaactacctgctgggccccgacgccccccccgagttcagcctggacagaagaaccggcatgctgaccgtggtgaagaagctggacagagagaaggaggacaagtacctgttcaccatcctggccaaggacaacggcgtgccccccctgaccagcaacgtgaccgtgttcgtgagcatcatcgaccagaacgacaacagccccgtgttcacccacaacgagtacaagttctacgtgcccgagaacctgcccagacacggcaccgtgggcctgatcaccgtgaccgaccccgactacggcgacaacagcgccgtgaccctgagcatcctggacgagaacgacgacttcaccatcgacagccagaccggcgtgatcagacccaacatcagcttcgacagagagaagcaggagagctacaccttctacgtgaaggccgaggacggcggcagagtgagcagaagcagcagcgccaaggtgaccatcaacgtggtggacgtgaacgacaacaagcccgtgttcatcgtgcccccctacaactacagctacgagctggtgctgcccagcaccaaccccggcaccgtggtgttccaggtgatcgccgtggacaacgacaccggcatgaacgccgaggtgagatacagcatcgtgggcggcaacaccagagacctgttcgccatcgaccaggagaccggcaacatcaccctgatggagaagtgcgacgtgaccgacctgggcctgcacagagtgctggtgaaggccaacgacctgggccagcccgacagcctgttcagcgtggtgatcgtgaacctgttcgtgaacgagagcgtgaccaacgccaccctgatcaacgagctggtgagaaagagcatcgaggcccccgtgacccccaacaccgagatcgccgacgtgagcagccccaccagcgactacgtgaagatcctggtggccgccgtggccggcaccatcaccgtggtggtggtgatcttcatcaccgccgtggtgagatgcagacaggccccccacctgaaggccgcccagaagaacatgcagaacagcgagtgggccacccccaaccccgagaacagacagatgatcatgatgaagaagaagaagaagaagaagaagcacagccccaagaacctgctgctgaacgtggtgaccatcgaggagaccaaggccgacgacgtggacagcgacggcaacagagtgaccctggacctgcccatcgacctggaggagcagaccatgggcaagtacaactgggtgaccacccccaccaccttcaagcccgacagccccgacctggccagacactacaagagcgccagcccccagcccgccttccagatccagcccgagacccccctgaacctgaagcaccacatcatccaggagctgcccctggacaacaccttcgtggcctgcgacagcatcagcaactgcagcagcagcagcagcgacccctacagcgtgagcgactgcggctaccccgtgaccaccttcgaggtgcccgtgagcgtgcacaccagacccaccgacagcagaacctag

SEQ ID NO: 226376 - protein, 1048 aa, Artificial Sequence
  derived and/or modified sequence
MFRVGFLIISSSSSLSPLLLVSVVRVNTTNCHKCLLSGTYIFAVLLVCVVFHSGAQEKNYTIREEIPENVLIGNLLKDLNLSLIPNKSLTTTMQFKLVYKTGDVPLIRIEEDTGEIFTTGARIDREKLCAGIPRDEHCFYEVEVAILPDEIFRLVKIRFLIEDINDNAPLFPATVINISIPENSAINSKYTLPAAVDPDVGINGVQNYELIKSQNIFGLDVIETPEGDKMPQLIVQKELDREEKDTYVMKVKVEDGGFPQRSSTAILQVSVTDTNDNHPVFKETEIEVSIPENAPVGTSVTQLHATDADIGENAKIHFSFSNLVSNIARRLFHLNATTGLITIKEPLDREETPNHKLLVLASDGGLMPARAMVLVNVTDVNDNVPSIDIRYIVNPVNDTVVLSENIPLNTKIALITVTDKDADHNGRVTCFTDHEIPFRLRPVFSNQFLLENAAYLDYESTKEYAIKLLAADAGKPPLNQSAMLFIKVKDENDNAPVFTQSFVTVSIPENNSPGIQLMKVSATDADSGPNAEINYLLGPDAPPEFSLDRRTGMLTVVKKLDREKEDKYLFTILAKDNGVPPLTSNVTVFVSIIDQNDNSPVFTHNEYKFYVPENLPRHGTVGLITVTDPDYGDNSAVTLSILDENDDFTIDSQTGVIRPNISFDREKQESYTFYVKAEDGGRVSRSSSAKVTINVVDVNDNKPVFIVPPYNYSYELVLPSTNPGTVVFQVIAVDNDTGMNAEVRYSIVGGNTRDLFAIDQETGNITLMEKCDVTDLGLHRVLVKANDLGQPDSLFSVVIVNLFVNESVTNATLINELVRKSIEAPVTPNTEIADVSSPTSDYVKILVAAVAGTITVVVVIFITAVVRCRQAPHLKAAQKNMQNSEWATPNPENRQMIMMKKKKKKKKHSPKNLLLNVVTIEETKADDVDSDGNRVTLDLPIDLEEQTMGKYNWVTTPTTFKPDSPDLARHYKSASPQPAFQIQPETPLNLKHHIIQELPLDNTFVACDSISNCSSSSSDPYSVSDCGYPVTTFEVPVSVHTRPTDSRT

SEQ ID NO: 226377 - DNA, 3147 bp, Artificial Sequence
  derived and/or modified sequence
atgtttcgcgtaggtttccttattatctcctcatcctcttctcttagccccctccttctagtgagcgtggtacgcgtgaatacaaccaattgtcataaatgtcttctctcaggcacatacattttcgctgtgctgctcgtgtgcgtcgtgttccattcgggtgctcaggagaaaaactacaccatccgcgaggagatacccgagaatgtgctcataggaaacctccttaaagacctcaacctaagccttatccccaataaatcactgaccaccacaatgcagttcaaactggtgtataagactggggatgtgcctttgattaggatcgaggaggacacaggagaaatttttaccacaggagccaggattgatcgcgagaaactctgcgcgggaattccacgcgatgagcactgcttttacgaggttgaggtagctatcttacccgatgaaattttccggctggtcaaaattagatttttgattgaggatataaatgataacgcccctctcttcccggccacagtgatcaacatcagcattccagaaaattccgctattaattctaagtataccttgcccgccgccgtggacccagacgtggggattaacggagtgcagaattacgagctgatcaaatcccaaaacattttcggcctggatgtgatagagacccccgaaggcgacaagatgcctcagctaattgtgcagaaggaactggatagggaggaaaaagatacatacgtgatgaaagtgaaagtagaagacggcggcttcccacaacggagctctactgcgattctccaggtcagcgtgacagatacgaacgacaaccatcccgtctttaaagaaaccgagatcgaggtctctatccctgagaacgctcctgtcgggacgagcgtgacacagctccatgctacggatgctgacatcggggaaaatgctaagatccatttctccttctctaacttggtgtccaatatcgcacgccgactgttccatctgaatgctaccacaggcttgataacaataaaggaacctctggacagggaggagactcccaatcacaaactgctggtgctggcctccgatggaggactgatgcctgcccgcgctatggtgctggtcaacgttactgacgtgaacgacaatgttccatccatcgatattaggtacatcgtgaatcccgtgaatgatactgtagttcttagcgagaatatcccacttaataccaaaatcgccctaattaccgtcacggataaagatgcagaccacaacgggagagtgacatgtttcactgatcacgagattcctttccgcctcaggccagttttttccaaccagtttttgctggaaaatgcagcgtatcttgactacgaaagcactaaggaatatgccattaaacttctcgccgcagatgccggcaagcctccactgaatcagagtgctatgctgttcattaaagtaaaagacgaaaacgacaatgctcccgtgttcactcagagtttcgtcaccgtatctatacccgagaacaatagccccggcatccagcttatgaaagtctcagctaccgacgcagattcgggccctaatgccgagataaactacctgctaggccccgacgccccccctgagttcagcctggatcgccggactggtatgctgacagtggtcaaaaagctagatagggagaaggaagataagtacttgttcaccatcctggccaaagataacggggtgccacccctcacaagcaatgtcactgtgttcgtgagtatcattgaccagaacgacaattccccagtattcacccacaacgagtacaagttctatgtgcctgaaaacctgcctaggcatggcactgtgggtctgataactgtgacggaccctgattatggcgacaattcggccgtcactctatccattctcgatgagaacgatgattttactatcgactcacagactggcgtaataaggcccaacatcagcttcgatagagaaaagcaagagagctatacattctatgtgaaggcggaagacggtgggcgggttagtcggagtagcagtgccaaagtaactataaatgtggtggatgtcaatgacaacaagccagtctttatcgtgcctccttataattactcctatgagctggtgctaccatcaactaacccaggaacagtcgtttttcaggtcatcgccgtggacaatgatactgggatgaacgccgaggtccgctactctattgtcggaggcaatacacgagatctgtttgctattgaccaggaaaccggaaacattaccctgatggaaaaatgcgacgtgacagatctgggcctgcaccgagtgctcgtgaaggccaacgatctcgggcagccggacagcctgttctccgtggtcattgtgaacctatttgtgaacgaatcagtgactaacgccacactcattaacgagctcgtcaggaagtctatcgaggctccagtgacaccaaacacggagatcgctgacgtctcaagtccgacctccgattacgtcaaaattcttgtggccgctgtggcagggaccatcacggtcgttgtagtgatatttatcactgctgtcgtgcgttgccggcaggcaccccacttgaaagccgcgcagaaaaatatgcagaactcggaatgggctactcccaatccggaaaacaggcaaatgattatgatgaagaaaaaaaaaaagaagaagaagcactcccccaagaatttactgttaaacgtggtgacaattgaggagaccaaagctgatgacgtagactcagacggcaacagggtgaccctggatctaccgatcgatctggaagagcaaactatgggaaaatataattgggtgactacgcctactacttttaagcccgatagtcctgacttggccaggcactacaagagcgcatctccccaaccagcttttcagatccagccagaaacaccactgaacctgaagcatcatattatacaagaactgcctcttgacaacacattcgtggcttgcgattctatttctaattgctcttcttcatcctcagacccatactccgtatccgactgtggttacccagttacaactttcgaagtgcccgtaagcgttcatacacggcctactgatagtcggacctag

SEQ ID NO: 226378 - DNA, 3147 bp, Artificial Sequence
  derived and/or modified sequence
atgttccgggtgggcttcctgatcatcagcagcagcagcagcctgagccccctgctgctggtgtctgtggtgcgggtgaacaccaccaactgccacaagtgcctgctgagcggcacctacatctttgctgtgctgctggtgtgtgtggtgttccacagcggggcccaggagaagaactacaccatccgggaggagatcccagaaaatgtgctgattggcaacctgctgaaggacctgaacctgagcctcatccccaacaagagcctgaccaccaccatgcagttcaagctggtgtacaagacaggagatgtgcccctcatcagaattgaagaagatactggagagatcttcaccactggagccagaattgaccgggagaagctgtgtgccggcatccccagagatgagcactgcttctatgaggtggaggtggccatcctgcctgatgagatcttccggctggtgaagatccgcttcctgattgaggacatcaatgacaatgcccccctcttccctgccaccgtcatcaacatcagcatccctgagaacagcgccatcaacagcaagtacaccctgcctgctgctgtggaccctgatgtgggcatcaatggagtgcagaactatgagctgatcaagagccagaacatcttcggcctggatgtgattgagaccccagagggggacaagatgccccagctgattgtgcagaaggagctggaccgggaggagaaggacacctacgtgatgaaggtgaaggtggaggatggcggcttcccccagaggagcagcacagccatcctgcaggtgtctgtgacagacaccaatgacaaccaccctgtgttcaaggagacagaaattgaggtgtccatcccagaaaatgcccctgtgggcacctctgtgacccagctgcacgccacagatgctgacatcggggagaatgccaagatccacttctccttcagcaacctggtgagcaacatcgcccggcggctcttccacctgaatgccaccaccggcctcatcaccatcaaggagcccctggaccgggaggagacccccaaccacaagctgctggtgctggccagtgatggcggcctgatgcctgcccgggccatggtgctggtgaatgtgacagatgtgaatgacaacgtgcccagcattgacatccgctacatcgtgaaccctgtgaatgacacagtggtgctgtctgagaacatccccctgaacaccaagatcgccctgatcaccgtgacagacaaggatgctgaccacaacggccgggtgacctgcttcacagaccacgagatccccttccggctgcggcctgtgttcagcaaccagttcctgctggagaatgctgcctacctggactatgagagcaccaaggagtatgccatcaagctgctggccgcagatgctgggaagccacccctgaaccagagcgccatgctgttcatcaaggtgaaggatgaaaatgacaatgcccctgtgttcacccagagctttgtgacagtgtccatccctgagaacaacagccctggcatccagctgatgaaggtgtctgccacagatgctgacagcggccccaatgctgagatcaactacctgctgggcccagatgcccctcctgagttcagcctggacagaagaacaggcatgctgactgtggtgaagaagctggaccgggagaaggaggacaagtacctgttcaccatcctggccaaggacaatggagtgccccccctgaccagcaatgtgacagtgtttgtgtccatcatcgaccagaatgacaacagccctgtgttcacccacaatgagtacaagttctacgtgcctgagaacctgcccaggcatggcaccgtgggcctcatcaccgtgacagatcctgactatggagacaacagcgctgtgaccctgagcatcctggatgaaaatgatgacttcaccatcgacagccagacaggagtcatccggcccaacatcagctttgaccgggagaagcaggagagctacaccttctacgtgaaggccgaggatggcggccgggtgagccgcagcagcagcgccaaggtgaccatcaacgtggtggatgtgaatgacaacaagcctgtgttcatcgtgcccccctacaactacagctatgagctggtgctgcccagcaccaaccctggcaccgtggtgttccaggtgattgctgtggacaatgacaccggcatgaatgctgaggtgcgctacagcatcgtgggcggcaacacccgggacctgtttgccatcgaccaggagaccggcaacatcaccctgatggagaagtgtgatgtgacagacctgggcctgcaccgggtgctggtgaaggccaatgacctgggccagcctgacagcctcttctctgtggtgattgtgaacctgtttgtgaatgaatctgtgaccaatgccaccctcatcaatgagctggtgaggaagagcattgaggcccctgtgacccccaacacagaaattgctgatgtgagcagccccaccagtgactatgtgaagatcctggtggccgctgtggccggcaccatcaccgtggtggtggtgatcttcatcacagctgtggtgcgctgccggcaggccccccacctgaaggccgcccagaagaacatgcagaacagcgagtgggccacccccaaccctgagaaccggcagatgatcatgatgaagaagaagaagaagaagaagaagcacagccccaagaacctgctgctgaatgtggtgaccatcgaggagaccaaggcagatgatgtggacagtgatggcaacagagtgaccctggacctgcccatcgacctggaggagcagaccatgggcaagtacaactgggtgaccacccccaccaccttcaagccagacagcccagacctggcccggcactacaagagcgccagcccccagcctgccttccagatccagcctgagacccccctgaacctgaagcaccacatcatccaggagctgcccctggacaacacctttgtggcctgtgacagcatcagcaactgcagcagcagcagcagtgacccctacagcgtgtctgactgtggctaccctgtgaccacctttgaggtgcctgtgtctgtgcacacccggcccacagacagcaggacatag

SEQ ID NO: 226379 - DNA, 3147 bp, Artificial Sequence
  derived and/or modified sequence
atgttccgggtgggcttcctgatcatcagcagcagcagcagcctgagccctctattactcgtgtcagtggttagagtaaacactaccaactgtcataagtgcttactatcaggaacctacatcttcgccgtgctacttgtatgcgtcgttttccactctggggcacaggagaaaaactacactatacgggaagagatccctgagaatgtgctcatcggtaacctccttaaagatctcaacctctccctgattcccaacaaaagcttgacaactacgatgcagttcaagctcgtttacaaaaccggagacgttccactcatccgcatagaggaagacacaggcgagatcttcaccaccggcgccagaattgacagggaaaagctctgtgcaggaatcccacgagacgagcactgtttttatgaagtcgaggtcgccattctgccagacgagattttcagactggtcaagatcagatttcttatcgaggacattaatgataacgcaccgctctttccggctacagtgatcaatatctccatccccgagaactcagcgatcaactctaagtatactttgcccgcagccgtagacccggatgtggggatcaacggagtacagaattatgaactgataaagagccaaaacatattcggtctcgatgtgattgagactcccgaaggcgacaaaatgccccagcttattgtgcagaaggaactggatagagaggaaaaggacacttacgtgatgaaagtgaaagttgaggacggcggtttccctcagaggtcctccacagccatcctgcaagtgtccgtgactgatacaaatgataatcaccctgtgtttaaagagacagagatagaagtgtctatacccgaaaatgcaccggtgggaacaagcgtcactcagctgcacgccaccgatgctgatatcggcgagaatgccaagatacatttcagcttcagcaatttggtatctaatatcgccagacgcctcttccatctgaatgctacaacaggcctgatcaccataaaggaaccactggatagggaggaaacgccaaatcacaagttgctggtgctggcctccgacggtggactaatgcctgcgcgtgcaatggtgttggttaatgttaccgacgtcaatgataatgtcccatctatagacatccgctatattgtcaatccagtaaatgatactgttgtactgtccgaaaatatacccctcaacacgaaaatagccctcattactgttacggataaggatgcagaccataatggtagggtaacgtgctttacagaccacgagattccattccggttgagacccgtcttttccaatcaattcttgctcgagaatgcagcctacttggactacgagagcaccaaggagtatgctattaagctcctggccgccgacgccggcaagcctccacttaaccagtccgcgatgctctttattaaagtgaaggacgagaatgacaacgctcccgtgtttacgcagagtttcgtaactgtaagcataccggaaaacaattctccgggaatccagctcatgaaagtcagcgccaccgatgcggactccggcccaaacgctgagattaattatctcctcgggccagatgcacctcctgaatttagcttggatagacggaccgggatgctgaccgtggtgaagaaactggacagagagaaagaggataagtatctgtttacaatcctcgccaaggacaacggagtccccccgcttactagcaacgttaccgtgtttgtctcaattatcgatcaaaacgataatagcccggtgttcacccacaacgagtacaaattttacgtccccgagaacctccctagacatggaaccgtcgggctgattacagtaactgatccagactacggcgacaactccgcagtgaccctgtcaattctggatgaaaatgacgatttcacaatcgactcccaaacaggtgtgattagaccgaacatatcattcgatagggagaagcaggaaagctacactttctatgtgaaggccgaagacggaggtcgtgttagtagaagtagttcagcgaaggttactatcaacgtcgttgacgtgaacgataataagccagtcttcatcgtgcccccatacaattacagttatgagttagtacttccgtccacgaaccccggaacagttgtattccaagttattgccgtggataatgatacgggcatgaatgccgaggtcagatactctattgttggcgggaacactcgggacctgttcgcaattgaccaggaaaccggtaacattaccctgatggagaagtgcgatgtcaccgacctggggttgcatcgggtcttagttaaggccaatgatcttggacagcccgattccctgttctcagtggttattgtgaacctgttcgtaaacgaaagcgtgaccaacgcaaccctcatcaacgaactggtgcgcaaaagcatcgaggcccccgtcactcctaacactgaaattgccgacgtcagctcgcccacaagcgattatgtgaagatcttggtcgccgcagtcgcgggcactataacagtggtagttgtgattttcataaccgctgtggtacgctgccggcaggccccacacctgaaagctgcccaaaaaaatatgcagaactcagagtgggccaccccgaatccagaaaaccgtcagatgatcatgatgaagaaaaaaaaaaaaaagaagaaacactcccctaagaatctgctcctgaacgtggtgacaatcgaagaaacaaaggcagacgacgtagattcagacggcaatcgcgtcacccttgacttacccattgacctcgaagagcaaactatgggtaaatataactgggtgacgacaccaacaacttttaaacctgattcaccagatttagctagacattataagagtgctagtccacaaccagcctttcaaatacagcccgaaacacccctgaatcttaaacatcacatcatccaagaactccccctcgacaacaccttcgtggcgtgcgactccatctctaattgctcctcttcaagctccgacccctattcagtctcagactgtgggtacccagtgaccacattcgaggtgcctgtgtccgtccacaccaggccgaccgatagtagaacatag

SEQ ID NO: 226380 - DNA, 3147 bp, Artificial Sequence
  derived and/or modified sequence
atgttccgcgtgggatttttgattatatcttcctcctccagcctgagccctctacttctggtttctgtggtgcgcgttaacacaacaaattgtcacaaatgcctcctctccggaacatatatctttgccgtcctcctggtatgtgtggtgttccactcaggtgctcaggagaaaaattacacaatccgcgaggaaattcctgagaacgttctaatcggtaacttactaaaggatctaaacttgagcctaatccctaataaaagccttactacaaccatgcagttcaagctggtgtacaagactggcgacgtccccctgattcgaatcgaagaggatactggcgaaatcttcactacaggagcacgaattgacagagagaagctttgcgcgggaattcccagagatgagcactgcttttatgaagtcgaagtggccatcctgcccgacgagattttccgcctcgttaagatcagatttctaatcgaagacatcaacgataatgctccactcttcccagcgactgtcatcaacatcagcattccggaaaactcggcgatcaactcgaaatacactctcccagctgccgtggacccagacgtcggaatcaacggtgttcagaactatgagctgatcaagtcacagaatatctttggcctggacgtaattgagactcccgagggcgataagatgccacagctgattgtacagaaagagttggaccgcgaagagaaagatacctacgtgatgaaagtgaaagttgaagatggcggattccctcagagaagttccaccgcaatcctgcaggtaagcgtgactgataccaacgacaatcacccagtctttaaggaaacggagatcgaagtaagcatacccgaaaacgcccctgtgggaactagtgtgacccagcttcacgcgacagacgcagacatcggcgagaatgcaaaaatccatttctccttctccaatctggtctctaatatcgccaggcgcctatttcatcttaacgcgaccaccggactgattaccattaaggagcccctcgacagagaagaaactcctaatcacaagcttctggttctggcttcagatggtggtttgatgcctgctcgggctatggtccttgtgaatgtcacagacgtgaatgacaatgtgcccagcattgacatcagatacattgtgaacccagtgaatgatacagttgtgctttccgagaatattcccctgaatacaaagattgccctcatcaccgtgactgataaagacgctgaccataacggtagagttacttgttttacagaccacgaaatcccttttaggctccgccctgttttcagcaatcagttcctgctagagaatgctgcctacttggattacgaaagtactaaagagtacgcgatcaaactcctcgctgctgacgcaggcaagccccctttgaatcagagcgctatgctgtttattaaagtcaaggatgaaaacgataatgcgcctgtctttacccagtccttcgtcaccgtctctatcccggagaacaactcacccggtatacagctgatgaaggtgtccgccacagatgctgattccggcccaaacgcagagatcaactacttgttggggccagatgccccacctgagttctccctagatagaagaacaggtatgttaaccgttgtgaaaaaacttgaccgcgagaaagaggacaagtatctgtttacaattcttgctaaggacaatggggttcctcctctcaccagtaacgtgacggtgtttgtgtcgatcatcgaccagaacgacaattcccctgttttcacacacaacgagtacaagttctatgtgccggagaacttaccccgacatgggactgtgggacttatcacggttaccgacccagattatggcgataacagtgccgtaaccctaagtatacttgacgaaaacgacgactttactatcgattcccagactggcgttattagaccgaacatcagcttcgaccgggaaaaacaggaatcctacactttctatgtcaaggccgaagacggcggacgtgtctcaaggtcttcttctgcaaaagttaccatcaatgtcgtcgacgtgaatgataataagccggtgtttattgtgcccccatataactactcttacgagctggtactgccctcgacaaaccctggaaccgtggtttttcaggtgattgccgtagataacgacaccggcatgaacgctgaggtgcgttatagcattgtcggcggtaacacaagagatctgtttgccattgaccaggaaacgggcaatattacgctgatggaaaagtgcgatgtgacagatttgggcttgcaccgcgtgctggtgaaagcgaacgacctgggccagcccgactctctgtttagcgtggttatagtcaacctgttcgtaaacgagagtgttactaacgccactctgattaacgaactcgtgagaaaatctatcgaggccccagtaacaccaaacactgagatcgctgatgtgtcctctccgacttctgactatgtgaagatcctagttgccgcagtggcaggaactattaccgttgttgtggtcattttcatcactgctgtggtgcgctgtcgtcaggccccacacttaaaagctgctcagaagaacatgcagaattcagagtgggccacccccaaccctgagaatcgccagatgatcatgatgaagaagaagaagaagaagaagaagcactcaccgaagaatctgctcttgaatgtggttaccatagaagagacaaaagcagacgatgtggatagcgacgggaaccgggtaacacttgatttacctatagatctggaggaacagacgatgggcaaatacaactgggtaacaaccccaaccaccttcaaaccggatagtcccgatcttgcacgtcactacaagtcagcgtcacctcagccagccttccagattcaacccgagacccccctgaatcttaagcaccacataatacaggagttacctctcgataacacgttcgtcgcgtgtgacagtattagcaattgttcatccagcagctctgacccatacagtgtttctgactgcggctatccagtcactacttttgaggtaccggtttccgtgcatacccgccctactgacagtcgaacatag

SEQ ID NO: 226381 - DNA, 4220 bp, Artificial Sequence
  derived and/or modified sequence
ggtggtccagtacctccaaagatatggaatacactcctgaaatatcctgaaaccttttttttttcagaatcctttaataagcagttatgtcaatctgaaagttgcttacttgtactttatattaatagctattcttgtttttcttatccaaagaaaaatcctctaatccccttttcacatgatagttgttaccatgtttaggcgttagtcacatcaacccctctcctctcccaaacttctcttcttcaaatcaaactttattagtccctcctttataatgattccttgcctccttttatccagatcaattttttttcactttgatgcccagagctgaagaaatggactattgtataaattattcattgccaagagaataattgcattttaaacccatgttataacaaagaataatgattatattttgtgatttgtaacaaataccctttattttcccttaactattgaattaaatattttaattatttgtattctctttaactatcttggtatattaaagtattatcttttatatatttatcaatggtggacacttttataggtactctgtgtcatttttgatactgtaggtatcttatttcatttatctttattcttaatgtacgaattcataatatttgattcagaacagatttatcactaattaacagagtgtcaattatgctaacatctcatttactgattttaatttaaaacagtttttgttaacatgcatgtttagggttggcttcttaataatttcttcttcctcttctctctctcctcttcttttggtcagtgttgtgcgggttaatacaacaaactgtcacaagtgtttgttgtccgggacgtacattttcgcggtcctgctagtatgcgtggtgttccactctggcgcccaggagaaaaactacaccatccgagaagaaattccagaaaacgtcctgataggcaacttgttgaaagaccttaacttgtcgctgattccaaacaagtccttgacaactactatgcagttcaagctagtgtacaagaccggagatgtgccactgattcgaattgaagaggatactggtgagatcttcactaccggcgctcgcattgatcgtgagaaattatgtgctggtatcccaagggatgagcattgcttttatgaagtggaggttgccattttgccggatgaaatatttagactggttaagatacgttttctgatagaagatataaatgataatgcaccattgttcccagcaacagttatcaacatatcaattccagagaactcggctataaactctaaatatactctcccagcggctgttgatcctgacgtaggcataaacggagttcaaaactacgaactaattaagagtcaaaacatttttggcctcgatgtcattgaaacaccagaaggagacaagatgccacaactgattgttcaaaaggagttagatagggaagagaaggatacctatgtgatgaaagtaaaggttgaagatggtggctttcctcaaagatccagtactgctattttgcaagtaagtgttactgatacaaatgacaaccacccagtctttaaggagacagagattgaagtcagtataccagaaaatgctcctgtaggcacttcagtgacacagctccatgccacagatgctgacataggtgaaaatgccaagatccacttctctttcagcaatctagtctccaacattgccaggagattatttcacctcaatgccaccactggacttatcacaatcaaagaaccactggatagggaagaaacaccaaaccacaagttactggttttggcaagtgatggtggattgatgccagcaagagcaatggtgctggtaaatgttacagatgtcaatgataatgtcccatccattgacataagatacatcgtcaatcctgtcaatgacacagttgttctttcagaaaatattccactcaacaccaaaattgctctcataactgtgacggataaggatgcggaccataatggcagggtgacatgcttcacagatcatgaaattcctttcagattaaggccagtattcagtaatcagttcctcctggagaatgcagcatatcttgactatgagtccacaaaagaatatgccattaaattactggctgcagatgctggcaaacctcctttgaatcagtcagcaatgctcttcatcaaagtgaaagatgaaaatgacaatgctccagttttcacccagtctttcgtaactgtttctattcctgagaataactctcctggcatccagttgatgaaagtaagtgcaacggatgcagacagtgggcctaatgctgagatcaattacctgctaggccctgatgctccacctgaattcagcctggatcgtcgtacaggcatgctgactgtagtgaagaaactagatagagaaaaagaggataaatatttattcacaattctggcaaaagataatggggtaccacccttaaccagcaatgtcacagtctttgtaagcattattgatcagaatgacaatagcccagttttcactcacaatgaatacaaattctatgtcccagaaaaccttccaaggcatggtacagtaggactaatcactgtaactgatcctgattatggagacaattctgcagttacgctctccattttagatgagaatgatgacttcaccattgattcacaaactggtgtcatccgaccaaatatttcatttgatagagaaaaacaagaatcttacactttctatgtaaaggctgaggatggtggtagagtatcacgttcttcaagtgccaaagtaaccataaatgtggttgatgtcaatgacaacaaaccagttttcattgtccctccttacaactattcttatgaattggttctaccgtccactaatccaggcacagtggtctttcaggtaattgctgttgacaatgacactggcatgaatgcagaggttcgttacagcattgtaggaggaaacacaagagatctgtttgcaatcgaccaagaaacaggcaacataacattgatggagaaatgtgatgttacagaccttggtttacacagagtgttggtcaaagctaatgacttaggacagcctgattctctcttcagtgttgtaattgtcaatctgttcgtgaatgagtcagtgaccaatgctacactgattaatgaactggtgcgcaaaagcattgaagcaccagtgaccccaaatactgagatagctgatgtatcctcaccaactagtgactatgtcaagatcctggttgcagctgttgctggcaccataactgtcgttgtagttattttcatcactgctgtagtaagatgtcgccaggcaccacaccttaaggctgctcagaaaaacatgcagaattctgaatgggctaccccaaacccagaaaacaggcagatgataatgatgaagaaaaagaaaaagaagaagaagcattcccctaagaacctgctgcttaatgttgtcactattgaagaaactaaggcagatgatgttgacagtgatggaaacagagtcacactagaccttcctattgatctagaagagcaaacaatgggaaagtacaattgggtaactacacctactactttcaagcctgacagccctgatttggcccgacactacaaatctgcctctccacagcctgccttccaaattcagcctgaaactcccctgaatttgaagcaccacatcatccaagaactgcctctcgataacacctttgtggcctgtgactctatctccaattgttcctcaagcagttcagatccctacagcgtttctgactgtggctatccagtgacaaccttcgaggtacctgtgtccgtacacaccagaccgactgattccaggacatgaactattgaaatctgcagtgagatgtaactttctaggaacaacaaaattccattccccttccaaaaaatttcaatgattgtgatttcaaaattaggctaagatcattaattttgtaatctagatttcccattataaaagcaagcaaaaatcatcttaaaaatgatgtcctagtgaaccttgtgctttctttagctgtaatctggcaatggaaatttaaaatttatggaagagacagtgcagcgcaataacagagtactctcatgctgtttctctgtttgctctgaatcaacagccatgatgtaatataaggctgtcttggtgtatacacttatggttaat

SEQ ID NO: 226382 - DNA, 3147 bp, Artificial Sequence
  derived and/or modified sequence
atgttcagagtgggcttcctgatcatcagcagcagcagcagcctgagccccctgctgctggtgagcgtggtgagagtgaacaccaccaactgccacaagtgcctgctgagcggcacctacatcttcgccgtgctgctggtgtgcgtggtgttccacagcggcgcccaggagaagaactacaccatcagagaggagatccccgagaacgtgctgatcggcaacctgctgaaggacctgaacctgagcctgatccccaacaagagcctgaccaccaccatgcagttcaagctggtgtacaagaccggcgacgtgcccctgatcagaatcgaggaggacaccggcgagatcttcaccaccggcgccagaatcgacagagagaagctgtgcgccggcatccccagagacgagcactgcttctacgaggtggaggtggccatcctgcccgacgagatcttcagactggtgaagatcagattcctgatcgaggacatcaacgacaacgcccccctgttccccgccaccgtgatcaacatcagcatccccgagaacagcgccatcaacagcaagtacaccctgcccgccgccgtggaccccgacgtgggcatcaacggcgtgcagaactacgagctgatcaagagccagaacatcttcggcctggacgtgatcgagacccccgagggcgacaagatgccccagctgatcgtgcagaaggagctggacagagaggagaaggacacctacgtgatgaaggtgaaggtggaggacggcggcttcccccagagaagcagcaccgccatcctgcaggtgagcgtgaccgacaccaacgacaaccaccccgtgttcaaggagaccgagatcgaggtgagcatccccgagaacgcccccgtgggcaccagcgtgacccagctgcacgccaccgacgccgacatcggcgagaacgccaagatccacttcagcttcagcaacctggtgagcaacatcgccagaagactgttccacctgaacgccaccaccggcctgatcaccatcaaggagcccctggacagagaggagacccccaaccacaagctgctggtgctggccagcgacggcggcctgatgcccgccagagccatggtgctggtgaacgtgaccgacgtgaacgacaacgtgcccagcatcgacatcagatacatcgtgaaccccgtgaacgacaccgtggtgctgagcgagaacatccccctgaacaccaagatcgccctgatcaccgtgaccgacaaggacgccgaccacaacggcagagtgacctgcttcaccgaccacgagatccccttcagactgagacccgtgttcagcaaccagttcctgctggagaacgccgcctacctggactacgagagcaccaaggagtacgccatcaagctgctggccgccgacgccggcaagccccccctgaaccagagcgccatgctgttcatcaaggtgaaggacgagaacgacaacgcccccgtgttcacccagagcttcgtgaccgtgagcatccccgagaacaacagccccggcatccagctgatgaaggtgagcgccaccgacgccgacagcggccccaacgccgagatcaactacctgctgggccccgacgccccccccgagttcagcctggacagaagaaccggcatgctgaccgtggtgaagaagctggacagagagaaggaggacaagtacctgttcaccatcctggccaaggacaacggcgtgccccccctgaccagcaacgtgaccgtgttcgtgagcatcatcgaccagaacgacaacagccccgtgttcacccacaacgagtacaagttctacgtgcccgagaacctgcccagacacggcaccgtgggcctgatcaccgtgaccgaccccgactacggcgacaacagcgccgtgaccctgagcatcctggacgagaacgacgacttcaccatcgacagccagaccggcgtgatcagacccaacatcagcttcgacagagagaagcaggagagctacaccttctacgtgaaggccgaggacggcggcagagtgagcagaagcagcagcgccaaggtgaccatcaacgtggtggacgtgaacgacaacaagcccgtgttcatcgtgcccccctacaactacagctacgagctggtgctgcccagcaccaaccccggcaccgtggtgttccaggtgatcgccgtggacaacgacaccggcatgaacgccgaggtgagatacagcatcgtgggcggcaacaccagagacctgttcgccatcgaccaggagaccggcaacatcaccctgatggagaagtgcgacgtgaccgacctgggcctgcacagagtgctggtgaaggccaacgacctgggccagcccgacagcctgttcagcgtggtgatcgtgaacctgttcgtgaacgagagcgtgaccaacgccaccctgatcaacgagctggtgagaaagagcatcgaggcccccgtgacccccaacaccgagatcgccgacgtgagcagccccaccagcgactacgtgaagatcctggtggccgccgtggccggcaccatcaccgtggtggtggtgatcttcatcaccgccgtggtgagatgcagacaggccccccacctgaaggccgcccagaagaacatgcagaacagcgagtgggccacccccaaccccgagaacagacagatgatcatgatgaagaagaagaagaagaagaagaagcacagccccaagaacctgctgctgaacgtggtgaccatcgaggagaccaaggccgacgacgtggacagcgacggcaacagagtgaccctggacctgcccatcgacctggaggagcagaccatgggcaagtacaactgggtgaccacccccaccaccttcaagcccgacagccccgacctggccagacactacaagagcgccagcccccagcccgccttccagatccagcccgagacccccctgaacctgaagcaccacatcatccaggagctgcccctggacaacaccttcgtggcctgcgacagcatcagcaactgcagcagcagcagcagcgacccctacagcgtgagcgactgcggctaccccgtgaccaccttcgaggtgcccgtgagcgtgcacaccagacccaccgacagcagaacctag

SEQ ID NO: 226383 - protein, 1340 aa, Artificial Sequence
  derived and/or modified sequence
MFRVGFLIISSSSSLSPLLLVSVVRVNTTNCHKCLLSGTYIFAVLLVCVVFHSGAQEKNYTIREEIPENVLIGNLLKDLNLSLIPNKSLTTTMQFKLVYKTGDVPLIRIEEDTGEIFTTGARIDREKLCAGIPRDEHCFYEVEVAILPDEIFRLVKIRFLIEDINDNAPLFPATVINISIPENSAINSKYTLPAAVDPDVGINGVQNYELIKSQNIFGLDVIETPEGDKMPQLIVQKELDREEKDTYVMKVKVEDGGFPQRSSTAILQVSVTDTNDNHPVFKETEIEVSIPENAPVGTSVTQLHATDADIGENAKIHFSFSNLVSNIARRLFHLNATTGLITIKEPLDREETPNHKLLVLASDGGLMPARAMVLVNVTDVNDNVPSIDIRYIVNPVNDTVVLSENIPLNTKIALITVTDKDADHNGRVTCFTDHEIPFRLRPVFSNQFLLENAAYLDYESTKEYAIKLLAADAGKPPLNQSAMLFIKVKDENDNAPVFTQSFVTVSIPENNSPGIQLMKVSATDADSGPNAEINYLLGPDAPPEFSLDRRTGMLTVVKKLDREKEDKYLFTILAKDNGVPPLTSNVTVFVSIIDQNDNSPVFTHNEYKFYVPENLPRHGTVGLITVTDPDYGDNSAVTLSILDENDDFTIDSQTGVIRPNISFDREKQESYTFYVKAEDGGRVSRSSSAKVTINVVDVNDNKPVFIVPPYNYSYELVLPSTNPGTVVFQVIAVDNDTGMNAEVRYSIVGGNTRDLFAIDQETGNITLMEKCDVTDLGLHRVLVKANDLGQPDSLFSVVIVNLFVNESVTNATLINELVRKSIEAPVTPNTEIADVSSPTSDYVKILVAAVAGTITVVVVIFITAVVRCRQAPHLKAAQKNMQNSEWATPNPENRQMIMMKKKKKKKKHSPKNLLLNVVTIEETKADDVDSDGNRVTLDLPIDLEEQTMGKYNWVTTPTTFKPDSPDLARHYKSASPQPAFQIQPETPLNLKHHIIQELPLDNTFVACDSISNCSSSSSDPYSVSDCGYPVTTFEVPVSVHTRPSQRRVTFHLPEGSQESSSDGGLGDHDAGSLTSTSHGLPLGYPQEEYFDRATPSNRTEGDGNSDPESNFISGMREKITVQPTVEEASDNCTQECLIYGHSDACWMPASLDHSSSSQAQASALCHSPPLSQASTQHHSPPVTQTIVLCHSPPVTQTIALCHSPPPIQVSALHHSPPLVQGTALHHSPPSAQASALCYSPPLAQAAAISHSSSLPQVIALHRSQAQSSVSLQQGWVQGANGLCSVDQGVQGSATSQFYTMSERLHPSDDSIKVIPLTTFAPRQQARPSRGDSPIMETHPL

SEQ ID NO: 226384 - protein, 1319 aa, Artificial Sequence
  derived and/or modified sequence
  misc_feature (1)..(1): Xaa can be any naturally occurring amino acid
XVVRVNTTNCHKCLLSGTYIFAVLLVCVVFHSGAQEKNYTIREEIPENVLIGNLLKDLNLSLIPNKSLTTTMQFKLVYKTGDVPLIRIEEDTGEIFTTGARIDREKLCAGIPRDEHCFYEVEVAILPDEIFRLVKIRFLIEDINDNAPLFPATVINISIPENSAINSKYTLPAAVDPDVGINGVQNYELIKSQNIFGLDVIETPEGDKMPQLIVQKELDREEKDTYVMKVKVEDGGFPQRSSTAILQVSVTDTNDNHPVFKETEIEVSIPENAPVGTSVTQLHATDADIGENAKIHFSFSNLVSNIARRLFHLNATTGLITIKEPLDREETPNHKLLVLASDGGLMPARAMVLVNVTDVNDNVPSIDIRYIVNPVNDTVVLSENIPLNTKIALITVTDKDADHNGRVTCFTDHEIPFRLRPVFSNQFLLENAAYLDYESTKEYAIKLLAADAGKPPLNQSAMLFIKVKDENDNAPVFTQSFVTVSIPENNSPGIQLMKVSATDADSGPNAEINYLLGPDAPPEFSLDRRTGMLTVVKKLDREKEDKYLFTILAKDNGVPPLTSNVTVFVSIIDQNDNSPVFTHNEYKFYVPENLPRHGTVGLITVTDPDYGDNSAVTLSILDENDDFTIDSQTGVIRPNISFDREKQESYTFYVKAEDGGRVSRSSSAKVTINVVDVNDNKPVFIVPPYNYSYELVLPSTNPGTVVFQVIAVDNDTGMNAEVRYSIVGGNTRDLFAIDQETGNITLMEKCDVTDLGLHRVLVKANDLGQPDSLFSVVIVNLFVNESVTNATLINELVRKSIEAPVTPNTEIADVSSPTSDYVKILVAAVAGTITVVVVIFITAVVRCRQAPHLKAAQKNMQNSEWATPNPENRQMIMMKKKKKKKKHSPKNLLLNVVTIEETKADDVDSDGNRVTLDLPIDLEEQTMGKYNWVTTPTTFKPDSPDLARHYKSASPQPAFQIQPETPLNLKHHIIQELPLDNTFVACDSISNCSSSSSDPYSVSDCGYPVTTFEVPVSVHTRPSQRRVTFHLPEGSQESSSDGGLGDHDAGSLTSTSHGLPLGYPQEEYFDRATPSNRTEGDGNSDPESTFIPGLKKEITVQPTVEEASDNCTQECLIYGHSDACWMPASLDHSSSSQAQASALCHSPPLSQASTQHHSPPVTQTIVLCHSPPVTQTIALCHSPPPIQVSALHHSPPLVQGTALHHSPPSAQASALCYSPPLAQAAAISHSSSLPQVIALHRSQAQSSVSLQQGWVQGANGLCSVDQGVQGSATSQFYTMSERLHPSDDSIKVIPLTTFAPRQQARPSRGDSPIMETHPL

SEQ ID NO: 226385 - DNA, 4023 bp, Artificial Sequence
  derived and/or modified sequence
atgttcagagtgggcttcctgatcatcagcagcagcagcagcctgagccccctgctgctggtgagcgtggtgagagtgaacaccaccaactgccacaagtgcctgctgagcggcacctacatcttcgccgtgctgctggtgtgcgtggtgttccacagcggcgcccaggagaagaactacaccatcagagaggagatccccgagaacgtgctgatcggcaacctgctgaaggacctgaacctgagcctgatccccaacaagagcctgaccaccaccatgcagttcaagctggtgtacaagaccggcgacgtgcccctgatcagaatcgaggaggacaccggcgagatcttcaccaccggcgccagaatcgacagagagaagctgtgcgccggcatccccagagacgagcactgcttctacgaggtggaggtggccatcctgcccgacgagatcttcagactggtgaagatcagattcctgatcgaggacatcaacgacaacgcccccctgttccccgccaccgtgatcaacatcagcatccccgagaacagcgccatcaacagcaagtacaccctgcccgccgccgtggaccccgacgtgggcatcaacggcgtgcagaactacgagctgatcaagagccagaacatcttcggcctggacgtgatcgagacccccgagggcgacaagatgccccagctgatcgtgcagaaggagctggacagagaggagaaggacacctacgtgatgaaggtgaaggtggaggacggcggcttcccccagagaagcagcaccgccatcctgcaggtgagcgtgaccgacaccaacgacaaccaccccgtgttcaaggagaccgagatcgaggtgagcatccccgagaacgcccccgtgggcaccagcgtgacccagctgcacgccaccgacgccgacatcggcgagaacgccaagatccacttcagcttcagcaacctggtgagcaacatcgccagaagactgttccacctgaacgccaccaccggcctgatcaccatcaaggagcccctggacagagaggagacccccaaccacaagctgctggtgctggccagcgacggcggcctgatgcccgccagagccatggtgctggtgaacgtgaccgacgtgaacgacaacgtgcccagcatcgacatcagatacatcgtgaaccccgtgaacgacaccgtggtgctgagcgagaacatccccctgaacaccaagatcgccctgatcaccgtgaccgacaaggacgccgaccacaacggcagagtgacctgcttcaccgaccacgagatccccttcagactgagacccgtgttcagcaaccagttcctgctggagaacgccgcctacctggactacgagagcaccaaggagtacgccatcaagctgctggccgccgacgccggcaagccccccctgaaccagagcgccatgctgttcatcaaggtgaaggacgagaacgacaacgcccccgtgttcacccagagcttcgtgaccgtgagcatccccgagaacaacagccccggcatccagctgatgaaggtgagcgccaccgacgccgacagcggccccaacgccgagatcaactacctgctgggccccgacgccccccccgagttcagcctggacagaagaaccggcatgctgaccgtggtgaagaagctggacagagagaaggaggacaagtacctgttcaccatcctggccaaggacaacggcgtgccccccctgaccagcaacgtgaccgtgttcgtgagcatcatcgaccagaacgacaacagccccgtgttcacccacaacgagtacaagttctacgtgcccgagaacctgcccagacacggcaccgtgggcctgatcaccgtgaccgaccccgactacggcgacaacagcgccgtgaccctgagcatcctggacgagaacgacgacttcaccatcgacagccagaccggcgtgatcagacccaacatcagcttcgacagagagaagcaggagagctacaccttctacgtgaaggccgaggacggcggcagagtgagcagaagcagcagcgccaaggtgaccatcaacgtggtggacgtgaacgacaacaagcccgtgttcatcgtgcccccctacaactacagctacgagctggtgctgcccagcaccaaccccggcaccgtggtgttccaggtgatcgccgtggacaacgacaccggcatgaacgccgaggtgagatacagcatcgtgggcggcaacaccagagacctgttcgccatcgaccaggagaccggcaacatcaccctgatggagaagtgcgacgtgaccgacctgggcctgcacagagtgctggtgaaggccaacgacctgggccagcccgacagcctgttcagcgtggtgatcgtgaacctgttcgtgaacgagagcgtgaccaacgccaccctgatcaacgagctggtgagaaagagcatcgaggcccccgtgacccccaacaccgagatcgccgacgtgagcagccccaccagcgactacgtgaagatcctggtggccgccgtggccggcaccatcaccgtggtggtggtgatcttcatcaccgccgtggtgagatgcagacaggccccccacctgaaggccgcccagaagaacatgcagaacagcgagtgggccacccccaaccccgagaacagacagatgatcatgatgaagaagaagaagaagaagaagaagcacagccccaagaacctgctgctgaacgtggtgaccatcgaggagaccaaggccgacgacgtggacagcgacggcaacagagtgaccctggacctgcccatcgacctggaggagcagaccatgggcaagtacaactgggtgaccacccccaccaccttcaagcccgacagccccgacctggccagacactacaagagcgccagcccccagcccgccttccagatccagcccgagacccccctgaacctgaagcaccacatcatccaggagctgcccctggacaacaccttcgtggcctgcgacagcatcagcaactgcagcagcagcagcagcgacccctacagcgtgagcgactgcggctaccccgtgaccaccttcgaggtgcccgtgagcgtgcacaccagacccagccagagaagagtgaccttccacctgcccgagggcagccaggagagcagcagcgacggcggcctgggcgaccacgacgccggcagcctgaccagcaccagccacggcctgcccctgggctacccccaggaggagtacttcgacagagccacccccagcaacagaaccgagggcgacggcaacagcgaccccgagagcaacttcatcagcggcatgagagagaagatcaccgtgcagcccaccgtggaggaggccagcgacaactgcacccaggagtgcctgatctacggccacagcgacgcctgctggatgcccgccagcctggaccacagcagcagcagccaggcccaggccagcgccctgtgccacagcccccccctgagccaggccagcacccagcaccacagcccccccgtgacccagaccatcgtgctgtgccacagcccccccgtgacccagaccatcgccctgtgccacagccccccccccatccaggtgagcgccctgcaccacagcccccccctggtgcagggcaccgccctgcaccacagcccccccagcgcccaggccagcgccctgtgctacagcccccccctggcccaggccgccgccatcagccacagcagcagcctgccccaggtgatcgccctgcacagaagccaggcccagagcagcgtgagcctgcagcagggctgggtgcagggcgccaacggcctgtgcagcgtggaccagggcgtgcagggcagcgccaccagccagttctacaccatgagcgagagactgcaccccagcgacgacagcatcaaggtgatccccctgaccaccttcgcccccagacagcaggccagacccagcagaggcgacagccccatcatggagacccaccccctgtag

SEQ ID NO: 226386 - DNA, 4023 bp, Artificial Sequence
  derived and/or modified sequence
atgtttcgggtcggcttcttgattatcagcagctctagcagtctgtcccctctgctcctcgtttctgtcgtgagagtgaataccacaaactgtcataaatgtctgttatcaggaacatatatttttgctgtccttctggtttgtgtggtcttccacagtggtgcccaggagaagaactacactatcagagaggagatcccggagaatgtgctgatcggtaacctgttaaaagacctgaatcttagcctcataccaaacaaaagtctgactaccaccatgcaatttaagcttgtgtacaagaccggcgatgtgcctctgattagaatcgaggaggataccggcgagatatttacgaccggggctcggatcgatcgcgagaagttgtgcgccgggatcccacgagatgagcactgcttttacgaggtggaagttgccatcctgcctgatgaaatttttcggctggtgaaaattagatttctgatcgaagatatcaatgacaacgctccgctgttccctgccactgtcattaacatctccattccagagaattctgccatcaattctaaatatactctgcccgctgcagtggatcccgacgtggggatcaacggggtgcagaactacgagctcattaaaagccagaacatcttcggcctggatgtgatagaaacacctgagggcgataaaatgcctcaacttatagtacaaaaagagttggaccgagaggagaaagacacatatgttatgaaggtaaaggtggaggatggggggttcccccagcgatcatcaaccgccatcttacaagtgtccgttaccgacacaaatgataatcacccagtgtttaaagaaacagagattgaggtgagtattccagagaacgccccggtcgggactagcgtgacccagctccatgccactgacgccgacattggggagaatgccaaaattcacttttctttctcaaacctagtaagcaatattgcgcgcaggttgttccaccttaatgctaccactggattgatcaccattaaggagccacttgatagggaggagacacctaaccataagctgctggtgctcgcaagcgacggtgggctgatgccagctcgtgcaatggtccttgttaacgtcaccgatgtcaacgataatgttccgtcaattgacattaggtacattgttaaccccgtgaacgatactgttgtgctgtccgaaaatatccctctcaacactaagatcgccctgattactgtcactgataaagacgccgatcacaatggcagggtcacctgttttaccgatcacgagatcccattccgccttagaccagtttttagtaaccaatttcttctggagaatgcggcctatctggactacgagtcaactaaagagtacgctattaaactgctggctgctgatgcaggaaagccgcccctaaaccagtcagctatgctgtttattaaagtcaaggacgaaaacgataacgcacctgtctttactcagtcgttcgtgaccgttagcattcctgagaataacagtcctgggatccagctgatgaaggtgtcggcgacggatgcggatagcggacccaacgccgaaattaattatctgctcgggcctgacgccccacctgagttctctctggaccgacggactgggatgctcaccgttgtaaaaaaactcgacagggagaaagaggataaatacctgttcaccatccttgccaaagacaatggtgtgcctccactgacctcaaacgtaacggtctttgtcagcattattgaccaaaatgacaacagtcctgtgttcactcataacgagtataagttttatgttcctgagaacttgcctcggcacggaaccgtaggcctgatcacagtgaccgaccccgattatggcgacaactcagcagtcactcttagtatactggacgagaacgacgacttcacgatcgacagtcagactggggtgatccggcctaacatttcttttgatcgcgagaaacaggaatcctatacattttatgtaaaagcagaggatggcggtcgggtatctcgtagcagttccgccaaggtgacaatcaatgtcgtggacgtgaacgataataaacccgtgttcatcgtgccgccctataactatagctacgagttagtcctgccatctacaaatcctggcactgtggtgttccaggtgatcgccgtggacaacgatacgggaatgaacgcagaggtgcgttactctatcgtcggcggcaataccagagaccttttcgctatcgatcaggagactggaaatattacactgatggagaagtgtgacgtgaccgatctgggactgcatagagtgctggttaaagcgaatgacctcggccagcctgatagcctttttagcgtggtcattgtcaatctgtttgtgaatgagtcagttactaacgcaacgttaattaacgagttggtgagaaagtctattgaggcccctgtgacacccaataccgagatagcagacgtgtctagtccaacttctgattacgtaaaaatcctcgtcgctgccgtggctgggacgattacagttgtggtggtcattttcattactgccgtcgttcgttgccgccaggcgcctcaccttaaagcagcccagaaaaacatgcaaaatagtgaatgggctacaccaaacccggagaacaggcagatgattatgatgaagaagaaaaagaagaaaaagaaacattctcccaaaaacctgcttctcaacgtcgttaccatcgaagagaccaaggccgatgatgttgattccgatgggaaccgcgtgactctggatctccccatcgatctagaggagcagacaatgggtaaatacaactgggtgactacccccaccacctttaaaccagattcccccgacctggctcgccattacaagtctgcatcgccgcaacccgcctttcagatccaaccagagacacccctgaaccttaaacatcacataatccaagaactcccgctggacaacactttcgtagcctgcgatagcatcagtaattgttcatccagctcctcagatccctactccgtgagcgactgtggctaccctgtgacaaccttcgaagttccagtctccgtgcatacaagaccatcacagaggagagtaaccttccacctgcccgaaggctctcaggagtctagctccgacggcggtctcggggatcatgatgcaggctccctgacgtctacgtcacacggtttgcctctcggataccctcaggaagagtacttcgatcgggccacaccctcaaatcgcaccgagggagatggaaactcggacccggagtcgaactttatcagcggcatgcgcgaaaagattactgtacagcctacggtggaagaggcctccgataactgcacacaggaatgcctgatatatggccactcagacgcttgctggatgccagcatcactcgatcatagcagttccagccaagcgcaagcgagcgccctatgccactcgcctcccctctcacaggcctccactcaacaccattcaccacccgtgacccagaccatagtgctttgccactctccacccgtaacccaaaccatcgccctctgccactcacctcccccaattcaggtatctgcgctccatcactcaccaccgcttgtgcagggtacggctctccaccacagtcccccttccgcgcaagcgtctgctctctgttacagtcccccgctagcccaggctgcggctataagccacagctcaagtctccctcaggtcatagcattgcaccggagccaggctcaatcgagcgtcagcctgcagcaggggtgggtgcaaggggccaatgggctttgttccgtggaccagggtgttcaaggctcagccacttcccaattttatacaatgagcgaaaggctgcacccctccgacgattccataaaggtaatacccctgactaccttcgccccccgccagcaagctcgtccaagccgtggggactcccccattatggagactcaccccttgtag

SEQ ID NO: 226387 - DNA, 4023 bp, Artificial Sequence
  derived and/or modified sequence
atgttccgggtgggcttcctgatcatcagcagcagcagcagcctgagccccctgctgctggtgtctgtggtgcgggtgaacaccaccaactgccacaagtgcctgctgagcggcacctacatctttgctgtgctgctggtgtgtgtggtgttccacagcggggcccaggagaagaactacaccatccgggaggagatcccagaaaatgtgctgattggcaacctgctgaaggacctgaacctgagcctcatccccaacaagagcctgaccaccaccatgcagttcaagctggtgtacaagacaggagatgtgcccctcatcagaattgaagaagatactggagagatcttcaccactggagccagaattgaccgggagaagctgtgtgccggcatccccagagatgagcactgcttctatgaggtggaggtggccatcctgcctgatgagatcttccggctggtgaagatccgcttcctgattgaggacatcaatgacaatgcccccctcttccctgccaccgtcatcaacatcagcatccctgagaacagcgccatcaacagcaagtacaccctgcctgctgctgtggaccctgatgtgggcatcaatggagtgcagaactatgagctgatcaagagccagaacatcttcggcctggatgtgattgagaccccagagggggacaagatgccccagctgattgtgcagaaggagctggaccgggaggagaaggacacctacgtgatgaaggtgaaggtggaggatggcggcttcccccagaggagcagcacagccatcctgcaggtgtctgtgacagacaccaatgacaaccaccctgtgttcaaggagacagaaattgaggtgtccatcccagaaaatgcccctgtgggcacctctgtgacccagctgcacgccacagatgctgacatcggggagaatgccaagatccacttctccttcagcaacctggtgagcaacatcgcccggcggctcttccacctgaatgccaccaccggcctcatcaccatcaaggagcccctggaccgggaggagacccccaaccacaagctgctggtgctggccagtgatggcggcctgatgcctgcccgggccatggtgctggtgaatgtgacagatgtgaatgacaacgtgcccagcattgacatccgctacatcgtgaaccctgtgaatgacacagtggtgctgtctgagaacatccccctgaacaccaagatcgccctgatcaccgtgacagacaaggatgctgaccacaacggccgggtgacctgcttcacagaccacgagatccccttccggctgcggcctgtgttcagcaaccagttcctgctggagaatgctgcctacctggactatgagagcaccaaggagtatgccatcaagctgctggccgcagatgctgggaagccacccctgaaccagagcgccatgctgttcatcaaggtgaaggatgaaaatgacaatgcccctgtgttcacccagagctttgtgacagtgtccatccctgagaacaacagccctggcatccagctgatgaaggtgtctgccacagatgctgacagcggccccaatgctgagatcaactacctgctgggcccagatgcccctcctgagttcagcctggacagaagaacaggcatgctgactgtggtgaagaagctggaccgggagaaggaggacaagtacctgttcaccatcctggccaaggacaatggagtgccccccctgaccagcaatgtgacagtgtttgtgtccatcatcgaccagaatgacaacagccctgtgttcacccacaatgagtacaagttctacgtgcctgagaacctgcccaggcatggcaccgtgggcctcatcaccgtgacagatcctgactatggagacaacagcgctgtgaccctgagcatcctggatgaaaatgatgacttcaccatcgacagccagacaggagtcatccggcccaacatcagctttgaccgggagaagcaggagagctacaccttctacgtgaaggccgaggatggcggccgggtgagccgcagcagcagcgccaaggtgaccatcaacgtggtggatgtgaatgacaacaagcctgtgttcatcgtgcccccctacaactacagctatgagctggtgctgcccagcaccaaccctggcaccgtggtgttccaggtgattgctgtggacaatgacaccggcatgaatgctgaggtgcgctacagcatcgtgggcggcaacacccgggacctgtttgccatcgaccaggagaccggcaacatcaccctgatggagaagtgtgatgtgacagacctgggcctgcaccgggtgctggtgaaggccaatgacctgggccagcctgacagcctcttctctgtggtgattgtgaacctgtttgtgaatgaatctgtgaccaatgccaccctcatcaatgagctggtgaggaagagcattgaggcccctgtgacccccaacacagaaattgctgatgtgagcagccccaccagtgactatgtgaagatcctggtggccgctgtggccggcaccatcaccgtggtggtggtgatcttcatcacagctgtggtgcgctgccggcaggccccccacctgaaggccgcccagaagaacatgcagaacagcgagtgggccacccccaaccctgagaaccggcagatgatcatgatgaagaagaagaagaagaagaagaagcacagccccaagaacctgctgctgaatgtggtgaccatcgaggagaccaaggcagatgatgtggacagtgatggcaacagagtgaccctggacctgcccatcgacctggaggagcagaccatgggcaagtacaactgggtgaccacccccaccaccttcaagccagacagcccagacctggcccggcactacaagagcgccagcccccagcctgccttccagatccagcctgagacccccctgaacctgaagcaccacatcatccaggagctgcccctggacaacacctttgtggcctgtgacagcatcagcaactgcagcagcagcagcagtgacccctacagcgtgtctgactgtggctaccctgtgaccacctttgaggtgcctgtgtctgtgcacacccggcccagccagaggagagtgaccttccacctgcctgagggcagccaggagagcagcagtgatggcggcctgggggaccatgatgctggcagcctgaccagcaccagccacggcctgcccctgggctacccccaggaggagtactttgaccgggccacccccagcaacagaacagaaggagatggcaacagcgaccctgagagcaacttcatcagcggcatgagggagaagatcaccgtgcagcccaccgtggaggaggccagtgacaactgcacccaggagtgcctgatctacggccacagtgatgcctgctggatgcctgccagcctggaccacagcagcagcagccaggcccaggccagcgccctgtgccacagcccccccctgagccaggccagcacccagcaccacagcccccctgtgacccagaccatcgtgctgtgccacagcccccctgtgacccagaccatcgccctgtgccacagccccccacccatccaggtgtctgccctgcaccacagcccccccctggtgcagggcacagccctgcaccacagcccccccagcgcccaggccagcgccctgtgctacagcccccccctggcccaggccgccgccatcagccacagcagcagcctgccccaggtgattgccctgcacaggagccaggcccagagctctgtgtccctgcagcagggctgggtgcagggcgccaacggcctgtgcagcgtggaccagggcgtgcagggcagcgccaccagccagttctacaccatgtctgagcggctgcaccccagtgatgacagcatcaaggtgatccccctgaccacctttgccccccggcagcaggcccggcccagcagaggagacagccccatcatggagacccaccccctgtag

SEQ ID NO: 226388 - DNA, 4023 bp, Artificial Sequence
  derived and/or modified sequence
atgttccgggtgggcttcctgatcatcagcagcagcagcagcctgtcacccctgctgctggtttcagtcgtgagggttaacacaacgaattgtcacaagtgtttgctcagcggtacttacattttcgccgttctgcttgtgtgcgtggtttttcacagcggagcgcaagaaaagaattacacaattagagaggagatacccgaaaacgtgctgataggtaatctcctgaaagacctgaacctatccttgatccctaacaagagcctgaccacaacaatgcagtttaaactggtttataaaaccggggacgtacccttgatcaggatcgaggaagacactggcgagatcttcacgacaggagccagaatcgatcgggaaaaactgtgtgccggtatcccgcgtgacgaacactgtttctacgaagtcgaagtggctatcctaccagacgagatttttagattagtcaaaatccgcttccttatcgaggacattaacgataatgcacccttgttcccagctactgtgataaacattagcatccctgagaattccgccatcaattctaaatacaccctgcccgcagcagtcgaccccgacgttggcattaacggcgtccaaaactacgaactgattaaatcccagaatatctttggtttagatgtcatcgagaccccagaaggggacaagatgccccagctgatcgtgcagaaggaactcgaccgggaagaaaaggacacttacgtaatgaaggtgaaggtggaagacggaggttttccacagcgtagcagcacagccatcttgcaagtctctgtgaccgacaccaacgacaaccatcccgtgttcaaggagaccgaaatcgaagtgagtatcccagaaaacgctccagtcggtactagtgtcactcagcttcatgccaccgatgctgacataggggagaatgccaagatccacttttcatttagtaacctggtttcaaacatcgcaaggaggttatttcacctcaatgcaacaaccggccttattaccataaaggagcctttggaccgggaggaaacaccgaatcataagctcttggtgctcgcctccgacggaggccttatgcctgctcgggcaatggtgttagtgaacgtgactgatgtgaacgacaacgtgccatcaatagatatcaggtacattgtaaaccccgtcaacgatactgtcgtgctatcagaaaatatacctctcaataccaagatcgctctgattaccgtgaccgacaaggatgctgaccataacggacgcgtgacttgctttactgaccacgagataccatttcggctgcgaccagtcttcagcaaccaattcctgctggagaatgctgcgtatcttgactatgagtctaccaaagaatatgctattaaattgttagccgcggacgccggaaagccccccctcaatcagtcagcaatgctgttcattaaggtcaaagacgaaaacgataatgcccctgtgtttactcaatcctttgtaacggtcagtattcctgagaataatagtccaggtatccaactgatgaaggtgtctgcgactgatgcagattcgggccctaacgcagagataaactacctgcttggccctgacgcgccgcccgagttctctctagacaggagaaccgggatgcttactgtcgtgaagaagctggacagagaaaaggaggataaatacctgtttaccattttggctaaagacaacggcgtccctcccctgacctctaacgtcacagtattcgtgagtattatagatcagaatgacaatagtcccgtgttcacccacaacgaatataagttttatgtcccggagaacctgccgcgacatgggacggtgggtctgataaccgttacagatcccgactacggggacaatagcgccgtgactctttctattttagatgaaaacgatgacttcacaatcgacagccagacaggcgttattaggcccaatatcagtttcgaccgggagaaacaggagtcatacaccttctacgttaaggccgaggacggtggtagggtatcacggtcttccagcgccaaagtcaccattaacgtggtggacgtgaatgacaacaaacctgtcttcatcgttccaccatataattacagctacgaactcgtgctaccttccacaaatcctggaaccgtggtgttccaagttattgccgtggataatgacacaggaatgaacgcagaggttcggtactcaattgtgggcggaaatacccgggatctgtttgctatcgaccaggagactgggaacataaccctcatggagaaatgtgatgtgactgacctcgggctgcatagagttctggtcaaagccaacgatttaggacagcctgactcactctttagtgtggtaattgtcaatctcttcgtgaacgagtctgtaacaaacgccacattgattaacgaactggtgaggaagagtattgaagctcccgttacaccaaatacagagattgccgatgtttcatcaccaacatccgattacgtgaagatcctggtcgctgccgttgccgggaccattaccgtcgtcgtggtgatctttattaccgctgtggtgcgttgcaggcaggctcctcaccttaaggccgcccaaaagaacatgcagaactcagaatgggctaccccaaatccagagaacagacaaatgataatgatgaagaaaaaaaagaaaaaaaagaagcattcaccaaagaatctgctgttgaatgtcgtaacaatcgaagagaccaaagctgatgacgtggactcagacggcaatagagtaactctggacctgcctatcgatctcgaagaacagacaatggggaagtacaattgggttaccacccctaccacttttaagcctgactctccagatctggcgcggcactacaaatccgcgtcacctcagccagcgtttcagatccagcctgaaacccccctgaatctgaaacatcacataattcaggagcttcccttggacaatactttcgtggcctgtgatagtatttcaaactgcagttcatcatctagtgacccttactccgtgagcgattgcggctaccctgtgactacgtttgaggtgcctgtctctgttcacacccggcccagtcaaagacgcgtcacgttccaccttccggaaggcagccaagagagtagctccgatgggggcttgggcgatcacgatgccggtagtctgaccagcactagtcatggactgcccctcgggtacccccaggaggagtattttgatagggccacaccaagtaacagaacagagggagacgggaactctgacccagaaagcaactttatttccggcatgagggagaagattactgtccagccaaccgtggaagaggcatcagataactgtactcaggagtgtctaatatatggccacagcgacgcttgttggatgccggccagtctggaccactcgtcttcctcacaggcacaggcatctgccttatgccattctcccccactgtcgcaggctagcacacaacatcacagccctccagtgacacagacgatcgtcctttgccattcccctcctgtcacacagaccatcgccctttgtcactctccgcctccaatccaggtcagcgccctgcatcactcccctccgctggtgcaagggacagccttgcatcattctccaccatcagcccaagctagtgccctgtgttacagtcctccgttggctcaggccgctgcgatttcccacagctcctcattgccacaggtcatcgccctccacagatcgcaagctcagtccagtgtttcactacagcaggggtgggtgcagggcgctaacggactgtgttctgtcgaccaaggagttcaaggtagtgcaacttcacagttttacacaatgagtgagcggctgcaccccagtgacgatagcatcaaggtgatcccccttacaacattcgcacctaggcagcaggcccgaccttcacgcggagacagtccaattatggaaacccatccactctag

SEQ ID NO: 226389 - DNA, 4023 bp, Artificial Sequence
  derived and/or modified sequence
atgttccgcgtgggatttctcatcattagtagcagttcatcgttgtctcccctcctgctagtgtcagtcgtgagggttaatacaacaaattgtcataaatgtctcctgtctggtacctatatttttgccgtcttattagtttgcgtggtgttccattctggcgctcaggaaaagaactacacaatccgagaggaaatcccagaaaatgttttgatcggcaacttgctaaaagatctgaatctctccctaattcccaataaatccctgactactaccatgcagttcaagctcgtctacaaaacaggcgatgtccccctgatacgaattgaagaggatactggcgaaatttttacgaccggcgctcgaatcgacagagaaaagttgtgcgcgggaatccccagagatgagcattgcttctatgaagtcgaagtcgccattctgccggatgaaatcttcagacttgttaaaatcaggtttcttattgaggacataaatgacaatgcccctctgttccccgctacagttatcaacatctctattccggaaaactcggcgattaacagcaaatacaccctacccgctgctgtggaccccgacgtaggcattaacggagtccagaactacgaattaattaaatctcagaacatttttggattagatgtcattgaaaccccagagggcgacaagatgccccagctcattgtccagaaggagttggatagagaagagaaggacacttatgtgatgaaagtaaaagtggaggacgggggattcccacagcgctccagcaccgccatcctccaggtcagcgtgacagataccaatgataaccaccccgtgttcaaggagactgaaatcgaggtgagcatccctgagaacgcccctgtgggcacatcggtaactcagcttcacgctactgatgccgacatcggcgagaatgcaaaaatccactttagcttctctaacttagtgtcaaatattgccaggcggctgttccatttaaatgcaaccaccggcctcataaccatcaaagagcccctggatagagaagagacccctaatcacaaattactggttttggcatctgacggaggcctgatgcccgctagagccatggttctggtaaacgtcaccgatgttaacgataacgtgccttctatcgatattagatatattgtcaatcctgtgaatgacaccgtagttctttctgaaaacatccctctgaataccaagatcgcccttatcaccgtgactgacaaggacgcggatcataacggaagagtgacttgctttacagatcacgaaattcctttccgcctacggccagtgttcagcaatcagtttctgcttgagaatgccgcatacttagactacgagtcaacaaaggaatatgctattaaattgcttgctgctgatgccggaaaacctcctttaaatcagagtgctatgttgtttatcaaagttaaggatgaaaacgataatgctccagtcttcacccagtccttcgtgactgtctcaattcctgagaacaactcccccggtattcagttaatgaaggtgtccgctacagacgccgactccgggccaaatgcggagattaattacctgctcggacccgatgcccctcctgaattctccttggatagaagaacaggcatgttgactgtcgtcaagaaacttgaccgtgagaaggaggataagtatctcttcaccatcctagctaaggataatggagtccctccccttaccagtaacgtgactgtttttgtaagcattatagatcaaaatgacaatagcccagtgtttacgcacaacgagtacaaattctacgtgcccgagaacctgccgaggcatggaacggttgggttgatcaccgttacagacccggattacggcgataattctgcagtgaccctgagcatactcgacgagaatgatgacttcaccattgactcacagactggtgtgatccggcctaatatatctttcgaccgggaaaagcaggaatcctatacgttttatgtgaaggccgaggacggcggaagagtttcgaggagttcttctgccaaagtgacgattaacgtggtggacgttaacgataataaaccagtattcatagtccctccttacaactactcctatgaactggtgttaccttctaccaaccccggtaccgttgtgttccaagtcattgctgtggataatgataccgggatgaatgccgaggtccgctactcgattgttggtggcaacactagagatctgttcgcgatcgatcaggagacaggcaatatcacactgatggaaaagtgcgacgtcacagatttggggttacaccgcgtactggtgaaagcgaacgacctcggccaacccgactcgctattctctgtggtcatcgtgaacctgtttgtgaacgagtctgtcaccaacgcgacactcattaacgaactcgtccggaagagcatagaggcaccagttacgcctaacacagaaattgccgacgtatccagccccacatctgactacgtcaaaatactggttgccgctgtggcaggcacaatcacggttgttgtagtcatctttataaccgccgtcgtgaggtgtagacaggctccacatttgaaggctgcccaaaagaatatgcagaattcagaatgggccacacctaatcccgaaaatcgccagatgattatgatgaagaagaagaaaaagaagaagaaacactcacccaagaatcttttacttaacgtggtgaccatcgaggaaacaaaagccgatgacgtggactccgacgggaaccgcgtaacccttgatcttccaattgatttggaggagcagactatggggaagtacaattgggtgactacccccaccaccttcaaacccgactctcccgacctcgcaaggcactacaaaagtgccagcccgcagcccgcttttcaaattcaaccagagacaccccttaacctcaaacatcacataatacaggagctgcctctagataatacattcgtcgcctgcgatagtatatcaaactgcagctcaagttcctctgacccctatagcgtttctgattgtgggtatcctgtgacaacctttgaagttcctgtttcagtccatacacgcccaagccagaggagagtcacatttcatctgccagagggctcccaagagagttcttctgacggcggacttggagatcatgacgccggaagccttacatctacctcccacgggctgccccttggttacccccaggaggaatacttcgacagggcaactcctagtaacaggaccgagggggatgggaactcagatcccgagtccaattttattagcggaatgcgggaaaagatcactgtgcagcctactgtagaagaggcctccgataactgcacacaagagtgtctcatatacggccattctgacgcgtgctggatgcccgctagcttagaccactcgagtagttcacaggcacaggctagcgccttatgtcacagtccaccactgtcacaggcatctacacaacaccacagcccacctgtaacgcagaccatcgtgctgtgccattccccgccagtgacacaaacaattgccctgtgtcactcgccacccccaatacaggtgtctgcactgcaccacagcccaccacttgtccaagggacggccctgcaccattctccaccgtctgcacaggcctccgctctttgctactctcccccactggcacaggccgctgccatctcacattccagttccctgccgcaggtgattgccctgcatcgatcccaggctcagagctcggtgtctttacaacagggttgggttcagggtgccaatggtctatgtagtgtggatcaaggcgttcagggatctgcgacctcccagttttacacgatgtcagaacggctccacccctcagatgactctatcaaggtcattccccttaccacattcgcgccacgccagcaggcgaggccttccaggggcgactctccgatcatggaaacacatcccctgtag

SEQ ID NO: 226390 - DNA, 3960 bp, Artificial Sequence
  derived and/or modified sequence
tgagtggtccgagttaatacaaccaactgccacaaatgtctgctgagcggtacgtacattttcgcggtgctgctcgtgtgtgtggttttccacagtggcgcccaggagaagaactatactataagggaagaaatacctgagaacgtattgattggaaatttattaaaagatctcaacctctctcttattccgaataagtcccttaccaccactatgcaattcaagttggtctataagactggagatgttccactaattcgaatcgaagaggacactggcgaaattttcacaaccggtgcccgcatcgatagggagaagttgtgtgctgggatccctcgcgatgagcactgtttttacgaggtggaggtggccattctgcctgatgaaatattccggttggtaaaaattcggtttctgattgaggatattaatgataatgcaccactcttcccagccactgtgattaatatctcaatcccagagaactcggctatcaacagcaagtatacacttcctgcggccgtcgatcccgacgtcggtatcaatggtgtgcaaaattatgagctgataaaatcccaaaatatctttgggttagatgtgatcgagacccctgaaggtgacaagatgccgcagctgattgtccaaaaagaactggatagggaagagaaggacacctatgtgatgaaagtcaaggtcgaagatggcggtttccctcaacggagttctacggccattttgcaggtatccgtgactgataccaatgataatcatcccgtgttcaaagagactgaaattgaagtgtcaatccctgagaatgcacccgttggtacttctgtgacccagctgcacgcaactgacgctgacatcggcgaaaatgccaagatccatttctcgttctctaatctggtctctaacatcgcacggcgcctctttcacttgaacgcaaccaccggacttatcaccataaaggagcccctggatcgcgaagaaacacctaaccataagctacttgtgctagccagcgacggcggcctcatgccggctcgcgccatggttctggtcaacgttacagatgtgaatgataacgtgccttcaatcgatatccgttacatcgtgaatcctgtcaatgatacagtggtcctgtctgaaaatattcccctgaataccaagattgcgctcatcaccgtgaccgataaggacgcagatcacaatggcagggttacatgctttactgaccacgagatccccttcaggctaaggcccgttttctccaatcagttcctccttgaaaatgccgcgtatttggattatgagtctaccaaagaatacgccataaaactgctcgctgcagacgccgggaagccaccgctaaatcagtctgcaatgttgtttattaaggtaaaggatgagaacgacaatgcccccgttttcacacagagttttgtgacggtgagcatacccgagaacaatagcccaggaatacaattgatgaaggtcagcgcgactgatgctgattctggacccaatgcagaaattaattatctcctgggcccagatgctccaccagaattttcattagaccggagaaccggcatgttgaccgtggttaaaaagctggaccgcgaaaaagaggataaatatctgtttacaatcttagctaaggacaacggcgttccacctcttacaagtaacgtgaccgtgttcgtcagtataatcgaccaaaacgacaactcgcccgtgttcacacacaatgaatataaattttatgttcccgaaaatctgcctcggcatgggacagtaggcctgatcactgttactgatcctgactatggcgacaactccgctgtgacactttcaattctagacgagaacgatgacttcacgattgactcccagactggggtaatccgcccaaacatctcctttgatagggagaagcaggaatcctataccttctacgtcaaggcagaggatggaggcagggttagccgcagctcatctgccaaggtcacaatcaacgtcgtcgatgtgaatgataataaacctgtcttcattgtgcctccctataattactcttatgagctggtgctgcccagtactaaccctgggactgtggtgttccaggtgatcgccgtggacaacgatacgggaatgaacgcagaagttcgatatagcatcgtgggagggaacaccagggacttgttcgccatcgatcaagaaactgggaatattactctgatggaaaaatgcgacgtgacggatctggggctccatcgggtattggtaaaggctaacgacctagggcaacccgactctctgttttccgttgttatagttaacctatttgttaacgaatccgttaccaacgcaaccctcattaacgaacttgtaaggaagagcatcgaagcccctgtaacacccaataccgaaattgccgacgtttcttcacccacatcagattatgtcaaaatcctggtcgctgccgttgcggggacgataaccgtagtagttgtgatcttcataactgccgtcgtccgatgtcgacaggccccacaccttaaagctgcacaaaagaacatgcagaactctgagtgggcaaccccaaatcccgagaacagacagatgattatgatgaagaaaaaaaagaagaagaaaaagcactcacccaagaatctactgcttaatgtcgttactattgaggagaccaaggcagacgacgttgacagcgatggaaaccgggttactctcgacctccccatcgatctggaggagcagactatgggcaagtacaattgggtcaccactccaaccacatttaaacccgactctcctgacctagccaggcattataaatcagcctctccacagcccgcatttcagatacagcccgagacccccttgaatctgaagcaccatataatccaggaattgcccttggacaacaccttcgtggcctgtgatagcatctcaaattgctcctcttccagttccgatccgtacagcgtgagtgattgcggctacccagtgaccacttttgaggtgccggtgagtgtacacacgcgacccagtcagcgccgggtgacattccaccttcccgaggggagtcaggaatcaagctcagacggcggactgggcgaccatgacgcgggcagtctcacttctaccagtcatggacttcccttgggatacccccaagaggagtattttgatcgggcaacaccctctaaccggactgagggagatgggaactctgacccagagtccacatttataccaggcctgaaaaaagaaatcaccgttcagccaacagtggaggaagccagtgataactgtactcaagagtgcttgatctatgggcatagcgacgcatgttggatgcctgcctctctggatcactctagctcttcacaggcccaggctagtgccttgtgtcactcgccccccctgtcacaggcatccacacagcatcattctcctccagtgacacagaccatagtactgtgccattcacctccagtaactcagactatcgctctttgtcactctccacctcccatccaggtgtccgcactccatcactcccctcctttggtgcaggggaccgcactgcaccacagccccccgagcgcacaagcgagcgcgctatgctattcaccccccctggcccaagcagccgcaatctctcattccagctccctcccacaggtcattgctctgcaccgctctcaggcacaatcctcagtgagcctccagcagggatgggtgcagggtgctaatggcctgtgctctgtagaccagggggtgcagggctctgcaacgtcacagttctacacaatgtccgaaaggctccaccctagtgatgattccataaaagtgattccccttactacattcgctccgagacagcaggctcgcccttctcgcggtgacagcccaataatggaaacacaccccttgtag

SEQ ID NO: 226391 - DNA, 3960 bp, Artificial Sequence
  derived and/or modified sequence
tgagtggtgcgggtgaacaccaccaactgccacaagtgcctgctgagcggcacctacatctttgctgtgctgctggtgtgtgtggtgttccacagcggggcccaggagaagaactacaccatccgggaggagatcccagaaaatgtgctgattggcaacctgctgaaggacctgaacctgagcctcatccccaacaagagcctgaccaccaccatgcagttcaagctggtgtacaagacaggagatgtgcccctcatccgcatcgaggaggacaccggggagatcttcaccaccggggccagaattgaccgggagaagctgtgtgccggcatccccagagatgagcactgcttctatgaggtggaggtggccatcctgcctgatgagatcttccggctggtgaagatccgcttcctgattgaggacatcaatgacaatgcccccctcttccctgccaccgtcatcaacatcagcatcccagaaaattctgccatcaacagcaagtacaccctgcctgctgctgtggaccctgatgtgggcatcaacggggtgcagaactatgagctgatcaagagccagaacatcttcggcctggatgtgattgagaccccagagggggacaagatgccccagctgattgtgcagaaggagctggaccgggaggagaaggacacctacgtgatgaaggtgaaggtggaggatggcggcttcccccagaggagcagcacagccatcctgcaggtgtctgtgacagacaccaatgacaaccaccctgtgttcaaggagacagaaattgaggtgtccatcccagaaaatgcccctgtgggcacctctgtgacccagctgcacgccacagatgctgacattggagaaaatgccaagatccacttctccttcagcaacctggtgagcaacatcgcccggcggctcttccacctgaatgccaccaccggcctcatcaccatcaaggagcccctggaccgggaggagacccccaaccacaagctgctggtgctggccagtgatggcggcctgatgcctgcccgggccatggtgctggtgaatgtgacagatgtgaatgacaacgtgcccagcattgacatccgctacatcgtgaaccctgtgaatgacacagtggtgctgtctgagaacatccccctgaacaccaagatcgccctgatcaccgtgacagacaaggatgctgaccacaacggccgggtgacctgcttcacagaccacgagatccccttccggctgcggcctgtgttcagcaaccagttcctgctggagaatgctgcctacctggactatgagagcaccaaggagtatgccatcaagctgctggccgcagatgctgggaagccacccctgaaccagagcgccatgctgttcatcaaggtgaaggatgaaaatgacaatgcccctgtgttcacccagagctttgtgacagtgtccatccctgagaacaacagccctggcatccagctgatgaaggtgtctgccacagatgctgacagcggccccaatgctgagatcaactacctgctgggcccagatgcccctcctgagttcagcctggacagaagaacaggcatgctgactgtggtgaagaagctggaccgggagaaggaggacaagtacctgttcaccatcctggccaaggacaacggggtgccccccctgaccagcaatgtgacagtgtttgtgtccatcatcgaccagaatgacaacagccctgtgttcacccacaatgagtacaagttctacgtgcctgagaacctgcccaggcatggaacagtgggcctcatcaccgtgacagatcctgactatggagacaacagcgctgtgaccctgagcatcctggatgaaaatgatgacttcaccatcgacagccagacaggagtcatccggcccaacatcagctttgaccgggagaagcaggagagctacaccttctacgtgaaggcagaagatggcggccgggtgagccgcagcagcagcgccaaggtgaccatcaacgtggtggatgtgaatgacaacaagcctgtgttcatcgtgcccccctacaactacagctatgagctggtgctgcccagcaccaaccctggcaccgtggtgttccaggtgattgctgtggacaatgacaccggcatgaatgctgaggtgcgctacagcatcgtgggcggcaacacccgggacctgtttgccatcgaccaggagactggaaacatcaccctgatggagaagtgtgatgtgacagacctgggcctgcaccgggtgctggtgaaggccaatgacctgggccagcctgacagcctcttctctgtggtgattgtgaacctgtttgtgaatgaatctgtgaccaatgccaccctcatcaatgagctggtgaggaagagcattgaggcccctgtgacccccaacacagaaattgctgatgtgagcagccccaccagtgactatgtgaagatcctggtggccgctgtggccggcaccatcaccgtggtggtggtgatcttcatcacagctgtggtgcgctgccggcaggccccccacctgaaggccgcccagaagaacatgcagaacagcgagtgggccacccccaacccagaaaatcggcagatgatcatgatgaagaagaagaagaagaagaagaagcacagccccaagaacctgctgctgaatgtggtgaccatcgaggagaccaaggcagatgatgtggacagtgatggcaacagagtgaccctggacctgcccatcgacctggaggagcagaccatgggcaagtacaactgggtgaccacccccaccaccttcaagccagacagcccagacctggcccggcactacaagagcgccagcccccagcctgccttccagatccagcctgagacccccctgaacctgaagcaccacatcatccaggagctgcccctggacaacacctttgtggcctgtgacagcatcagcaactgcagcagcagcagcagtgacccctacagcgtgtctgactgtggctaccctgtgaccacctttgaggtgcctgtgtctgtgcacacccggcccagccagaggagagtgaccttccacctgcctgagggcagccaggagagcagcagtgatggcggcctgggggaccatgatgctggcagcctgaccagcaccagccacggcctgcccctgggctacccccaggaggagtactttgaccgggccacccccagcaacagaacagaaggagatggcaacagcgaccctgagagcaccttcatccctggcctgaagaaggagatcaccgtgcagcccaccgtggaggaggccagtgacaactgcacccaggagtgcctgatctacggccacagtgatgcctgctggatgcctgccagcctggaccacagcagcagcagccaggcccaggccagcgccctgtgccacagcccccccctgagccaggccagcacccagcaccacagcccccctgtgacccagaccatcgtgctgtgccacagcccccctgtgacccagaccatcgccctgtgccacagccccccacccatccaggtgtctgccctgcaccacagcccccccctggtgcagggcacagccctgcaccacagccccccatctgcccaggccagcgccctgtgctacagcccccccctggcccaggccgccgccatcagccacagcagcagcctgccccaggtgattgccctgcacaggagccaggcccagagctctgtgtccctgcagcagggctgggtgcagggcgccaacggcctgtgcagcgtggaccagggcgtgcagggcagcgccaccagccagttctacaccatgtctgagcggctgcaccccagtgatgacagcatcaaggtgatccccctgaccacctttgccccccggcagcaggcccggcccagcagaggagacagccccatcatggagacccaccccctgtag

SEQ ID NO: 226392 - DNA, 3960 bp, Artificial Sequence
  derived and/or modified sequence
tgagtggtgcgggtgaacaccaccaactgccacaagtgcctgctgagcgggacctacatcttcgccgtcctcttagtatgcgtagtgtttcacagtggagcccaggagaagaattatacaataagggaagagataccagagaatgtgctcataggaaatctgctcaaagatctgaaccttagtctgattcccaataagtcacttacaacaacaatgcagttcaaactggtttacaagaccggtgacgtgccactaattcgtatcgaggaagataccggagaaatctttaccactggggccaggatcgatcgcgagaagctctgtgcagggatcccaagagatgaacactgtttctacgaagttgaagtggccatccttcccgatgagatcttccgattggtcaagatcagattccttatcgaggacattaatgacaatgctccactgttcccagccaccgtgattaacatctccatcccggaaaattctgctatcaattccaaatatacgctgcctgccgccgtggaccccgatgttggcatcaatggtgtgcagaattacgagctgattaagtcccagaatatctttggcctagatgttattgaaactcccgagggcgacaaaatgccgcagctcatagtgcagaaggaactggacagggaggaaaaggacacctacgtgatgaaagtgaaagtcgaggatggcgggttcccccagagatcgagcaccgctatcctccaggtgagcgtcaccgacacaaatgataaccaccctgtgtttaaagagacggaaatcgaggtgagtattcctgaaaatgcgcctgtgggcacctccgtcacccagcttcacgcaactgatgcagatatcggtgaaaacgcaaagattcacttcagtttcagtaacctagtgtccaatatcgctaggcgcctcttccatttgaacgccactaccggactgataacgattaaggaacctttagatcgagaagaaactcccaatcacaagttgctggtcctggcttccgacggcggccttatgccggctagggccatggtcctggtaaacgtgaccgacgtaaacgacaatgttccttccatagatatcaggtacatcgtgaacccggtgaatgacacagtagttctgtccgagaacatacctctgaacacaaaaatcgctctgattaccgtcactgacaaggacgctgatcacaacggccgcgtcacctgctttactgaccatgagatcccctttagactccggcctgtattttccaatcagttcctcctggaaaatgcggcctatctggattatgagtctaccaaggaatacgccatcaaactactggccgccgatgctggcaaaccacccctgaaccagagcgcgatgctgtttataaaggtcaaggatgaaaatgataatgcccccgtgttcacacaatccttcgtgactgtctccatccccgaaaacaactctcccggcatccagttgatgaaggtgtcagccactgatgcagacagtggacccaacgctgagattaattatctgctggggcctgacgcccctcccgaattttccctggatcggcgcaccggcatgcttaccgtggtgaaaaaactagatagggagaaggaagacaagtatttgttcacaattctggcgaaagataatggagttcctcctttgacaagtaacgtaaccgttttcgtttctattatcgatcagaatgacaactcaccggtattcacccacaacgaatacaagttctatgtgcccgagaatttgcctcgacacggcactgtgggcttgattactgtaaccgaccccgactacggtgataactcagctgtgacattatccattctcgatgaaaacgatgattttacaatcgattcccaaacaggagttattaggcccaacatcagcttcgaccgggaaaagcaagagtcatataccttttatgtgaaggcagaagacggggggagagtgtctaggtcttcatcagctaaggtgacaatcaacgttgtggacgtgaacgataataaaccggtctttatcgtgccaccgtataattatagctatgagctcgtactcccaagcacgaatcccgggactgtggtctttcaagtgatagctgtagataatgacacggggatgaatgccgaagttcggtatagtatcgtggggggaaacacccgcgacctattcgccatcgaccaggagacaggcaacatcacactgatggaaaaatgtgatgtgactgacctaggactgcatagggtcctggtgaaggcaaatgacctgggtcagccagattccctcttttctgtggtaatcgtgaacctgtttgtgaacgagtccgtgacaaatgccacacttatcaacgagctggtcagaaaaagtatagaggccccggtcacacccaatactgagattgcagacgtatccagtccaacctccgactacgtcaagatcttagttgctgccgtggcaggcaccatcaccgttgttgtggtgatctttatcaccgcagttgtgaggtgtcgccaggccccacacctcaaggcggcacaaaaaaacatgcagaactccgaatgggcgaccccaaatccagagaaccgccagatgattatgatgaaaaaaaagaaaaagaaaaaaaaacatagtcccaagaatttgttgctcaatgttgtaaccatagaggagacaaaggctgatgacgtggatagtgacggcaaccgtgtgacactggacctaccgattgacctggaagaacaaacaatgggaaagtacaactgggttactacacctactacattcaagcctgactctcctgatcttgcgagacactataagagcgcatccccacagcccgccttccagatccagcctgagacccctctcaacttgaaacaccacattattcaggaactacccctggataacacattcgtcgcctgcgactccataagcaattgttccagcagtagtagcgatccttactccgtatcagactgcggttaccccgtaacgacattcgaagtccccgtatccgtacacacccgtcccagtcagagaagagtcactttccacttgcctgagggctcccaggaaagctcaagtgacggcggcctgggagatcacgatgctggctccctgacctcaacctcacatggactgcctctcggatacccccaggaggaatattttgacagggctaccccctccaatcgtacagaaggcgatggcaactccgaccccgaatccacctttatcccaggtctgaaaaaggaaattaccgttcagccaactgtggaggaggcatccgataattgtacacaggagtgtcttatttatggccatagtgacgcgtgttggatgcctgcaagcctcgatcattcctcttcatcacaggcccaggcctcggctctatgtcactccccgccgttaagccaggctagcacgcagcaccacagccctcccgtgacccaaactattgtactctgtcacagtcccccagtaacacagactattgctctgtgtcacagccctccccctattcaagtcagcgctctgcatcatagtccaccacttgttcagggaacagccctgcaccatagccctcctagtgcccaggcatccgctctatgctatagccccccgctcgcccaggctgcagcaatttctcacagctcctcattacctcaggttatcgctctgcatcgctcacaagcacaatcttcggtgtccttgcagcagggctgggtccagggggcaaacgggctgtgttccgtggaccagggagtgcagggaagcgccacatcccagttctatacaatgtcagagcggctgcacccctctgacgattcaatcaaggtcatcccccttaccacctttgcaccccgtcagcaggcacggcctagccgcggtgattcacctattatggaaacacatcccttgtag

SEQ ID NO: 226393 - DNA, 3960 bp, Artificial Sequence
  derived and/or modified sequence
taggttgtgagagtcaataccaccaactgtcacaagtgcttgttgtctggcacctacatcttcgccgtgctgcttgtttgcgttgtgtttcattctggcgcacaggagaagaactacacaatcagggaggagattcccgaaaacgtcctgatagggaacctgctcaaagacctcaatctcagtctgattccgaacaagtccctgacaaccaccatgcaattcaaacttgtgtacaaaacgggagacgtaccgctcatccgcatcgaagaggacactggcgagatctttactaccggagctcgcatcgatagggagaagctatgcgccggaatacccagagatgagcactgcttttatgaggtggaagttgccatccttcccgatgagattttcaggcttgttaaaattcggtttctcattgaggacataaacgataacgcaccactgttcccagctactgtcattaatatctcaatccctgagaatagcgccatcaatagcaaatacaccctgccggcagccgtggaccccgacgtcgggatcaacggtgtccagaactatgaactgattaagagccagaatatcttcggcctggacgttatagaaactcccgagggtgacaaaatgccgcagctgatcgtacagaaagagctggatagggaggagaaggatacatatgtaatgaaggtgaaggtggaggacggtggattcccgcagagatcttccacagcaattttgcaggtctccgtgacggatacaaatgacaatcatcctgtgtttaaggagacagagatcgaagtgtccatccccgagaatgccccagtagggacctcagtcacgcagctgcacgcaacggacgccgacatcggggaaaatgccaagattcacttttcattttccaacctggtctccaacattgcacgcaggctgttccacctcaatgccactaccgggcttatcaccattaaagagcccctggatcgggaagaaaccccgaaccacaagctgcttgttctggcctcagacggtggcctcatgcctgcacgggcaatggttctcgtcaatgtgacagacgtgaatgataatgttcctagtattgacatccgatatatagtgaatccagtgaatgataccgttgtgctgtcagagaacattcctctcaacactaagatcgctctgataacagtcacagacaaggatgcggaccacaacgggagagtaacctgctttaccgaccacgagatcccgtttcggcttcgtcctgtcttctccaatcagttcctcctggagaatgccgcatacctagactatgagagcaccaaggagtacgcaataaagttgctcgccgcagacgctggcaagccccctctcaatcaatccgccatgctctttatcaaggttaaggacgaaaatgataacgcacccgtgtttactcagagctttgtgaccgtctccatccctgaaaataacagccccggaatacagctcatgaaggtctccgcaacagatgccgattctgggccaaatgcagagattaattatttactgggacctgacgcccctcccgagttctcactagacaggcggactgggatgctcactgtggtaaagaagctggaccgcgaaaaggaagataagtatctgtttacaattctcgctaaagacaacggagtgccacctctgacatctaatgtgaccgtgttcgtctctataatcgaccagaacgacaattcacctgtattcacacataatgagtataagttttacgttccagagaaccttccacggcacgggacagtgggactgattaccgtcaccgacccagactacggcgataacagcgccgtcaccctgtcaattctcgatgaaaacgacgattttaccattgacagtcagacaggggtgatcagaccaaatatctccttcgaccgcgagaagcaagaaagttacaccttttacgtcaaagccgaggatgggggacgagtgtccagatcttcgagtgctaaggtgaccatcaacgtggtcgatgttaacgacaacaagccagtgtttattgtgcctccttacaattattcatacgagctggtactcccatcgaccaacccaggcaccgtcgtctttcaggtgattgcagtggacaatgataccggcatgaatgcagaggtgaggtactctattgtggggggaaacactcgtgatctgtttgctattgaccaggaaacgggcaatatcacactcatggagaagtgtgatgtgactgacttgggcttacatagggtgcttgtaaaggcgaatgatctggggcagcccgacagcctgtttagcgtggttattgtcaacctctttgtcaatgaaagcgtcactaacgctactttaatcaacgaactggtgcgtaaatctatcgaagcaccggtcacgcctaacactgagatagctgatgtgagctccccaacatccgactacgtgaagattctggtggccgctgtggccggaacaatcacagtggtggtggtgatatttatcactgcggtggtgaggtgtagacaggcccctcatttaaaggcggctcagaagaacatgcagaattccgagtgggctactcccaaccctgagaatcgccagatgatcatgatgaaaaaaaagaagaagaagaaaaaacattcacccaagaacttacttttaaatgtagtgacaatagaggagaccaaggcagatgacgttgattcagatggcaatagggtcaccttggacctgcccatcgacctagaagaacaaaccatgggcaagtacaattgggtaactacgccaactacctttaaaccagacagccccgacctggcaagacactataaatctgcttcacctcaacctgcgttccaaattcagcctgaaacccctctgaaccttaagcaccatatcatccaggagttacccttagacaatacattcgtggcctgcgacagtatttccaactgcagctcctcctcctctgatccctacagcgtgtcagattgcgggtacccagttactaccttcgaagtgcctgtgtccgtgcacaccagaccaagccagcggagggtcacttttcatctgcctgagggttctcaagaatcatcctcagacggaggcctgggggaccatgatgcaggaagcctgacatcaacctcccacggtcttcctttgggctacccccaggaagaatatttcgatcgtgcaaccccctcaaacaggaccgagggggacggtaatagtgaccctgagtccacattcattccgggattaaaaaaagagataaccgtacagcctaccgtcgaggaggcctcggataattgtacacaggagtgcctaatctatggacactccgacgcctgctggatgcccgcttccctggatcacagttcttccagtcaagctcaggcctctgcactttgccactccccacccctctctcaggcctccacacagcaccattcccccccagtcacccagacgatcgtgttatgccattctccgcctgtaactcagactatagctctttgtcacagcccacctcctattcaggtgtccgcacttcaccattcacctccgctggtgcagggaactgctctccatcactccccgccaagcgctcaggcaagcgctctgtgctactcccctccactcgcccaggctgcggcaatatcacactcctcctctctaccccaagtgatagcgttgcatcggagtcaggcacagtcctcagtgtccttacagcaggggtgggtacaaggagccaacgggttgtgctccgtagaccaaggtgtccaggggtctgccacatcccagttttacacaatgtctgagaggcttcatccaagcgacgattccattaaggttatccccttaacaaccttcgcccctaggcagcaagcccgacccagcagaggtgatagccctatcatggaaacgcacccactctag

SEQ ID NO: 226394 - DNA, 4023 bp, Artificial Sequence
  derived and/or modified sequence
atgtttagggttggcttcttaataatttcttcttcctcttctctctctcctcttcttttggtcagtgttgtgcgggttaatacaacaaactgtcacaagtgtttgttgtccgggacgtacattttcgcggtcctgctagtatgcgtggtgttccactctggcgcccaggagaaaaactacaccatccgagaagaaattccagaaaacgtcctgataggcaacttgttgaaagaccttaacttgtcgctgattccaaacaagtccttgacaactactatgcagttcaagctagtgtacaagaccggagatgtgccactgattcgaattgaagaggatactggtgagatcttcactaccggcgctcgcattgatcgtgagaaattatgtgctggtatcccaagggatgagcattgcttttatgaagtggaggttgccattttgccggatgaaatatttagactggttaagatacgttttctgatagaagatataaatgataatgcaccattgttcccagcaacagttatcaacatatcaattccagagaactcggctataaactctaaatatactctcccagcggctgttgatcctgacgtaggcataaacggagttcaaaactacgaactaattaagagtcaaaacatttttggcctcgatgtcattgaaacaccagaaggagacaagatgccacaactgattgttcaaaaggagttagatagggaagagaaggatacctatgtgatgaaagtaaaggttgaagatggtggctttcctcaaagatccagtactgctattttgcaagtaagtgttactgatacaaatgacaaccacccagtctttaaggagacagagattgaagtcagtataccagaaaatgctcctgtaggcacttcagtgacacagctccatgccacagatgctgacataggtgaaaatgccaagatccacttctctttcagcaatctagtctccaacattgccaggagattatttcacctcaatgccaccactggacttatcacaatcaaagaaccactggatagggaagaaacaccaaaccacaagttactggttttggcaagtgatggtggattgatgccagcaagagcaatggtgctggtaaatgttacagatgtcaatgataatgtcccatccattgacataagatacatcgtcaatcctgtcaatgacacagttgttctttcagaaaatattccactcaacaccaaaattgctctcataactgtgacggataaggatgcggaccataatggcagggtgacatgcttcacagatcatgaaattcctttcagattaaggccagtattcagtaatcagttcctcctggagaatgcagcatatcttgactatgagtccacaaaagaatatgccattaaattactggctgcagatgctggcaaacctcctttgaatcagtcagcaatgctcttcatcaaagtgaaagatgaaaatgacaatgctccagttttcacccagtctttcgtaactgtttctattcctgagaataactctcctggcatccagttgatgaaagtaagtgcaacggatgcagacagtgggcctaatgctgagatcaattacctgctaggccctgatgctccacctgaattcagcctggatcgtcgtacaggcatgctgactgtagtgaagaaactagatagagaaaaagaggataaatatttattcacaattctggcaaaagataatggggtaccacccttaaccagcaatgtcacagtctttgtaagcattattgatcagaatgacaatagcccagttttcactcacaatgaatacaaattctatgtcccagaaaaccttccaaggcatggtacagtaggactaatcactgtaactgatcctgattatggagacaattctgcagttacgctctccattttagatgagaatgatgacttcaccattgattcacaaactggtgtcatccgaccaaatatttcatttgatagagaaaaacaagaatcttacactttctatgtaaaggctgaggatggtggtagagtatcacgttcttcaagtgccaaagtaaccataaatgtggttgatgtcaatgacaacaaaccagttttcattgtccctccttacaactattcttatgaattggttctaccgtccactaatccaggcacagtggtctttcaggtaattgctgttgacaatgacactggcatgaatgcagaggttcgttacagcattgtaggaggaaacacaagagatctgtttgcaatcgaccaagaaacaggcaacataacattgatggagaaatgtgatgttacagaccttggtttacacagagtgttggtcaaagctaatgacttaggacagcctgattctctcttcagtgttgtaattgtcaatctgttcgtgaatgagtcagtgaccaatgctacactgattaatgaactggtgcgcaaaagcattgaagcaccagtgaccccaaatactgagatagctgatgtatcctcaccaactagtgactatgtcaagatcctggttgcagctgttgctggcaccataactgtcgttgtagttattttcatcactgctgtagtaagatgtcgccaggcaccacaccttaaggctgctcagaaaaacatgcagaattctgaatgggctaccccaaacccagaaaacaggcagatgataatgatgaagaaaaagaaaaagaagaagaagcattcccctaagaacctgctgcttaatgttgtcactattgaagaaactaaggcagatgatgttgacagtgatggaaacagagtcacactagaccttcctattgatctagaagagcaaacaatgggaaagtacaattgggtaactacacctactactttcaagcctgacagccctgatttggcccgacactacaaatctgcctctccacagcctgccttccaaattcagcctgaaactcccctgaatttgaagcaccacatcatccaagaactgcctctcgataacacctttgtggcctgtgactctatctccaattgttcctcaagcagttcagatccctacagcgtttctgactgtggctatccagtgacaaccttcgaggtacctgtgtccgtacacaccagaccgtcccagcggcgtgtcacatttcacctgccagaaggctctcaggaaagcagcagtgatggtggactgggagaccatgatgcaggcagccttaccagcacatcccatggcctgccccttggctatcctcaggaggagtactttgatcgtgctacacccagcaatcgcactgaaggggatggcaactccgatcctgaatctaattttatcagtgggatgagggagaaaataactgttcaaccaactgtggaagaggcctctgacaactgcactcaagaatgtctcatctatggccattctgatgcctgctggatgccggcatctctggatcattccagctcttcacaagcacaggcctctgctctatgccacagcccaccactgtcacaggcctctactcagcaccacagcccaccagtgacacagaccattgttctctgccacagccctccagtgacacagaccatcgcattgtgccacagcccaccaccgatacaggtgtctgctctccaccacagtcctcctctagtgcagggtactgcacttcaccacagcccaccatcagcacaggcctcagccctctgctacagccctcctttagcacaggctgctgcaatcagccacagctcttctctgccacaggttattgccctccatcgtagtcaggcccaatcatcagtcagtttgcagcaaggttgggtgcaaggtgctaatggactatgctctgttgatcagggagtgcaaggtagtgcaacatctcagttttacaccatgtctgaaagacttcatcccagtgatgattcaattaaagtcattcctttgacaaccttcgctccacgccaacaggccagaccgtccagaggtgattcccccattatggaaacacatcccttgtaa

SEQ ID NO: 226395 - DNA, 8240 bp, Artificial Sequence
  derived and/or modified sequence
tgttgtgcgggttaatacaacaaactgtcacaagtgtttgttgtccgggacgtacattttcgcggtcctgctagtatgcgtggtgttccactctggcgcccaggagaaaaactacaccatccgagaagaaattccagaaaacgtcctgataggcaacttgttgaaagaccttaacttgtcgctgattccaaacaagtccttgacaactactatgcagttcaagctagtgtacaagaccggagatgtgccactgattcgaattgaagaggatactggtgagatcttcactaccggcgctcgcattgatcgtgagaaattatgtgctggtatcccaagggatgagcattgcttttatgaagtggaggttgccattttgccggatgaaatatttagactggttaagatacgttttctgatagaagatataaatgataatgcaccattgttcccagcaacagttatcaacatatcaattccagagaactcggctataaactctaaatatactctcccagcggctgttgatcctgacgtaggcataaacggagttcaaaactacgaactaattaagagtcaaaacatttttggcctcgatgtcattgaaacaccagaaggagacaagatgccacaactgattgttcaaaaggagttagatagggaagagaaggatacctatgtgatgaaagtaaaggttgaagatggtggctttcctcaaagatccagtactgctattttgcaagtaagtgttactgatacaaatgacaaccacccagtctttaaggagacagagattgaagtcagtataccagaaaatgctcctgtaggcacttcagtgacacagctccatgccacagatgctgacataggtgaaaatgccaagatccacttctctttcagcaatctagtctccaacattgccaggagattatttcacctcaatgccaccactggacttatcacaatcaaagaaccactggatagggaagaaacaccaaaccacaagttactggttttggcaagtgatggtggattgatgccagcaagagcaatggtgctggtaaatgttacagatgtcaatgataatgtcccatccattgacataagatacatcgtcaatcctgtcaatgacacagttgttctttcagaaaatattccactcaacaccaaaattgctctcataactgtgacggataaggatgcggaccataatggcagggtgacatgcttcacagatcatgaaattcctttcagattaaggccagtattcagtaatcagttcctcctggagaatgcagcatatcttgactatgagtccacaaaagaatatgccattaaattactggctgcagatgctggcaaacctcctttgaatcagtcagcaatgctcttcatcaaagtgaaagatgaaaatgacaatgctccagttttcacccagtctttcgtaactgtttctattcctgagaataactctcctggcatccagttgatgaaagtaagtgcaacggatgcagacagtgggcctaatgctgagatcaattacctgctaggccctgatgctccacctgaattcagcctggatcgtcgtacaggcatgctgactgtagtgaagaaactagatagagaaaaagaggataaatatttattcacaattctggcaaaagataatggggtaccacccttaaccagcaatgtcacagtctttgtaagcattattgatcagaatgacaatagcccagttttcactcacaatgaatacaaattctatgtcccagaaaaccttccaaggcatggtacagtaggactaatcactgtaactgatcctgattatggagacaattctgcagttacgctctccattttagatgagaatgatgacttcaccattgattcacaaactggtgtcatccgaccaaatatttcatttgatagagaaaaacaagaatcttacactttctatgtaaaggctgaggatggtggtagagtatcacgttcttcaagtgccaaagtaaccataaatgtggttgatgtcaatgacaacaaaccagttttcattgtccctccttacaactattcttatgaattggttctaccgtccactaatccaggcacagtggtctttcaggtaattgctgttgacaatgacactggcatgaatgcagaggttcgttacagcattgtaggaggaaacacaagagatctgtttgcaatcgaccaagaaacaggcaacataacattgatggagaaatgtgatgttacagaccttggtttacacagagtgttggtcaaagctaatgacttaggacagcctgattctctcttcagtgttgtaattgtcaatctgttcgtgaatgagtcagtgaccaatgctacactgattaatgaactggtgcgcaaaagcattgaagcaccagtgaccccaaatactgagatagctgatgtatcctcaccaactagtgactatgtcaagatcctggttgcagctgttgctggcaccataactgtcgttgtagttattttcatcactgctgtagtaagatgtcgccaggcaccacaccttaaggctgctcagaaaaacatgcagaattctgaatgggctaccccaaacccagaaaacaggcagatgataatgatgaagaaaaagaaaaagaagaagaagcattcccctaagaacctgctgcttaatgttgtcactattgaagaaactaaggcagatgatgttgacagtgatggaaacagagtcacactagaccttcctattgatctagaagagcaaacaatgggaaagtacaattgggtaactacacctactactttcaagcctgacagccctgatttggcccgacactacaaatctgcctctccacagcctgccttccaaattcagcctgaaactcccctgaatttgaagcaccacatcatccaagaactgcctctcgataacacctttgtggcctgtgactctatctccaattgttcctcaagcagttcagatccctacagcgtttctgactgtggctatccagtgacaaccttcgaggtacctgtgtccgtacacaccagaccgtcccagcggcgtgtcacatttcacctgccagaaggctctcaggaaagcagcagtgatggtggactgggagaccatgatgcaggcagccttaccagcacatcccatggcctgccccttggctatcctcaggaggagtactttgatcgtgctacacccagcaatcgcactgaaggggatggcaactccgatcctgaatctactttcatacctggactaaagaaagaaataactgttcaaccaactgtggaagaggcctctgacaactgcactcaagaatgtctcatctatggccattctgatgcctgctggatgccggcatctctggatcattccagctcttcacaagcacaggcctctgctctatgccacagcccaccactgtcacaggcctctactcagcaccacagcccaccagtgacacagaccattgttctctgccacagccctccagtgacacagaccatcgcattgtgccacagcccaccaccgatacaggtgtctgctctccaccacagtcctcctctagtgcagggtactgcacttcaccacagcccaccatcagcacaggcctcagccctctgctacagccctcctttagcacaggctgctgcaatcagccacagctcttctctgccacaggttattgccctccatcgtagtcaggcccaatcatcagtcagtttgcagcaaggttgggtgcaaggtgctaatggactatgctctgttgatcagggagtgcaaggtagtgcaacatctcagttttacaccatgtctgaaagacttcatcccagtgatgattcaattaaagtcattcctttgacaaccttcgctccacgccaacaggccagaccgtccagaggtgattcccccattatggaaacacatcccttgtaaagctaaaatagttacttcaaattttcagaaaagatgtatatagtcaaaatttaagatacaattccaatgagtattctgattatcagatttgtaaataactatgtaaatagaaacagataccagaataaatctacagctagacccttagtcaatagttaaccaaaaaattgcaatttgtttaattcagaatgtgtatttaaaaagaaaaggaatttaacaatttgcatccccttgtacagtaaggcttatcatgacagagcgtactatttctgatgtacagtattttttgttgtttttatcatcatgtgcaatattactgatttgtttccatgctgattgtgtggaaccagtatgtagcaaatggaaagcctagaaatatcttattttctaagtttacctttagtttacctaaacttttgttcagataatgttaaaaggtatacgtactctagccttttttggggctttctttttgatttttgtttgtggttttcagtttttttgttgttgttagtgagtctcccttcaaaatacacagtaggtagtgtaaatactgcttgtttgtgtctctctgctgtcatgttttctaccttattccaatactatattgttgataaaatttgtatatacattttcaataaagaatatgtataaactgtacagatctagatctacaacctatttctctactctttagtagagttcgagacacagaagtgcaataactgccctaattaagcaactatttgttaaaaagggcccctttttactttaatagtttagtgtaaagtacatcagaaataaaactgtatctgacattttaagcctgtagtccattattacttgggtctttacttctgggaatttgtatgtaacagcctagaaaattaaaaggaggtggatgcatccaaagcacgagtcacttaaaatatcgacggtaaactactattttgtagagaaactcaggaagatttaaatgttgatttgacagctcaataggctgttaccaaagggtgttcagtaaaaataacaaatacatgtaactgtagataaaaccacatactaaatctataagactaagggatttttgttattctagctcaacttactgaagaaaaccactaataacaacaagaatatcaggaaggaacttttcaagaaatgtaattataaatctacatcaaacagaattttaaggaaaaatgcagagggagaaataaggcacatgactgcttcttgcagtcaagaagaaataccaataacacacacagaacaaaaaccatcaaaatctcatatatgaaataaaatatattcttctaagcaaagaaacagtactattcatagaaaacattagttttctcctgttgtctgttatttccttcttttatcctcttaactggccattatcttgtatgtgcacattttataaatgtacagaaacatcaccaacttgattttcttccatagcaaaactgagaaaataccttgtttcagtataacactaaaccaagagacaattgatgtttaatgggggcggttggggttgggggggagtcaatatctcctattgattaacttagacatagattttgtaatgtataacttgatatttaatttatgattaaactgtaattttgtaacataaactgtggtaattgcataatttcattggtgaggatttcctttgaatattgagaaagtttcttttcatgtgcccagcaggttaagtagcgttttcagaatatacattattcccatccattgtaaagttccttaagtcatatttgactgggcgtgcagaataacttcttaactattaactatcagagtttgattaataaaattaattaattttttttctccttcgtgttgttaatgttccaagggatttggagcatactggttttccaggtgcatgtgaatcccgaaggactgatgatatttgaatgtttattaaattattatcacacaaatgtgttgatattgtggctattgttgatgttgaaaattgtaaacttggggaagattaagaaaagaaccaatagtgacaaaaatcagtgcttccagtagattttagaacattctttgcctcaaaaaacctgcaaagatgatgtgagattttttcttgtgttttaattattttcacattttctctctgcaaacctttagttttctgatgatctacacacacacatacacacacacacacacacacgtgcacacacacacatttaaaggatataaaaagaagaggttgaaagattattaaataacttatcaggcatctcaatggttactatctatgttagtgaaaatcaaataggactcaaagttggatatttgggatttttcttctgacagtataatttattgagttactagggaggttcttaaatcctcatatctggaaacttgtgaagttttgacacctttcctatagatataggaatgaaccaatacgcttttattaccctttctaactctgattttataatcagacttagattgtgtttagaatattaaatgactgggcaccctcttcttggtttttaccagagaggctttgaatggaagcaggctgagagtagccaaagaggcaaggggtattagcccagttattctcccctatgccttctcttcctaagcgtccactaggtctggccttggaaatctgttacttctacggcttcagatctgatgatatctttttcatcacattacaagttatttctttgactgaatagacagtggtataggttgacacagcacacaagtggctattgtgatgtatgatgtatgtagtcccacaactgcaaaacgtcttactgaagcaacaatcgaaaaatggttctgttttaaaaaggattttgtttgatttgaaattaaaacttcaaactgaatgacttatatgagaataatatgttcaatcaaagtagttattctattttgtgtccatattccattagattgtgattattaattttctagctatggtattactatatcacacttgtgagtatgtattcaaatactaagtatcttatatgctacgtgcatacacattcttttcttaaactttacctgtgttttaactaatattgtgtcagtgtattaaaaattagcttttacatatgatatctacaatgtaataaatttagagagtaattttgtgtattcttatttacttaacattttacttttaattatgtaaatttggttagaaaataataataaatggttagtgctattgtgtaatggtagcagttacaaagagcctctgccttcccaaactaatatttatcacacatggtcattaaatgggaaaaaaatagactaaacaaatcacaaattgttcagttcttaaaatgtaattatgtcacacacacaaaaaaatccttttcaatcctgagaaaattaaaggtgttttactcacatggatatttcaacattagttttttttgtttgtttctttttcatggtattactgaaggtgtgtatactccctaatacacatttatgaaaatctacttgtttagacttttatttatactcttctgatttatattttttattataattattatttcttatcttcttttatattttttggaaaccaaatttatagttagtttaggtaaactttttattatgaccattagaaactattttgaatgtttccaactggctcaattggctgggaaaacatgggaacaagagaagctgaaatatatttctgcaagaacctttctatattatgtgccaattaccacaccagatcaattttatgcagaggccttaaaatattctttcacagtagctttcttacactaaccgtcatgtgcttttagtaaatatgatttttaaaagcagttcaagttgacaacagcagaaacagtaacaaaaaaatctgctcagaaaaatgtatgtgcacaaataaaaaaaattaatggcaattgtttagtgactgtaagtgatactttttaaagagtaaactgtgtgaaatttatactatccctgcttaaaatattaagatttttatgaaatatgtatttatgtttgtattgtgggaagattcctcctctgtgatatcatacagcatctgaaagtgaacagtatcccaaagcagttccaagcatgctttggaagtaagaaggttgactattgtatggccaaggatggcagtatgtaatccagaagcaaacttgtattaattgttctatttcaggttctgtattgcatgttttcttattaatatatattaataaaagttatgagaaataaa

SEQ ID NO: 226396 - DNA, 3960 bp, Artificial Sequence
  derived and/or modified sequence
tgagtggtgagagtgaacaccaccaactgccacaagtgcctgctgagcggcacctacatcttcgccgtgctgctggtgtgcgtggtgttccacagcggcgcccaggagaagaactacaccatcagagaggagatccccgagaacgtgctgatcggcaacctgctgaaggacctgaacctgagcctgatccccaacaagagcctgaccaccaccatgcagttcaagctggtgtacaagaccggcgacgtgcccctgatcagaatcgaggaggacaccggcgagatcttcaccaccggcgccagaatcgacagagagaagctgtgcgccggcatccccagagacgagcactgcttctacgaggtggaggtggccatcctgcccgacgagatcttcagactggtgaagatcagattcctgatcgaggacatcaacgacaacgcccccctgttccccgccaccgtgatcaacatcagcatccccgagaacagcgccatcaacagcaagtacaccctgcccgccgccgtggaccccgacgtgggcatcaacggcgtgcagaactacgagctgatcaagagccagaacatcttcggcctggacgtgatcgagacccccgagggcgacaagatgccccagctgatcgtgcagaaggagctggacagagaggagaaggacacctacgtgatgaaggtgaaggtggaggacggcggcttcccccagagaagcagcaccgccatcctgcaggtgagcgtgaccgacaccaacgacaaccaccccgtgttcaaggagaccgagatcgaggtgagcatccccgagaacgcccccgtgggcaccagcgtgacccagctgcacgccaccgacgccgacatcggcgagaacgccaagatccacttcagcttcagcaacctggtgagcaacatcgccagaagactgttccacctgaacgccaccaccggcctgatcaccatcaaggagcccctggacagagaggagacccccaaccacaagctgctggtgctggccagcgacggcggcctgatgcccgccagagccatggtgctggtgaacgtgaccgacgtgaacgacaacgtgcccagcatcgacatcagatacatcgtgaaccccgtgaacgacaccgtggtgctgagcgagaacatccccctgaacaccaagatcgccctgatcaccgtgaccgacaaggacgccgaccacaacggcagagtgacctgcttcaccgaccacgagatccccttcagactgagacccgtgttcagcaaccagttcctgctggagaacgccgcctacctggactacgagagcaccaaggagtacgccatcaagctgctggccgccgacgccggcaagccccccctgaaccagagcgccatgctgttcatcaaggtgaaggacgagaacgacaacgcccccgtgttcacccagagcttcgtgaccgtgagcatccccgagaacaacagccccggcatccagctgatgaaggtgagcgccaccgacgccgacagcggccccaacgccgagatcaactacctgctgggccccgacgccccccccgagttcagcctggacagaagaaccggcatgctgaccgtggtgaagaagctggacagagagaaggaggacaagtacctgttcaccatcctggccaaggacaacggcgtgccccccctgaccagcaacgtgaccgtgttcgtgagcatcatcgaccagaacgacaacagccccgtgttcacccacaacgagtacaagttctacgtgcccgagaacctgcccagacacggcaccgtgggcctgatcaccgtgaccgaccccgactacggcgacaacagcgccgtgaccctgagcatcctggacgagaacgacgacttcaccatcgacagccagaccggcgtgatcagacccaacatcagcttcgacagagagaagcaggagagctacaccttctacgtgaaggccgaggacggcggcagagtgagcagaagcagcagcgccaaggtgaccatcaacgtggtggacgtgaacgacaacaagcccgtgttcatcgtgcccccctacaactacagctacgagctggtgctgcccagcaccaaccccggcaccgtggtgttccaggtgatcgccgtggacaacgacaccggcatgaacgccgaggtgagatacagcatcgtgggcggcaacaccagagacctgttcgccatcgaccaggagaccggcaacatcaccctgatggagaagtgcgacgtgaccgacctgggcctgcacagagtgctggtgaaggccaacgacctgggccagcccgacagcctgttcagcgtggtgatcgtgaacctgttcgtgaacgagagcgtgaccaacgccaccctgatcaacgagctggtgagaaagagcatcgaggcccccgtgacccccaacaccgagatcgccgacgtgagcagccccaccagcgactacgtgaagatcctggtggccgccgtggccggcaccatcaccgtggtggtggtgatcttcatcaccgccgtggtgagatgcagacaggccccccacctgaaggccgcccagaagaacatgcagaacagcgagtgggccacccccaaccccgagaacagacagatgatcatgatgaagaagaagaagaagaagaagaagcacagccccaagaacctgctgctgaacgtggtgaccatcgaggagaccaaggccgacgacgtggacagcgacggcaacagagtgaccctggacctgcccatcgacctggaggagcagaccatgggcaagtacaactgggtgaccacccccaccaccttcaagcccgacagccccgacctggccagacactacaagagcgccagcccccagcccgccttccagatccagcccgagacccccctgaacctgaagcaccacatcatccaggagctgcccctggacaacaccttcgtggcctgcgacagcatcagcaactgcagcagcagcagcagcgacccctacagcgtgagcgactgcggctaccccgtgaccaccttcgaggtgcccgtgagcgtgcacaccagacccagccagagaagagtgaccttccacctgcccgagggcagccaggagagcagcagcgacggcggcctgggcgaccacgacgccggcagcctgaccagcaccagccacggcctgcccctgggctacccccaggaggagtacttcgacagagccacccccagcaacagaaccgagggcgacggcaacagcgaccccgagagcaccttcatccccggcctgaagaaggagatcaccgtgcagcccaccgtggaggaggccagcgacaactgcacccaggagtgcctgatctacggccacagcgacgcctgctggatgcccgccagcctggaccacagcagcagcagccaggcccaggccagcgccctgtgccacagcccccccctgagccaggccagcacccagcaccacagcccccccgtgacccagaccatcgtgctgtgccacagcccccccgtgacccagaccatcgccctgtgccacagccccccccccatccaggtgagcgccctgcaccacagcccccccctggtgcagggcaccgccctgcaccacagcccccccagcgcccaggccagcgccctgtgctacagcccccccctggcccaggccgccgccatcagccacagcagcagcctgccccaggtgatcgccctgcacagaagccaggcccagagcagcgtgagcctgcagcagggctgggtgcagggcgccaacggcctgtgcagcgtggaccagggcgtgcagggcagcgccaccagccagttctacaccatgagcgagagactgcaccccagcgacgacagcatcaaggtgatccccctgaccaccttcgcccccagacagcaggccagacccagcagaggcgacagccccatcatggagacccaccccctgtag

SEQ ID NO: 226397 - protein, 521 aa, Artificial Sequence
  derived and/or modified sequence
MKSQGQHWYSSSDKNCKVSFREKLLIIDSNLGVQDVENLKFLCIGLVPNKKLEKSSSASDVFEHLLAEDLLSEEDPFFLAELLYIIRQKKLLQHLNCTKEEVERLLPTRQRVSLFRNLLYELSEGIDSENLKDMIFLLKDSLPKTEMTSLSFLAFLEKQGKIDEDNLTCLEDLCKTVVPKLLRNIEKYKREKAIQIVTPPVDKEAESYQGEEELVSQTDVKTFLEALPQESWQNKHAGSNGNRATNGAPSLVSRGMQGASANTLNSETSTKRAAVYRMNRNHRGLCVIVNNHSFTSLKDRQGTHKDAEILSHVFQWLGFTVHIHNNVTKVEMEMVLQKQKCNPAHADGDCFVFCILTHGRFGAVYSSDEALIPIREIMSHFTALQCPRLAEKPKLFFIQACQGEEIQPSVSIEADALNPEQAPTSLQDSIPAEADFLLGLATVPGYVSFRHVEEGSWYIQSLCNHLKKLVPRMLKFLEKTMEIRGRKRTVWGAKQISATSLPTAISAQTPRPPMRRWSSVS

SEQ ID NO: 226398 - DNA, 1566 bp, Artificial Sequence
  derived and/or modified sequence
atgaaatctcaagggcaacattggtattcttcaagcgataaaaattgtaaagtttctttccgagaaaagcttctgatcatagatagcaatctgggggtgcaggatgtcgagaacctgaagtttctgtgcattggcctcgtcccaaacaagaaactcgagaagtcttcctcggccagcgacgtctttgaacacttgctggccgaagacctcttgagtgaagaggacccgttttttctggccgagctactttatattatacgccaaaaaaagctgttgcagcacctcaactgcactaaggaggaggtggagcggctgttacctacacgtcagagggtgagccttttcaggaatcttttgtacgagctttctgaggggatcgacagtgagaatctgaaggacatgatctttctactcaaagattcactgcccaagaccgagatgacctccttaagcttcctcgcctttctggaaaagcaaggcaagattgatgaggataacctgacatgtctggaagatttgtgtaaaactgtggtgcctaaattactgcgcaacatcgagaagtacaagcgcgagaaggctatccaaattgtgactccgccagttgacaaggaagctgaaagctatcaaggtgaagaagagctagtaagtcagaccgatgtgaaaacgttcctggaggctttgccacaggagtcgtggcaaaacaagcatgcaggatctaacggcaatagagcaaccaatggtgccccatccctggtcagtcgagggatgcagggcgcttctgccaacacgctgaattccgagacatccaccaagagagctgcagtttacagaatgaacaggaatcatcgcgggctgtgtgtaatagtgaacaaccactcattcactagccttaaggatcggcagggcacgcataaagacgcggagatcctcagtcatgtgttccagtggttgggctttactgtgcacattcataacaacgtgactaaggttgagatggaaatggtcctgcagaagcagaaatgcaatcccgcgcatgctgacggggattgcttcgtgttctgtattctgacgcacgggcgctttggcgcagtgtattcaagtgacgaggcactgatccccatccgggaaatcatgtcccactttacagccctacagtgccctaggttagccgagaagcctaaactcttcttcatacaagcgtgtcagggagaggagattcagccgtccgtgagtatcgaagctgatgcactcaatccagaacaggccccgacaagtctccaggacagtattcctgcagaagcagatttcctgctgggcttggccaccgtacctggatatgtctccttccgccacgtggaggagggcagttggtacattcagtcactatgcaatcacttgaagaaactggttccgcggatgctgaagtttctcgagaagactatggagatccgcgggagaaagcgtacagtttggggggcgaagcagataagcgccacatctctgcctacagccatatcggcacaaacccctcggccaccgatgaggcggtggtcatcggtgtcctag

SEQ ID NO: 226399 - DNA, 1566 bp, Artificial Sequence
  derived and/or modified sequence
atgaagagccagggccagcactggtacagcagcagtgacaagaactgcaaggtgtccttccgggagaagctgctgatcatcgacagcaacctgggcgtgcaggatgtggagaacctgaagttcctgtgcatcggcctggtgcccaacaagaagctggagaagagcagcagcgccagtgatgtgtttgagcacctgctggccgaggacctgctgtctgaggaggaccccttcttcctggccgagctgctgtacatcatccggcagaagaagctgctgcagcacctgaactgcaccaaggaggaggtggagcggctgctgcccacccggcagagggtgtccctcttcaggaacctgctgtatgagctgtctgagggcatcgacagcgagaacctgaaggacatgatcttcctgctgaaggacagcctgcccaagacagagatgaccagcctgtccttcctggccttcctggagaagcagggcaagattgatgaggacaacctgacctgcctggaggacctgtgcaagacagtggtgcccaagctgctgagaaatattgagaagtacaagcgggagaaggccatccagatcgtgaccccacctgtggacaaggaggccgagagctaccagggcgaggaggagctggtgtcccagacagatgtgaagaccttcctggaggccctgccccaggagagctggcagaacaagcatgctggcagcaatggaaacagagccaccaacggggcccccagcctggtgtcccggggcatgcagggcgccagcgccaacaccctgaacagcgagaccagcaccaagagagctgctgtgtacaggatgaacagaaaccaccggggcctgtgtgtgattgtgaacaaccacagcttcaccagcctgaaggaccggcagggcacccacaaggatgctgagatcctgagccacgtgttccagtggctgggcttcaccgtgcacatccacaacaacgtgaccaaggtggagatggagatggtgctgcagaagcagaagtgcaacccagcccacgcagatggagactgctttgtgttctgcatcctgacccacggccgctttggagctgtgtacagcagtgatgaggccctgatccccatccgggagatcatgagccacttcaccgccctgcagtgcccccggctggccgagaagcccaagctgttcttcatccaggcctgccagggcgaggagatccagcccagcgtgtccattgaagcagatgccctgaaccctgagcaggcccccaccagcctgcaggacagcatcccagctgaggccgacttcctgctgggcctggccaccgtgcccggctacgtgtccttcagacatgtggaggagggctcctggtacatccagagcctgtgcaaccacctgaagaagctggtgcccaggatgctgaagttcctggagaagaccatggagatccggggcaggaagaggacagtgtggggcgccaagcagatcagcgccaccagcctgcccacagccatcagcgcccagaccccccggccccccatgaggcgctggagctctgtgtcctag

SEQ ID NO: 226400 - DNA, 1566 bp, Artificial Sequence
  derived and/or modified sequence
atgaagagccagggccagcactggtacagcagcagcgacaagaactgcaaggtctcctttcgcgagaaactactgatcatcgacagcaatcttggagtgcaggatgtggagaacttaaagtttctgtgtatcggtctcgtgcccaacaaaaagttagagaaatcttcatctgcttcagacgtgttcgagcacctgctggctgaggacttactttcagaggaagacccatttttcctggctgaactgctgtacatcatacggcagaagaagctgctgcaacatctgaactgcacaaaagaggaagtagaaaggctcttacccacaagacagagggtttcactgtttagaaatctgttatatgagttaagcgaaggaatcgattccgaaaacctgaaggatatgatcttcctcttaaaagattctctgccaaagacggagatgacatctctgtctttcttggcttttcttgaaaaacagggcaagattgatgaagacaatctcacatgtctggaggacctatgcaaaaccgtggtgcccaaactgctacggaacatcgagaagtataagcgggaaaaggccatacagatcgtaactcctcctgtcgacaaggaggccgaatcctatcagggcgaggaggagcttgtatcccagaccgatgttaagacattcctcgaagctttgcctcaggagtcttggcagaacaagcacgcaggctcaaacgggaatcgggccacgaacggtgcgccgagccttgtttcccggggcatgcagggcgcttccgccaacactctgaactcagaaaccagcaccaagcgcgcagcagtgtaccgaatgaatcgcaatcatagaggcctatgcgtgattgtgaacaatcacagcttcacctcgttgaaggaccgtcaggggacccacaaggatgccgagatcctgtctcatgttttccagtggttagggtttactgtgcacatacacaataatgtgaccaaagtggagatggaaatggtcttacagaagcagaaatgtaatccagcacacgcagatggtgactgcttcgtgttctgtatcttgacccatggccgtttcggagctgtttacagtagcgacgaggccctgattcctataagagagattatgagccatttcacagcattgcaatgtccgaggctggcggaaaaacccaagttgttttttatccaggcttgccagggagaagagattcagccctctgtctccatagaggctgatgcattaaatccagaacaagcacccaccagcctgcaggattccatacctgcggaagcggactttctacttggactcgcaactgttccaggttatgtgagctttagacacgtggaagagggcagctggtatattcagtccttatgtaatcacctaaaaaagctggtcccgaggatgctgaagttcctcgaaaaaacaatggagatccgtggcaggaagcgaacggtgtggggcgctaaacagatttctgcaacttctcttccaacggctatatctgcgcagaccccgcgcccccccatgcggcggtggtcctcagtgtcttag

SEQ ID NO: 226401 - DNA, 1566 bp, Artificial Sequence
  derived and/or modified sequence
atgaaatcccagggacagcactggtatagtagtagcgacaagaattgcaaagtatcttttagagagaaactgttgattatagactccaatctaggtgtgcaggatgtggagaacctgaaattcctttgcattggcctggttcctaataaaaaactggaaaagtcaagctccgcctcagacgtgttcgagcacctcttagctgaggatttgcttagcgaggaagatccatttttcctggctgaactgctctacatcatacgccagaagaaactgttacaacacttgaattgcaccaaggaagaggttgaacgcctcctccccactcgacaacgggtcagtttgttcagaaacctgctttacgagctcagtgagggcattgactccgaaaacttgaaagatatgatctttctgctgaaggacagtttacctaagaccgaaatgacatcgttgtctttcctcgccttcttggaaaagcagggtaagatcgatgaggataacttgacctgcctggaggacctctgtaaaaccgtcgtgcccaaactcctgcgcaatatcgagaaatataagcgcgaaaaagcaatccagatcgtgacaccacccgtcgataaggaagctgagtcttaccaaggagaggaggagctggtaagtcagacagatgttaagacatttctagaggcactgccacaggagagctggcaaaacaagcatgccggaagtaacggtaacagagccaccaacggtgctccaagcctggtgagccgtgggatgcagggtgcctcagctaacacactgaattctgagacttcaacaaaacgggctgcagtctatcgaatgaatcggaaccacaggggactctgcgtgatcgtgaacaatcacagttttacgtctttgaaagataggcaaggcacccacaaagatgccgaaatcctgagccatgttttccaatggctagggttcacagtccacatccacaataacgttaccaaggtcgagatggaaatggtcctccagaagcagaagtgcaaccccgctcatgctgatggcgattgtttcgtgttctgcattctgacacacggcaggtttggcgctgtgtactcctccgacgaggctttgatacctattcgggagattatgtcacatttcactgctctacagtgtccccgactcgccgagaagccaaagctgtttttcattcaggcctgccagggggaagaaattcagccttctgtttctatcgaggctgacgcgctgaatcccgagcaagcgcctacctcactgcaggactcaatcccagccgaggctgattttttgctgggccttgcaactgtaccgggatatgtgagtttcagacacgtagaagaaggttcatggtacattcagtccctctgtaatcacttaaagaaactggtgcccagaatgttaaagttcttggagaaaactatggagatccgcggtaggaagcggacagtatggggggctaaacagataagtgctacttcactcccaactgctatctcggctcagaccccgcgacccccaatgaggcggtggtcttctgtgagttag

SEQ ID NO: 226402 - DNA, 2073 bp, Artificial Sequence
  derived and/or modified sequence
tgaagattcagttttcacttaaacaaccagcaagtcttgaagtctcttcccaagcaaatgggagcttctttggaccttggagcacacagaggattctactttctttaaaactttgttttcaggcaatttccctgagaaccgtttacttccagaagattggtggagcttgatctgaaggctggccatgaaatctcaaggtcaacattggtattccagttcagataaaaactgtaaagtgagctttcgtgagaagcttctgattattgattcaaacctgggggtccaagatgtggagaacctcaagtttctctgcataggattggtccccaacaagaagctggagaagtccagctcagcctcagatgtttttgaacatctcttggcagaggatctgctgagtgaggaagaccctttcttcctggcagaactcctctatatcatacggcagaagaagctgctgcagcacctcaactgtaccaaagaggaagtggagcgactgctgcccacccgacaaagggtttctctgtttagaaacctgctctacgaactgtcagaaggcattgactcagagaacttaaaggacatgatcttccttctgaaagactcgcttcccaaaactgaaatgacctccctaagtttcctggcatttctagagaaacaaggtaaaatagatgaagataatctgacatgcctggaggacctctgcaaaacagttgtacctaaacttttgagaaacatagagaaatacaaaagagagaaagctatccagatagtgacacctcctgtagacaaggaagccgagtcgtatcaaggagaggaagaactagtttcccaaacagatgttaagacattcttggaagccttaccgcaggagtcctggcaaaataagcatgcaggtagtaatggtaacagagccacaaatggtgcaccaagcctggtctccagggggatgcaaggagcatctgctaacactctaaactctgaaaccagcacaaagagggcagctgtgtacaggatgaatcggaaccacagaggcctctgtgtcattgtcaacaaccacagctttacctccctgaaggacagacaaggaacccataaagatgctgagatcctgagtcatgtgttccagtggcttgggttcacagtgcatatacacaataatgtgacgaaagtggaaatggagatggtcctgcagaagcagaagtgcaatccagcccatgccgacggggactgcttcgtgttctgtattctgacccatgggagatttggagctgtctactcttcggatgaggccctcattcccattcgggagatcatgtctcacttcacagccctgcagtgccctagactggctgaaaaacctaaactctttttcatccaggcctgccaaggtgaagagatacagccttccgtatccatcgaagcagatgctctgaaccctgagcaggcacccacttccctgcaggacagtattcctgccgaggctgacttcctacttggtctggccactgtcccaggctatgtatcctttcggcatgtggaggaaggcagctggtatattcagtctctgtgtaatcatctgaagaaattggtcccaaggatgctgaaatttctggaaaagacaatggaaatcaggggcaggaagagaacagtgtggggtgctaaacagatctcagcaacctccctgcccacggccatctctgcgcagacacctcgaccccccatgcgcaggtggagcagcgtttcctagttctttccagaggcttccttctgcctgccttccagccacatcgcctgagattgacaacgccctacagcaagacggaaacctccctttacagcaccaccttgcgattctgcagccacaaagttgagacttctgaacgtggcactcttctgttcccttactgtttcacgtgtacctgtgtcatctttcttgtttcatcgtaaacatacttctaaaattcccattttctttatttagaaatagaactacaagcggatggttaaacaatttaaacaaatggtccatggggaaaagtgaatttcacactgtcccccaaactttcagtg

SEQ ID NO: 226403 - DNA, 1566 bp, Artificial Sequence
  derived and/or modified sequence
atgaagagccagggccagcactggtacagcagcagcgacaagaactgcaaggtgagcttcagagagaagctgctgatcatcgacagcaacctgggcgtgcaggacgtggagaacctgaagttcctgtgcatcggcctggtgcccaacaagaagctggagaagagcagcagcgccagcgacgtgttcgagcacctgctggccgaggacctgctgagcgaggaggaccccttcttcctggccgagctgctgtacatcatcagacagaagaagctgctgcagcacctgaactgcaccaaggaggaggtggagagactgctgcccaccagacagagagtgagcctgttcagaaacctgctgtacgagctgagcgagggcatcgacagcgagaacctgaaggacatgatcttcctgctgaaggacagcctgcccaagaccgagatgaccagcctgagcttcctggccttcctggagaagcagggcaagatcgacgaggacaacctgacctgcctggaggacctgtgcaagaccgtggtgcccaagctgctgagaaacatcgagaagtacaagagagagaaggccatccagatcgtgaccccccccgtggacaaggaggccgagagctaccagggcgaggaggagctggtgagccagaccgacgtgaagaccttcctggaggccctgccccaggagagctggcagaacaagcacgccggcagcaacggcaacagagccaccaacggcgcccccagcctggtgagcagaggcatgcagggcgccagcgccaacaccctgaacagcgagaccagcaccaagagagccgccgtgtacagaatgaacagaaaccacagaggcctgtgcgtgatcgtgaacaaccacagcttcaccagcctgaaggacagacagggcacccacaaggacgccgagatcctgagccacgtgttccagtggctgggcttcaccgtgcacatccacaacaacgtgaccaaggtggagatggagatggtgctgcagaagcagaagtgcaaccccgcccacgccgacggcgactgcttcgtgttctgcatcctgacccacggcagattcggcgccgtgtacagcagcgacgaggccctgatccccatcagagagatcatgagccacttcaccgccctgcagtgccccagactggccgagaagcccaagctgttcttcatccaggcctgccagggcgaggagatccagcccagcgtgagcatcgaggccgacgccctgaaccccgagcaggcccccaccagcctgcaggacagcatccccgccgaggccgacttcctgctgggcctggccaccgtgcccggctacgtgagcttcagacacgtggaggagggcagctggtacatccagagcctgtgcaaccacctgaagaagctggtgcccagaatgctgaagttcctggagaagaccatggagatcagaggcagaaagagaaccgtgtggggcgccaagcagatcagcgccaccagcctgcccaccgccatcagcgcccagacccccagaccccccatgagaagatggagcagcgtgagctag

SEQ ID NO: 226404 - protein, 686 aa, Artificial Sequence
  derived and/or modified sequence
MIEDSGKRGNTMAERRQLFAEMRAQDLDRIRLSTYRTACKLRFVQKKCNLHLVDIWNVIEALRENALNNLDPNTELNVSRLEAVLSTIFYQLNKRMPTTHQIHVEQSISLLLNFLLAAFDPEGHGKISVFAVKMALATLCGGKIMDKLRYIFSMISDSSGVMVYGRYDQFLREVLKLPTAVFEGPSFGYTEQSARSCFSQQKKVTLNGFLDTLMSDPPPQCLVWLPLLHRLANVENVFHPVECSYCHSESMMGFRYRCQQCHNYQLCQDCFWRGHAGGSHSNQHQMKEYTSWKSPAKKLTNALSKSLSCASSREPLHPMFPDQPEKPLNLAHIVDTWPPRPVTSMNDTLFSHSVPSSGSPFITRSMLESSNRLDEEHRLIARYAARLAAESSSSQPPQQRSAPDISFTIDANKQQRQLIAELENKNREILQEIQRLRLEHEQASQPTPEKAQQNPTLLAELRLLRQRKDELEQRMSALQESRRELMVQLEGLMKLLKTQGAGSPRSSPSHTISRPIPMPIRSASACSTPTHTPQDSLTGVGGDVQEAFAQSSRRNLRNDLLVAADSITNTMSSLVKELNSEVGSETESNVDSEFARTQFEDLVPSPTSEKAFLAQIHARKPGYIHSGATTSTMRGDMVTEDADPYVQPEDENYENDSVRQLENELQMEEYLKQKLQDEAYQVSLQG

SEQ ID NO: 226405 - protein, 686 aa, Artificial Sequence
  derived and/or modified sequence
MIEDSGKRGNTMAERRQLFAEMRAQDLDRIRLSTYRTACKLRFVQKKCNLHLVDIWNVIEALRENALNNLDPNTELNVSRLEAVLSTIFYQLNKRMPTTHQIHVEQSISLLLNFLLAAFDPEGHGKISVFAVKMALATLCGGKIMDKLRYIFSMISDSSGVMVYGRYDQFLREVLKLPTAVFEGPSFGYTEQSARSCFSQQKKVTLNGFLDTLMSDPPPQCLVWLPLLHRLANVENVFHPVECSYCHSESMMGFRYRCQQCHNYQLCQDCFWRGHAGGSHSNQHQMKEYTSWKSPAKKLTNALSKSLSCASSREPLHPMFPDQPEKPLNLAHIVCFRPPRPVTSMNDTLFSHSVPSSGSPFITRSMLESSNRLDEEHRLIARYAARLAAESSSSQPPQQRSAPDISFTIDANKQQRQLIAELENKNREILQEIQRLRLEHEQASQPTPEKAQQNPTLLAELRLLRQRKDELEQRMSALQESRRELMVQLEGLMKLLKTQGAGSPRSSPSHTISRPIPMPIRSASACSTPTHTPQDSLTGVGGDVQEAFAQSSRRNLRNDLLVAADSITNTMSSLVKELNSEVGSETESNVDSEFARTQFEDLVPSPTSEKAFLAQIHARKPGYIHSGATTSTMRGDMVTEDADPYVQPEDENYENDSVRQLENELQMEEYLKQKLQDEAYQVSLQG

SEQ ID NO: 226406 - DNA, 2061 bp, Artificial Sequence
  derived and/or modified sequence
atgattgaagactccggcaaacgcggcaacaccatggccgagcgtcggcaactctttgccgaaatgagagcacaagacctggaccggatcagactttccacctaccggaccgcgtgtaaattgagattcgtacagaagaagtgcaacttacatcttgttgacatctggaacgtgattgaagccttgagagaaaacgctctgaataacctggaccccaacacagagcttaacgtgagccgactcgaagcagttctctcaaccatcttttaccagctgaacaaacggatgcccaccactcatcagatccacgtcgaacagtctatcagcctgcttctcaattttcttctcgctgcctttgatccagaaggtcatgggaaaatatcagttttcgctgtgaagatggccctggctactctgtgtggcggtaagatcatggacaagctccgctatatcttttcaatgatctctgatagctccggagtgatggtgtacggaagatatgaccagtttctccgcgaagtcctgaaactacccacagcagtgtttgagggtcccagctttgggtacaccgaacagtcagccaggtcttgcttcagccaacagaagaaggtgaccttgaacgggtttttggacacccttatgtctgacccacccccccagtgtctcgtgtggctacccctgctgcatagactggccaacgtagagaacgttttccatcctgttgaatgctcatactgccactccgagagcatgatggggtttagataccgctgccaacagtgccataactatcagctgtgccaggattgcttctggcggggacacgccgggggctctcactccaatcagcaccaaatgaaagaatatacttcatggaagtcacctgccaaaaagctcactaatgcactgtcgaaaagcttaagctgcgcgtcgtctagagaaccattacatcctatgtttccagaccagcctgagaagcccctgaacctggcccatatagtcgatacatggccccctagacccgttacatcaatgaacgacactttgttttctcatagtgtgccaagcagcggcagcccttttattactcgatcgatgctcgagagctctaacaggctcgatgaggagcatcgcctcatcgcacgttacgctgctagattggccgcggaatcatcctctagtcagcccccacagcaacgctctgcccccgatatctcctttactatcgatgccaataaacaacaacggcagctgattgccgagctagagaacaaaaatcgtgagatcctccaggaaatccagcgtctgcgcctagagcacgagcaggcttcacagccaacgcctgagaaggcccagcagaatcccactcttcttgcggaattacggttactgcgacagcgcaaggacgagctagaacagagaatgtctgctcttcaggaaagcagaagggagctgatggttcagcttgagggcttaatgaaattactcaagactcagggagcggggtccccccgtagcagccctagccatactatatcaagaccaatcccaatgccaattagatcagcgagcgcttgtagtactccgactcataccccacaagactccctcacaggtgttggcggggatgtgcaggaggcatttgctcaaagcagcagaagaaatttgcggaacgatctcctggtagcggccgatagcatcactaataccatgagcagcctcgtcaaagagctgaatagtgaagtgggaagtgagactgagagtaacgtagacagtgagttcgcccggacacagttcgaggacctcgttcctagtcctacttcagagaaggcctttctggcgcaaatacatgccagaaagccaggttatatccatagcggcgctactacctccaccatgcgcggagacatggtgacggaggatgccgatccatatgtgcagcccgaggatgagaattacgagaacgactcagtgcggcagctggagaatgaacttcaaatggaggagtacctgaaacaaaaattgcaggatgaagcttaccaggttagcctccaggggtag

SEQ ID NO: 226407 - DNA, 2061 bp, Artificial Sequence
  derived and/or modified sequence
atgatcgaggattctggcaagcgcggaaacacgatggccgagcgaagacagctgttcgctgaaatgcgcgcgcaggaccttgaccgcattaggctgtccacatacaggacagcttgtaaactgagattcgtgcagaaaaaatgtaacctacacttggtcgatatctggaatgtcatagaggcactgagagagaatgcccttaacaacctggatcccaatacagaactgaatgtgtcgcggctggaggctgttctaagcactatcttttaccagcttaacaaaagaatgcccactacccaccagatccacgtagaacagtctattagcttactcctgaacttcctactcgctgcgtttgatcctgaggggcacggcaaaataagcgttttcgccgtcaagatggcattagctacactctgcggaggtaagatcatggataagctgcgatacatcttcagtatgatcagtgattcctcaggcgtaatggtctacgggcggtacgatcagtttttgcgcgaagtgttgaaactgcctactgctgtcttcgaaggaccatctttcggctacactgaacagtccgcccggtcttgcttttctcagcagaaaaaagtgactctcaatgggttcctcgacacattgatgagcgacccacccccccaatgcctggtgtggctgcctcttctccataggttagccaatgtggaaaacgtcttccaccccgtggaatgctcttactgccattccgagtcaatgatgggttttagatatcggtgccagcagtgtcataactaccagttatgccaggactgcttctggcggggtcacgccggaggaagccactcgaatcaacaccagatgaaggagtacacttcctggaagtcccctgccaaaaagctgacgaatgccctcagtaagagcctatcttgtgcatcttcaagggaacccctccaccctatgttccccgaccagcctgaaaaaccactaaacctcgcacatatcgtttgctttcgcccaccgagaccagtgacctctatgaatgacaccctgttcagccacagtgtgcctagctcggggtcccctttcatcacacggagtatgctggaatccagcaatcggctcgatgaagagcaccgcctcatcgcacgatacgcagcgagactggcagcagagagcagtagcagtcagcctcctcaacaaagaagcgctcctgatatcagttttactatcgacgctaacaaacagcagcgccagttgattgcggaactcgagaacaaaaatagggagatcctgcaggagatccaaagactgaggttggagcatgaacaggcctctcagcctactccagagaaagcgcagcagaaccctactcttttagcagaactgaggctacttcgacagcgaaaggacgagctagagcagcggatgagcgctctccaggagtcacggcgcgaactaatggtgcagttggagggattaatgaaactgctgaaaacacagggcgccggaagccctagaagttctccttcccatacgatttcccggcctatcccaatgcccattcgttccgccagcgcctgctctacacccactcatactccccaagacagcctcactggtgttggaggagatgtgcaggaggcctttgcccagtccagtcgccggaatctgcgtaatgatctgctggttgccgcggactccatcacaaacacaatgagtagcctggtgaaagaactgaactcagaggtgggaagcgaaaccgaatccaacgttgattcagaattcgcacggacccaattcgaagaccttgtaccaagccctacctcggaaaaggctttccttgctcagatccatgcacgaaagccaggatatatacattcaggggcaaccacctccacaatgcgaggagacatggttaccgaagacgcagacccatatgtccagcccgaagacgaaaactacgagaacgattccgtccggcagctggagaacgagctgcagatggaggaatacctgaagcagaaacttcaagacgaagcataccaggtgagcctgcaaggatag

SEQ ID NO: 226408 - DNA, 2061 bp, Artificial Sequence
  derived and/or modified sequence
atgattgaagattctgggaagaggggcaacaccatggccgagcggcggcagctgtttgctgagatgagggcccaggacctggaccgcatccggctgagcacctacagaacagcctgcaagctgcgctttgtgcagaagaagtgcaacctgcacctggtggacatctggaatgtgattgaggccctgcgggagaatgccctgaacaacctggaccccaacacagagctgaatgtgtcccggctggaggccgtgctgagcaccatcttctaccagctgaacaagaggatgcccaccacccaccagatccacgtggagcagagcatcagcctgctgctgaacttcctgctggccgcctttgatcctgagggccacggcaagatctctgtgtttgctgtgaagatggccctggccaccctgtgtggcggcaagatcatggacaagctgcgctacatcttctccatgatcagtgacagcagtggagtgatggtgtatggccgctatgaccagttcctgcgggaggtgctgaagctgcccacagctgtgtttgagggccccagctttggctacacagagcagagcgcccggagctgcttcagccagcagaagaaggtgaccctgaatggcttcctggacaccctgatgtctgaccccccaccccagtgcctggtgtggctgcccctgctgcaccggctggccaacgtggagaatgtgttccaccctgtggagtgcagctactgccacagcgagagcatgatgggcttccgctaccgctgccagcagtgccacaactaccagctgtgccaggactgcttctggaggggccacgccggcggcagccacagcaaccagcaccagatgaaggagtacacctcctggaagagccctgccaagaagctgaccaatgccctgagcaagagcctgagctgtgccagcagccgggagcccctgcaccccatgtttcctgaccagcctgagaagcccctgaacctggcccacatcgtggacacctggccacccaggcctgtgacctccatgaatgacaccctcttcagccacagcgtgcccagcagcggcagccccttcatcaccaggtccatgctggagagcagcaaccggctggatgaggagcacaggctcatcgcccgctatgctgcccggctggccgctgagagcagcagcagccagcccccccagcagaggtctgccccagacatctccttcaccattgatgccaacaagcagcagaggcagctgattgctgagctggagaacaagaaccgggagatcctgcaggagatccagaggctgcggctggagcacgagcaggccagccagcccaccccagagaaggcccagcagaaccccaccctgctggccgagctgcggctgctgcggcagaggaaggatgagctggagcagaggatgtctgccctgcaggagagccggcgggagctgatggtgcagctggagggcctgatgaagctgctgaagacccagggcgccggcagccccaggagcagccccagccacaccatcagccggcccatccccatgcccatccgcagcgccagcgcctgcagcacccccacccacaccccccaggacagcctgactggagtgggcggagatgtgcaggaggcctttgcccagagcagcagaagaaacctgagaaatgacctgctggtggccgctgacagcatcaccaacaccatgagcagcctggtgaaggagctgaacagcgaggtgggcagcgagacagagagcaatgtggacagcgagtttgcccggacccagtttgaggacctggtgcccagccccaccagcgagaaggccttcctggcccagatccacgccaggaagccaggctacatccacagcggggccaccaccagcaccatgagaggagacatggtgacagaagatgctgacccctacgtgcagccagaagatgaaaattatgaaaatgattctgtgcggcagctggagaatgagctgcagatggaggagtacctgaagcagaagctgcaggatgaggcctaccaggtgtccctgcagggctag

SEQ ID NO: 226409 - DNA, 2061 bp, Artificial Sequence
  derived and/or modified sequence
atgattgaagattctgggaagaggggcaacaccatggccgagcggcggcagctgtttgctgagatgagggcccaggacctggaccgcatccggctgagcacctacagaacagcctgcaagctgcgctttgtgcagaagaagtgcaacctgcacctggtggacatctggaatgtgattgaggccctgcgggagaatgccctgaacaacctggaccccaacacagagctgaatgtgtcccggctggaggccgtgctgagcaccatcttctaccagctgaacaagaggatgcccaccacccaccagatccacgtggagcagagcatcagcctgctgctgaacttcctgctggccgcctttgatcctgagggccacggcaagatctctgtgtttgctgtgaagatggccctggccaccctgtgtggcggcaagatcatggacaagctgcgctacatcttctccatgatcagtgacagcagtggagtgatggtgtatggccgctatgaccagttcctgcgggaggtgctgaagctgcccacagctgtgtttgagggccccagctttggctacacagagcagagcgcccggagctgcttcagccagcagaagaaggtgaccctgaatggcttcctggacaccctgatgtctgaccccccaccccagtgcctggtgtggctgcccctgctgcaccggctggccaacgtggagaatgtgttccaccctgtggagtgcagctactgccacagcgagagcatgatgggcttccgctaccgctgccagcagtgccacaactaccagctgtgccaggactgcttctggaggggccacgccggcggcagccacagcaaccagcaccagatgaaggagtacacctcctggaagagccctgccaagaagctgaccaatgccctgagcaagagcctgagctgtgccagcagccgggagcccctgcaccccatgtttcctgaccagcctgagaagcccctgaacctggcccacatcgtgtgcttccggccccccaggcctgtgacctccatgaatgacaccctcttcagccacagcgtgcccagcagcggcagccccttcatcaccaggtccatgctggagagcagcaaccggctggatgaggagcacaggctcatcgcccgctatgctgcccggctggccgctgagagcagcagcagccagcccccccagcagaggtctgccccagacatctccttcaccattgatgccaacaagcagcagaggcagctgattgctgagctggagaacaagaaccgggagatcctgcaggagatccagaggctgcggctggagcacgagcaggccagccagcccaccccagagaaggcccagcagaaccccaccctgctggccgagctgcggctgctgcggcagaggaaggatgagctggagcagaggatgtctgccctgcaggagagccggcgggagctgatggtgcagctggagggcctgatgaagctgctgaagacccagggcgccggcagccccaggagcagccccagccacaccatcagccggcccatccccatgcccatccgcagcgccagcgcctgcagcacccccacccacaccccccaggacagcctgactggagtgggcggagatgtgcaggaggcctttgcccagagcagcagaagaaacctgagaaatgacctgctggtggccgctgacagcatcaccaacaccatgagcagcctggtgaaggagctgaacagcgaggtgggcagcgagacagagagcaatgtggacagcgagtttgcccggacccagtttgaggacctggtgcccagccccaccagcgagaaggccttcctggcccagatccacgccaggaagccaggctacatccacagcggggccaccaccagcaccatgagaggagacatggtgacagaagatgctgacccctacgtgcagccagaagatgaaaattatgaaaatgattctgtgcggcagctggagaatgagctgcagatggaggagtacctgaagcagaagctgcaggatgaggcctaccaggtgtccctgcagggctag

SEQ ID NO: 226410 - DNA, 2061 bp, Artificial Sequence
  derived and/or modified sequence
atgatcgaggacagcggcaagcggggcaacaccatggccgagcggcgtcaacttttcgccgaaatgcgcgcacaggatctggatagaatccggctgtccacttaccggactgcttgtaagcttcgatttgtgcagaagaaatgcaacctgcacctggttgatatttggaatgtcattgaggccttgcgtgagaacgcgcttaacaatcttgacccgaatacagagctgaatgtgtctagactggaagcggtcctgtccacaattttttaccaactaaacaaaagaatgccgacaacacaccaaattcatgtggagcagagtatctccttgctgttgaactttctcttagctgctttcgacccagagggtcacggcaagatctccgtatttgctgtgaagatggcccttgcaacattgtgtgggggcaagatcatggacaaactaaggtatatcttctcaatgatcagcgacagctccggagtcatggtgtacggcagatatgatcagttcctgagagaggtgctgaaactgcccaccgccgtgtttgaaggcccttcattcggttacacagagcagtctgcccgatcgtgctttagtcagcagaagaaggtgacgctgaacggctttttggacactcttatgtccgacccaccccctcagtgcctggtgtggctacccctgctgcacaggttagcgaacgtggagaacgtgttccatcccgtcgagtgcagttactgtcacagcgagagcatgatgggatttcgctaccggtgccagcagtgtcataattatcaactgtgccaggactgcttctggaggggacacgccgggggaagtcactcaaaccagcatcaaatgaaggagtatacctcttggaagtcccctgccaagaaactaacaaacgccctttccaagagcctgtcttgcgcgtcctcaagggaacctctgcatcctatgttcccggatcagccagaaaaaccccttaacctcgcccacatcgtcgacacctggccacctagaccagtcacatccatgaacgatacccttttctcccatagcgttcctagctcggggtccccttttatcacccggagcatgctcgaaagtagcaacaggttggatgaggaacaccgtctaattgctcgctacgcagctaggttggcagctgagtcttcctcaagccagccaccccaacaaaggagcgcccccgacataagcttcacaatagacgcgaataaacaacagcggcagctcatcgccgagcttgaaaacaaaaatcgtgagatattgcaggagattcagcggctaaggctggaacacgagcaggccagccaacccactccagagaaagcacaacagaatcctacactgttggcagagctgcggcttctacgccagaggaaggacgagcttgagcaacgcatgtctgcactacaagagtcgcggcgagaactgatggtgcaacttgaggggctgatgaagctgctgaaaacacagggcgcaggctcgccacgaagcagtccatcccacactattagtaggcctattcctatgcccatccgctctgcttcagcatgtagcaccccaacacatactccccaggactcccttacgggagtgggcggggatgtccaagaggccttcgcccagagctctagaagaaatcttcgcaacgaccttctcgtggcagctgattctattaccaacacaatgtcctctctggtaaaagagctcaatagtgaagttgggtctgagacagaatccaacgtggactccgaattcgccagaacccagttcgaggaccttgtcccatcccccactagtgagaaggcgttcctagctcagattcatgcccgaaagccagggtatatccatagcggcgctactacctctacaatgagaggcgacatggttactgaagacgccgatccctacgtgcaacctgaagacgagaattacgagaatgattccgtgcggcagcttgagaacgaactgcagatggaagaatatttaaagcagaaactgcaggacgaagcctaccaggtatccctgcagggatag

SEQ ID NO: 226411 - DNA, 2061 bp, Artificial Sequence
  derived and/or modified sequence
atgatcgaggacagcggcaagcggggcaacaccatggccgagcggcgtcagctatttgccgagatgcgcgcccaggatctggacaggatcaggcttagcacctaccggaccgcctgtaaacttcgatttgtccaaaaaaaatgcaatctccacttggtagacatctggaacgtgatagaggcgctccgtgaaaatgcattaaacaacctcgacccgaataccgaactaaatgtgagtagactcgaggcggtgctctctactattttctatcagcttaacaagcgtatgccaaccacccaccagatccatgttgagcagtccattagcttgctgctgaacttcctgctagccgccttcgatcccgaaggccacgggaaaatttctgtgtttgcggtgaaaatggccctggccacactgtgcggtggcaaaatcatggacaaactccgctacattttttcgatgatctctgacagttctggggtgatggtatacggtaggtatgatcaattccttcgagaagttctgaagctgccgaccgctgtgttcgagggcccaagttttgggtatacagagcagagcgctcgttcttgctttagccaacagaagaaggtgactcttaacggctttttggacactctgatgtcagaccctccacctcaatgtctagtgtggcttccactgcttcacagactagccaatgtggaaaacgtctttcatccggtggagtgctcttactgtcattccgagagcatgatgggcttcaggtatcgatgccagcaatgccacaactaccagctgtgccaggattgcttctggaggggccacgccgggggctctcacagcaaccagcaccaaatgaaagagtacactagctggaagtcccccgctaaaaaactgactaacgctctgagcaaaagcctctcctgcgcttcttctcgggaaccgctacatcctatgttccctgaccagcctgagaaaccgcttaacctggctcatatcgtttgcttcaggccccctcgcccagtgacaagtatgaatgacacactgttttcacactccgtgccgtcctctggctccccttttatcactagatctatgctcgaatcttccaatcggctcgacgaggaacataggctgattgctaggtacgccgcacgccttgccgccgagtcgtcctcatcccagcctccccagcagcgttcagctccagacatctcatttaccatcgacgctaacaaacaacagcggcagctgattgctgagttagaaaataaaaatagggaaatccttcaggagattcagcgcctgagactggaacacgaacaggcctcccagcctactcctgagaaagcacagcagaaccctacgttgctcgccgaactgcgcctcctacgccagagaaaggacgaactcgagcagaggatgtccgctctgcaggagtctaggagagagctgatggtgcagctggaggggctgatgaagttgctgaaaacccagggtgctggatccccaaggtcctcgccttcccataccatctcacggcctatccccatgcctatccgatccgcaagtgcatgcagcacccccactcacacgccccaggatagtctaacgggcgtggggggcgacgtgcaggaagcctttgctcaaagctcccgcaggaatctaaggaatgatctactggttgccgcggattctattaccaataccatgagttcactagttaaggaactaaatagcgaggttggatctgaaacagagtccaatgtcgacagtgagttcgctcggacccagtttgaagatttagtcccctccccaacatcggagaaagcctttctagcgcagatccacgcacgcaaacctggatatattcatagcggcgccactacttctaccatgcgaggtgacatggtgaccgaggacgccgatccttacgtccagccagaagacgagaactacgagaacgattctgtgaggcaacttgaaaacgaactccagatggaagagtacctgaaacagaagctccaggatgaagcataccaggttagcctgcagggatag

SEQ ID NO: 226412 - DNA, 2061 bp, Artificial Sequence
  derived and/or modified sequence
atgattgaggactccggaaagagagggaatacaatggcggaaaggaggcagttattcgcggagatgcgtgcccaagatctcgatcggatcagactctctacttataggacagcatgcaagctgcgttttgttcaaaaaaaatgtaacttgcacttggtagacatttggaatgtaatcgaggccctcagagagaacgcattgaacaatttggatcccaatacagagctgaacgtgtcacggctagaggctgtgctatccaccattttttatcagctgaataagcggatgccaaccactcaccaaatccacgtcgagcagtctatttccctcctgctgaacttccttttggcggcttttgaccctgaagggcatggcaaaatcagcgtcttcgcagtgaaaatggcattggccacactatgcggtggtaaaattatggataaactcaggtacatcttctccatgatctccgactcttcaggggtcatggtttatgggagatatgatcagtttctgcgagaggttcttaagctcccgaccgctgtgttcgaagggccaagctttggatacacagagcagagtgctaggtcctgctttagccagcaaaagaaagtcacgctgaatgggttccttgataccctgatgtctgatccccctccacagtgtttagtgtggctgcccctgcttcaccgcctagccaatgtggagaacgtgtttcatcccgtggagtgctcatactgccactccgaatccatgatgggttttaggtaccgttgccaacaatgtcataattaccaactctgtcaagactgtttctggcggggtcacgcgggaggttcacattccaatcagcatcaaatgaaggaatacacttcatggaaatcccccgctaaaaaactcaccaatgccctttcaaaatcgctgtcttgcgctagttcgcgggagcccttacatcccatgttcccagatcagccagagaagcctttgaaccttgcccatatcgtcgatacttggccacctagacctgttaccagcatgaacgatacactgtttagccacagcgtccccagttcagggtcaccgtttatcaccaggagcatgctggaatcatcaaatcgtctagacgaggaacaccggctcatagctagatatgccgctcgtttggctgccgagtcttcttcttcccagccaccacagcagagatcagcccctgacatttctttcacaatcgacgctaacaaacaacaacggcagcttatagcagaactagaaaacaagaatagagagatccttcaggagattcagcggctgcggttggagcacgaacaagcaagccagcccacgcccgaaaaggcccagcagaatcctacattgttggcagaattgagactattgagacagcggaaggatgaactggagcaaaggatgagcgccctccaggaatccaggcgcgagttgatggtgcagctcgaaggcttaatgaagttgttaaagactcagggtgccggttccccacggtcatctccatcccatacaattagccggcctatccctatgcctattcggagtgcttctgcatgcagcacccctacccacacccctcaagacagcctgaccggagtaggtggggacgtgcaggaggcctttgcccagtccagccgacgaaatctgaggaatgacctcctagtcgccgcagatagtattacgaataccatgtctagtctggttaaggaactcaattccgaagtcggctccgaaactgagagcaacgtggattccgaattcgcgcgtactcagtttgaggatctcgttccttcgccaacttccgagaaagctttcctcgcccagatccacgcgaggaagcctggttacatccactctggtgcgactacctcaaccatgagaggcgacatggtgaccgaggatgccgacccatacgttcaacctgaggatgagaactatgagaatgatagtgtgagacagctggaaaacgagcttcagatggaggagtatttgaaacagaaactgcaggatgaggcatatcaggtctctctgcaggggtag

SEQ ID NO: 226413 - DNA, 2061 bp, Artificial Sequence
  derived and/or modified sequence
atgatagaggactcaggcaaacggggaaatacaatggccgaaagacgccaactgttcgctgaaatgcgtgctcaagacctcgaccgtatccgactgtctacctacagaacagcctgtaaactcaggttcgtgcagaagaagtgcaacctgcatctcgtggacatctggaacgtgatagaggcgctgagagagaatgccctgaataatctggatccaaacaccgagcttaatgtatcaagactcgaagctgttctgagcacaattttttaccagctcaacaagaggatgccaaccactcatcaaattcatgtggaacagtccatctctctactgctgaatttcttgctggccgctttcgatcctgagggacacggcaagatcagcgtttttgccgtgaaaatggccctagctacattgtgcggcggaaaaatcatggataaactccggtacattttctcaatgatcagtgattcctctggagtcatggtgtacggccgatatgaccagtttctccgcgaagtgctgaaactcccaacggctgttttcgaagggcctagtttcggttacactgaacagagtgctcggagctgctttagtcagcagaaaaaagtcacccttaatggatttctcgatactttaatgagcgacccacctcctcagtgtctcgtctggctcccactcctccataggcttgctaacgtggaaaacgtttttcacccagtcgagtgcagttactgccattccgagtcgatgatgggcttccggtacaggtgtcagcaatgtcacaactaccaactgtgtcaggactgtttttggagaggccatgccggtggtagccattctaaccagcatcaaatgaaggaatatacaagttggaaatcaccagcaaaaaaactgaccaatgcattatcaaaatccctgagctgcgcctctagcagagagcctctccatcctatgtttcctgaccaaccagagaagcccttgaatcttgctcacattgtgtgcttccgccctccgcgtccagtgaccagtatgaacgacaccctgttctcccattctgttcccagctccggcagtcccttcattaccagaagcatgttagaaagcagtaatcgtcttgatgaggagcacaggctcatcgccaggtacgccgcacgactcgctgctgaatcctcatccagtcagccgccacagcaacgctccgccccagatatttcctttaccattgacgccaataagcaacagcgacagctaatcgccgaactcgagaacaaaaaccgtgagattcttcaggagattcaacgcctgagactggaacacgaacaggcttcccaaccgacgcccgagaaggcgcaacagaatccgaccctgcttgcagagctgaggctcctcagacagcgcaaagacgaactggagcagaggatgagcgcgttacaagaatctcggagggaactgatggttcagctggaaggcctgatgaagctacttaagacccagggtgccggtagccctagatcttctccctcacacacaatttctcggccaatacctatgcccattcgctccgcgtctgcgtgtagcacccccacgcacacccctcaggactcgttaaccggagttggcggagatgtccaggaggccttcgcccagagctccaggagaaatttacggaacgacctcctcgtggctgctgattctataaccaatactatgagctctctggtgaaggagctaaatagcgaagtgggctccgaaaccgaatccaatgtggatagtgagttcgccagaacacagttcgaagatctcgtgccaagccctacctcagaaaaggccttcctcgcccagatccatgctagaaagcctggatacattcatagcggcgctacaacctcaaccatgaggggcgatatggtgacggaagacgcagacccctatgttcagcccgaagacgagaattatgaaaacgattccgtgagacagctggagaacgagctgcagatggaagagtacctgaagcaaaaactgcaggacgaggcataccaggtcagtctccagggctag

SEQ ID NO: 226414 - DNA, 2061 bp, Artificial Sequence
  derived and/or modified sequence
atgatcgaggacagcggcaagagaggcaacaccatggccgagagaagacagctgttcgccgagatgagagcccaggacctggacagaatcagactgagcacctacagaaccgcctgcaagctgagattcgtgcagaagaagtgcaacctgcacctggtggacatctggaacgtgatcgaggccctgagagagaacgccctgaacaacctggaccccaacaccgagctgaacgtgagcagactggaggccgtgctgagcaccatcttctaccagctgaacaagagaatgcccaccacccaccagatccacgtggagcagagcatcagcctgctgctgaacttcctgctggccgccttcgaccccgagggccacggcaagatcagcgtgttcgccgtgaagatggccctggccaccctgtgcggcggcaagatcatggacaagctgagatacatcttcagcatgatcagcgacagcagcggcgtgatggtgtacggcagatacgaccagttcctgagagaggtgctgaagctgcccaccgccgtgttcgagggccccagcttcggctacaccgagcagagcgccagaagctgcttcagccagcagaagaaggtgaccctgaacggcttcctggacaccctgatgagcgacccccccccccagtgcctggtgtggctgcccctgctgcacagactggccaacgtggagaacgtgttccaccccgtggagtgcagctactgccacagcgagagcatgatgggcttcagatacagatgccagcagtgccacaactaccagctgtgccaggactgcttctggagaggccacgccggcggcagccacagcaaccagcaccagatgaaggagtacaccagctggaagagccccgccaagaagctgaccaacgccctgagcaagagcctgagctgcgccagcagcagagagcccctgcaccccatgttccccgaccagcccgagaagcccctgaacctggcccacatcgtggacacctggccccccagacccgtgaccagcatgaacgacaccctgttcagccacagcgtgcccagcagcggcagccccttcatcaccagaagcatgctggagagcagcaacagactggacgaggagcacagactgatcgccagatacgccgccagactggccgccgagagcagcagcagccagcccccccagcagagaagcgcccccgacatcagcttcaccatcgacgccaacaagcagcagagacagctgatcgccgagctggagaacaagaacagagagatcctgcaggagatccagagactgagactggagcacgagcaggccagccagcccacccccgagaaggcccagcagaaccccaccctgctggccgagctgagactgctgagacagagaaaggacgagctggagcagagaatgagcgccctgcaggagagcagaagagagctgatggtgcagctggagggcctgatgaagctgctgaagacccagggcgccggcagccccagaagcagccccagccacaccatcagcagacccatccccatgcccatcagaagcgccagcgcctgcagcacccccacccacaccccccaggacagcctgaccggcgtgggcggcgacgtgcaggaggccttcgcccagagcagcagaagaaacctgagaaacgacctgctggtggccgccgacagcatcaccaacaccatgagcagcctggtgaaggagctgaacagcgaggtgggcagcgagaccgagagcaacgtggacagcgagttcgccagaacccagttcgaggacctggtgcccagccccaccagcgagaaggccttcctggcccagatccacgccagaaagcccggctacatccacagcggcgccaccaccagcaccatgagaggcgacatggtgaccgaggacgccgacccctacgtgcagcccgaggacgagaactacgagaacgacagcgtgagacagctggagaacgagctgcagatggaggagtacctgaagcagaagctgcaggacgaggcctaccaggtgagcctgcagggctag

SEQ ID NO: 226415 - DNA, 2061 bp, Artificial Sequence
  derived and/or modified sequence
atgatcgaggacagcggcaagagaggcaacaccatggccgagagaagacagctgttcgccgagatgagagcccaggacctggacagaatcagactgagcacctacagaaccgcctgcaagctgagattcgtgcagaagaagtgcaacctgcacctggtggacatctggaacgtgatcgaggccctgagagagaacgccctgaacaacctggaccccaacaccgagctgaacgtgagcagactggaggccgtgctgagcaccatcttctaccagctgaacaagagaatgcccaccacccaccagatccacgtggagcagagcatcagcctgctgctgaacttcctgctggccgccttcgaccccgagggccacggcaagatcagcgtgttcgccgtgaagatggccctggccaccctgtgcggcggcaagatcatggacaagctgagatacatcttcagcatgatcagcgacagcagcggcgtgatggtgtacggcagatacgaccagttcctgagagaggtgctgaagctgcccaccgccgtgttcgagggccccagcttcggctacaccgagcagagcgccagaagctgcttcagccagcagaagaaggtgaccctgaacggcttcctggacaccctgatgagcgacccccccccccagtgcctggtgtggctgcccctgctgcacagactggccaacgtggagaacgtgttccaccccgtggagtgcagctactgccacagcgagagcatgatgggcttcagatacagatgccagcagtgccacaactaccagctgtgccaggactgcttctggagaggccacgccggcggcagccacagcaaccagcaccagatgaaggagtacaccagctggaagagccccgccaagaagctgaccaacgccctgagcaagagcctgagctgcgccagcagcagagagcccctgcaccccatgttccccgaccagcccgagaagcccctgaacctggcccacatcgtgtgcttcagaccccccagacccgtgaccagcatgaacgacaccctgttcagccacagcgtgcccagcagcggcagccccttcatcaccagaagcatgctggagagcagcaacagactggacgaggagcacagactgatcgccagatacgccgccagactggccgccgagagcagcagcagccagcccccccagcagagaagcgcccccgacatcagcttcaccatcgacgccaacaagcagcagagacagctgatcgccgagctggagaacaagaacagagagatcctgcaggagatccagagactgagactggagcacgagcaggccagccagcccacccccgagaaggcccagcagaaccccaccctgctggccgagctgagactgctgagacagagaaaggacgagctggagcagagaatgagcgccctgcaggagagcagaagagagctgatggtgcagctggagggcctgatgaagctgctgaagacccagggcgccggcagccccagaagcagccccagccacaccatcagcagacccatccccatgcccatcagaagcgccagcgcctgcagcacccccacccacaccccccaggacagcctgaccggcgtgggcggcgacgtgcaggaggccttcgcccagagcagcagaagaaacctgagaaacgacctgctggtggccgccgacagcatcaccaacaccatgagcagcctggtgaaggagctgaacagcgaggtgggcagcgagaccgagagcaacgtggacagcgagttcgccagaacccagttcgaggacctggtgcccagccccaccagcgagaaggccttcctggcccagatccacgccagaaagcccggctacatccacagcggcgccaccaccagcaccatgagaggcgacatggtgaccgaggacgccgacccctacgtgcagcccgaggacgagaactacgagaacgacagcgtgagacagctggagaacgagctgcagatggaggagtacctgaagcagaagctgcaggacgaggcctaccaggtgagcctgcagggctag

SEQ ID NO: 226416 - DNA, 6522 bp, Artificial Sequence
  derived and/or modified sequence
aggatgagatcatagtttcaggatcctcaggaaaccctggtactggcagcagccagcctctgctgtgcccacatgacccacaactctggcagcggacccggcacttccaacattattaaataataagaaagcggctcctactccaggctcaaacctccctgcagaccaatggacaccttctaagagtttggcgagtcagtgactgaagcgcccgtccattccaagataaataggatttaccaatccttggatgaagtgcttgggaagtctttaagtgccataatcaactgccatttcaaagaatatagatggttttgaaaagttcatgctgtcccttcattgaattttagaatgattgaagatagtgggaaaagaggaaataccatggcagaaagaagacagctgtttgcagagatgagggctcaagatctggatcgcatccgactctccacctacagaacagcatgcaagcttaggtttgttcagaagaaatgcaatttgcacctggtggacatatggaatgtcatagaagcattgcgggaaaatgctctgaacaacctggacccaaacactgaactcaacgtgtcccgcttagaggctgtgctctccactattttttaccagctcaacaaacggatgccaaccactcaccaaatccatgtggagcagtccatcagcctcctccttaacttcctgcttgcagcgtttgatccggaaggccatggtaaaatttcagtatttgctgtcaaaatggctttagccacattgtgtggagggaagatcatggacaaattaagatatattttctcaatgatttctgactccagtggggtgatggtttatggacgatatgaccaattccttcgggaagttctcaaactacccacggcagtttttgaaggtccttcatttggttacacagaacagtcagccagatcctgtttctcccaacagaaaaaagtcacgttaaatggtttcttggacacgcttatgtcagatcctcccccgcagtgtctggtctggttgcctcttctgcatcgactagcaaatgtggaaaatgtcttccatccggttgagtgttcctactgccacagtgagagtatgatgggatttcgctaccgatgccaacagtgtcacaattaccagctctgtcaggactgcttctggaggggacatgccggtggttctcatagcaaccagcaccaaatgaaagagtacacgtcatggaaatcacctgctaagaagctgactaatgcattaagcaagtccctgagctgtgcttccagccgtgaacctttgcaccccatgttcccagatcagcctgagaagccactcaacttggctcacatcgttgatacttggcctcccagacctgtaaccagcatgaacgacaccctgttctcccactctgttccctcctcaggaagtccttttattaccaggagcatgcttgagagttcaaaccggcttgatgaagaacacaggctaattgccaggtatgcggcaaggctggcagcagagtcctcttcgtctcagccacctcagcagagaagtgctcctgacatctctttcaccatcgatgcgaataagcagcaaaggcagctgattgctgagctagaaaacaagaacagagaaatcttacaggagatccagagacttcggctagagcatgaacaagcttctcagcccacgccagagaaggcacagcaaaaccccaccctgctggcagaactccggctcctcagacagcgcaaagatgagctggaacagagaatgtctgctctccaggagagccggagagagctaatggtccagttggagggtctcatgaagctactaaagactcagggggcaggctctccccgctcctcccccagccacaccatcagcaggccaattcccatgcccatccggtcagcgtcagcctgctccaccccgacgcacacgccgcaggactccctcacaggagtagggggagatgtacaagaggcatttgcacaaagttcaagaagaaacttaaggaatgacttgctagtggctgcagattccatcactaacactatgtcctctcttgtgaaagagctgaattctgaggttgggagtgaaacagagagtaatgtggattctgaatttgcacggactcagtttgaggatcttgttccctcaccaacctctgaaaaggcttttctagcgcaaatccatgcccgaaaacctgggtacattcacagtggagctaccacaagtaccatgcgtggcgacatggttacggaggatgcagatccctatgtgcagcctgaagatgaaaactatgaaaatgactctgtccggcagctggagaatgagctccagatggaggaatacctgaaacagaagctgcaagatgaagcttatcaggtcagcttgcaaggttgaatgcaatatccttttatcacactcctctcaagcaagctatagtcagacagatgatgaaagtaacatgaaaactggtgatgatggagagccctgtggccacacagaggaggaagacagcagcctggcagcagcctcaccgaagagaggaaccaccacacccagcagctcctgacagacccccacccctaaagatgtgtcctgatgactatagtgcagctaactttttgttctcagatttgtagtgcataggtgtgtgtttcaagaaggaaaaaaaaagacttctgttcaaagttaacttatcagctacatcctctgtaacgtggttcatccctggttaaaaagcaaacaaacacaggctgaaaacccatgctgctgttatacacaatggcagtattaacaagcattttaaacctttgcacatgatattgaacctgttcagtttacaatgacaatattaatactgtttatagctagaagtttgatttctgaattctttgagattttagcaaaacagtttattatacactgtacatttttttcacagcaattggaaaaaaacaaccacttgcaatcattcaataaccctgaagaatttggttcctgagtgtacaaactcagagcccggaagccaagaagggtccttggcctgcacggtctgtagttgactccaagtctctgtgagcagtgacttgaaccaaacacaccaggaataatccattctttggggcctctttccaactcgaggttgttttctttcaagatactctaatcagccatagaatttagtgtaaatatttttttttccaaatagatatcatattcaaaaaaggcagcattcaaattatatagaatctagtttttaaaatcagcacagatcttcttaaaaactgtgaactatgttttgaaatactcgttactaaagctgtttataaaccacaggtgccataagatccccaaacggactaaagttatctctgctcttccatggtcttgttcctctcgttttggctttaggaagcatgtctttaacagcaccgctcgttcacaagttcccccatcaagttgtttggaggccttcagctttaaatgtacaggcttaaagtgcgcttgcaaacgtttgctctcctttttttctgaatgttgattgccttagctggccacctggtgttctgcatgtagccttctgtggtcatgtgaaaggagacaggctcttctaagttgagttgggatttttgcactcagtgaaaagctgaagtgcaaaagagctatcaaagacaagaggataaaagactgggatagtcttttccaaggaccctctttagagggccctaaagacctcctttgggaattctggggaaaaagaaaaagtaatcttctacttgcttcaagatttgatttttttaaaaaagcctgcgacctattcaatacattatgcttaaattagcagtttctctggaattcctgtctctcctttaaaagaaaggagagaacattttagaacaatagttctcaaagtgtgttccccggacaagcagcatctgcaacacttaggaaggtcttcgaaatactaatttgtaagccccacctcaggcctactgaatcagaagctctgggggttgggtccagaagtctgttttagtcaaccctctaggtgattctgatgctcgctaaaggttgagaactactgctttagaatgaagtcgtataataaagtctctgaaaaggccttattcagaataagcaagaaaggttctgtgattcacttttgcttctggggctggcaaaaaccttctctgaacccacacaccaagttcgtagttggtaggtgcccagccaagtcctgacatcttcatgccccctctgcagagggcggctgtacgatgttcacatgtctgcgtttggtcagacatcatctccttggctgccctttgaaaccaaatcacttgccttggggataaagtgctcaattggcattagtgagaagcccatcctatcccttgacatacttaatcatatatctctccagagaactcacctgacaaatgtctctgagcacaggctgacaccaaagtggcacaactgcacagttctcagatttctttgcacagattgatttttattgcgggttttgttggggtgtcttaatgttcatctcttttccactgcccatcctctgtgaacccatacctctctagatggagcaggtggccactggtgcctcatactcagtattgaaaaccactacatcccagctacctataatgctgtcagctcaaaatcatagccaggtagttcttgaactcagaacttaaatcctgcacgtggcactccaccactgactggaccgagctggcatatgttgtttctttgtgtttctacatcaaaatgttcgtctaagatttgaactgttctgctgataaccttccccgttgtcatagctatttcattgccaaccaactccatcacatggttgttgatatcgtcatataaagccattgcaaggactctggaaactgccgccaatgaccaatttctgactaaccagccaccttttctctctcttagctccacgtcagcactgagaccagactcgagcacccctgtcctgtaagcgagacaaaatggcgtgtgttattttggggttttgtgttttttggtgggtttctttccttggctctccagatttacttttggggcctgttctaagtgcaaacccagcaagtttcacttgtcctgtccattagatacaactacatcttgcgggggttgtttctttcttgttccacaatgaattgcacatccatctccatcagagctgatagcctgttaataagcactggtctaacacagccaaccctcctccacagcgccatattaatggaggaggggaggaaggtgaaatctactgcatgggattcaggaaacagttgtggttggtcaggacggaagttggggtaagtttggttggtcagagggagttgtgctggagattgtgaaaaatgggttcttgaatgatctactataaggcagggaaggttcatttgtaagtagtaatgtgaactgaattgcattaagagtgtgtggcctttgttgtgatatactatgtattttcttatatgcatgagccaaactgttgcatcataatttagcactgatgtctgcttttattttgatcatctttgtccacccttattagttcttggctgttaaccgtagatagatcttgtaaatccagcaacctttggttgctgcattccccttggttcgattccacgcaaggagccacaagtgagaactccactgtccttagaagaaagggcatttttacttttgaaccaaaaagagaaaaaaaaatcagaagtgttgcatcttgaggcgaattaactgtaagacatttttaattatgactactgcaatttgacaccatttgaaataatcaattcagagacactaaagatttcacaatattcattggtattgtaaaaaaaaaatactattgtatggatttttgtattgctgttaagtattgttttgtgtgtgtgtgtgtgtgtgtgtgttggaacctcctggggacatgttatattttgaagtgattaaactatttaattgtgtgtctatattttggagtggaataatttcttcattaaaaaatgtttttaaaaacactatatcttgggtggtttattcctttgtttcagtgaatctttcctaaagcaacgtggagtcagtctgttgaaagaaggaaggcaggtacttgcagtttaaagcaggacccattgatggaatattgagccaccgaggcaaaatagctcaccttctcttgccttgggggatgcatggtttttaccattctactgttttattagcatctgtgagcatctaatagaaatactattctgctatttatggaaatccttattataattgatatggaagtgagtttgaaattctaacagctaacatatttcatgtttgtatcacacactgttcttaacactttatgtgacttcactcaattctttgaatcctctgcatctagccatgtattctgcaaatattaagtgctcaatggtttttttgttgaattactgaataaatgaattagtggtg

SEQ ID NO: 226417 - DNA, 6522 bp, Artificial Sequence
  derived and/or modified sequence
aggatgagatcatagtttcaggatcctcaggaaaccctggtactggcagcagccagcctctgctgtgcccacatgacccacaactctggcagcggacccggcacttccaacattattaaataataagaaagcggctcctactccaggctcaaacctccctgcagaccaatggacaccttctaagagtttggcgagtcagtgactgaagcgcccgtccattccaagataaataggatttaccaatccttggatgaagtgcttgggaagtctttaagtgccataatcaactgccatttcaaagaatatagatggttttgaaaagttcatgctgtcccttcattgaattttagaatgattgaagatagtgggaaaagaggaaataccatggcagaaagaagacagctgtttgcagagatgagggctcaagatctggatcgcatccgactctccacctacagaacagcatgcaagcttaggtttgttcagaagaaatgcaatttgcacctggtggacatatggaatgtcatagaagcattgcgggaaaatgctctgaacaacctggacccaaacactgaactcaacgtgtcccgcttagaggctgtgctctccactattttttaccagctcaacaaacggatgccaaccactcaccaaatccatgtggagcagtccatcagcctcctccttaacttcctgcttgcagcgtttgatccggaaggccatggtaaaatttcagtatttgctgtcaaaatggctttagccacattgtgtggagggaagatcatggacaaattaagatatattttctcaatgatttctgactccagtggggtgatggtttatggacgatatgaccaattccttcgggaagttctcaaactacccacggcagtttttgaaggtccttcatttggttacacagaacagtcagccagatcctgtttctcccaacagaaaaaagtcacgttaaatggtttcttggacacgcttatgtcagatcctcccccgcagtgtctggtctggttgcctcttctgcatcgactagcaaatgtggaaaatgtcttccatccggttgagtgttcctactgccacagtgagagtatgatgggatttcgctaccgatgccaacagtgtcacaattaccagctctgtcaggactgcttctggaggggacatgccggtggttctcatagcaaccagcaccaaatgaaagagtacacgtcatggaaatcacctgctaagaagctgactaatgcattaagcaagtccctgagctgtgcttccagccgtgaacctttgcaccccatgttcccagatcagcctgagaagccactcaacttggctcacatcgtttgttttaggcctcccagacctgtaaccagcatgaacgacaccctgttctcccactctgttccctcctcaggaagtccttttattaccaggagcatgcttgagagttcaaaccggcttgatgaagaacacaggctaattgccaggtatgcggcaaggctggcagcagagtcctcttcgtctcagccacctcagcagagaagtgctcctgacatctctttcaccatcgatgcgaataagcagcaaaggcagctgattgctgagctagaaaacaagaacagagaaatcttacaggagatccagagacttcggctagagcatgaacaagcttctcagcccacgccagagaaggcacagcaaaaccccaccctgctggcagaactccggctcctcagacagcgcaaagatgagctggaacagagaatgtctgctctccaggagagccggagagagctaatggtccagttggagggtctcatgaagctactaaagactcagggggcaggctctccccgctcctcccccagccacaccatcagcaggccaattcccatgcccatccggtcagcgtcagcctgctccaccccgacgcacacgccgcaggactccctcacaggagtagggggagatgtacaagaggcatttgcacaaagttcaagaagaaacttaaggaatgacttgctagtggctgcagattccatcactaacactatgtcctctcttgtgaaagagctgaattctgaggttgggagtgaaacagagagtaatgtggattctgaatttgcacggactcagtttgaggatcttgttccctcaccaacctctgaaaaggcttttctagcgcaaatccatgcccgaaaacctgggtacattcacagtggagctaccacaagtaccatgcgtggcgacatggttacggaggatgcagatccctatgtgcagcctgaagatgaaaactatgaaaatgactctgtccggcagctggagaatgagctccagatggaggaatacctgaaacagaagctgcaagatgaagcttatcaggtcagcttgcaaggttgaatgcaatatccttttatcacactcctctcaagcaagctatagtcagacagatgatgaaagtaacatgaaaactggtgatgatggagagccctgtggccacacagaggaggaagacagcagcctggcagcagcctcaccgaagagaggaaccaccacacccagcagctcctgacagacccccacccctaaagatgtgtcctgatgactatagtgcagctaactttttgttctcagatttgtagtgcataggtgtgtgtttcaagaaggaaaaaaaaagacttctgttcaaagttaacttatcagctacatcctctgtaacgtggttcatccctggttaaaaagcaaacaaacacaggctgaaaacccatgctgctgttatacacaatggcagtattaacaagcattttaaacctttgcacatgatattgaacctgttcagtttacaatgacaatattaatactgtttatagctagaagtttgatttctgaattctttgagattttagcaaaacagtttattatacactgtacatttttttcacagcaattggaaaaaaacaaccacttgcaatcattcaataaccctgaagaatttggttcctgagtgtacaaactcagagcccggaagccaagaagggtccttggcctgcacggtctgtagttgactccaagtctctgtgagcagtgacttgaaccaaacacaccaggaataatccattctttggggcctctttccaactcgaggttgttttctttcaagatactctaatcagccatagaatttagtgtaaatatttttttttccaaatagatatcatattcaaaaaaggcagcattcaaattatatagaatctagtttttaaaatcagcacagatcttcttaaaaactgtgaactatgttttgaaatactcgttactaaagctgtttataaaccacaggtgccataagatccccaaacggactaaagttatctctgctcttccatggtcttgttcctctcgttttggctttaggaagcatgtctttaacagcaccgctcgttcacaagttcccccatcaagttgtttggaggccttcagctttaaatgtacaggcttaaagtgcgcttgcaaacgtttgctctcctttttttctgaatgttgattgccttagctggccacctggtgttctgcatgtagccttctgtggtcatgtgaaaggagacaggctcttctaagttgagttgggatttttgcactcagtgaaaagctgaagtgcaaaagagctatcaaagacaagaggataaaagactgggatagtcttttccaaggaccctctttagagggccctaaagacctcctttgggaattctggggaaaaagaaaaagtaatcttctacttgcttcaagatttgatttttttaaaaaagcctgcgacctattcaatacattatgcttaaattagcagtttctctggaattcctgtctctcctttaaaagaaaggagagaacattttagaacaatagttctcaaagtgtgttccccggacaagcagcatctgcaacacttaggaaggtcttcgaaatactaatttgtaagccccacctcaggcctactgaatcagaagctctgggggttgggtccagaagtctgttttagtcaaccctctaggtgattctgatgctcgctaaaggttgagaactactgctttagaatgaagtcgtataataaagtctctgaaaaggccttattcagaataagcaagaaaggttctgtgattcacttttgcttctggggctggcaaaaaccttctctgaacccacacaccaagttcgtagttggtaggtgcccagccaagtcctgacatcttcatgccccctctgcagagggcggctgtacgatgttcacatgtctgcgtttggtcagacatcatctccttggctgccctttgaaaccaaatcacttgccttggggataaagtgctcaattggcattagtgagaagcccatcctatcccttgacatacttaatcatatatctctccagagaactcacctgacaaatgtctctgagcacaggctgacaccaaagtggcacaactgcacagttctcagatttctttgcacagattgatttttattgcgggttttgttggggtgtcttaatgttcatctcttttccactgcccatcctctgtgaacccatacctctctagatggagcaggtggccactggtgcctcatactcagtattgaaaaccactacatcccagctacctataatgctgtcagctcaaaatcatagccaggtagttcttgaactcagaacttaaatcctgcacgtggcactccaccactgactggaccgagctggcatatgttgtttctttgtgtttctacatcaaaatgttcgtctaagatttgaactgttctgctgataaccttccccgttgtcatagctatttcattgccaaccaactccatcacatggttgttgatatcgtcatataaagccattgcaaggactctggaaactgccgccaatgaccaatttctgactaaccagccaccttttctctctcttagctccacgtcagcactgagaccagactcgagcacccctgtcctgtaagcgagacaaaatggcgtgtgttattttggggttttgtgttttttggtgggtttctttccttggctctccagatttacttttggggcctgttctaagtgcaaacccagcaagtttcacttgtcctgtccattagatacaactacatcttgcgggggttgtttctttcttgttccacaatgaattgcacatccatctccatcagagctgatagcctgttaataagcactggtctaacacagccaaccctcctccacagcgccatattaatggaggaggggaggaaggtgaaatctactgcatgggattcaggaaacagttgtggttggtcaggacggaagttggggtaagtttggttggtcagagggagttgtgctggagattgtgaaaaatgggttcttgaatgatctactataaggcagggaaggttcatttgtaagtagtaatgtgaactgaattgcattaagagtgtgtggcctttgttgtgatatactatgtattttcttatatgcatgagccaaactgttgcatcataatttagcactgatgtctgcttttattttgatcatctttgtccacccttattagttcttggctgttaaccgtagatagatcttgtaaatccagcaacctttggttgctgcattccccttggttcgattccacgcaaggagccacaagtgagaactccactgtccttagaagaaagggcatttttacttttgaaccaaaaagagaaaaaaaaatcagaagtgttgcatcttgaggcgaattaactgtaagacatttttaattatgactactgcaatttgacaccatttgaaataatcaattcagagacactaaagatttcacaatattcattggtattgtaaaaaaaaaatactattgtatggatttttgtattgctgttaagtattgttttgtgtgtgtgtgtgtgtgtgtgtgttggaacctcctggggacatgttatattttgaagtgattaaactatttaattgtgtgtctatattttggagtggaataatttcttcattaaaaaatgtttttaaaaacactatatcttgggtggtttattcctttgtttcagtgaatctttcctaaagcaacgtggagtcagtctgttgaaagaaggaaggcaggtacttgcagtttaaagcaggacccattgatggaatattgagccaccgaggcaaaatagctcaccttctcttgccttgggggatgcatggtttttaccattctactgttttattagcatctgtgagcatctaatagaaatactattctgctatttatggaaatccttattataattgatatggaagtgagtttgaaattctaacagctaacatatttcatgtttgtatcacacactgttcttaacactttatgtgacttcactcaattctttgaatcctctgcatctagccatgtattctgcaaatattaagtgctcaatggtttttttgttgaattactgaataaatgaattagtggtg

SEQ ID NO: 226418 - protein, 273 aa, Artificial Sequence
  derived and/or modified sequence
MKSQGQHWYSSSDKNCKVSFREKLLIIDSNLGVQDVENLKFLCIGLVPNKKLEKSSSASDVFEHLLAEDLLSEEDPFFLAELLYIIRQKKLLQHLNCTKEEVERLLPTRQRVSLFRNLLYELSEGIDSENLKDMIFLLKDSLPKTEMTSLSFLAFLEKQGKIDEDNLTCLEDLCKTVVPKLLRNIEKYKREKAIQIVTPPVDKEAESYQGEEELVSQTDVKTFLEALPQESWQNKHAGSNEGSCVQDESEPQRPLCHCQQPQLYLPEGQTRNP

SEQ ID NO: 226419 - DNA, 822 bp, Artificial Sequence
  derived and/or modified sequence
atgaagtctcaaggccagcactggtattcttcttctgacaagaactgcaaggttagcttccgcgaaaagctgctgatcatagacagcaacctgggcgtacaagatgtggaaaacctgaaattcctgtgtattgggcttgtgcctaacaagaagcttgagaagtcctctagtgcttcagatgtgtttgaacacctgctagccgaggaccttctcagtgaggaagatccattcttcctcgctgagctgctatatataatccggcaaaagaagctgctccaacacctgaattgtaccaaagaggaagtggagcgcctcctgcctacaagacaaagagtctccctgttccgaaatcttctgtacgaactctccgagggcatcgatagtgaaaatctgaaagatatgatctttctgctgaaagactcgctgcctaaaacagaaatgacctcgctttctttcctggccttccttgagaagcaaggcaaaatcgacgaagacaacctcacatgcctggaagacctatgtaagacggtggtgcctaagctgttacggaacatagaaaagtacaagagagaaaaggccatccagatagtcactccccccgtggacaaggaggccgaatcgtatcagggggaggaggagctcgtatcacagacggacgttaaaacattcttggaagccctgccacaggagtcatggcaaaacaagcatgccgggtctaatgagggaagttgtgttcaggacgaatcagagcctcaaaggccgttgtgccattgtcagcaacctcagctctatttaccagaggggcagacaagaaatccctag

SEQ ID NO: 226420 - DNA, 822 bp, Artificial Sequence
  derived and/or modified sequence
atgaagagccagggccagcactggtacagcagcagtgacaagaactgcaaggtgtccttccgggagaagctgctgatcatcgacagcaacctgggcgtgcaggatgtggagaacctgaagttcctgtgcatcggcctggtgcccaacaagaagctggagaagagcagcagcgccagtgatgtgtttgagcacctgctggccgaggacctgctgtctgaggaggaccccttcttcctggccgagctgctgtacatcatccggcagaagaagctgctgcagcacctgaactgcaccaaggaggaggtggagcggctgctgcccacccggcagagggtgtccctcttcaggaacctgctgtatgagctgtctgagggcatcgacagcgagaacctgaaggacatgatcttcctgctgaaggacagcctgcccaagacagagatgaccagcctgtccttcctggccttcctggagaagcagggcaagattgatgaggacaacctgacctgcctggaggacctgtgcaagacagtggtgcccaagctgctgagaaatattgagaagtacaagcgggagaaggccatccagatcgtgaccccacctgtggacaaggaggccgagagctaccagggcgaggaggagctggtgtcccagacagatgtgaagaccttcctggaggccctgccccaggagagctggcagaacaagcatgctggcagcaatgaaggcagctgtgtgcaggatgaaagtgagccccagaggcccctgtgccactgccagcagccccagctgtacctgcctgagggccagaccaggaacccctag

SEQ ID NO: 226421 - DNA, 822 bp, Artificial Sequence
  derived and/or modified sequence
atgaagagccagggccagcactggtacagcagcagcgacaagaactgtaaagtatccttcagagagaagctccttatcattgattctaatctcggggttcaggacgtggagaacctgaagtttctctgtattgggctggtgcccaacaagaaacttgaaaagtcctctagtgcgtctgacgtgtttgagcatctcctcgccgaggatctgctcagcgaggaagaccctttctttctggccgagctgctgtacataatccggcagaaaaaattgctacagcacctgaattgtaccaaggaggaggtggagcgtctcctccctacccgccagcgagtcagccttttccggaaccttctctacgaactctccgaagggatcgactccgaaaacttaaaagacatgattttcttgctgaaggacagcttgccaaagaccgaaatgacctccctcagcttcctcgcctttcttgagaaacagggtaagattgatgaggataatctcacatgcctggaagatctgtgcaagaccgttgtgcctaagctcttacggaatatcgagaaatataagagagaaaaggccatccagatcgtgaccccacccgtggacaaggaggctgagtcttaccagggagaggaagagctggtcagccaaacggatgtaaaaactttcctagaggcgctgccacaggaatcttggcaaaataaacatgctggtagtaatgagggctcctgtgtgcaggatgagagcgagccacagcggcccttatgccactgccagcagccccagctttatctacctgagggccagactcgcaatccatag

SEQ ID NO: 226422 - DNA, 822 bp, Artificial Sequence
  derived and/or modified sequence
atgaaaagccagggccagcactggtatagcagcagcgacaaaaactgcaaggtctccttccgggagaagctactcatcatcgatagcaatctaggagtccaggatgtggagaacctaaaatttttatgtataggcctggtccccaacaaaaaactcgagaagagcagtagcgccagcgacgtctttgagcatctgctggccgaagacctactgagcgaagaagatcccttctttctagccgagttactttacattatcagacagaaaaagctactgcagcacctgaattgtacaaaggaagaagtggagagactcctgccaacacggcagcgtgtgagtctgtttcgcaacctgctgtatgagctcagtgaaggcattgactctgagaaccttaaagatatgatattcttgctgaaagactccctccccaaaaccgaaatgacatcattgagtttcctggcttttctggagaagcagggcaagattgacgaagataacctcacctgcctggaggacctgtgcaagacggttgttccaaaacttctgcggaacatagaaaagtacaagcgggagaaggcaattcaaatagtgacccccccagtggacaaggaagccgaaagctatcagggggaagaagagctcgtttctcagacagatgtgaagacgttcctggaggctttaccccaggagtcctggcagaacaagcatgcaggctcaaatgaaggctcctgtgtgcaggacgagagtgaaccacaacggccactgtgtcactgccagcaacctcagctctacttgcccgaggggcagacgaggaatccatag

SEQ ID NO: 226423 - DNA, 822 bp, Artificial Sequence
  derived and/or modified sequence
atgaagagccagggccagcactggtacagcagcagcgacaagaactgcaaggtgagcttcagagagaagctgctgatcatcgacagcaacctgggcgtgcaggacgtggagaacctgaagttcctgtgcatcggcctggtgcccaacaagaagctggagaagagcagcagcgccagcgacgtgttcgagcacctgctggccgaggacctgctgagcgaggaggaccccttcttcctggccgagctgctgtacatcatcagacagaagaagctgctgcagcacctgaactgcaccaaggaggaggtggagagactgctgcccaccagacagagagtgagcctgttcagaaacctgctgtacgagctgagcgagggcatcgacagcgagaacctgaaggacatgatcttcctgctgaaggacagcctgcccaagaccgagatgaccagcctgagcttcctggccttcctggagaagcagggcaagatcgacgaggacaacctgacctgcctggaggacctgtgcaagaccgtggtgcccaagctgctgagaaacatcgagaagtacaagagagagaaggccatccagatcgtgaccccccccgtggacaaggaggccgagagctaccagggcgaggaggagctggtgagccagaccgacgtgaagaccttcctggaggccctgccccaggagagctggcagaacaagcacgccggcagcaacgagggcagctgcgtgcaggacgagagcgagccccagagacccctgtgccactgccagcagccccagctgtacctgcccgagggccagaccagaaacccctag

SEQ ID NO: 226424 - protein, 522 aa, Artificial Sequence
  derived and/or modified sequence
MKSQGQHWYSSSDKNCKVSFREKLLIIDSNLGVQDVENLKFLCIGLVPNKKLEKSSSASDVFEHLLAEDLLSEEDPFFLAELLYIIRQKKLLQHLNCTKEEVERLLPTRQRVSLFRNLLYELSEGIDSENLKDMIFLLKDSLPKTEMTSLSFLAFLEKQGKIDEDNLTCLEDLCKTVVPKLLRNIEKYKREKAIQIVTPPVDKEAESYQGEEELVSQTDVKTFLEALPQESWQNKHAGSNGNRATNGAPSLVSRGMQGASANTLNSETSTKRAAVYRMNRNHRGLCVIVNNHSFTSLKDRQGTHKDAEILSHVFQWLGFTVHIHNNVTKVEMEMVLQKQKCNPAHADGDCFVFCILTHGRFGAVYSSDEALIPIREIMSHFTALQCPRLAEKPKLFFIQACQGEEIQPSVSIEADALNPEQAPTSLQDSIPAEADFLLGLATVPGYVSFRHVEEGSWYIQSLCNHLKKLVPRHEDILSILTAVNDDVSRRVDKQGTKKQMPQPAFTLRKKLVFPVPLDALSL

SEQ ID NO: 226425 - DNA, 1569 bp, Artificial Sequence
  derived and/or modified sequence
atgaagtcccagggtcagcattggtacagttcttcagataagaattgtaaagtgagctttcgtgaaaaactgttgataatcgactctaacctgggggtccaggacgtagaaaacctgaagtttctctgcattggactggtccctaataaaaaactcgaaaagagttcttctgcgtcagacgtgttcgaacatttgctggctgaggatctcctctctgaagaagatcctttcttccttgctgagctcctgtacataattcgacaaaagaagctcctgcagcatctgaattgtacaaaagaggaggtggaacggcttctccccacacgccaacgggttagcctgttccgtaacctactgtatgagctttctgaaggtatcgattcagaaaatctaaaagacatgatattcctcctcaaagattcactcccaaaaaccgagatgactagccttagctttctcgcatttctcgaaaagcaggggaagatcgacgaagataatctgacctgcttggaggatctatgcaaaactgttgtgcctaagcttcttaggaatattgaaaaatataaaagagagaaggctattcagattgtgacgccaccagtggacaaggaggccgagagctatcaaggggaagaagaattggtgtctcagacggatgtgaagacatttctggaggcactgcctcaggagagctggcagaataaacatgccggcagtaatggtaatagggccaccaacggtgccccatccctagtatcgcgaggcatgcaaggggcaagtgccaacactcttaactccgagacaagcaccaagcgggctgccgtctacaggatgaaccgaaaccatcgaggcctgtgtgtgattgtaaataaccattctttcacaagtctgaaagacagacaaggtacccataaagatgctgagatcctttctcacgtgttccagtggcttggcttcacagtccacattcacaataatgttaccaaagttgagatggagatggtcctgcagaagcagaagtgcaaccccgcacacgctgacggggactgctttgtgttctgcattctgacccacggccggtttggagcagtttactccagtgacgaggcgctgatccctatccgcgagatcatgtcccacttcactgcccttcagtgccccaggctggcagagaaaccaaaattattcttcattcaagcatgccagggggaggagattcaaccctcagttagtattgaggcagacgccctgaatcccgaacaggccccaacttccctccaggactcaatcccggcagaagctgattttctgctgggactggctactgtgccaggctatgtgtcctttcgccatgtcgaggaggggagctggtacatccaatctctgtgtaaccatcttaaaaagctggtcccccgccatgaggacattctcagtatcctcaccgccgtgaacgacgatgtcagcaggcgcgtggacaagcagggcactaaaaaacagatgccacagcctgcgttcacgctgcgcaaaaagctggtgtttccggtgccgctggacgctctgtccttgtag

SEQ ID NO: 226426 - DNA, 1569 bp, Artificial Sequence
  derived and/or modified sequence
atgaagagccagggccagcactggtacagcagcagtgacaagaactgcaaggtgtccttccgggagaagctgctgatcatcgacagcaacctgggcgtgcaggatgtggagaacctgaagttcctgtgcatcggcctggtgcccaacaagaagctggagaagagcagcagcgccagtgatgtgtttgagcacctgctggccgaggacctgctgtctgaggaggaccccttcttcctggccgagctgctgtacatcatccggcagaagaagctgctgcagcacctgaactgcaccaaggaggaggtggagcggctgctgcccacccggcagagggtgtccctcttcaggaacctgctgtatgagctgtctgagggcatcgacagcgagaacctgaaggacatgatcttcctgctgaaggacagcctgcccaagacagagatgaccagcctgtccttcctggccttcctggagaagcagggcaagattgatgaggacaacctgacctgcctggaggacctgtgcaagacagtggtgcccaagctgctgagaaatattgagaagtacaagcgggagaaggccatccagatcgtgaccccacctgtggacaaggaggccgagagctaccagggcgaggaggagctggtgtcccagacagatgtgaagaccttcctggaggccctgccccaggagagctggcagaacaagcatgctggcagcaatggaaacagagccaccaacggggcccccagcctggtgtcccggggcatgcagggcgccagcgccaacaccctgaacagcgagaccagcaccaagagagctgctgtgtacaggatgaacagaaaccaccggggcctgtgtgtgattgtgaacaaccacagcttcaccagcctgaaggaccggcagggcacccacaaggatgctgagatcctgagccacgtgttccagtggctgggcttcaccgtgcacatccacaacaacgtgaccaaggtggagatggagatggtgctgcagaagcagaagtgcaacccagcccacgcagatggagactgctttgtgttctgcatcctgacccacggccgctttggagctgtgtacagcagtgatgaggccctgatccccatccgggagatcatgagccacttcaccgccctgcagtgcccccggctggccgagaagcccaagctgttcttcatccaggcctgccagggcgaggagatccagcccagcgtgtccattgaagcagatgccctgaaccctgagcaggcccccaccagcctgcaggacagcatcccagctgaggccgacttcctgctgggcctggccaccgtgcccggctacgtgtccttcagacatgtggaggagggctcctggtacatccagagcctgtgcaaccacctgaagaagctggtgcccaggcatgaggacatcctgagcatcctgacagctgtgaatgatgatgtgtccagaagagtggacaagcagggcaccaagaagcagatgccccagcctgccttcaccctgaggaagaagctggtgtttcctgtgcccctggatgccctgagcctgtag

SEQ ID NO: 226427 - DNA, 1569 bp, Artificial Sequence
  derived and/or modified sequence
atgaagagccagggccagcactggtacagcagcagcgacaagaactgtaaagtaagttttagggagaagcttctgatcattgatagcaaccttggcgttcaggatgttgagaatctgaagttcctctgcatcggcctggtgcccaataagaagctcgagaagtctagctccgccagcgatgtgtttgaacatttactggcagaggaccttctgtccgaggaggacccatttttcctcgccgagctgctctacattattcgtcagaagaagctgctccagcacttgaactgcacgaaggaagaagtggagaggctgctgccaacacggcagagagtgtccctcttcaggaatttactgtacgagctgtcggaaggaattgacagcgagaacctcaaagatatgatcttcctgctaaaagactctctgcctaaaacagagatgactagcctctccttcttagcgtttctggaaaagcagggcaagatcgacgaggataacttgacatgcttggaagatttatgtaagactgttgtgcctaagctgctgaggaatatcgagaaatataagcgagagaaagccattcagatcgtaacacccccggtagacaaagaagcagaatcttaccagggcgaggaagagctggtatcacagacggatgtgaaaacctttctggaagctcttccccaggagagctggcagaacaaacacgctggctccaacggcaatcgcgcgactaacggcgccccttcactggtcagtagggggatgcagggggccagtgccaatacattgaatagcgagaccagcaccaaacgggctgccgtgtatcgaatgaacaggaatcaccggggactctgtgttattgttaataatcattcatttacaagcctaaaagacagacaggggactcataaggacgcagaaatcctgtcccacgtgttccagtggttgggcttcactgttcatatccataataacgttacaaaggtggagatggagatggtgctgcagaaacagaagtgcaacccagctcacgccgacggagattgttttgtgttctgcatcctcacccacggtagattcggcgcggtttacagctccgatgaggccctcatcccaatcagagagataatgtcacacttcaccgccttgcagtgccctcgcctcgcggaaaaacccaaattgttttttattcaggcttgccagggagaggagatccagccatctgtaagcatcgaagccgacgctctcaatcctgaacaggcccccacatctctgcaggattccatcccggcggaagccgatttcctgctcggccttgcaactgttccgggatacgtgtcttttcggcacgtcgaagagggctcttggtatattcagtctctctgtaaccatctgaaaaaactcgtcccacgtcatgaggatatcctatccatcctgacagccgtgaacgacgatgtgtctagaagggttgacaaacagggaaccaagaagcagatgccccaacctgcatttaccctgcgtaaaaagctggtctttccggtcccactcgacgctctcagcctgtag

SEQ ID NO: 226428 - DNA, 1569 bp, Artificial Sequence
  derived and/or modified sequence
atgaaaagtcagggtcagcattggtactcttccagtgataaaaattgtaaagtctcattcagggaaaagctgttgatcatcgattccaatctgggtgtccaagatgtcgagaatcttaagttcctgtgcattgggctcgtgcctaataagaaattagaaaaaagtagctccgcgagcgacgtatttgagcacctgttggctgaagacctactgagtgaggaagacccttttttcttagccgagcttctatatattattcgacagaaaaaattgctccaacacctcaactgtacgaaggaagaagtcgaacgcttgctgcctactcgccagcgggtgtcactttttaggaacctgctgtatgagttatccgaaggcatcgattcagagaacctgaaggacatgattttccttttaaaggattctctccctaagacggaaatgactagtctcagtttcctggcattcctggagaagcagggaaaaatcgacgaggacaacctcacatgcctggaggacttgtgcaagacagtggtgccaaaactgctacgaaacatagagaaatataaacgggaaaaggctattcaaatcgtcacacccccagtggacaaagaggcggaatcctaccagggcgaagaggaactggtgtcgcagacagacgttaagactttcttagaggccctgccgcaggaatcgtggcagaataaacacgccggatccaacggaaatagggcgacgaatggggcaccaagcctggtgagtaggggaatgcaaggcgctagcgccaacaccttaaatagtgaaaccagtacaaaacgagcagctgtttataggatgaaccgcaaccatagagggttgtgcgtcatcgtgaacaaccattcatttacttctctgaaggaccggcagggcacccacaaggacgcagagatcctgagccatgttttccagtggctgggtttcacggtgcacattcataacaatgtgaccaaggttgaaatggagatggtcctgcagaagcaaaaatgcaatccagcacacgctgacggagactgtttcgtgttctgcatattgacccatggcaggttcggcgctgtgtactcttcagatgaggccctgatacccattagggagatcatgagccatttcacagccctacagtgcccaaggctagctgaaaaaccgaaactgttctttatccaggcttgccagggcgaggagattcaaccaagcgtgtctatagaagcagatgcactgaaccctgagcaagcacccaccagtctgcaggactctatacccgctgaagccgattttttactagggctggccaccgtgcccggatatgtctcatttaggcatgtggaggagggatcttggtatatccagagtttgtgtaatcatttgaaaaagctagtgccaagacacgaagacattctgagcattctcacggccgtcaatgacgacgtatcccgacgagttgacaaacagggtaccaagaaacagatgccccagcctgcctttacacttagaaaaaagctcgtgttccctgttcccctcgacgccctcagcctgtag

SEQ ID NO: 226429 - DNA, 5928 bp, Artificial Sequence
  derived and/or modified sequence
tccctttttgacttaccaaggaaatggagatccaaaggaaagcctgaagcactttgtggcttccacgggttcgtttctaggaagcttttgctttacctggggaaaccccaagctctacagtgagaaagttgtaaattagcctttaggagacgctgtttgtcaaagttatcttaaccctggaaaaggggagggaaaaaggcagataagcagtgatgacatcagcaggaaactagtatcaggctacccagtcctgaagattcagttttcacttaaacaaccagcaagtcttgaagtctcttcccaagcaaatgggagcttctttggaccttggagcacacagaggattctactttctttaaaactttgttttcaggcaatttccctgagaaccgtttacttccagaagattggtggagcttgatctgaaggctggccatgaaatctcaaggtcaacattggtattccagttcagataaaaactgtaaagtgagctttcgtgagaagcttctgattattgattcaaacctgggggtccaagatgtggagaacctcaagtttctctgcataggattggtccccaacaagaagctggagaagtccagctcagcctcagatgtttttgaacatctcttggcagaggatctgctgagtgaggaagaccctttcttcctggcagaactcctctatatcatacggcagaagaagctgctgcagcacctcaactgtaccaaagaggaagtggagcgactgctgcccacccgacaaagggtttctctgtttagaaacctgctctacgaactgtcagaaggcattgactcagagaacttaaaggacatgatcttccttctgaaagactcgcttcccaaaactgaaatgacctccctaagtttcctggcatttctagagaaacaaggtaaaatagatgaagataatctgacatgcctggaggacctctgcaaaacagttgtacctaaacttttgagaaacatagagaaatacaaaagagagaaagctatccagatagtgacacctcctgtagacaaggaagccgagtcgtatcaaggagaggaagaactagtttcccaaacagatgttaagacattcttggaagccttaccgcaggagtcctggcaaaataagcatgcaggtagtaatggtaacagagccacaaatggtgcaccaagcctggtctccagggggatgcaaggagcatctgctaacactctaaactctgaaaccagcacaaagagggcagctgtgtacaggatgaatcggaaccacagaggcctctgtgtcattgtcaacaaccacagctttacctccctgaaggacagacaaggaacccataaagatgctgagatcctgagtcatgtgttccagtggcttgggttcacagtgcatatacacaataatgtgacgaaagtggaaatggagatggtcctgcagaagcagaagtgcaatccagcccatgccgacggggactgcttcgtgttctgtattctgacccatgggagatttggagctgtctactcttcggatgaggccctcattcccattcgggagatcatgtctcacttcacagccctgcagtgccctagactggctgaaaaacctaaactctttttcatccaggcctgccaaggtgaagagatacagccttccgtatccatcgaagcagatgctctgaaccctgagcaggcacccacttccctgcaggacagtattcctgccgaggctgacttcctacttggtctggccactgtcccaggctatgtatcctttcggcatgtggaggaaggcagctggtatattcagtctctgtgtaatcatctgaagaaattggtcccaagacatgaagacatcttatccatcctcactgctgtcaacgatgatgtgagtcgaagagtggacaaacagggaacaaagaaacagatgccccagcctgctttcacactaaggaaaaaactagtattccctgtgcccctggatgcactttcattatagcagagagtttttgttggttcttagacctcaaacgaatcattggctataacctccagcctcctgcccagcacaggaatcggtggtctccacctgtcattctagaaacaggaaacaccgtgttttctgacacagtcaattctgattttctttttcttttgcaagtctaaatgttagaaaactttcttttttttggagatagtctcattctgtcacccagactggagtgcaggggggcaatcacggctcactgtagtctcgacctcccaggctcaagctgtcctcccgcctcagcttcccaagtagctgggaccacaggtgtgtaccaccgtgcccggattttttttattctttattttttgtagagatggagggatctcactttgttgcacaggctggtttcaaactcctaggcccaagtgatcctcccacctctgtccccaaaatactgggattataggcacgagccaccacacctggccagaaaactttcattattgaagacttggattgtagccttggttttggatgtctattctgaagacagagtaattggctttggtttgtgcaggtactttttctttgagacagagtcactccgtcacctgggctggagtgcagtggtgggatcactgttcactgcagccttgacctcccaggttcaagcgatcctcccacctcagcctcccaagtagctgagactacaggtgtgtgtccatgcacagctaactttttattttttttgtggagatggggtttcactatgttgcctaagctggtctcaaactcctgggctcaagcgatcctcccacctcagcttctcaaagttctgggactacaggcatgaaatactgtgcctggcctggggaccaggtgcattttaaggttccttggtgttcaaaaaccacgttcttagcctagattgagcttagattgcctctctagacaactaccccttagttataattctgtgtcccctctgcatgcccttaaacattggacagtgaggtcacagtccacccaccctctctctgatctcccccttcctaagacttctcttttgcacatctagtgaggtgaaaatttggtctatgccaggcccatttcctgcttttgtgtaaggaaggtgctcacataggaagtttttatttggttagagacaggtttccctgtaggaagatgatggctcatttacactcagctgctctgcaagcagaaactttacaacctgatgtcatattccattttggactgggtgcggtgactcatgcctgtaatcccagtactctgggaagccaaggcaggcagatcacttgaggtcaggagttcgagaccagcctggccaatacggcaaaacctcatcattactaaaaacacaaaaattagccaggtgtggcggcgagcacctgtaatcccagctactcgggaggctgagacaggagaatctcttgaatccaggaggcagaggctgtggtgagccaagatgacacaactgcactccagcttgggcaacagggcgagaccttgtttaaaaaaaaaattcaatattggggttggaacatttcagttgccattgacagaacacccaattcaaattgactgaagcaaagaagggaatttattgcctctttcacattgaaacccaggagtggataacactggcttcaggcaaagcttgaatcaggactcaatctacaggccagcacctttctcttggccggatgtcctcagggctggcagatgcagtagactgcagtggacagtccccaccttgttactgctactacactttgctcctctggcccaaggcatgaggagagaggctgtgtcagaaactgaagctgttctcaggatcactgggctcttcttggcagaggggatgtctggcttgcctgaagggagtggctctgtaaggacgccttgatgctttcttcattaagattttgagcatttttacgtacttgagcttttttttttttttttttcaatttctagaggaactttttctctgttaattcctggaactgtattttgaatccttaaaggtgagccctcatagggagatccaaagtcctgtggttaacgccttcatttatagatgaggcagctgaggcctggggatgtgaacaacctgctcacagtcctcatttactggatttgacttcagccaggtgaactggaatgccttggggcgtggaagggcattaggagtgtttcatttgatatgtgaatgctcataaaaaaatgtcaaggaatgaagaacaacaactctcagtggtgcctgcatttataattatttatgtgaaagtcaaattcatgtacagtaaatttgttataagaatattcacaagaacactgttctgatatctctgattgtcatgtggatttgaatgtagcttgacagagggaatgtctaatctatattgacagggcaggaacaccgtcatcttagacaaacaccgccactttaagttccagttccctttctagcctcatgcatttcaaggaaatcacttcttttctaacagcgagcagccagaaagagaagagagtaaaatacagataagacagctctggcatagagggaggtgggggggtgggggaagtctcttgggtaactgccaaactttgccttcatacaatgggttccaggaaaacaatgagccttaataagcacattcctttcccttcaggtgcactaagtggggaagctaaaagcagactggaggggggtggggtgtacctacagctgcagaaatattgtatgggaacggacacacaactctccctcccagataagcacagcaaagagacatagaagcaatccaagcctctgataaactctcccaccctaaatccttaaaaactcttagtctgtaagtgagtgggctctgacctaactcggccagaagcccctttcaaatttgttttctctaaaataaacctgtccttggctgtcaagccacctttcatgtttctttcctctttctttaattcttacacatgtgtcaggatgatctcccaaaaccgtgttcataacagtcagggccaaaagctagtggtcacagtccttgtccagttggcagaactgacatgtgaaggcaagtgaaggatggtgagatactgaggaaagagcaaaggatctggagatcaaagccctgcatttccattttgtcctgattcctttgctcagagacactaactaaatcaagctagcttttttcagccttgtctgtaaagtagagaaaacattagctgttgggaagacgaaaaagaatgtgtcctatgtgtgcatctatttaaatctaactgtgctgaggtgcatataaatgcctttaggtggtagggtcttccggttgtaactgcaacagaaatagcaggacttaagttcctttgtgcgtaattccagctgactttattagcggcaactcagcactagcattacccctgacatactctgagtaagatctaattcttccctcactggttcgtgatgtctaccgcagcagaaggccagctcttgactctgagttcagttggacaaaatgctgttgataaaacctcctgtcaggcctctgagcccaagctaagccatcatatcccttgtgacctgcacatatatatccagatggcctgaagtaactgaagaatcacaaaagaagtgaaaatggcctgttcctgccttaactgatgacattaccttgtgaaattccttctcctggctcatcctggctcaaaagctcccccagtgagcaccttgtgacccccatccctgccagccagagaacaaccccctttgactgtaattttccactacttacccaaatcctataaaacggccccacccctatctcccttcactgactttcttttcggactcagcccacctgcacccaggtgattaaaaagctttattgctcacacaaa

SEQ ID NO: 226430 - DNA, 5814 bp, Artificial Sequence
  derived and/or modified sequence
aaggaaatggagatccaaaggaaagcctgaagcactttgtggcttccacgggttcgtttctaggaagcttttgctttacctggggaaaccccaagctctacagtgagaaagttgtaaattagcctttaggagacgctgtttgtcaaagttatcttaaccctggaaaaggggagggaaaaaggcagataagcagtgatgacatcagcaggaaactagtatcaggctacccagtcctgaagattcagttttcacttaaacaaccagcaagtcttgaagtctcttcccaagcaaatgggagcttctttggaccttggagcacacagaggattctactttctttaaaactttgttttcaggcaatttccctgagaaccgtttacttccagaagattggtggagcttgatctgaaggctggccatgaaatctcaaggtcaacattggtattccagttcagataaaaactgtaaagtgagctttcgtgagaagcttctgattattgattcaaacctgggggtccaagatgtggagaacctcaagtttctctgcataggattggtccccaacaagaagctggagaagtccagctcagcctcagatgtttttgaacatctcttggcagaggatctgctgagtgaggaagaccctttcttcctggcagaactcctctatatcatacggcagaagaagctgctgcagcacctcaactgtaccaaagaggaagtggagcgactgctgcccacccgacaaagggtttctctgtttagaaacctgctctacgaactgtcagaaggcattgactcagagaacttaaaggacatgatcttccttctgaaagactcgcttcccaaaactgaaatgacctccctaagtttcctggcatttctagagaaacaaggtaaaatagatgaagataatctgacatgcctggaggacctctgcaaaacagttgtacctaaacttttgagaaacatagagaaatacaaaagagagaaagctatccagatagtgacacctcctgtagacaaggaagccgagtcgtatcaaggagaggaagaactagtttcccaaacagatgttaagacattcttggaagccttaccgcaggagtcctggcaaaataagcatgcaggtagtaatgagggcagctgtgtacaggatgaatcggaaccacagaggcctctgtgtcattgtcaacaaccacagctttacctccctgaaggacagacaaggaacccataaagatgctgagatcctgagtcatgtgttccagtggcttgggttcacagtgcatatacacaataatgtgacgaaagtggaaatggagatggtcctgcagaagcagaagtgcaatccagcccatgccgacggggactgcttcgtgttctgtattctgacccatgggagatttggagctgtctactcttcggatgaggccctcattcccattcgggagatcatgtctcacttcacagccctgcagtgccctagactggctgaaaaacctaaactctttttcatccaggcctgccaaggtgaagagatacagccttccgtatccatcgaagcagatgctctgaaccctgagcaggcacccacttccctgcaggacagtattcctgccgaggctgacttcctacttggtctggccactgtcccaggctatgtatcctttcggcatgtggaggaaggcagctggtatattcagtctctgtgtaatcatctgaagaaattggtcccaagacatgaagacatcttatccatcctcactgctgtcaacgatgatgtgagtcgaagagtggacaaacagggaacaaagaaacagatgccccagcctgctttcacactaaggaaaaaactagtattccctgtgcccctggatgcactttcattatagcagagagtttttgttggttcttagacctcaaacgaatcattggctataacctccagcctcctgcccagcacaggaatcggtggtctccacctgtcattctagaaacaggaaacaccgtgttttctgacacagtcaattctgattttctttttcttttgcaagtctaaatgttagaaaactttcttttttttggagatagtctcattctgtcacccagactggagtgcaggggggcaatcacggctcactgtagtctcgacctcccaggctcaagctgtcctcccgcctcagcttcccaagtagctgggaccacaggtgtgtaccaccgtgcccggattttttttattctttattttttgtagagatggagggatctcactttgttgcacaggctggtttcaaactcctaggcccaagtgatcctcccacctctgtccccaaaatactgggattataggcacgagccaccacacctggccagaaaactttcattattgaagacttggattgtagccttggttttggatgtctattctgaagacagagtaattggctttggtttgtgcaggtactttttctttgagacagagtcactccgtcacctgggctggagtgcagtggtgggatcactgttcactgcagccttgacctcccaggttcaagcgatcctcccacctcagcctcccaagtagctgagactacaggtgtgtgtccatgcacagctaactttttattttttttgtggagatggggtttcactatgttgcctaagctggtctcaaactcctgggctcaagcgatcctcccacctcagcttctcaaagttctgggactacaggcatgaaatactgtgcctggcctggggaccaggtgcattttaaggttccttggtgttcaaaaaccacgttcttagcctagattgagcttagattgcctctctagacaactaccccttagttataattctgtgtcccctctgcatgcccttaaacattggacagtgaggtcacagtccacccaccctctctctgatctcccccttcctaagacttctcttttgcacatctagtgaggtgaaaatttggtctatgccaggcccatttcctgcttttgtgtaaggaaggtgctcacataggaagtttttatttggttagagacaggtttccctgtaggaagatgatggctcatttacactcagctgctctgcaagcagaaactttacaacctgatgtcatattccattttggactgggtgcggtgactcatgcctgtaatcccagtactctgggaagccaaggcaggcagatcacttgaggtcaggagttcgagaccagcctggccaatacggcaaaacctcatcattactaaaaacacaaaaattagccaggtgtggcggcgagcacctgtaatcccagctactcgggaggctgagacaggagaatctcttgaatccaggaggcagaggctgtggtgagccaagatgacacaactgcactccagcttgggcaacagggcgagaccttgtttaaaaaaaaaattcaatattggggttggaacatttcagttgccattgacagaacacccaattcaaattgactgaagcaaagaagggaatttattgcctctttcacattgaaacccaggagtggataacactggcttcaggcaaagcttgaatcaggactcaatctacaggccagcacctttctcttggccggatgtcctcagggctggcagatgcagtagactgcagtggacagtccccaccttgttactgctactacactttgctcctctggcccaaggcatgaggagagaggctgtgtcagaaactgaagctgttctcaggatcactgggctcttcttggcagaggggatgtctggcttgcctgaagggagtggctctgtaaggacgccttgatgctttcttcattaagattttgagcatttttacgtacttgagcttttttttttttttttttcaatttctagaggaactttttctctgttaattcctggaactgtattttgaatccttaaaggtgagccctcatagggagatccaaagtcctgtggttaacgccttcatttatagatgaggcagctgaggcctggggatgtgaacaacctgctcacagtcctcatttactggatttgacttcagccaggtgaactggaatgccttggggcgtggaagggcattaggagtgtttcatttgatatgtgaatgctcataaaaaaatgtcaaggaatgaagaacaacaactctcagtggtgcctgcatttataattatttatgtgaaagtcaaattcatgtacagtaaatttgttataagaatattcacaagaacactgttctgatatctctgattgtcatgtggatttgaatgtagcttgacagagggaatgtctaatctatattgacagggcaggaacaccgtcatcttagacaaacaccgccactttaagttccagttccctttctagcctcatgcatttcaaggaaatcacttcttttctaacagcgagcagccagaaagagaagagagtaaaatacagataagacagctctggcatagagggaggtgggggggtgggggaagtctcttgggtaactgccaaactttgccttcatacaatgggttccaggaaaacaatgagccttaataagcacattcctttcccttcaggtgcactaagtggggaagctaaaagcagactggaggggggtggggtgtacctacagctgcagaaatattgtatgggaacggacacacaactctccctcccagataagcacagcaaagagacatagaagcaatccaagcctctgataaactctcccaccctaaatccttaaaaactcttagtctgtaagtgagtgggctctgacctaactcggccagaagcccctttcaaatttgttttctctaaaataaacctgtccttggctgtcaagccacctttcatgtttctttcctctttctttaattcttacacatgtgtcaggatgatctcccaaaaccgtgttcataacagtcagggccaaaagctagtggtcacagtccttgtccagttggcagaactgacatgtgaaggcaagtgaaggatggtgagatactgaggaaagagcaaaggatctggagatcaaagccctgcatttccattttgtcctgattcctttgctcagagacactaactaaatcaagctagcttttttcagccttgtctgtaaagtagagaaaacattagctgttgggaagacgaaaaagaatgtgtcctatgtgtgcatctatttaaatctaactgtgctgaggtgcatataaatgcctttaggtggtagggtcttccggttgtaactgcaacagaaatagcaggacttaagttcctttgtgcgtaattccagctgactttattagcggcaactcagcactagcattacccctgacatactctgagtaagatctaattcttccctcactggttcgtgatgtctaccgcagcagaaggccagctcttgactctgagttcagttggacaaaatgctgttgataaaacctcctgtcaggcctctgagcccaagctaagccatcatatcccttgtgacctgcacatatatatccagatggcctgaagtaactgaagaatcacaaaagaagtgaaaatggcctgttcctgccttaactgatgacattaccttgtgaaattccttctcctggctcatcctggctcaaaagctcccccagtgagcaccttgtgacccccatccctgccagccagagaacaaccccctttgactgtaattttccactacttacccaaatcctataaaacggccccacccctatctcccttcactgactttcttttcggactcagcccacctgcacccaggtgattaaaaagctttattgctcac

SEQ ID NO: 226431 - DNA, 1569 bp, Artificial Sequence
  derived and/or modified sequence
atgaagagccagggccagcactggtacagcagcagcgacaagaactgcaaggtgagcttcagagagaagctgctgatcatcgacagcaacctgggcgtgcaggacgtggagaacctgaagttcctgtgcatcggcctggtgcccaacaagaagctggagaagagcagcagcgccagcgacgtgttcgagcacctgctggccgaggacctgctgagcgaggaggaccccttcttcctggccgagctgctgtacatcatcagacagaagaagctgctgcagcacctgaactgcaccaaggaggaggtggagagactgctgcccaccagacagagagtgagcctgttcagaaacctgctgtacgagctgagcgagggcatcgacagcgagaacctgaaggacatgatcttcctgctgaaggacagcctgcccaagaccgagatgaccagcctgagcttcctggccttcctggagaagcagggcaagatcgacgaggacaacctgacctgcctggaggacctgtgcaagaccgtggtgcccaagctgctgagaaacatcgagaagtacaagagagagaaggccatccagatcgtgaccccccccgtggacaaggaggccgagagctaccagggcgaggaggagctggtgagccagaccgacgtgaagaccttcctggaggccctgccccaggagagctggcagaacaagcacgccggcagcaacggcaacagagccaccaacggcgcccccagcctggtgagcagaggcatgcagggcgccagcgccaacaccctgaacagcgagaccagcaccaagagagccgccgtgtacagaatgaacagaaaccacagaggcctgtgcgtgatcgtgaacaaccacagcttcaccagcctgaaggacagacagggcacccacaaggacgccgagatcctgagccacgtgttccagtggctgggcttcaccgtgcacatccacaacaacgtgaccaaggtggagatggagatggtgctgcagaagcagaagtgcaaccccgcccacgccgacggcgactgcttcgtgttctgcatcctgacccacggcagattcggcgccgtgtacagcagcgacgaggccctgatccccatcagagagatcatgagccacttcaccgccctgcagtgccccagactggccgagaagcccaagctgttcttcatccaggcctgccagggcgaggagatccagcccagcgtgagcatcgaggccgacgccctgaaccccgagcaggcccccaccagcctgcaggacagcatccccgccgaggccgacttcctgctgggcctggccaccgtgcccggctacgtgagcttcagacacgtggaggagggcagctggtacatccagagcctgtgcaaccacctgaagaagctggtgcccagacacgaggacatcctgagcatcctgaccgccgtgaacgacgacgtgagcagaagagtggacaagcagggcaccaagaagcagatgccccagcccgccttcaccctgagaaagaagctggtgttccccgtgcccctggacgccctgagcctgtag

SEQ ID NO: 226432 - protein, 567 aa, Artificial Sequence
  derived and/or modified sequence
MIEDSGKRGNTMAERRQLFAEMRAQDLDRIRLSTYRTACKLRFVQKKCNLHLVDIWNVIEALRENALNNLDPNTELNVSRLEAVLSTIFYQLNKRMPTTHQIHVEQSISLLLNFLLAAFDPEGHGKISVFAVKMALATLCGGKIMDKLRYIFSMISDSSGVMVYGRYDQFLREVLKLPTAVFEGPSFGYTEQSARSCFSQQKKVTLNGFLDTLMSDPPPQCLVWLPLLHRLANVENVFHPVECSYCHSESMMGFRYRCQQCHNYQLCQDCFWRGHAGGSHSNQHQMKEYTSWKSPAKKLTNALSKSLSCASSREPLHPMFPDQPEKPLNLAHIVPPRPVTSMNDTLFSHSVPSSGSPFITRSSPPKDSEVEQNKLLARAAPAFLKGKGIQYSLNVADRLADEHVLIGLYVNMLRNNPSCMLESSNRLDEEHRLIARYAARLAAESSSSQPPQQRSAPDISFTIDANKQQRQLIAELENKNREILQEIQRLRLEHEQASQPTPEKAQQNPTLLAELRLLRQRKDELEQRMSALQESRRELMVQLEGLMKLLKEEELKQGVSYVPYCRS

SEQ ID NO: 226433 - DNA, 1704 bp, Artificial Sequence
  derived and/or modified sequence
atgattgaggatagcgggaagcggggcaataccatggcagaacgaaggcagctttttgcagagatgcgcgctcaagacttggaccggatcagactgtcgacctaccgcacagcatgcaagctgagatttgttcagaagaaatgtaacctccatttagttgacatttggaatgtgattgaagccctgcgggaaaacgccctgaataacttggatccaaatacagagctgaacgtaagccgcctggaggccgtgctttccaccatcttctaccagctgaacaaacggatgccaaccacccatcaaattcatgtggagcagtccatctcgctgttactaaatttcctccttgcggcgttcgatcccgagggacacgggaagatctctgtgttcgccgtaaagatggctttagctacattgtgcggcggcaagattatggacaagctccgctatatcttttccatgatctcagatagctcaggagtgatggtgtatgggcgctacgaccagtttctccgcgaggttctcaagctgccaacagccgttttcgagggtccatcatttggatacaccgagcagagtgccaggagctgtttttcgcagcagaagaaggtgactctgaacggatttttggataccctcatgagcgatccacctccacagtgccttgtgtggttacccctgcttcacaggctggctaacgttgaaaatgtgtttcatccagtggagtgttcatactgtcattcggagtcgatgatgggctttaggtatagatgccagcagtgccataattaccagctctgccaagactgtttttggcgcggacacgctgggggatcccactctaaccagcaccagatgaaggagtatacatcatggaagtcacccgcgaagaaactcacaaacgccctgtctaaatctctgtcctgtgcatcttctagagaaccactgcacccaatgttccccgaccagcctgagaaaccacttaacctggcccacatcgttccaccccggccagtgacaagcatgaatgacaccttgttctcgcactcagtcccaagcagcggctctccttttataaccaggtccagtcctccaaaagactccgaagtcgagcagaacaagctgctcgctagggccgcaccggctttccttaaggggaagggcatccagtatagtctgaacgtggccgaccggctcgccgacgagcatgtgctcatagggctgtatgtcaatatgctgagaaataatcctagctgcatgctggaatcatccaatcgcctcgacgaggaacaccggctgatcgcgagatacgccgcccgactggccgcggagtcctcaagtagccaaccaccccaacaaaggtccgcaccagatattagttttaccattgacgccaacaaacagcagcgccagctgattgcagagttggaaaataagaacagagaaatcttgcaagaaatccaacggctccgtttagagcacgagcaggccagccagcccacgccggaaaaagcacagcagaatcccaccctattggctgagctgcggctgctgcggcagcggaaagacgaactcgagcagcggatgtcggcgctccaagagagtaggagggaacttatggtccaactggagggattgatgaagcttctgaaggaagaggaacttaaacaaggtgtctcatacgtcccatattgccgatcttag

SEQ ID NO: 226434 - DNA, 1704 bp, Artificial Sequence
  derived and/or modified sequence
atgattgaagattctgggaagaggggcaacaccatggccgagcggcggcagctgtttgctgagatgagggcccaggacctggaccgcatccggctgagcacctacagaacagcctgcaagctgcgctttgtgcagaagaagtgcaacctgcacctggtggacatctggaatgtgattgaggccctgcgggagaatgccctgaacaacctggaccccaacacagagctgaatgtgtcccggctggaggccgtgctgagcaccatcttctaccagctgaacaagaggatgcccaccacccaccagatccacgtggagcagagcatcagcctgctgctgaacttcctgctggccgcctttgatcctgagggccacggcaagatctctgtgtttgctgtgaagatggccctggccaccctgtgtggcggcaagatcatggacaagctgcgctacatcttctccatgatcagtgacagcagtggagtgatggtgtatggccgctatgaccagttcctgcgggaggtgctgaagctgcccacagctgtgtttgagggccccagctttggctacacagagcagagcgcccggagctgcttcagccagcagaagaaggtgaccctgaatggcttcctggacaccctgatgtctgaccccccaccccagtgcctggtgtggctgcccctgctgcaccggctggccaacgtggagaatgtgttccaccctgtggagtgcagctactgccacagcgagagcatgatgggcttccgctaccgctgccagcagtgccacaactaccagctgtgccaggactgcttctggaggggccacgccggcggcagccacagcaaccagcaccagatgaaggagtacacctcctggaagagccctgccaagaagctgaccaatgccctgagcaagagcctgagctgtgccagcagccgggagcccctgcaccccatgtttcctgaccagcctgagaagcccctgaacctggcccacatcgtgccccccaggcctgtgacctccatgaatgacaccctcttcagccacagcgtgcccagcagcggcagccccttcatcaccaggagcagcccccccaaggacagcgaggtggagcagaacaagctgctggcccgggccgccccagccttcctgaagggcaagggcatccagtacagcctgaatgtggccgaccggctggctgatgaacatgtgctgattggcctgtatgtgaacatgctgaggaacaaccccagctgcatgctggagagcagcaaccggctggatgaggagcacaggctcatcgcccgctatgctgcccggctggccgctgagagcagcagcagccagcccccccagcagaggtctgccccagacatctccttcaccattgatgccaacaagcagcagaggcagctgattgctgagctggagaacaagaaccgggagatcctgcaggagatccagaggctgcggctggagcacgagcaggccagccagcccaccccagagaaggcccagcagaaccccaccctgctggccgagctgcggctgctgcggcagaggaaggatgagctggagcagaggatgtctgccctgcaggagagccggcgggagctgatggtgcagctggagggcctgatgaagctgctgaaggaggaggagctgaagcagggcgtgtcctatgtgccctactgccgctcctag

SEQ ID NO: 226435 - DNA, 1704 bp, Artificial Sequence
  derived and/or modified sequence
atgatcgaggacagcggcaagcggggcaacaccatggccgagcggagacagctttttgccgagatgcgagcccaggatctcgaccgcattagactgtcgacctatcggactgcctgtaaactacgttttgtgcagaagaagtgtaacctccacctagtggatatctggaatgtgatagaggccttgagggaaaacgcactgaataatctcgacccgaatactgagctcaatgtcagccgactggaggcggtactgtccaccatcttttatcaactcaacaagcggatgcccacaacccaccaaatacacgtcgaacagtctattagccttcttctgaacttcctgcttgctgcctttgaccccgagggccatgggaagatcagcgtttttgccgtgaagatggctctagctactctctgtggtggcaaaattatggataagcttagatatattttttcaatgatatccgactcctccggagttatggtctacggacgttacgatcagtttctgagggaggtgctcaaactgcccactgctgtctttgagggaccatccttcgggtacactgagcagagcgcgaggagttgtttctctcagcagaaaaaggtaaccctgaacggcttcctcgacactctcatgtcagatccacctccccagtgcctggtctggctacctctgctgcaccgtctggctaatgttgagaatgttttccatccagtggagtgctcttattgccacagcgagtccatgatgggctttcgttaccggtgtcagcagtgccataattatcagctttgtcaggattgcttttggaggggccatgcagggggatcccattctaatcagcaccagatgaaagaatacacctcatggaagagtcccgccaagaagctgacaaacgctctcagcaaaagcctgtcttgtgcgtcatccagagagcctctgcaccctatgtttccggatcagccagaaaagccactgaaccttgcacacattgtcccaccccgtccagtaacctcgatgaatgacacactgttctcccacagtgtgcctagctcgggtagcccgtttataacacggtcctctccgccgaaggatagcgaggtagaacagaacaaactgctggcccgcgcagcccctgccttcctgaaagggaagggcattcaatacagcctaaacgtggcagaccggttggccgacgaacacgtcctcatcggcctatacgttaacatgctacggaataatccctcttgcatgttggagtctagtaatagactcgacgaggagcaccgtttgatcgctaggtacgccgcgaggctggcagcggagtctagcagtagccaacccccgcagcagagaagcgcccctgatatatccttcacgattgacgcgaacaagcagcagcgccagctgattgccgagctggagaacaagaaccgagaaatcttgcaagagattcagcgtcttcgactcgagcacgaacaagcaagccaacccacaccagagaaggctcagcagaatcccactctgctggcggaactgcgtctgcttagacagcgaaaggacgagctcgaacaaaggatgtctgcgttacaggagagcaggagagaacttatggtccagctggagggactgatgaagttgctgaaagaagaggaactcaagcagggcgttagctacgttccttactgccggtcctag

SEQ ID NO: 226436 - DNA, 1704 bp, Artificial Sequence
  derived and/or modified sequence
atgatcgaggacagcgggaaacgaggaaataccatggccgagcggcgtcaactcttcgcggagatgagagcacaggaccttgaccgcatccgcctgtccacttatcggacagcctgtaagctgcgattcgtgcagaagaaatgtaatcttcatttggtcgatatatggaatgtgatagaagctcttcgcgaaaacgctctgaataaccttgatcctaacacagagttgaatgtcagtcgcttggaggcggtgctgagcacaatcttctaccagctcaataagagaatgcccactacccaccagattcatgtggagcagtccatcagtctccttttaaactttctgctggcagcctttgaccctgaggggcatggtaagatcagtgttttcgcggtaaagatggccttggccaccctgtgcggtggcaagataatggacaaactccgttatattttctccatgattagcgatagttctggggtgatggtctatggtcgctacgaccagtttctgagggaagtgctgaagctgccaacggcggtgttcgaggggccatcctttgggtatacagagcagagcgcaagatcatgtttctcacagcagaagaaggtgaccctgaatgggtttctggataccctcatgagcgatccccctccccagtgtcttgtatggctgcctctgttacaccggctggctaacgttgagaacgtgtttcatccggttgaatgcagctattgtcactctgaatccatgatgggtttcagatatagatgtcagcaatgccataactaccagctctgtcaggattgcttttggcggggacatgctggcggaagtcacagcaatcaacaccagatgaaagagtatacaagctggaagtccccagctaagaagctaacaaatgccctgtcaaagagtctcagttgcgcctcctctcgggagcccctgcaccccatgttccccgatcagcccgagaagccgttaaacctggcgcatattgtccctccgcgaccagtaacaagtatgaatgacacattgttctctcattctgtaccgtcctcaggctctccattcatcactcgcagcagtccgcctaaagattcagaagttgaacagaacaagctcttggccagagctgcccctgctttcctgaagggcaagggaattcagtatagccttaatgtggccgaccgcttggcggatgaacacgtgcttatcggtctttacgtcaacatgctgcgcaataacccctcctgtatgctcgagtcatccaatagactggacgaggagcacaggctgattgcaagatacgctgcaaggctggccgctgagtcatcctcatctcagcctccacagcaacgctccgcaccagacatcagctttaccatagacgccaataaacagcagaggcagttaatagctgaactcgagaacaaaaaccgagaaatattgcaagaaatccaaaggttgcggttagagcatgagcaggccagccagccaactcccgaaaaagcccagcagaacccaacactgctcgccgaacttagactgctcagacagagaaaggacgaactggagcagcgtatgtccgctttgcaggagagcagacgcgaactcatggttcagcttgagggccttatgaaactgctcaaagaagaagagctaaagcagggggtatcatacgtgccctattgtcgatcatag

SEQ ID NO: 226437 - DNA, 1704 bp, Artificial Sequence
  derived and/or modified sequence
atgatcgaggacagcggcaagagaggcaacaccatggccgagagaagacagctgttcgccgagatgagagcccaggacctggacagaatcagactgagcacctacagaaccgcctgcaagctgagattcgtgcagaagaagtgcaacctgcacctggtggacatctggaacgtgatcgaggccctgagagagaacgccctgaacaacctggaccccaacaccgagctgaacgtgagcagactggaggccgtgctgagcaccatcttctaccagctgaacaagagaatgcccaccacccaccagatccacgtggagcagagcatcagcctgctgctgaacttcctgctggccgccttcgaccccgagggccacggcaagatcagcgtgttcgccgtgaagatggccctggccaccctgtgcggcggcaagatcatggacaagctgagatacatcttcagcatgatcagcgacagcagcggcgtgatggtgtacggcagatacgaccagttcctgagagaggtgctgaagctgcccaccgccgtgttcgagggccccagcttcggctacaccgagcagagcgccagaagctgcttcagccagcagaagaaggtgaccctgaacggcttcctggacaccctgatgagcgacccccccccccagtgcctggtgtggctgcccctgctgcacagactggccaacgtggagaacgtgttccaccccgtggagtgcagctactgccacagcgagagcatgatgggcttcagatacagatgccagcagtgccacaactaccagctgtgccaggactgcttctggagaggccacgccggcggcagccacagcaaccagcaccagatgaaggagtacaccagctggaagagccccgccaagaagctgaccaacgccctgagcaagagcctgagctgcgccagcagcagagagcccctgcaccccatgttccccgaccagcccgagaagcccctgaacctggcccacatcgtgccccccagacccgtgaccagcatgaacgacaccctgttcagccacagcgtgcccagcagcggcagccccttcatcaccagaagcagcccccccaaggacagcgaggtggagcagaacaagctgctggccagagccgcccccgccttcctgaagggcaagggcatccagtacagcctgaacgtggccgacagactggccgacgagcacgtgctgatcggcctgtacgtgaacatgctgagaaacaaccccagctgcatgctggagagcagcaacagactggacgaggagcacagactgatcgccagatacgccgccagactggccgccgagagcagcagcagccagcccccccagcagagaagcgcccccgacatcagcttcaccatcgacgccaacaagcagcagagacagctgatcgccgagctggagaacaagaacagagagatcctgcaggagatccagagactgagactggagcacgagcaggccagccagcccacccccgagaaggcccagcagaaccccaccctgctggccgagctgagactgctgagacagagaaaggacgagctggagcagagaatgagcgccctgcaggagagcagaagagagctgatggtgcagctggagggcctgatgaagctgctgaaggaggaggagctgaagcagggcgtgagctacgtgccctactgcagaagctag

SEQ ID NO: 226438 - DNA, 4518 bp, Artificial Sequence
  derived and/or modified sequence
ttgagcacaaggggaagaatgaacacagctttttattgaagttaaaggttactttggagtttgtttggaaatgtgtaaggtcaaatactatagttttcagcatatgtagtacttcagaggaagaattaaggggcatgttggtgcatttaactacaaaaccagaatgattgaagatagtgggaaaagaggaaataccatggcagaaagaagacagctgtttgcagagatgagggctcaagatctggatcgcatccgactctccacctacagaacagcatgcaagcttaggtttgttcagaagaaatgcaatttgcacctggtggacatatggaatgtcatagaagcattgcgggaaaatgctctgaacaacctggacccaaacactgaactcaacgtgtcccgcttagaggctgtgctctccactattttttaccagctcaacaaacggatgccaaccactcaccaaatccatgtggagcagtccatcagcctcctccttaacttcctgcttgcagcgtttgatccggaaggccatggtaaaatttcagtatttgctgtcaaaatggctttagccacattgtgtggagggaagatcatggacaaattaagatatattttctcaatgatttctgactccagtggggtgatggtttatggacgatatgaccaattccttcgggaagttctcaaactacccacggcagtttttgaaggtccttcatttggttacacagaacagtcagccagatcctgtttctcccaacagaaaaaagtcacgttaaatggtttcttggacacgcttatgtcagatcctcccccgcagtgtctggtctggttgcctcttctgcatcgactagcaaatgtggaaaatgtcttccatccggttgagtgttcctactgccacagtgagagtatgatgggatttcgctaccgatgccaacagtgtcacaattaccagctctgtcaggactgcttctggaggggacatgccggtggttctcatagcaaccagcaccaaatgaaagagtacacgtcatggaaatcacctgctaagaagctgactaatgcattaagcaagtccctgagctgtgcttccagccgtgaacctttgcaccccatgttcccagatcagcctgagaagccactcaacttggctcacatcgtgcctcccagacctgtaaccagcatgaacgacaccctgttctcccactctgttccctcctcaggaagtccttttattaccaggagctctcctcccaaggacagtgaagtagagcagaacaaactgctggctagggctgctccagcttttctgaagggcaaagggatacagtacagcctgaatgtggcagacaggctagctgatgaacatgttctcatcgggttgtatgtcaacatgctccggaacaacccctcatgcatgcttgagagttcaaaccggcttgatgaagaacacaggctaattgccaggtatgcggcaaggctggcagcagagtcctcttcgtctcagccacctcagcagagaagtgctcctgacatctctttcaccatcgatgcgaataagcagcaaaggcagctgattgctgagctagaaaacaagaacagagaaatcttacaggagatccagagacttcggctagagcatgaacaagcttctcagcccacgccagagaaggcacagcaaaaccccaccctgctggcagaactccggctcctcagacagcgcaaagatgagctggaacagagaatgtctgctctccaggagagccggagagagctaatggtccagttggagggtctcatgaagctactaaaggaagaagaactgaagcagggagtaagttatgtcccctactgcaggtcttaactaacagtggaggggcctgccgacctgcggttttctcattgcttttgctctaatgtatgttcatgcttcagtttggaaagagaaaaaagtcatactaatttgcttctttttcaatgtagtgcttgaattgagatatataaatttagcattttttataactatcactactatccacatcaaaagaagaactatgacatcttttagaaaagggaacgaattgtcatttattggaaacattttagatccccagaggtataagtttcaaaccagtcttagcttttcaagttgttgatcagacccttctcttaacagagagataccacagtcactagagataccctgaggttcatgtcatcccaaaacccacagcactcagaagctaacctctacacccactcacactgtgagtattcagttcggtttcattttactgaaaacctgtgaaacctctttttataaaaatcaggcaattaaatcccttttcatcacacaattattgagccttgttccccatggctcaccaaaatgtgctcaattttgtgagagaaagactgtactccataactgactattcacgtcccatctttttggctcttccccaaagcagaatccttactgttggttgacagtaatctctttttaaaaagtaactctcagctttttccttagcaccagagcctttcggctccgggagacgagagggtcattacatacttttttttttttctggaaataggggcattgtgactttatagcctaaactggagctgtctgaacctgtggtcaggctcaagagccagcagggggagcagcaaactcaaaaaaaaaaacaaattaaattaaattaaattaaattaaatagaagcaaaataaaagcagctttaatttcaagtgcatgtaccacgctatgtatgacaatatatcccactcactagcattatttaaaagtttcacattatttccatggatcaattagaaccacaacctgtccaatttcaacgtatctttcatttcttctgtatgctcttttctattattcattatgtgtgtttgtgtgtaacaaagaatgtttggaaaatgctggacacatttttacccttcattcccatggtctgtaaaaaaggaaagtgtaaaatcaatctgtaatgtcagacaataaagataatgtattacattattttgtattttgtgaaaaaaattactttactaaattaaagtcaaattttaacagaagacagtccccctgggtgaaggacacataacacatacagcctgtataattgcccatgaatgcatacatggggtattgctattgtatttccaatacacttagatcatggtaaagaaaaatgccttcttcatgatacttctctgcaaatggcttctttcctctcctgtctcttatttagcatgtgcatagaaaaaggaaataaggttcaattataacctccctcctcctagcagagagagagggcaatcatcctgtcgtcatcagccttgctttagccatttcccttggggatactttccaggccatttcccaggcagcaggatcttgaaaggctcctatggaccaggaagttcgtaaacagatggatgcacagagccaaactgtggcagtgcccccaaggtggcgccactgccccctcaccttccagctcctctccaccaagcccctcagcagcttctgcatctcagggggccaacagcgggtactgcggtgtcggtacccaaggaccagggcccacgtcacccagatgtcagcaatacatcgtctgggtagtggcagagtttgcctatttcacttatttatcttttttgcttttatacacaagcctcttttcaaaaaggacctgaggcagcttacaacaaaagatataaacagtgacttcataaaattgaaatagaaaaatcaaaaactaaagaaaataaaatgtgaatatgctaatcttaagggacaaggatgttactctgcatgttctggcaatgaagcaaaaaaaaaaaaaaaaggaaaattatcggtggttttatcagtacagaaataccacttctcaggggaacaaaatttctgttggcataaaatatgaaagaaagtcttcactgggagctttataggagtactggacgatagaaaaggaaaaaaagcagtcatagatttcatgtggctgtttcttatactgacctcagtcaaaattaaaagcagaaccttatcaatcccagccctatagaggcggttctgcaaggaaataaacaaatgctgtccaaatatagacttctcatggtaaaacatgatctaaggagagaatttagaggttttagactggcatctgcttctaaattctgtttttatttatgagtgtttctcccctttggggacattgtctttgtaaaaccaaacttagaacacccccacacaacaaattgtgctggatttaataacctctacttgctttatcataagtctgtgtggttcaatgtagtgttttattatactggcatatataatttctacttacattgtttcttgttagaggtaatgcatgaatttatccctctcgaggagagaacatgaattaaaaaaaatagtgcctgtaatataatgtgatgattatgatatcacaagcaataaatttttttttacaaaacttgaa

SEQ ID NO: 226439 - DNA, 1176 bp, Artificial Sequence
  derived and/or modified sequence
atgttccccgaccagcctgagaagcccctaaatcttgcacatatcgtgccccctagaccggttacgagtatgaacgacactttattcagccacagcgtgccctccagtggatctcccttcatcacaagatccagcccgcctaaggactcagaagtggagcagaataagttattggctcgcgccgcaccagccttcctgaagggtaaggggatgctggaaagtagtaatagacttgatgaggagcatcgtttgatagccaggtatgcggcacgcctggcagctgaatcatcctcctctcagcccccacagcagaggtccgcaccagacatcagttttacgattgatgccaataagcaacagcgccaactgattgctgagctcgagaataagaatagggaaatactgcaggaaatccaacgcctcaggctggagcacgagcaggcatctcaaccgactcccgagaaagctcagcagaacccaaccctactggctgagttacgcctgctacgccagagaaaagatgagctcgagcagcgaatgtcggccctgcaggagtccagacgtgaactcatggtgcagctcgagggattgatgaaactgttgaagacccaaggagccggttcaccccgctcaagtccctcccataccatctccaggccaatcccaatgcctattaggtccgcctcggcctgcagtactcctacccatactccccaggactccctgacaggagtgggaggcgacgttcaggaggcgtttgcccagtcctctcgacggaacctgaggaatgacttgctggtcgccgcagactcaatcacaaatacaatgagtagtctagttaaggaacttaactcagaggtagggagtgaaactgagtccaatgtggactcagaattcgcccgcacccagttcgaggatttagttccatccccaacctccgaaaaggcctttctggcgcaaatccacgctaggaagcctggttacatccactcgggagcaaccacatccacaatgcgcggtgatatggttacagaagatgcagatccttatgttcagcccgaggacgagaattatgaaaatgattccgtgagacagctagaaaacgagttacagatggaagagtatctcaagcagaagctgcaggacgaggcatatcaggttagtctgcagggctag

SEQ ID NO: 226440 - DNA, 1176 bp, Artificial Sequence
  derived and/or modified sequence
atgttcccagaccagcctgaaaagcctcttaacttggcacacatcgttccaccacgtccagtgacctctatgaacgacacattatttagccacagcgtcccttccagcggctcacctttcatcacgagaagctcgccacctaaagatagcgaggtggaacagaacaaactcttagctcgggccgccccggccttcttgaaaggcaagggaatgcttgaatccagtaacagactggacgaggaacacaggctgattgcccgatacgctgctaggttggctgccgagagttcatccagtcagccaccacagcagcgctccgcccccgatatctcattcacgattgatgccaacaaacagcagaggcagctcattgctgagctggagaacaagaatagggagatactccaagaaatccagaggctgcgactcgagcacgagcaggcctcccagccaacccctgagaaagctcaacagaatcctacactgctcgctgagctccgtctgcttcgacagcgcaaagacgaactcgagcagaggatgtccgcgctccaggagtctaggcgggagctgatggtacagctggaggggcttatgaagcttctaaaaacacagggggctggcagccccaggagctctccgtcccataccatttccagaccaattccgatgccaatccgctccgcttcggcatgttctacccccacccataccccacaggactccctgactggagtgggcggcgatgttcaggaggctttcgcccagagctcacgacgaaacttgaggaatgatttgctggtggctgcagactccattacaaacactatgtcgagtctggtgaaggaactgaacagcgaagtagggagcgagaccgagagtaatgttgattcagagttcgccagaacccaatttgaggatctagtgcctagtccaaccagtgagaaggccttccttgctcagatccatgccagaaagcctggctatatccactctggtgccacaacctctacaatgcggggtgatatggtgaccgaggatgcggacccatacgtgcagcctgaagacgagaactatgaaaatgatagtgttcgccagcttgagaacgagctgcaaatggaggagtatctcaagcagaagctccaggatgaagcatatcaggtctctttgcaggggtag

SEQ ID NO: 226441 - DNA, 1176 bp, Artificial Sequence
  derived and/or modified sequence
atgtttcctgaccagcctgagaagcccctgaacctggcccacatcgtgccccccaggcctgtgacctccatgaatgacaccctcttcagccacagcgtgcccagcagcggcagccccttcatcaccaggagcagcccccccaaggacagcgaggtggagcagaacaagctgctggcccgggccgccccagccttcctgaagggcaagggcatgctggagagcagcaaccggctggatgaggagcaccggctgattgcccgctatgctgcccggctggccgctgagagcagcagcagccagcccccccagcagaggtctgccccagacatctccttcaccattgatgccaacaagcagcagaggcagctgattgctgagctggagaacaagaaccgggagatcctgcaggagatccagaggctgcggctggagcacgagcaggccagccagcccaccccagagaaggcccagcagaaccccaccctgctggccgagctgcggctgctgcggcagaggaaggatgagctggagcagaggatgtctgccctgcaggagagcagaagagagctgatggtgcagctggagggcctgatgaagctgctgaagacccagggcgccggcagccccaggagcagccccagccacaccatcagccggcccatccccatgcccatccgcagcgccagcgcctgcagcacccccacccacaccccccaggacagcctgactggagtgggcggagatgtgcaggaggcctttgcccagagcagcagaagaaacctgagaaatgacctgctggtggccgctgacagcatcaccaacaccatgagcagcctggtgaaggagctgaacagcgaggtgggcagcgagacagagagcaatgtggacagcgagtttgcccggacccagtttgaggacctggtgcccagccccaccagcgagaaggccttcctggcccagatccacgccaggaagccaggctacatccacagcggggccaccaccagcaccatgagaggagacatggtgacagaagatgctgacccctacgtgcagccagaagatgagaactatgaaaatgacagcgtgcggcagctggagaatgagctgcagatggaggagtacctgaagcagaagctgcaggatgaggcctaccaggtgtccctgcagggctag

SEQ ID NO: 226442 - DNA, 1176 bp, Artificial Sequence
  derived and/or modified sequence
atgttccccgaccagcccgagaagcccctgaacctggcccacatcgtcccaccccgacctgtgacaagcatgaacgacacactattttcacactccgtgcccagctctgggagccctttcatcactcgctcatcaccacctaaagactctgaagtcgaacagaacaagctcctcgctagagccgccccagcatttctgaaaggaaaggggatgctggagtcttcgaatagacttgacgaagaacatcgtcttattgcacgctacgcggctcgcctggccgcagagagctcatcttcccagcccccacaacagagatccgctcccgacattagttttactatagatgctaataagcagcaaagacagctaatcgctgagttggaaaataagaatagagagatccttcaggagatccaaagactgaggctcgagcacgaacaggcctcacagcctacacccgaaaaggcccagcagaatcctacgctcttggccgaactgagacttctgcgtcaacgtaaagacgagctggagcagaggatgagcgcactgcaggagtcgcgacgggagctgatggttcagttggaggggctgatgaagttactcaaaacacaaggcgccggctcaccaagatcctctccaagtcacactattagtcgacctatccctatgccaattagatccgcttcagcctgctccacacccacacatactccacaagattctctgactggcgtgggaggtgatgttcaagaggcctttgcccagtcctctcgccggaacctgcgaaatgatctgctggtggctgctgactctatcaccaacacaatgtcctcactcgtcaaagagctgaattccgaggtgggaagcgagaccgagtccaacgtagactctgaattcgcgcgcacccaattcgaggacctggtgccaagcccaaccagcgaaaaagctttcctggctcaaatccatgcgcggaaacccgggtatatccactcaggagccactacttccacaatgagaggcgacatggttacagaagacgccgatccatacgtgcagccagaagacgagaattacgaaaacgactctgttcgacagctggagaacgaactccagatggaagagtatcttaaacagaagttacaagatgaggcctaccaggtgtcgcttcagggctag

SEQ ID NO: 226443 - DNA, 1176 bp, Artificial Sequence
  derived and/or modified sequence
atgttccccgaccagcccgagaagcccctgaacctggcccacatcgtacctccccgccccgtaacttccatgaacgatacactgttttcccactcagtgccaagcagcgggtcccccttcattactcggtcttccccaccaaaggactcagaagtggagcagaataagttgctcgccagagcggccccagcatttctgaaagggaaagggatgctggagtcctctaatcgtctggacgaagaacataggttgatcgctagatacgccgctagactggccgcagaatcgtcatcaagccagcctccacagcagcggtcagctcctgatatctcattcactatcgatgcgaacaagcagcagagacagctgattgccgaactagaaaacaagaaccgggaaatcctgcaggagattcagagactgcgcctggagcatgagcaggcctcccagcctacacctgaaaaggcccagcaaaacccgaccctcctggctgaactgcgtttgctgagacagaggaaggatgagctcgagcagaggatgagcgcattacaggagtccagacgcgagttgatggtacagctggagggactcatgaagctcctaaagacacagggggctgggtctccacgctcttcaccatcccacacaatatcgcgccccattcccatgcccatccgttcagccagcgcctgctcaaccccgacacatactccccaggactctctgaccggggtcggaggtgatgtccaggaggccttcgcccagagcagtagacggaacttgagaaacgacttactggtggctgcggattctatcaccaacaccatgtcctccctcgtgaaagaactcaattccgaagttgggagcgaaaccgagagcaacgtggactcggaatttgcgcgcacccagttcgaggacctcgtaccgtctccgacatcagaaaaagctttcctggcccaaatccacgctcggaaacctggctacatacatagtggagctacaacgtccaccatgcgcggggatatggttacggaagacgccgacccatacgtgcagcctgaggacgaaaactacgagaacgacagtgttcgccaactagagaacgagctccagatggaggaatacctcaaacagaagttgcaggacgaagcttatcaggtaagcctgcaagggtag

SEQ ID NO: 226444 - DNA, 1176 bp, Artificial Sequence
  derived and/or modified sequence
atgttccccgaccagccagagaagccgctgaatctggcacatatcgttccacctagaccggtcactagtatgaacgacactctctttagccactctgtacccagctctggcagccctttcatcacaaggagctctccacctaaagattccgaagtggaacagaacaaactgttggccagagcagcacccgcatttctcaagggtaagggaatgctggaatcttctaacaggctagacgaagagcatcggttaattgcaaggtacgcggcaaggctggctgctgagagctccagttcccaaccaccccagcagcgatcagcccctgatatctcctttaccattgatgcgaacaaacaacagagacagctcattgctgaactggagaataagaaccgagaaattctgcaggaaattcagcgactccggttagagcacgagcaagcctcccaaccaacccccgaaaaagcgcagcagaacccgaccctgcttgccgagctgcgccttctgagacaacggaaagatgaacttgagcagcggatgtcggcactgcaagaatcccggagagagcttatggtgcagctggaagggctgatgaagctcctgaaaacccagggggctggcagtcctaggagttcaccttcacacacaatctctaggcctattcccatgccgatccgatctgcttctgcttgtagcacccccacccacactcctcaggactccctcaccggagtgggcggagacgtccaggaagcatttgctcaaagcagccgccgaaacttgagaaacgacctgcttgtcgccgcagatagtattaccaataccatgtcttccctggtgaaggaactgaatagcgaggtaggaagcgaaacggaatctaatgtggacagtgagttcgcgagaacacagtttgaggaccttgtaccttcgccaaccagcgagaaagccttcctggcccagatccacgccaggaagcctggttatattcattctggagccacaaccagcactatgcgaggggatatggtgaccgaagatgctgacccctacgtgcaaccagaggatgaaaactatgagaatgactctgtccgacagctggagaatgaacttcagatggaggagtacctgaagcagaagctgcaggatgaggcatatcaggtctccctccaggggtag

SEQ ID NO: 226445 - DNA, 1176 bp, Artificial Sequence
  derived and/or modified sequence
atgtttcccgatcagccagagaaaccactgaatctggcacatattgtgccccctagacctgtcacctccatgaacgacactctttttagccattcagtgcctagctctggcagcccatttataacccgctcttctcccccaaaggactcagaggtagagcagaataagctcctcgctcgcgctgcccctgcgttcctaaagggcaagggcatgctagagtcctcaaaccgcctggacgaagagcatcggctgatcgcacgttatgcagctagactcgccgctgaaagttctagctcacagccccctcagcagcggagcgcacctgacatctcatttaccatagacgcaaataaacagcagaggcaactgattgctgagctggaaaataagaatagggagatccttcaggagatccaacgactgcgactggagcacgaacaagcatcacagcctaccccagaaaaagcacagcaaaaccccactctgttagccgagcttagactccttagacagcgcaaggatgaactcgagcaaagaatgtcagcgctccaagagagccgcagggaacttatggtgcagttggagggcttgatgaaattgttgaaaacccaaggagctgggagccctagaagcagcccttctcatactatctcccggcctatccctatgcccattaggtcggcttccgcttgcagtaccccaactcacacccctcaggacagcctcaccggagtgggtggggatgtgcaggaggcatttgcccagtcctcccggagaaatctccgcaatgacctcctggtggccgcagactctatcaccaacacaatgtcaagcctggtgaaggaattaaattcagaagtgggcagtgaaaccgagagcaacgtggattccgagtttgccagaacacaattcgaggacttggtccccagtcctacaagcgagaaagctttcctggcacagatccacgctaggaagccaggatacatccatagtggcgcaactacgagcaccatgagaggcgatatggtgactgaggatgccgacccctacgttcaaccggaagacgagaactacgagaatgattcggtccgccagctggaaaatgagctgcagatggaggagtacctcaaacagaagcttcaagacgaagcgtaccaggttagcttgcagggctag

SEQ ID NO: 226446 - DNA, 1176 bp, Artificial Sequence
  derived and/or modified sequence
atgttccccgaccagcccgagaagcccctgaacctggcccacatcgtgccccccagacccgtgaccagcatgaacgacaccctgttcagccacagcgtgcccagcagcggcagccccttcatcaccagaagcagcccccccaaggacagcgaggtggagcagaacaagctgctggccagagccgcccccgccttcctgaagggcaagggcatgctggagagcagcaacagactggacgaggagcacagactgatcgccagatacgccgccagactggccgccgagagcagcagcagccagcccccccagcagagaagcgcccccgacatcagcttcaccatcgacgccaacaagcagcagagacagctgatcgccgagctggagaacaagaacagagagatcctgcaggagatccagagactgagactggagcacgagcaggccagccagcccacccccgagaaggcccagcagaaccccaccctgctggccgagctgagactgctgagacagagaaaggacgagctggagcagagaatgagcgccctgcaggagagcagaagagagctgatggtgcagctggagggcctgatgaagctgctgaagacccagggcgccggcagccccagaagcagccccagccacaccatcagcagacccatccccatgcccatcagaagcgccagcgcctgcagcacccccacccacaccccccaggacagcctgaccggcgtgggcggcgacgtgcaggaggccttcgcccagagcagcagaagaaacctgagaaacgacctgctggtggccgccgacagcatcaccaacaccatgagcagcctggtgaaggagctgaacagcgaggtgggcagcgagaccgagagcaacgtggacagcgagttcgccagaacccagttcgaggacctggtgcccagccccaccagcgagaaggccttcctggcccagatccacgccagaaagcccggctacatccacagcggcgccaccaccagcaccatgagaggcgacatggtgaccgaggacgccgacccctacgtgcagcccgaggacgagaactacgagaacgacagcgtgagacagctggagaacgagctgcagatggaggagtacctgaagcagaagctgcaggacgaggcctaccaggtgagcctgcagggctag

SEQ ID NO: 226447 - protein, 452 aa, Artificial Sequence
  derived and/or modified sequence
MAAPSAGSWSTFQHKELMAADRGRRILGVCGMHPHHQETLKKNRVVLAKQLLLSELLEHLLEKDIITLEMRELIQAKVGSFSQNVELLNLLPKRGPQAFDAFCEALRETKQGHLEDMLLTTLSGLQHVLPPLSCDYDLSLPFPVCESCPLYKKLRLSTDTVEHSLDNKDGPVCLQVKPCTPEFYQTHFQLAYRLQSRPRGLALVLSNVHFTGEKELEFRSGGDVDHSTLVTLFKLLGYDVHVLCDQTAQEMQEKLQNFAQLPAHRVTDSCIVALLSHGVEGAIYGVDGKLLQLQEVFQLFDNANCPSLQNKPKMFFIQACRGDETDRGVDQQDGKNHAGSPGCEESDAGKEKLPKMRLPTRSDMICGYACLKGTAAMRNTKRGSWYIEALAQVFSERACDMHVADMLVKVNALIKDREGYAPGTEFHRCKEMSEYCSTLCRHLYLFPGHPPT

SEQ ID NO: 226448 - DNA, 1359 bp, Artificial Sequence
  derived and/or modified sequence
atggccgcaccatctgccggcagttggtcaacgttccaacacaaagagctcatggcggcagatcgcggccgaaggatcctgggcgtgtgtggaatgcatccacatcatcaagagaccctgaagaagaatcgcgtggtgctcgccaaacaattgttgttatccgaactcctagagcacctgctggagaaagatattataactctggaaatgagagaacttatccaggcgaaggtgggctccttttcacagaatgtcgaactccttaacctgttacctaagcgaggtccacaggcgtttgatgccttctgcgaagctctcagagaaactaagcaggggcacctggaggacatgctcctcacaaccctctcgggccttcaacatgtactgccccctctgtcatgcgactacgacctgtccctgccctttccggtgtgtgagagttgtccactatataagaagctccgcctgagcacagatacggtcgagcacagtctcgacaacaaggatggtcccgtgtgcctgcaagtgaaaccttgtacacctgaattttatcagacacactttcagctcgcttatagactgcagagcaggcccagggggctggcccttgtcctgtccaacgtgcatttcacaggcgagaaggaactggaattcaggtctggaggcgatgtagaccatagtacgctggtgacattgttcaaactgttaggctatgatgtgcacgtcctgtgcgaccaaactgctcaagagatgcaagaaaagctgcagaattttgcgcaactccctgcccaccgtgtaaccgattcgtgtatcgtggctctgctgtcccacggtgttgaaggcgctatttatggcgtggacggaaagctcctgcaactacaagaggtctttcagttgtttgacaacgctaattgcccatccctccagaacaagccaaagatgttcttcatccaggcttgccgcggggatgagaccgaccgtggagtggaccagcaggatgggaagaaccatgcagggagcccagggtgtgaagaaagtgacgccggaaaggagaagctcccgaaaatgagattaccaacgaggtctgacatgatatgtgggtacgcatgtctcaaaggcaccgcggcaatgagaaacacaaagcggggcagttggtacatcgaggccctggctcaggtattcagcgaaagagcatgtgacatgcatgtggccgacatgctggtaaaagttaacgctctcattaaagatagagagggatatgccccaggtacagagttccatcggtgtaaagagatgagcgagtattgttctactctctgcaggcatttatatctcttccctggacatccaccaacctag

SEQ ID NO: 226449 - DNA, 1359 bp, Artificial Sequence
  derived and/or modified sequence
atggccgcccccagcgctggctcctggagcaccttccagcacaaggagctgatggctgctgaccggggccgccgcatcctgggcgtgtgtggcatgcacccccaccaccaggagaccctgaagaagaacagagtggtgctggccaagcagctgctgctgtctgagctgctggagcacctgctggagaaggacatcatcaccctggagatgagggagctgatccaggccaaggtgggcagcttcagccagaatgtggagctgctgaacctgctgcccaagaggggcccccaggcctttgatgccttctgtgaggccctgcgggagaccaagcagggccacctggaggacatgctgctgaccaccctgagcggcctgcagcacgtgctgccccccctgagctgtgactatgacctgagcctgcccttccctgtgtgtgagagctgccccctgtacaagaagctgcggctgagcacagacacagtggagcacagcctggacaacaaggatggccctgtgtgcctgcaggtgaagccctgcaccccagagttctaccagacccacttccagctggcctaccgcctgcagagccggccccggggcctggccctggtgctgagcaatgtgcacttcaccggggagaaggagctggagttccgctctggaggagatgtggaccacagcaccctggtgaccctcttcaagctgctgggctatgatgtgcacgtgctgtgtgaccagacagcccaggagatgcaggagaagctgcagaactttgcccagctgcctgcccaccgggtgacagacagctgcatcgtggccctgctgagccatggagtggagggcgccatctacggcgtggatggcaagctgctgcagctgcaggaggtgttccagctgtttgacaatgccaactgccccagcctgcagaacaagcccaagatgttcttcatccaggcctgcagaggagatgaaacagaccggggcgtggaccagcaggacggcaagaaccacgccggcagccctggctgtgaggagagtgatgctgggaaggagaagctgcccaagatgaggctgcccaccaggagtgacatgatctgtggctacgcctgcctgaagggcacagctgccatgaggaacaccaagaggggctcctggtacatcgaggccctggcccaggtgttttctgagcgggcctgtgacatgcacgtggccgacatgctggtgaaggtgaatgccctgatcaaggaccgggagggctacgcccctggaacagagttccaccgctgcaaggagatgtctgagtactgcagcaccctgtgccgccacctgtacctgtttcctggccacccccccacctag

SEQ ID NO: 226450 - DNA, 1359 bp, Artificial Sequence
  derived and/or modified sequence
atggccgcccccagcgccggcagctggagcaccttccagcacaaggagctgatggcagccgacagaggacgtagaatccttggagtgtgtggcatgcaccctcaccatcaggagaccctgaaaaaaaacagggtcgtgttggctaagcaactcctactctctgaattactagagcatctcctggaaaaggatattatcaccctcgaaatgagggagctgatccaagcaaaggtcggctccttctctcaaaatgtcgaactgctgaatttactgcccaagcggggcccacaggcgtttgacgccttttgtgaggccttacgggaaactaagcaaggccatcttgaagacatgctgctgactacgctcagtggcctacagcatgtcctgcctcctctgtcctgtgattacgacctcagcctgccatttcctgtgtgtgaatcttgcccactctataagaagttgcggctctctacagacaccgtagaacactcattagacaataaggatggacccgtgtgcttgcaggtcaaaccctgtacacccgagttctatcagactcattttcaactggcctaccgtctgcagtcgcgacccagaggtcttgctcttgtattgagtaatgtacatttcacaggggaaaaagagttggaatttagatcgggaggcgacgtggaccattcaacactggtcactctcttcaagctgctaggctacgacgtacatgttttgtgcgatcaaacagctcaggaaatgcaagaaaagctgcaaaactttgcccagctgcctgcgcatcgcgtgaccgacagttgcattgttgccctgctgtcccacggcgtggagggagccatctacggcgttgacgggaaactgctacagcttcaagaagtgttccagttattcgataacgcaaactgtcccagcctacagaataagcctaagatgtttttcattcaggcatgcagaggtgacgagactgaccgcggagtagaccaacaagacggcaagaatcacgctggcagtcctgggtgtgaggagagcgatgccggaaaggaaaagcttccaaagatgagactccccacccggtctgatatgatttgcggctatgcctgtctgaaagggacagctgctatgagaaatacaaagcgaggctcctggtacatcgaagcgttggcccaggtgttctcggaacgggcatgtgatatgcacgtcgccgatatgctggtcaaagtcaacgccctgataaaggatcgcgaggggtacgcacccggaaccgagttccacaggtgtaaggaaatgagcgagtactgcagtaccctctgtaggcacttgtatctgttcccaggacatccccccacctag

SEQ ID NO: 226451 - DNA, 1359 bp, Artificial Sequence
  derived and/or modified sequence
atggctgcgccatcagcgggatcatggagtacatttcaacacaaagagctcatggcggcagataggggaagacgtatcctcggcgtttgcgggatgcaccctcaccatcaagaaacacttaagaagaatcgagtcgtgctcgccaagcagttgctgttgtcagagctgctagagcatttgctggagaaagacatcatcacgttggagatgagggaactcatccaggccaaggttggatccttttctcagaatgtcgagctgctgaacctgctccctaaacggggaccccaggcattcgacgctttctgtgaagcgcttcgagagacgaagcagggacacctagaagacatgctgctaactaccctgagcggactgcaacatgtcttgccccctttgtcttgtgattacgacctcagcctaccctttcccgtgtgcgaaagctgcccactctataagaaacttcgattgtccaccgataccgtggaacactctttagataacaaggatggcccagtgtgcctccaggtcaagccatgcacccccgaattctaccagacccattttcaactcgcctatcgcttgcagagtcggcctcgaggactcgctctagtgctgagcaacgtgcactttactggggaaaaggagttggagtttaggagtggcggtgatgtggaccactctactcttgtcacactatttaaactgctcgggtatgatgtccacgtgctatgtgaccaaactgcccaggaaatgcaggagaaattgcagaacttcgctcagctccctgcacatcgcgtgacagactcttgtatcgtggccttgctgtctcacggggtggagggggctatatatggagtggatggtaagttgctgcaactccaggaagtgtttcagctgtttgataatgcaaactgtcctagtctccagaataagccaaaaatgttttttatccaggcttgccgtggcgatgagacagataggggagtcgaccagcaggatgggaaaaaccatgctggttctccgggatgtgaggagtccgacgcaggcaaagagaaactccccaaaatgagattaccaacacgtagtgatatgatatgcggctatgcatgtctgaagggcactgccgcaatgcggaacacaaagcgcggatcctggtacatcgaagccctcgcccaggtgttctcagagcgcgcatgcgacatgcacgtggctgacatgctggtgaaagtgaacgctctgatcaaggatagagaaggatatgcacccggtaccgaatttcataggtgtaaggaaatgtccgagtactgcagtaccctttgccggcacctttatctgttccctgggcatccccctacctag

SEQ ID NO: 226452 - DNA, 4225 bp, Artificial Sequence
  derived and/or modified sequence
cttttgtctgtccgccgagcaccccacttcaccccattggaccgcgcggccgccgctagagctctgcgcctgcgcacgcaccgggccggggactgggtggcctggtgtgtgggcgcggcagggcgcaggcgcaggcgcagtgtgcgtccgcgtctgaggggagggatgtgggggaagcgacggcccccggtttgtttgggctgtgggcggtgcgcagcggagagcccgggaaaagcgggaaatggcggcgccgagcgcggggtcttggtccaccttccagcacaaggagctgatggccgctgacaggggacgcaggatattgggagtgtgtggcatgcatcctcatcatcaggaaactctaaaaaagaaccgagtggtgctagccaaacagctgttgttgagcgaattgttagaacatcttctggagaaggacatcatcaccttggaaatgagggagctcatccaggccaaagtgggcagtttcagccagaatgtggaactcctcaacttgctgcctaagaggggtccccaagcttttgatgccttctgtgaagcactgagggagaccaagcaaggccacctggaggatatgttgctcaccaccctttctgggcttcagcatgtactcccaccgttgagctgtgactacgacttgagtctcccttttccggtgtgtgagtcctgtcccctttacaagaagctccgcctgtcgacagatactgtggaacactccctagacaataaagatggtcctgtctgccttcaggtgaagccttgcactcctgaattttatcaaacacacttccagctggcatataggttgcagtctcggcctcgtggcctagcactggtgttgagcaatgtgcacttcactggagagaaagaactggaatttcgctctggaggggatgtggaccacagtactctagtcaccctcttcaagcttttgggctatgacgtccatgttctatgtgaccagactgcacaggaaatgcaagagaaactgcagaattttgcacagttacctgcacaccgagtcacggactcctgcatcgtggcactcctctcgcatggtgtggagggcgccatctatggtgtggatgggaaactgctccagctccaagaggtttttcagctctttgacaacgccaactgcccaagcctacagaacaaaccaaaaatgttcttcatccaggcctgccgtggagatgagactgatcgtggggttgaccaacaagatggaaagaaccacgcaggatcccctgggtgcgaggagagtgatgccggtaaagaaaagttgccgaagatgagactgcccacgcgctcagacatgatatgcggctatgcctgcctcaaagggactgccgccatgcggaacaccaaacgaggttcctggtacatcgaggctcttgctcaagtgttttctgagcgggcttgtgatatgcacgtggccgacatgctggttaaggtgaacgcacttatcaaggatcgggaaggttatgctcctggcacagaattccaccggtgcaaggagatgtctgaatactgcagcactctgtgccgccacctctacctgttcccaggacaccctcccacatgatgtcacctccccatcatccacgccaagtggaagccactggaccacaggaggtgtgatagagcctttgatcttcaggatgcacggtttctgttctgccccctcagggatgtgggaatctcccagacttgtttcctgtgcccatcatctctgcctttgagtgtgggactccaggccagctccttttctgtgaagccctttgcctgtagagccagccttggttggacctattgccaggaatgtttcagctgcagttgaagagcctgacaagtgaagttgtaaacacagtgtggttatggggagagggcatataaattccccatatttgtgttcagttccagcttttgtagatggcactttagtgattgcttttattacattagttaagatgtctgagagaccatctcctatcttttatttcattcatatcctccgccctttttgtcctagagtgagagtttggaaggtgtccaaatttaatgtagacattatcttttggctctgaagaagcaaacatgactagagacgcaccttgctgcagtgtccagaagcggcctgtgcgttcccttcagtactgcagcgccacccagtggaaggacactcttggctcgtttgggctcaaggcaccgcagcctgtcagccaacattgccttgcatttgtaccttattgatctttgcccatggaagtctcaaagatctttcgttggttgtttctctgagctttgttactgaaatgagcctcgtggggagcatcagagaaggccaggaagaatggtgtgtttccctagactctgtaaccacctctctgtctttttccttcctgagaaacgtccatctctctcccttactattcccactttcattcaatcaacctgcacttcatatctagatttctagaaaagcttcctagcttatctccctgcttcatatctctcccttctttaccttcatttcatcctgttggctgctgccaccaaatctgtctagaatcctgctttacaggatcatgtaaatgctcaaagatgtaatgtagttctttgttcctgctttctctttcagtattaaactctcctttgatattatgtggcttttatttcagtgccatacatgttattgttttcaacctagaaacctttatccctgcttatctgaaacttcccaacttccctgttctttaagactttttttttttttttttttttttttgagacagagtctcgctctgtcgcccaggctggagggcagtggcacgatctcagctcactgcaagctccaactcccgggttcacgccattctcctgcctcagccttccaagtagctgggactacaggtgcccgccaccgtgcccggctaatttttttgtatttttagtagagacagggtttcaccatgttagccgggatggtcttgatctcctgacctcatgatccacccacctcagcctcccaaagtgttgggattacaggcgtgagccactgcgcccgggcaagacctttttttaaaaaaaaaaaaaaaaaaacttccattctttcttcctccagtctgttctcacataacagagtagttttggtttttaattttttttggttgtttgctgttttttgttttttaaggtgagttctcactatgtttctcagactggtctcgaactcctggcctcaagccatcttcccgcctcagcctctcaaatagctgggcttacaggcatgagccaccacacctggccaggatttggttgtttaaatataaatctgatcacccccctgcttagaacccttctgctttctattacccctcatttaaaatgtaaactcttcaccttggtttatgagaactggttcttgccttccccttgaacctcattaaatggtgatttcttgctaagctccagcccgagtggtctcctctcagcttctaattttgtgctctttcctgcccttttcctgggccttctcagctctccacccccaccactcttgactcaggtggtgtccttcttcctcaagtcttgacaattcccgggcccttcagtccctgagcagtctacttctgtgtctgtcaccacatcttgtcttttcccctcattgcatttattgcagtttatatatatgctacttttacttgttcatttctgtctcccctaccaggctgtaaatgagggcagaaaccttgtttgttttattcaccatcatgtaccaagtgcttggcacatagtgggccttcattaaatgtttgttgaataaaagagggaagaaggcaagccaaccttagctacaatcctaccttttgataaaatgttccttttgacaatatacacggattattatttgtactttgtttttccatgtgttttgcttttatccactggcatttttagctccttgaagacatatcatgtgtgagataacttccttcacatctcccatggtccctagcaaaatgctaggcctgtagtagtcaaggtgctcaataaatatttgtttgggtggtttgtgagccttgctgccaagtcctgcctttgggtcgacatagtatggaagtatttgagagagagaacctttccactcccactgccaggattttgtattgccatcgggtgccaaataaatgctcatatttattactga

SEQ ID NO: 226453 - DNA, 1146 bp, Artificial Sequence
  derived and/or modified sequence
gggaaatggcggcgccgagcgcggggtcttggtccaccttccagcacaaggagctgatggccgctgacaggggacgcaggatattgggagtgtgtggcatgcatcctcatcatcaggaaactctaaaaaagaaccgagtggtgctagccaaacagctgttgttgagcgaattgttagaacatcttctggagaaggacatcatcaccttggaaatgagggagctcatccaggccaaagtgggcagtttcagccagaatgtggaactcctcaacttgctgcctaagaggggtccccaagcttttgatgccttctgtgaagccttgcactcctgaattttatcaaacacacttccagctggcatataggttgcagtctcggcctcgtggcctagcactggtgttgagcaatgtgcacttcactggagagaaagaactggaatttcgctctggaggggatgtggaccacagtactctagtcaccctcttcaagcttttgggctatgacgtccatgttctatgtgaccagactgcacaggaaatgcaagagaaactgcagaattttgcacagttacctgcacaccgagtcacggactcctgcatcgtggcactcctctcgcatggtgtggagggcgccatctatggtgtggatgggaaactgctccagctccaagaggtttttcagctctttgacaacgccaactgcccaagcctacagaacaaaccaaaaatgttcttcatccaggcctgccgtggagatgagactgatcgtggggttgaccaacaagatggaaagaaccacgcaggatcccctgggtgcgaggagagtgatgccggtaaagaaaagttgccgaagatgagactgcccacgcgctcagacatgatatgcggctatgcctgcctcaaagggactgccgccatgcggaacaccaaacgaggttcctggtacatcgaggctcttgctcaagtgttttctgagcgggcttgtgatatgcacgtggccgacatgctggttaaggtgaacgcacttatcaaggatcgggaaggttatgctcctggcacagaattccaccggtgcaaggagatgtctgaatactgcagcactctgtgccgccacctctacctgttcccaggacaccctcccacatga

SEQ ID NO: 226454 - DNA, 1048 bp, Artificial Sequence
  derived and/or modified sequence
ggaaaagcgggaaatggcggcgccgagcgcggggtcttggtccaccttccagcacaaggagctgatggccgctgacaggggacgcaggatattgggagtgtgtggcatgcatcctcatcatcaggaaactctaaaaaagaaccgagtggtgctagccaaacagctgttgttgagcgaattgttagaacatcttctggagaaggacatcatcaccttggaaatgagggagctcatccaggccaaagtgggcagtttcagccagaatgtggaactcctcaacttgctgcctaagaggggtccccaagcttttgatgccttctgtgaagcactgagggagaccaagcaaggccacctggaggatatgttgctcaccaccctttctgggcttcagcatgtactcccaccgttgagctgtgactacgacttgagtctcccttttccggtgtgtgagtcctgtcccctttacaagaagctccgcctgtcgacagatactgtggaacactccctagacaataaagatggtcctgtctgccttcaggtgaagccttgcactcctgaattttatcaaacacacttccagctggcatataggttgcagtctcggcctcgtggcctagcactggtgttgagcaatgtgcacttcactggagagaaagaactggaatttcgctctggaggggatgtggaccacagtactctagtcaccctcttcaagcttttgggctatgacgtccatgttctatgtgaccagactgcacaggaaatgcaagagaaactgcagaattttgcacagttacctgcacaccgagtcacggactcctgcatcgtggcactcctctcgcatggtgtggagggcgccatctatggtgtggatgggaaactgctccagctccaagaggtttttcagctctttgacaacgccaactgcccaagcctacagaacaaaccaaaaatgttcttcatccaggcctgccgtggagcaggtgctattggatcccttgggcacctccttctgttcactgctgccaccgcctctcttgctctgtaa

SEQ ID NO: 226455 - DNA, 1359 bp, Artificial Sequence
  derived and/or modified sequence
atggccgcccccagcgccggcagctggagcaccttccagcacaaggagctgatggccgccgacagaggcagaagaatcctgggcgtgtgcggcatgcacccccaccaccaggagaccctgaagaagaacagagtggtgctggccaagcagctgctgctgagcgagctgctggagcacctgctggagaaggacatcatcaccctggagatgagagagctgatccaggccaaggtgggcagcttcagccagaacgtggagctgctgaacctgctgcccaagagaggcccccaggccttcgacgccttctgcgaggccctgagagagaccaagcagggccacctggaggacatgctgctgaccaccctgagcggcctgcagcacgtgctgccccccctgagctgcgactacgacctgagcctgcccttccccgtgtgcgagagctgccccctgtacaagaagctgagactgagcaccgacaccgtggagcacagcctggacaacaaggacggccccgtgtgcctgcaggtgaagccctgcacccccgagttctaccagacccacttccagctggcctacagactgcagagcagacccagaggcctggccctggtgctgagcaacgtgcacttcaccggcgagaaggagctggagttcagaagcggcggcgacgtggaccacagcaccctggtgaccctgttcaagctgctgggctacgacgtgcacgtgctgtgcgaccagaccgcccaggagatgcaggagaagctgcagaacttcgcccagctgcccgcccacagagtgaccgacagctgcatcgtggccctgctgagccacggcgtggagggcgccatctacggcgtggacggcaagctgctgcagctgcaggaggtgttccagctgttcgacaacgccaactgccccagcctgcagaacaagcccaagatgttcttcatccaggcctgcagaggcgacgagaccgacagaggcgtggaccagcaggacggcaagaaccacgccggcagccccggctgcgaggagagcgacgccggcaaggagaagctgcccaagatgagactgcccaccagaagcgacatgatctgcggctacgcctgcctgaagggcaccgccgccatgagaaacaccaagagaggcagctggtacatcgaggccctggcccaggtgttcagcgagagagcctgcgacatgcacgtggccgacatgctggtgaaggtgaacgccctgatcaaggacagagagggctacgcccccggcaccgagttccacagatgcaaggagatgagcgagtactgcagcaccctgtgcagacacctgtacctgttccccggccacccccccacctag

SEQ ID NO: 226456 - protein, 108 aa, Artificial Sequence
  derived and/or modified sequence
MAAPSAGSWSTFQHKELMAADRGRRILGVCGMHPHHQETLKKNRVVLAKQLLLSELLEHLLEKDIITLEMRELIQAKVGSFSQNVELLNLLPKRGPQAFDAFCEALHS

SEQ ID NO: 226457 - DNA, 327 bp, Artificial Sequence
  derived and/or modified sequence
atggctgcaccatccgccggatcatggagtactttccagcacaaggaactcatggcagcagacaggggacgtcgaatcctgggcgtgtgcggtatgcatcctcaccatcaagaaactctgaagaaaaaccgagtcgtcctggcaaaacaactgttgctgagcgagctgttggagcacctgttggagaaggacatcatcacactcgagatgcgagagctcattcaggccaaggtgggcagcttctctcagaatgtggagctccttaacctgcttccaaagcgtgggccccaggcttttgacgctttttgcgaagctttgcatagttag

SEQ ID NO: 226458 - DNA, 327 bp, Artificial Sequence
  derived and/or modified sequence
atggccgcccccagcgctggctcctggagcaccttccagcacaaggagctgatggctgctgaccggggccgccgcatcctgggcgtgtgtggcatgcacccccaccaccaggagaccctgaagaagaacagagtggtgctggccaagcagctgctgctgtctgagctgctggagcacctgctggagaaggacatcatcaccctggagatgagggagctgatccaggccaaggtgggcagcttcagccagaatgtggagctgctgaacctgctgcccaagaggggcccccaggcctttgatgccttctgtgaggccctgcacagctag

SEQ ID NO: 226459 - DNA, 327 bp, Artificial Sequence
  derived and/or modified sequence
atggccgcccccagcgccggcagctggagcaccttccagcacaaggaattgatggcagcagaccgtggaaggcggatcctcggcgtgtgtggcatgcacccacatcatcaagagacccttaagaagaacagagtggtcctggccaaacagcttctgctgagcgagcttctggagcaccttctggagaaggacattattactctggaaatgcgggagctcatccaggcaaaggtagggtcattcagccagaacgtggagctgctgaacctcttgcccaagcgcgggccacaagccttcgatgcattttgtgaagccctccacagttag

SEQ ID NO: 226460 - DNA, 327 bp, Artificial Sequence
  derived and/or modified sequence
atggcagcgccatcagcaggctcctggtcaacctttcagcacaaggagctcatggcagcagatcggggaaggcgaatcttgggagtctgcggcatgcacccgcaccatcaggagacgctgaagaaaaatcgggtggtattggccaagcagctgttgttaagcgagctgctggagcatctgctcgagaaggatatcatcactctggagatgagggagctcatccaggccaaggtagggtccttcagtcagaacgtcgagctgttgaacctcctgcctaagcgaggccctcaagcctttgacgccttctgcgaggcccttcactcatag

SEQ ID NO: 226461 - DNA, 327 bp, Artificial Sequence
  derived and/or modified sequence
atggccgcccccagcgccggcagctggagcaccttccagcacaaggagctgatggccgccgacagaggcagaagaatcctgggcgtgtgcggcatgcacccccaccaccaggagaccctgaagaagaacagagtggtgctggccaagcagctgctgctgagcgagctgctggagcacctgctggagaaggacatcatcaccctggagatgagagagctgatccaggccaaggtgggcagcttcagccagaacgtggagctgctgaacctgctgcccaagagaggcccccaggccttcgacgccttctgcgaggccctgcacagctag

SEQ ID NO: 226462 - protein, 767 aa, Artificial Sequence
  derived and/or modified sequence
MATYLEFIQQNEERDGVRFSWNVWPSSRLEATRMVVPLACLLTPLKERPDLPPVQYEPVLCSRPTCKAVLNPLCQVDYRAKLWACNFCFQRNQFPPAYGGISEVNQPAELMPQFSTIEYVIQRGAQSPLIFLYVVDTCLEEDDLQALKESLQMSLSLLPPDALVGLITFGRMVQVHELSCEGISKSYVFRGTKDLTAKQIQDMLGLTKPAMPMQQARPAQPQEHPFASSRFLQPVHKIDMNLTDLLGELQRDPWPVTQGKRPLRSTGVALSIAVGLLEGTFPNTGARIMLFTGGPPTQGPGMVVGDELKIPIRSWHDIEKDNARFMKKATKHYEMLANRTAANGHCIDIYACALDQTGLLEMKCCANLTGGYMVMGDSFNTSLFKQTFQRIFTKDFNGDFRMAFGATLDVKTSRELKIAGAIGPCVSLNVKGPCVSENELGVGGTSQWKICGLDPTSTLGIYFEVVNQHNTPIPQGGRGAIQFVTHYQHSSTQRRIRVTTIARNWADVQSQLRHIEAAFDQEAAAVLMARLGVFRAESEEGPDVLRWLDRQLIRLCQKFGQYNKEDPTSFRLSDSFSLYPQFMFHLRRSPFLQVFNNSPDESSYYRHHFARQDLTQSLIMIQPILYSYSFHGPPEPVLLDSSSILADRILLMDTFFQIVIYLGETIAQWRKAGYQDMPEYENFKHLLQAPLDDAQEILQARFPMPRYINTEHGGSQARFLLSKVNPSQTHNNLYAWGQETGAPILTDDVSLQVFMDHLKKLAVSSAC

SEQ ID NO: 226463 - protein, 331 aa, Artificial Sequence
  derived and/or modified sequence
MATYLEFIQQNEERDGVRFSWNVWPSSRLEATRMVVPLACLLTPLKERPDLPPVQYEPVLCSRPTCKAVLNPLCQVDYRAKLWACNFCFQRNQFPPAYGGISEVNQPAELMPQFSTIEYVIQRGAQSPLIFLYVVDTCLEEDDLQALKESLQMSLSLLPPDALVGLITFGRMVQVHELSCEGISKSYVFRGTKDLTAKQIQDMLGLTKPAMPMQQARPAQPQEHPFASSRFLQPVHKIDMNLTDLLGELQRDPWPVTQGKRPLRSTGVALSIAVGLLEGTFPNTGARIMLFTGGPPTQGPGMVVGDELKIPIRSWHDIEKDNARFMKKATK

SEQ ID NO: 226464 - DNA, 2304 bp, Artificial Sequence
  derived and/or modified sequence
atggcaacttatttagaattcatccaacagaacgaagaaagggatggagtccgcttctcgtggaatgtgtggccaagcagtaggctggaggcaactcgcatggtggtccccctggcgtgtctgctgactccactgaaggagcggcccgatctgccccctgtgcaatacgagccagtcctgtgttccaggcctacctgcaaagccgtcctgaatccactttgtcaagtcgactaccgcgcaaaactttgggcctgcaatttttgctttcagcgcaatcaatttcccccagcgtacggggggatatcagaggtgaatcaacctgccgaactcatgccacagttcagcaccatcgagtatgtaatccagcgaggggcacagagtccactgatattcctgtacgtagtcgacacatgcctggaggaggatgatctgcaggctctgaaggagtctctacagatgagcttgtcattactgccacctgatgctctggtgggtctgatcacctttggccgcatggtacaggtgcatgagctgagctgcgaagggatcagcaagagttatgtgtttcgaggcaccaaagacttaaccgccaaacagattcaggacatgcttggccttaccaagcctgccatgcctatgcaacaagctcgccctgcccaaccccaagagcaccccttcgctagcagccgctttctccagcccgtacacaagatcgatatgaacctgaccgatttgctgggagagttacagagagacccctggccagtgactcagggaaagcgacctctgcgatccacgggagtagcactgtctattgccgttggtctgctggagggcacttttcctaatacaggggcccgcattatgctattcacaggaggccctcccactcaaggccctggtatggtggtgggagacgagctgaaaatacccattaggtcctggcatgatatcgaaaaggacaacgcgcgattcatgaaaaaggcgaccaaacactacgagatgctcgccaacagaactgccgccaacggtcattgtatcgacatatacgcttgcgctctcgaccagaccgggctgttagagatgaagtgctgcgccaatctgacaggggggtacatggtgatgggcgatagttttaatacttccctgtttaagcagaccttccagcgtatctttacaaaagattttaatggtgacttccggatggcctttggagccaccctagatgtcaagacaagccgcgaactcaagattgccggtgccattggaccctgcgtgagtctgaatgtaaagggaccctgtgtgagtgagaatgagctgggcgtcggcggcacttcacaatggaaaatctgcggcctggatccaaccagtacactgggtatttacttcgaggtggtgaaccaacacaatacgcccattccccagggaggaagaggggcaattcagtttgtcacccactaccagcacagctccacccaacggaggattagagtcaccaccatcgcccgtaactgggccgacgtgcaatcccagctgaggcatattgaggctgctttcgatcaggaggcggctgctgtgctgatggcccggcttggcgtgttccgagctgagagtgaggaagggcccgacgtactgaggtggttagaccgacagttgatccggctttgccagaagttcggccagtacaataaagaggaccctacatcttttcggctgtcggacagtttcagtctgtaccctcagttcatgttccaccttaggcgaagtcccttcctgcaagtgtttaacaatagccccgatgaatctagttattaccggcaccatttcgccagacaagacctcactcaatccctgatcatgatccagcctattctctacagctacagtttccatggaccacccgaaccagtcctcttggattctagctccatactagcggatcgcatactcttaatggacacgttttttcagatcgtcatttaccttggcgagacaattgctcagtggcgcaaggccggctaccaggacatgcccgagtacgagaacttcaaacacctgctccaggcccctctggatgatgcacaggagattctacaggcacgattcccaatgccccgctacattaataccgaacacggtgggtcccaggcaagattcttactatccaaagtaaatccttcgcagacacacaataatctgtacgcatgggggcaggagactggtgcacccattttgaccgacgatgtgtccctccaagtgttcatggatcacctgaagaaactggccgtcagctccgcctgttag

SEQ ID NO: 226465 - DNA, 2304 bp, Artificial Sequence
  derived and/or modified sequence
atggccacatacctggagtttatccagcaaaacgaggaaagagatggtgtccgcttctcgtggaatgtttggccatccagtcggttagaggccacgcgcatggtggtcccactggcatgtttgctgacccctcttaaagaaaggcctgaccttccaccagtgcagtacgaaccagttctgtgtagcagaccaacctgcaaagccgtcttaaatccattgtgccaggtcgattatcgtgcgaaactttgggcatgcaacttttgcttccaacgtaaccagttccccccagcatatggtgggatcagtgaagtgaatcaacccgccgagcttatgccgcagttttctaccatagagtacgtgatacagcgcggggctcagtcgcccctgatattcctgtatgttgtggacacctgcctggaggaggacgacttgcaggcacttaaagaatccctgcaaatgagtttgagtctactgccccccgacgcgcttgtcggcttaatcacatttggcaggatggtccaggtgcacgagctgtcctgtgagggtatatcaaaatcttacgtgtttcggggcacgaaggatctgactgccaaacagatccaggacatgctgggtctgactaagcccgctatgccgatgcagcaagcccggccagctcaaccccaggaacacccattcgcttccagccgattcttgcagcccgtgcacaagatcgatatgaacttgacggacctcctaggggagctacaacgtgacccatggcccgtcacccagggcaagcggcccctgcgctctactggggtagcattgtctatcgccgtcggtcttctcgaagggacttttcccaacaccggagcccggataatgctgtttacgggaggaccgcctacacagggccccggaatggtcgtgggcgacgaactaaaaatccctattcgaagctggcatgacattgaaaaggataacgcaaggtttatgaagaaagccaccaaacattatgaaatgctcgccaataggaccgcagctaatggccattgcattgatatttacgcctgcgctttggatcagacgggcctgctcgagatgaaatgttgtgccaaccttacaggtggctatatggttatgggggactcgttcaatactagcctgttcaaacagactttccagcggatttttactaaagatttcaatggcgacttccgtatggcttttggagccactctggacgtgaagaccagcagggagctgaaaatcgcaggagctataggcccctgtgtgtcactaaacgtgaaagggccctgtgtgagcgagaacgagttgggagtcggaggtacaagccagtggaagatctgcgggctggacccaacctctactctgggaatttactttgaggtcgtgaatcaacataacacgccaatcccacagggggggaggggtgccatacagtttgtaactcattaccagcattcatctactcagcgtaggataagggtcactacgattgcccggaattgggctgacgtccagtcacagctgcgacacatcgaggcagcgtttgaccaagaagccgcagctgtcttaatggcacggcttggagtgttcagggcagaaagcgaagagggcccggatgtcttgcgatggctggaccgacaactgatacgcctgtgtcaaaaatttggccagtacaacaaagaggacccaacctcattccgactcagcgactctttcagtctgtatccgcagtttatgttccacttgcggcgtagtccattcctgcaggttttcaataacagcccggacgagagcagctactacaggcaccattttgcccgacaggatttaacacaatccctgattatgatccagcccatcctgtattcttacagctttcatggtccacccgagccggtattgctggacagtagcagcattctggctgatcggatcctgttaatggataccttcttccagatcgttatatacctcggggaaaccatcgcacaatggagaaaggcaggctaccaagatatgcccgagtatgagaactttaagcatctgttacaagctccattggatgacgcacaggagatcctccaggcccgcttccccatgcctcgatacatcaacactgaacacggcgggtcacaggctaggtttctgctctcaaaggttaacccaagtcagacgcataataacctttatgcctggggacaagaaacaggtgctcctatacttactgatgacgtctcgctccaggtgtttatggatcacctgaagaagctggcggtcagctcagcctgttag

SEQ ID NO: 226466 - DNA, 2304 bp, Artificial Sequence
  derived and/or modified sequence
atggcaacatacctcgagttcatccagcagaacgaggagcgggatggtgttcggttcagttggaatgtgtggccttcttctagactggaagcaacacgaatggttgttcctttggcctgcctgctcaccccgttgaaggaacgccccgatctacccccagtacagtatgaaccagtgctgtgctcacgacccacatgcaaggccgttctgaatcccctttgccaggtagactatcgcgctaaactgtgggcctgtaacttttgcttccagaggaaccagtttccccccgcatatggaggtatttccgaggtcaatcaacctgccgaactgatgccgcagtttagcaccatcgaatacgtgatccagcggggggcccaatcgcctctcatctttctgtatgttgtcgacacttgccttgaggaagatgacctgcaagccctcaaggaatccctgcagatgtctctatccctactcccccccgacgcgcttgtgggacttatcacattcggaagaatggtccaggtgcacgagctgtcatgcgaaggaattagcaaatcctacgtgttccgcggaactaaggatctgacagccaagcaaattcaggatatgctcggactgacgaaacccgccatgccaatgcagcaggcaaggcctgcccagccacaggagcaccctttcgccagcagccgattcctgcagcccgtgcataagatagatatgaatctgacagacctgctgggggagcttcaacgcgatccgtggcctgtgacacaaggaaagagacccctgaggagtaccggcgttgcattgtccatcgccgttggactcctggagggtacttttcctaacactggcgcaaggatcatgcttttcacaggtggcccaccaacacagggacctggaatggtcgtaggagacgagctgaaaataccaatcagatcatggcacgacatcgagaaggacaacgccagatttatgaagaaagccacaaagcactacgaaatgctggccaatagaaccgctgctaatggccactgcatcgacatctacgcatgtgcactcgatcaaaccggcctgctggaaatgaagtgctgtgccaatctgactgggggatatatggtgatgggagacagtttcaacacctctttgtttaaacagaccttccagcggatttttacaaaggactttaatggcgactttcgaatggcctttggcgctacattagatgtcaagacctccagggagctaaagatcgcaggggccatcgggccctgcgtcagtttgaacgttaagggcccttgcgtttccgaaaacgaacttggagtcgggggaacgagccaatggaagatttgtgggctggaccccacctcaacactgggcatatatttcgaggttgtaaaccagcacaatacccccattcctcagggtggacgcggcgccatccagtttgtgactcactaccagcacagttcaacacagcggcggatacgcgtaaccaccatcgcccgaaattgggctgatgtgcagtcacagttgcggcatattgaagctgcattcgatcaggaggcagctgccgtattaatggcccgccttggggtgtttcgcgccgagtctgaggaaggtcctgacgtccttaggtggcttgatcgccagctcatccggctgtgccagaaatttggccagtataataaagaggatcctaccagctttcgactgtccgactcattttccctgtaccctcagttcatgttccatttgcggagaagtcctttccttcaggtatttaataactcgcccgacgaatccagctattataggcatcatttcgcacgccaagatcttacacaaagtttgatcatgattcaacccatcctgtacagctatagcttccatggcccgcctgaaccagttttgctcgattcctccagcattctggcagatcgaatactgctaatggatacattcttccagatagtgatatacctgggagagacaatcgcacagtggcgaaaggcaggataccaggacatgccagagtacgagaattttaaacacctgctgcaggccccactggacgatgcccaggagatactgcaggcacgcttccccatgccgcggtatatcaacacagaacacggggggtcccaggcacggtttctgctgtctaaggtgaatccgagccagacccacaataatctgtatgcttggggacaagaaactggggctccaatcctcacagacgatgtgtctctgcaagtctttatggaccacttaaagaaattggcagttagtagtgcgtgctag

SEQ ID NO: 226467 - DNA, 2304 bp, Artificial Sequence
  derived and/or modified sequence
atggcaacctatctggaatttatacagcaaaatgaggagagagatggcgtccggtttagttggaatgtttggccatctagccggcttgaggctacccgcatggtagtgcctctagcctgcctgctgacacccctgaaggagcgtcctgacctgccccccgtccaatacgaacccgtgctgtgtagtcgccctacatgcaaagctgtattgaatcctctatgtcaggtggactatagagctaagctgtgggcctgtaacttctgcttccagagaaaccagtttccgccagcctacggcggcatcagtgaggtcaaccaaccagcggaactgatgccccaattctccacaattgagtacgtcattcaaaggggggctcagtcacctttaatcttcctctatgtcgtggacacttgtctggaggaggacgacctccaggctttaaaggaaagccttcagatgtctctttctctgttaccccccgacgctttggtggggctaatcacattcggcaggatggtgcaagtgcacgaactatcttgtgaaggtatctcgaagagctatgtgtttagaggcaccaaagatctgaccgccaaacagattcaagatatgctagggctcactaagccggccatgccaatgcaacaggcccggcccgcacagccacaagagcacccctttgcatcatctagatttttacagcccgtgcacaagattgacatgaatctcaccgacctgctcggcgaattgcagcgcgacccatggcccgtgacacagggcaagcgacctctgagaagtactggggttgcactcagtattgccgtgggcctgctggagggaacttttccaaatacaggagcccgtatcatgctgtttactggtggtccccccacccaaggtcccggcatggtggtcggtgatgaactcaagattcccattcgtagttggcatgacatagagaaagataatgcccgattcatgaagaaagctaccaaacactatgagatgttggctaatagaactgcagccaatggccactgtatagacatttacgcctgtgcgttggatcaaaccggcctgctggaaatgaaatgttgtgcgaacctgacaggtggttatatggtaatgggagattcttttaatacgtccttgttcaaacagacctttcagcggatattcacgaaggacttcaatggggacttcagaatggcatttggagcaaccctggatgtcaagactagtagagaactgaagattgctggcgcaataggaccatgcgtcagtctgaatgttaagggtccctgcgtgtcagagaatgaactgggtgtcggcggaacaagccagtggaagatttgcggcctggatcctactagcactttgggcatttacttcgaggtggttaatcagcacaacactccaatcccccagggcgggcgaggggccatccagtttgtcactcactatcagcactcctctacacagagaagaattcgcgttacaactatcgctagaaactgggccgacgtgcagtcccagctccggcacattgaggcggcctttgatcaagaggcagctgctgtgcttatggccaggcttggtgtgtttcgggccgaaagcgaggaagggccagatgtactgcggtggctggaccgacagctcattcgcctctgccagaagtttggccagtataataaagaggaccccaccagttttaggctgagtgattcattttctctgtacccccagtttatgtttcatctccgacggagtccattcctgcaggtgttcaacaacagcccagatgagtcatcttactatcggcatcatttcgccagacaagacctgacacagagcctgatcatgatccagcctatactatattcttattcgtttcacggtcctcctgagccagttctcctggattcatcttctatcctggccgatcggattcttcttatggacactttcttccaaatcgtcatctaccttggcgagaccatcgctcagtggcggaaagcagggtatcaagatatgccagaatacgagaacttcaaacatctgcttcaggcacccctcgatgacgcgcaagaaatccttcaagccaggttccctatgccacgctatattaacaccgagcatggaggctcccaggccagatttctcctgtctaaagtaaacccatctcaaacgcacaataatctgtacgcttgggggcaggaaacgggggccccgatcctgacagatgacgtctctctgcaggtgttcatggatcacctgaaaaagctagctgtgagctcagcctgttag

SEQ ID NO: 226468 - DNA, 996 bp, Artificial Sequence
  derived and/or modified sequence
atggcaacatatctcgagttcatccagcagaatgaggagagggacggggtacgctttagctggaacgtctggccttcctcgcgtctggaagccacccgcatggtcgtgccgctggcatgtctgttgaccccattgaaagagcgcccggacctgcctccagtccaatacgagcccgtcctgtgtagtcgcccgacatgtaaggcggttcttaaccccctgtgtcaggtggactatcgtgccaagctgtgggcctgtaatttttgctttcagagaaaccagttcccgccagcgtacgggggcataagcgaggtcaatcagcctgctgagctgatgccacagttctctacgattgagtacgtgattcagcgcggcgcccagagtcctttgatctttctgtacgtcgtggatacctgcctcgaagaagacgatctgcaagctctgaaagagagcttgcagatgtccttgagcctgctgcctcctgacgcactggtgggattgattactttcggaagaatggtccaagttcacgaactctcttgtgaaggcatcagtaaaagctatgtgtttcggggcaccaaggatttaactgccaagcagattcaggacatgcttgggttaaccaaaccagccatgccgatgcagcaggcccgcccagcacagccccaagagcaccctttcgccagtagcagattcctacagcccgtgcacaaaatcgacatgaacctgaccgatctcctgggggaactccaacgggacccatggccggttacgcagggcaagcgccctctgcgctccactggcgtggcactgagcatcgctgttggccttctcgagggcacatttcccaatactggtgccagaatcatgctcttcacgggtggcccccccacgcaaggccccgggatggtggtgggcgacgagctcaagattccaattcggtcctggcacgatatcgagaaggataacgcccggtttatgaaaaaggcgaccaagtag

SEQ ID NO: 226469 - DNA, 2304 bp, Artificial Sequence
  derived and/or modified sequence
atggccacctacctggagttcatccagcagaatgaggagagagatggagtgcgcttctcctggaatgtgtggcccagcagccggctggaggccaccaggatggtggtgcccctggcctgcctgctgacccccctgaaggagaggccagacctgccccctgtgcagtatgagcctgtgctgtgcagccggcccacctgcaaggctgtgctgaaccccctgtgccaggtggactaccgggccaagctgtgggcctgcaacttctgcttccagaggaaccagtttcctccagcctacggcggcatcagcgaggtgaaccagcctgctgagctgatgccccagttcagcaccattgaatatgtgatccagagaggagcccagagccccctcatcttcctgtatgtggtggacacctgcctggaggaggatgacctgcaggccctgaaggagagcctgcagatgagcctgagcctgctgcccccagatgccctggtgggcctcatcacctttggaaggatggtgcaggtgcatgagctgagctgtgagggcatcagcaagagctatgtgttccggggcaccaaggacctgacagccaagcagatccaggacatgctgggcctgaccaagccagccatgcccatgcagcaggcccggcctgcccagccccaggagcacccctttgccagcagccgcttcctgcagcctgtgcacaagattgacatgaacctgacagacctgctgggggagctgcagagggacccctggcctgtgacccagggcaagaggcccctgcggagcactggagtggccctgagcattgctgtgggcctgctggagggcaccttccccaacacaggagcccgcatcatgctgttcaccggcggcccccccacccagggccctggcatggtggtgggagatgagctgaagatccccatccgctcctggcatgacatcgagaaggacaatgcccgcttcatgaagaaggccaccaagcactatgagatgctggccaacagaacagctgccaacggccactgcatcgacatctatgcctgtgccctggaccagacaggcctgctggagatgaagtgctgtgccaacctgactggaggctacatggtgatgggagacagcttcaacaccagcctcttcaagcagaccttccagaggatcttcaccaaggacttcaatggagacttcaggatggccttcggggccaccctggatgtgaagaccagccgggagctgaagattgctggggccatcggcccctgtgtgtccctgaatgtgaagggcccctgtgtgtctgaaaatgagctgggcgtgggcggcaccagccagtggaagatctgtggcctggaccccaccagcaccctgggcatctactttgaggtggtgaaccagcacaacacccccatcccccagggcggccgcggggccatccagtttgtgacccactaccagcacagcagcacccagaggcgcatccgggtgaccaccatcgccaggaactgggcagatgtgcagagccagctgcggcacattgaagctgcctttgaccaggaggccgctgctgtgctgatggcccggctgggcgtcttccgggcagagagcgaggagggcccagatgtgctgcgctggctggaccggcagctgatccggctgtgccagaagtttggccagtacaacaaggaggaccccaccagcttccggctgagtgacagcttcagcctgtacccccagttcatgttccacctgcggcgcagccccttcctgcaggtgttcaacaacagcccagatgagagcagctactaccgccaccactttgcccggcaggacctgacccagagcctcatcatgatccagcccatcctgtacagctacagcttccacggccccccagagcctgtgctgctggacagcagcagcatcctggccgaccgcatcctgctgatggacaccttcttccagatcgtcatctacctgggggagaccatcgcccagtggaggaaggccggctaccaggacatgccagaatatgagaacttcaagcacctgctgcaggcccccctggatgatgcccaggagatcctgcaggcccgcttccccatgccccgctacatcaacacagagcacggcggcagccaggcccgcttcctgctgagcaaggtgaaccccagccagacccacaacaacctgtatgcctggggccaggagaccggggcccccatcctgacagatgatgtgtccctgcaggtgttcatggaccacctgaagaagctggccgtgtcctctgcctgctag

SEQ ID NO: 226470 - DNA, 996 bp, Artificial Sequence
  derived and/or modified sequence
atggccacctacctggagttcatccagcagaatgaggagagagatggagtgcgcttctcctggaatgtgtggcccagcagccggctggaggccaccaggatggtggtgcccctggcctgcctgctgacccccctgaaggagaggccagacctgccccctgtgcagtatgagcctgtgctgtgcagccggcccacctgcaaggctgtgctgaaccccctgtgccaggtggactaccgggccaagctgtgggcctgcaacttctgcttccagaggaaccagtttcctccagcctacggcggcatcagcgaggtgaaccagcctgctgagctgatgccccagttcagcaccattgaatatgtgatccagagaggagcccagagccccctcatcttcctgtatgtggtggacacctgcctggaggaggatgacctgcaggccctgaaggagagcctgcagatgagcctgagcctgctgcccccagatgccctggtgggcctcatcacctttggaaggatggtgcaggtgcatgagctgagctgtgagggcatcagcaagagctatgtgttccggggcaccaaggacctgacagccaagcagatccaggacatgctgggcctgaccaagccagccatgcccatgcagcaggcccggcctgcccagccccaggagcacccctttgccagcagccgcttcctgcagcctgtgcacaagattgacatgaacctgacagacctgctgggggagctgcagagggacccctggcctgtgacccagggcaagaggcccctgcggagcactggagtggccctgagcattgctgtgggcctgctggagggcaccttccccaacacaggagcccgcatcatgctgttcaccggcggcccccccacccagggccctggcatggtggtgggagatgagctgaagatccccatccgctcctggcatgacatcgagaaggacaatgcccgcttcatgaagaaggccaccaagtag

SEQ ID NO: 226471 - DNA, 2304 bp, Artificial Sequence
  derived and/or modified sequence
atggccacctacctggagttcatccagcagaacgaggagcgggacggcgtccgcttttcatggaatgtgtggccatctagtcggctggaggccacacgcatggtggttcccctggcctgcctgctgacccctctgaaagagcgtcctgatcttcctcccgtccagtatgagcccgtactttgcagccgcccaacctgtaaggcagttctaaacccactgtgccaggtcgattatcgcgctaagctgtgggcatgcaatttctgttttcagagaaatcagttccctcccgcgtacggagggatctccgaggtgaaccagcctgccgagcttatgccacaattctccacgattgaatatgtcattcaaagaggggcgcagtcaccattaatcttcctgtatgtggttgacacatgccttgaggaagatgatctacaggccctgaaggagtccctgcagatgtccttgtcattgcttcctcctgatgccctggttggtctgattacattcggcaggatggtgcaggtgcatgaactgtcttgtgaagggatcagtaaaagctatgtgtttcggggcactaaggacctcacagcaaagcaaatccaagacatgctgggcctaacgaaacccgcgatgccaatgcagcaggcccggcccgcgcagccccaggagcaccccttcgcttcaagtcgattcctccagcccgtgcataaaatcgatatgaacctgactgaccttctcggtgaactgcagcgcgacccctggcctgttacgcaaggtaaacgccccctgcgctcgaccggagtggcactctccatcgccgtgggtctcctggaggggacctttcccaatacaggcgccagaatcatgttgtttacaggtgggccgcccacccaaggacctggaatggtcgtcggagatgaacttaaaatcccaataaggagttggcatgatattgagaaggacaacgcaagatttatgaagaaagcgaccaaacactacgagatgctagccaacagaacagctgcaaatggtcactgcatcgatatctatgcttgtgccctcgaccagactggtctgcttgagatgaaatgttgcgcgaatttaaccgggggttatatggttatgggagattcgtttaacacttcactatttaagcagactttccagcgaatcttcaccaaggactttaacggcgacttccgcatggcttttggtgcaaccttagatgtgaagacgtcccgtgaactgaagattgcgggggccattggcccgtgcgtttccctgaacgtgaagggcccttgtgtgagcgagaacgaactgggcgtcggtggtaccagtcagtggaaaatttgcgggttagatccgacatctaccctcggtatttactttgaggtggttaatcagcacaataccccaattccccagggaggaagaggcgctattcagtttgtcactcattaccagcattcgtcgacgcagagaagaattcgcgtcaccacaatagcccggaactgggccgacgtccagtcccaacttagacacatcgaggcagcatttgatcaggaggctgcggccgtgctgatggctaggctaggcgtcttcagggccgagtccgaggaaggaccagacgttcttagatggctcgatagacagctgatccgactgtgccaaaagttcggccagtacaacaaagaggatcccactagcttcaggctgtctgattctttttccctttacccacagttcatgttccatctgaggcgaagccctttcctccaggtgttcaacaattcgcctgacgagtcgagctattacagacaccatttcgccagacaggatctgacccagtctctgataatgatccagcctattctttactcctactccttccacgggcccccagaacccgtactgctggacagcagtagcattctggccgaccgtatcctactgatggacaccttcttccagatcgtgatttacttgggggaaactatcgctcagtggaggaaagccggctaccaggacatgccggaatatgagaattttaagcatctgctgcaggcccccctcgacgatgcgcaagagattctgcaagccagattccccatgccccggtacattaataccgagcacggtggaagtcaggcgcgcttcctgctgtcaaaagtcaacccatcccagacccataataatctatatgcttggggtcaggaaactggcgcacctatccttaccgacgacgtatcccttcaggtgttcatggatcacctcaaaaaattggctgtgtcttccgcctgctag

SEQ ID NO: 226472 - DNA, 2304 bp, Artificial Sequence
  derived and/or modified sequence
atggccacctacctggagttcatccagcagaacgaggagcgggacggcgtcaggttttcttggaatgtgtggccctcttctaggctggaggctaccaggatggtggttcctctggcctgcctcctgaccccccttaaagaaaggccagacctccctcccgtacaatatgaaccagtcctgtgttcaagaccaacctgcaaggccgtgctgaaccccttatgtcaggtggactaccgggctaaactttgggcatgcaatttttgctttcaacgcaatcaattcccacccgcgtatgggggtatttctgaggtgaatcagccagcagagctcatgccccaattctccacaattgaatatgttatccagcggggtgctcagtctcctctaatattcctatacgtggtcgatacgtgcctggaggaggacgacctgcaggcgctcaaagagtccttgcagatgagcctcagcctcctgcctcccgacgcactggtaggactaattacgtttggaaggatggtccaggtgcatgaactctcctgtgagggtatctcaaagtcctatgtttttcgtggtacaaaggacctgactgccaaacagatccaggacatgctcggccttactaaacctgccatgcctatgcagcaagcccgcccagcacagccacaggagcatcccttcgcttcatctcgatttctgcagcctgtgcacaaaatcgacatgaacctcaccgacctgttaggggaacttcaaagagacccctggcctgtcactcaggggaagaggccgctccggtccaccggcgtagctcttagtattgccgtgggactgctggaaggaacctttcctaacactggagctaggatcatgctgttcacaggtgggccaccaactcagggaccaggaatggtcgtgggggatgagctgaagattcccattagatcgtggcacgacattgagaaggataacgctagattcatgaaaaaggctaccaaacattacgaaatgcttgccaatagaacagccgctaatggccactgtatcgatatttacgcctgtgccctggatcaaactgggctgctggaaatgaagtgctgtgctaaccttaccggtggctacatggtgatgggagatagctttaatacatcccttttcaagcaaacctttcagaggatctttacaaaagacttcaatggagactttcgaatggcctttggggctacgctcgatgttaagacaagcagagaattaaagattgcgggcgccattggtccctgcgtctccctgaacgtgaaggggccctgcgttagcgagaacgagctgggcgtcggaggaacaagccagtggaagatctgcgggcttgacccaacgagcaccctgggaatctacttcgaggtggtcaatcaacacaacactccaattccacaaggggggagaggagcaatccagtttgtgactcattaccagcactcctcgacccaacggcggattagggtgacaacgattgcaaggaattgggccgatgtccaatcccaactgcgccatatagaagccgcatttgaccaggaggctgccgccgttttgatggctagactgggcgtttttagagctgaatctgaagaaggtcctgacgtgctgagatggcttgacagacagttgatccgcctgtgtcagaaattcggtcagtataacaaagaggaccctacatccttcaggctgtctgacagcttctcactgtatccacaatttatgtttcacttacggaggagcccctttctgcaagtgtttaacaactcccccgacgagtcatcatattaccgacaccacttcgcaaggcaggatctgactcagagtcttattatgatacagcccatactgtacagctacagtttccacggtcctcctgaacctgtattacttgacagctcgtcaatactggctgatcgcattctgctgatggatactttttttcagattgtaatttatttaggagagactattgcgcagtggaggaaggcggggtaccaggatatgccagaatacgaaaattttaagcacttgctgcaagctccgttggacgatgcccaagagatcctccaagcgagattccccatgcccaggtacatcaatacagagcacggaggttctcaggcacggttcctcctgtccaaagttaatcccagccaaacccataacaatctatacgcgtggggacaagaaactggggcccctatcctgacggacgatgtctcgctccaggtctttatggaccacctgaagaaactggctgtgtcttccgcctgctag

SEQ ID NO: 226473 - DNA, 2304 bp, Artificial Sequence
  derived and/or modified sequence
atggccacctacctggagttcatccagcagaacgaggagcgggacggggtcagattcagctggaacgtgtggccaagctcacggctggaggcaacaagaatggttgtccctcttgcttgcctcctgacacccctgaaggaacggcctgacctcccgccggtgcaatacgagcctgttctgtgctctaggcccacgtgcaaggccgtcctgaaccccctgtgccaagtcgactacagggccaaactctgggcttgcaacttctgctttcagcgaaatcagttccctcctgcatatggaggaatttcagaggtaaaccagccggctgaactgatgccccagttttcaactatcgagtacgtcattcagagaggtgctcaatccccgctcattttcctgtatgtggtcgatacttgcctggaggaagacgacctacaggcgctgaaggaatccttgcaaatgtcccttagcctgctgccacctgacgccctggtgggcctaatcaccttcggccgcatggtacaggtccatgaactaagctgcgagggcatatccaagtcatacgtgtttagaggcactaaagacttgaccgctaaacagattcaggacatgctcggtctgacgaaacctgcaatgccaatgcagcaggccagacctgctcagccacaggagcaccccttcgctagctcacggtttctgcaaccagtccacaagattgacatgaacctgactgatctgctgggggaactgcaacgcgacccatggcctgttacccaaggtaagcgccccttacgcagcacgggagtagctctgtccatcgcagtgggtctgctagaaggtacctttccaaacaccggggctcgtatcatgctcttcacaggagggccacctacacagggccccgggatggtggtcggggatgagctgaaaattccgattcgcagctggcatgacatcgaaaaggataatgcaaggtttatgaagaaggcaactaaacactacgaaatgttagccaaccgaaccgccgccaatgggcactgtattgatatctatgcgtgcgcattggatcagactggtctgcttgaaatgaagtgctgcgctaaccttactggcggatacatggtaatgggagattccttcaacacttcacttttcaagcagacttttcagagaatctttactaaggattttaatggagactttcgtatggcattcggcgcaaccctggacgtgaaaacgtccagggagctcaagatcgcgggcgctatcggtccctgtgtctctttaaacgttaagggaccttgtgtgtctgagaacgagctgggtgtggggggtacgtcacaatggaagatctgcggcctggatcccactagtactctgggaatctacttcgaagttgtcaatcagcataacacaccaatccctcagggcggaagaggtgctatccagtttgtgacccattaccaacacagttcaacacaaaggcgtatccgtgtgacaacaatcgccagaaactgggccgacgtgcagtcgcagctgcgccatatcgaggcagcattcgaccaggaagctgctgcggtgttaatggcgcggctgggcgtgttccgagccgagtccgaggagggccccgacgtccttcggtggctggataggcagctcataagactttgccaaaaatttggccagtataacaaggaggaccccactagctttcggttatccgattccttctctctctatccgcagtttatgttccacctgaggcgttctcccttcttgcaggtgtttaacaacagcccagatgaatcaagctactatcgacaccatttcgcccgacaagacctcacccagagcctgataatgatccagcccattctctattcttatagctttcatggcccaccagagccagtcttgctggactctagctctatactggccgatcggatactgctgatggacacattttttcaaattgtgatataccttggagaaactatcgcccaatggcggaaagccggttaccaagatatgccggagtatgagaatttcaaacatcttttgcaggctcctctggacgacgctcaggagattctgcaggccaggtttccgatgcctaggtatatcaataccgagcatggggggtcacaggctaggtttctactgtcgaaagtgaacccatctcaaacacacaacaatctgtatgcctgggggcaggagactggggccccgattttgacggacgacgtgtcactccaagtattcatggaccatctcaagaagctggcggtgagtagcgcttgttag

SEQ ID NO: 226474 - DNA, 2304 bp, Artificial Sequence
  derived and/or modified sequence
atggccacctacctggagttcatccagcagaacgaggagcgggacggggtgaggttctcctggaacgtctggccatcctctcgccttgaggctactcgtatggtagttccgctggcttgtctgctgaccccactcaaggaacgacctgatctgccgccagtccagtatgagccagttctgtgttctcggccaacgtgcaaggccgtgctgaacccactgtgtcaggtggactacagagccaagctctgggcctgcaatttttgttttcaaaggaaccaattccctcccgcttatggcggtatttccgaggtgaatcagccagccgaactgatgccccagttctccaccattgagtatgtgatacagcgtggggcacagagtccacttatttttctctatgttgtggatacatgcctcgaagaagacgatttgcaggcgctgaaggagtccttgcagatgagcctgtctctcctgccacctgatgccctagttggccttatcacgttcggacgtatggttcaggttcatgaattgagctgcgagggaatcagcaagagttacgtctttagaggaaccaaggacctgactgccaaacagatccaggatatgcttggactcaccaagccagccatgccaatgcagcaagctagacccgcccagccccaggaacatccttttgcttcgagtagattcttgcagcccgtgcataagatcgacatgaaccttacggacctgctcggagaactgcaacgcgatccttggcctgttacccagggaaaaagaccgctgagatctaccggggtggcactgtcaatagccgttggtctcctggaagggaccttccctaatacaggagcccgcatcatgttgttcactgggggacctcccactcaagggcccggcatggtcgttggtgacgaactgaagatccccatccggtcttggcacgatattgaaaaggacaacgcccgcttcatgaaaaaggccaccaagcactacgaaatgctagcaaataggacagccgccaatggccattgcatagatatctatgcttgtgcgctggaccaaactgggctccttgagatgaaatgctgcgccaacctcaccggtgggtatatggtgatgggagattcctttaatacgtcgctcttcaagcagacttttcagaggatttttacaaaagatttcaacggagacttcagaatggcgttcggggccaccttagatgtcaagacctctagagaattaaaaatcgccggtgctataggcccctgtgtgagtctgaacgtgaagggtccctgcgtgtctgagaacgagttgggagttggtggaacatcgcagtggaagatttgcggcctcgaccccacctctacattaggtatctatttcgaggttgtgaaccagcacaacacaccaattccccagggcggcagaggagctatccagtttgtgactcattaccagcatagcagcacacagcggagaattcgggtgactaccatcgcacggaactgggcagatgtccagagtcagctgcgccacattgaagccgcattcgatcaggaagcagctgctgttcttatggcaagactcggcgtgttccgagccgagtctgaggagggccctgatgtgctgagatggctcgacagacagctgattcgtctttgtcagaagttcggacagtacaataaggaggaccccaccagcttccggttatccgacagcttctcgttgtacccccaatttatgttccacctgcgccgttccccattcctgcaagtatttaacaatagcccagatgaatcctcctattataggcaccatttcgccaggcaggacctgacccaatctctgatcatgattcaaccaatcctgtatagctacagctttcatgggccgcccgaaccggtgttgctcgacagttccagcatccttgcagaccggatcctactgatggatacattttttcagatagtgatttatctgggcgagacaattgctcagtggaggaaagctggatatcaagatatgccagagtacgagaatttcaagcatctgctccaggcaccattagatgatgcacaggaaatccttcaggctcggttcccgatgccacgctatataaacacagaacatggtggaagtcaggctaggttcttgttgtcgaaggtgaacccctctcagacacacaacaacctttacgcctggggacaggaaacaggggccccaatcttgacggatgatgttagtctccaggtatttatggatcacttaaaaaaattagccgttagcagtgcatgctag

SEQ ID NO: 226475 - DNA, 996 bp, Artificial Sequence
  derived and/or modified sequence
atggccacctacctggagttcatccagcagaacgaggagcgggacggtgtaaggttctcctggaatgtgtggcccagctctagactcgaggcaaccaggatggtagttcccctcgcatgcctgctgacccccctgaaggaacggcccgacctgccgcccgtgcagtatgaaccagtgctttgcagcaggccaacatgtaaggcagttctgaaccctctttgccaggtcgactaccgggccaagctgtgggcatgcaacttctgctttcagcgcaatcagttcccccccgcatatggaggaatctcagaggtgaatcagccagctgaacttatgccccagttcagcacgatcgagtatgtgatccagcgcggcgcacagagtccactcatctttctgtatgtagttgacacgtgcctggaggaggacgaccttcaggctctgaaagagagcttgcaaatgtctctgagtttgctgccgcccgacgccttggtagggctcattactttcggccgtatggtgcaggttcacgagcttagctgcgaagggatttcaaagtcttatgtctttaggggaactaaggaccttacagccaaacaaatccaggacatgctagggttgactaaacccgccatgccaatgcagcaggcacgtcccgcacagccacaggagcatccgtttgcctctagccggtttctgcaaccggttcacaagatcgatatgaacctcaccgatctgctaggtgagctccagcgagacccctggcctgtcacacaaggcaaacggcctcttcgcagtaccggcgtggccctgtctattgccgtcggtctacttgagggtacctttccaaacaccggagctcgaatcatgctgttcacgggggggccgcccacacagggtcccgggatggtcgtaggggatgaactaaaaatccctatcaggtcctggcatgacattgagaaggacaacgctagattcatgaaaaaggcaactaaatag

SEQ ID NO: 226476 - DNA, 2304 bp, Artificial Sequence
  derived and/or modified sequence
atggcaacctatctggaatttattcagcagaacgaagagcgcgacggtgtgcgattcagctggaatgtctggccctccagcaggcttgaggcaacgcgcatggtagtgccactagcttgcctgcttacgcccctgaaagagcgcccagacctgccccctgtgcaatacgagcccgtgttgtgtagtcgcccaacttgcaaggcagttctgaacccgctgtgtcaagtagattaccgagccaagctgtgggcttgcaacttctgtttccagcgaaatcagtttccacccgcttatgggggaatctctgaagtcaaccaacccgctgagttgatgccccaattctcaaccattgaatatgtgatccagagaggtgctcagagtcccctgatcttcctttacgtggtcgatacctgcctcgaggaggacgatctgcaggcactgaaggaaagtctgcagatgagtctatctctcctgcctcccgatgctctggtgggactgatcacatttggcaggatggtacaggtgcatgagctctcatgtgagggaatcagtaagagctatgtgtttagaggcactaaggatttaaccgccaagcagatacaggacatgcttggcttaaccaaacctgccatgccaatgcagcaggcacgccctgcccaacctcaagaacatccctttgcaagctcacggtttttgcagccggttcacaagattgatatgaatctgaccgacctcctcggagagttgcagcgtgacccttggcctgtaacccagggtaaaagaccgctccgatccactggcgtcgccctctctatcgcagtcgggctccttgaggggactttccctaataccggtgccaggattatgctcttcacaggaggtccccctacccagggaccaggaatggtcgtgggcgatgagctgaagattcccattagatcttggcacgacatcgagaaagataacgctcgctttatgaaaaaagcaaccaaacactatgagatgttggccaatagaaccgccgctaacggccactgcatcgacatttatgcctgtgcgctcgatcagaccggattgcttgagatgaagtgctgcgcgaatctgacaggcggatatatggtaatgggggactcttttaacaccagccttttcaagcagactttccaaagaatattcacaaaagacttcaatggagatttcaggatggcatttggcgctacgctcgatgttaagactagtcgggagttgaagattgccggagccattggaccctgtgtttcactcaatgttaagggcccttgcgtgtctgaaaatgaactgggagtgggcggtacctcgcagtggaaaatctgcgggttggacccaacctctaccctgggtatctatttcgaggtcgtaaatcagcataacacacctattccacaaggaggaaggggggcaatccaattcgtgactcattaccagcacagcagtactcagcgtcggataagggtcacaacaatagctcgcaactgggctgacgtgcagagccagttgcgtcatatagaggccgcattcgatcaggaggcagcagctgtgctaatggcgcgtctaggagtgttccgagcggagtcagaggagggccctgatgtgcttagatggctggataggcagctgatcagactgtgtcagaaatttggccagtataataaggaggatcccacatctttccgactctctgacagcttcagtctttacccgcagtttatgtttcacctgcgcagatccccgtttttgcaggtgttcaacaactcaccagacgagtcttcttattacagacaccacttcgccagacaggaccttacacagagtctcatcatgattcagcccattctgtactcttactcctttcatggccctcccgagcccgtgttactggacagctcttccattctggctgacagaatcctgcttatggatacttttttccagattgtcatttacctaggcgaaaccatcgcccagtggagaaaagccggatatcaggatatgccagagtatgagaattttaagcacctcctgcaggctcccctagacgacgcacaggaaatcctgcaggcgcgttttccaatgcctcggtacatcaatacagaacacggagggagtcaggccagattccttctcagtaaagtgaatcctagccagactcacaacaacttatacgcttggggccaagagaccggcgctcccatcctcactgatgacgtttcattacaggtgtttatggaccacctaaagaaattggcagtctcgagcgcttgttag

SEQ ID NO: 226477 - DNA, 2304 bp, Artificial Sequence
  derived and/or modified sequence
atggccacttatcttgagtttatccagcagaacgaggaaagggatggtgtacgattttcgtggaacgtttggcctagtagccggctcgaagcaacaaggatggtagtgccattggcttgcctccttactccacttaaggagcggcctgatctgcctccggtccagtacgagcccgtgttgtgttctaggcccacctgcaaagccgtgctcaatcctctctgtcaggtagattacagggcaaaactctgggcgtgcaacttctgtttccagagaaaccagttccccccagcctacgggggtatttctgaagtgaaccagcccgcagagctcatgccgcagttttctacgattgagtacgtgatccagcgcggtgctcagagcccactgatctttttgtacgtagttgacacctgtttagaagaggacgatctacaagcactcaaggagtccctccagatgtcattatccttgttgccccctgatgcccttgtgggacttattactttcggcagaatggtccaggtgcacgagctttcctgcgagggtatttccaaatcttacgtgttcagaggaaccaaggacctgaccgctaagcagatccaagatatgctggggctcaccaagcctgctatgcctatgcagcaggccaggcctgcacagccacaggagcacccgttcgcctcatctcggtttcttcagcctgtccacaagattgacatgaacctgacagacctcctgggcgaactacagcgtgatccctggccagtcacccagggtaaaagaccactcaggtctactggagtggcactttcaattgctgtgggcctgctcgagggaacttttcccaatacaggtgcgaggataatgctcttcacgggcggtccacctacacagggccctggcatggttgtcggcgacgaactgaaaatcccaattaggtcttggcacgatatcgagaaagataacgcaagatttatgaagaaggccacgaagcattatgagatgctggctaaccggactgcggctaacggacactgtatcgacatctatgcatgcgcactggatcagactgggctgctcgaaatgaaatgttgcgctaacctgactggtggttacatggtgatgggggattcatttaatacctctctgttcaagcagacattccagaggatcttcactaaagacttcaatggcgactttcgcatggcgtttggcgcaactctcgatgtcaagacatctagggagctgaagattgctggtgccattgggccttgtgtctcactgaacgtgaagggtccttgtgtgtccgagaacgaactgggggtaggaggcacctcacagtggaagatttgcggcttggatcccacgagcaccctcggcatttacttcgaggtggtcaatcaacacaacacaccaatcccacagggtggccgtggggcaattcaattcgttacacactatcagcactcaagcacacagaggcggattcgcgtaactaccattgccagaaattgggctgatgttcagtctcagctgagacatattgaggctgcctttgaccaggaggctgccgcagtgctgatggcaaggctgggcgtcttccgtgccgagtccgaagagggccctgatgttctccgctggctggatcggcagttaattcggctttgccagaagttcggccagtacaacaaagaggatccaacctcgttccgcttatctgatagcttctccctgtaccctcagtttatgtttcacctcaggaggagcccattcctacaggtgttcaataactcaccggatgagtcttcctattacagacatcactttgcacgccaagatctcactcaatcgctcattatgattcagcccatactgtacagctactccttccatggacccccagaaccagttctcttggactcttcgtccatcctcgcagaccgcattctcctgatggacactttctttcagatcgtgatctacttaggggagaccattgcccagtggaggaaagctggatatcaagacatgcctgagtacgagaacttcaaacatctgctgcaggctccgctcgacgacgcacaagagatattacaggccaggtttcccatgccaagatacattaatactgaacacggaggttctcaagccaggttcttgctcagcaaggtaaatccaagtcagacccacaacaacctctacgcatggggacaggagacgggggctccaatccttacggacgatgttagcttgcaagtgttcatggaccacctgaagaagctcgccgtgagcagcgcctgttag

SEQ ID NO: 226478 - DNA, 2304 bp, Artificial Sequence
  derived and/or modified sequence
atggctacctacttggagtttatccaacaaaatgaggagagggacggagtgcgcttttcttggaacgtgtggccgagcagcaggctggaagccacacggatggtagttccgctcgcctgtctgctcactcctctgaaggaacgcccagatctaccccctgtgcagtatgagcccgtgctttgcagccggcctacgtgcaaggcggtacttaatccgctgtgtcaggtagattaccgggctaaactgtgggcctgcaatttctgtttccagaggaatcagttcccaccagcctatggagggatttcagaggtgaaccagcctgcagagctgatgcctcaattttcaactattgaatatgtgatccagcgcggtgcccagagccctcttatctttctctacgtagtggacacctgtctggaagaggacgatttgcaggccctaaaggagagcctccagatgtcactttcacttttacctcctgacgccctggtgggactgatcacattcggaaggatggtacaggtacatgagctttcgtgcgaggggatttccaagagctacgtttttaggggcacaaaggatctcacggccaagcagatacaggacatgctgggactgaccaagccggctatgcctatgcagcaggccaggccagctcagccacaggagcatccatttgcttcttctcgttttctacagcctgtgcataagattgatatgaaccttactgacttactaggtgagctgcagagggatccttggcccgtgactcaaggaaagagaccgctgaggagcacgggagtcgctctgagtatcgccgttggactcctggaaggcacatttccaaataccggggctcgcattatgctatttaccgggggacctcctacccaggggccaggtatggtagtgggcgatgaattgaagatccctatccgatcttggcatgatatagaaaaagataatgcccgatttatgaaaaaggcgaccaaacattacgaaatgctggctaaccggaccgccgctaacggacactgcattgatatttacgcgtgcgccctggaccaaaccgggcttctggagatgaaatgctgcgccaatctcaccggaggatacatggtcatgggtgacagctttaacacctcactcttcaaacagacctttcagaggatctttacaaaggattttaacggagactttaggatggccttcggcgcaactttggatgtgaagaccagtcgcgagttgaagattgcaggtgctatagggccatgtgtttcgttgaatgttaaaggcccttgcgtgagcgaaaacgagctgggcgttggaggtacatcccaatggaaaatctgcggcctcgaccccacgtctacactggggatatactttgaggtcgtgaaccagcacaatactcccatcccccaagggggacggggagccatccaatttgttactcactaccagcactcctccacacagcgacgaatccgcgtgacaactatagcccgaaattgggctgatgtgcagagtcagctcagacatatagaggctgccttcgatcaggaggcagctgccgtcctgatggcacggctcggtgtgttcagagccgagtctgaagaagggcctgacgtccttagatggctggaccgtcagttaattcgcctgtgtcaaaagttcggccagtacaacaaagaagacccaaccagctttaggctttctgacagtttctctctctatccgcagttcatgttccaccttagacgcagcccgtttctgcaggttttcaataattctcctgacgaaagctcctattaccggcaccattttgcgagacaggacctcactcagtctctgattatgatccagcctatactgtatagttattcctttcacggtccaccagagcctgtgctattggattccagttccatactcgccgataggatattactgatggatacatttttccagattgtgatttacctgggtgaaacgatagctcagtggaggaaggccggttatcaggacatgccagaatacgaaaactttaagcatctgctccaagcccctctggatgacgcccaggaaatactgcaggccaggttcccaatgcctcgatacatcaataccgaacatggtgggtcacaagcgaggttccttctctccaaagttaatcctagtcagacccacaacaacctctacgcttggggccaggaaacgggggcaccgattttaactgacgacgtgagtctccaggtgtttatggaccacttaaaaaaactggctgtatcatctgcttgttag

SEQ ID NO: 226479 - DNA, 2304 bp, Artificial Sequence
  derived and/or modified sequence
atggcaacttatctggagtttatccagcagaatgaggagcgcgatggcgtccgattcagttggaacgtgtggcccagttccagactggaagccaccaggatggtggtccccttggcctgccttctgacccccctgaaagagaggccagatctgcctccagtacaatacgaaccagtcctgtgctctcgccctacatgtaaagctgtgctcaaccctctctgtcaggttgattatagggccaagctgtgggcctgtaatttctgtttccaaagaaatcagttccctcctgcttacggagggatttcagaggtgaaccaacccgctgagcttatgccccaatttagtaccattgagtacgtgatacaaagaggcgctcagtcgcctcttatattcctctacgtggtcgacacttgtctcgaagaagatgacctgcaggctttaaaggaatctcttcagatgtctctgagcttgttgccccctgatgctctggtggggctcattacttttgggcgaatggtgcaggtccacgaactgtcctgtgaaggaatatcaaaatcctatgtttttagagggaccaaggacctgacggcaaaacagatccaagatatgcttggcttgaccaagcccgcaatgccaatgcagcaggccaggccggctcagccacaggagcacccttttgcatcctcccgattcttgcaaccagtccataagatcgacatgaacctaactgacctattaggagagctgcaaagggacccatggcctgtcacccaagggaagcgcccactccggtctaccggcgttgcgttatccattgccgtgggtctgttagaaggcactttccctaacacaggagcaaggattatgctcttcaccggtggacccccaacccaggggccaggcatggtcgtgggcgatgagctgaagataccaatccggtcctggcatgacatcgagaaggacaatgcgaggtttatgaagaaagcaacaaaacattatgagatgcttgcgaaccggaccgctgcgaacggccattgcatcgacatttacgcatgcgctcttgaccagactggccttctggagatgaagtgctgtgccaatcttaccggcggttacatggtgatgggggacagctttaatacatccttgtttaaacagaccttccagcgcatctttacgaaggacttcaatggtgattttcggatggcattcggagctactcttgacgtcaagacttcgagggaactgaagattgctggagcaattggaccgtgtgtttccctgaatgtaaagggcccatgcgtgagcgaaaacgagctgggagtggggggaacttcccagtggaagatttgtggccttgacccaacctctaccttgggtatttatttcgaggtcgtcaatcagcataacacaccgatccctcaggggggtaggggagccatccagtttgtcacgcattaccaacactcctcaactcagcggaggatcagagtcactactatcgccagaaattgggcagacgtgcagtctcagctgagacacatcgaggcggcattcgatcaggaggcagctgctgtcctcatggcgcgtctcggggtttttcgcgctgagtcggaggaagggcctgacgtcctacggtggctggacaggcagcttatcagattatgccagaaatttggccagtacaacaaggaggacccgacgtcctttcggctttctgatagctttagtctttatccccagttcatgttccacctgcgccgatctccattcctacaggtcttcaataattctcctgatgagagcagttattaccggcaccactttgccaggcaagatctgacacaaagcctgataatgatccagcctatcctttacagctattcctttcacggtcctcctgagcctgtgctgcttgacagcagcagcatcctggcggacagaatactgctcatggatacattcttccagattgttatctatctcggggaaacaattgctcagtggcgaaaggctggctaccaagatatgccagaatatgagaactttaagcacctgctgcaggcgccactggacgatgcacaggaaatcctgcaggccaggttcccaatgcccaggtacatcaacaccgaacatggtggtagccaggccagattcctgctgtccaaggtcaaccccagccagacgcacaataatttgtatgcttggggacaagagaccggcgctcccatcctcacagatgatgtcagcctgcaggtgttcatggaccacttgaagaagctggccgttagcagtgcctgctag

SEQ ID NO: 226480 - DNA, 996 bp, Artificial Sequence
  derived and/or modified sequence
atggcgacctatctggagttcatacaacagaacgaggagagagacggggtgcgtttcagttggaacgtttggccatcaagtaggctggaggccactaggatggttgtgcctcttgcatgtctgctgacacccttgaaagaaagacctgatcttcctcccgtgcagtacgaaccagtgctgtgtagccgccctacatgtaaggctgtgttgaaccccctgtgtcaggtcgattatcgagcgaaactgtgggcctgcaacttttgtttccaaagaaatcaatttccgccagcatacggcggaatcagtgaggtcaatcagccagccgagctaatgccccaattcagcaccattgagtacgtcatccaaaggggggcacagtcaccgctaatatttctatatgtcgtcgacacttgtctggaggaggatgacttgcaggccctgaaagagtcactccagatgtccctctccctgctgccccctgatgctctagtgggtttgatcactttcgggcgaatggtgcaagtgcatgagctgtcgtgtgagggtatttccaagtcatacgtgtttcgcggaactaaggaccttaccgccaagcagatccaggatatgttgggattaacaaaaccagccatgcccatgcagcaggccaggccagcccagcctcaagagcacccctttgcctcctcccgcttcctgcagcctgtacataagattgacatgaacttgacagaccttttaggagagctgcaaagagatccatggcccgtcacccaaggcaaacggcctcttaggtcgaccggagtcgccctctccatcgccgtgggtctgctcgagggtaccttcccaaacactggcgctagaattatgttatttacaggtggcccacctacacagggtcctgggatggtggtgggcgatgaactgaaaattcccatacgaagttggcacgacatcgaaaaggataacgcgcgtttcatgaaaaaagcaaccaagtag

SEQ ID NO: 226481 - DNA, 3176 bp, Artificial Sequence
  derived and/or modified sequence
atcgttctcgctttccggtagctaaggcgatcagcgggacttcccactgagacgagcggatgtcatattgtatcagggcgaacctctgaggagcgctggctgcgcttaggcaacggtgcggcaggcgccggggttttctgaaacagaaacgtttaggggtggggaaacgtgttccgaggaactctcgttttgaagtgcgacatacacctgtcttgccctgttccaagatggtggcagagcttctctgagtctctcgcttcctccagtccgtcggagaagcgctctttgattggccagtggacagcgccgtggcatgacgcgctggggcgctggccaatcggttgagagctgagctggacttggcggtgggagccggagcctgcttgttgcagctgtgggtgaggacggctctagctaggtgagcggctccggccaggtgagcggggcgcataggtgacggagggccgagggcacggttcccttttagactatggcgacatacctggagttcatccagcagaatgaagaacgggatggtgtgcgttttagttggaacgtgtggccttccagccggctggaggctacaagaatggttgtacccctggcttgtctccttactcctttgaaagaacgtccagacctacctcctgtacaatatgaacctgtgctttgcagcaggccaacttgtaaagctgttctcaacccactttgtcaggttgattatcgagcaaaactttgggcctgtaatttctgttttcaaagaaatcagtttcctccagcttatggaggcatatctgaggtgaatcaacctgccgaattgatgccccagttttctacaattgagtacgtgatacagcgaggtgctcagtcccctctgatctttctctatgtggttgacacatgcctggaggaagatgaccttcaagcactcaaagagtccctgcagatgtccctgagtcttcttcctccagatgctctggtgggtctgatcacatttggaaggatggtgcaggttcatgagctaagctgtgaaggaatctccaaaagttatgtcttccgagggaccaaggatttaactgcaaagcaaatacaggatatgttgggcctgaccaagccagccatgcccatgcagcaagcacgacctgcacaaccacaggagcacccttttgcttcaagcagatttctgcagcctgttcacaagattgatatgaacctcactgatcttcttggggagctacagagggacccatggccagtaactcaggggaagagacctttgcgatccactggtgtggctttgtccattgctgttggcttgctggagggcacttttccaaacacaggagccaggatcatgctgtttactggaggtccccctacccaagggcctggcatggtggttggagatgaattaaagattcctattcgttcttggcatgatattgagaaagataatgcacgattcatgaaaaaggcaaccaagcactatgagatgcttgctaatcgaacagctgcaaatggtcactgcattgatatttatgcttgtgcccttgatcaaactggacttttggagatgaagtgttgtgcaaatcttactggaggctacatggtaatgggagattctttcaacacttctctcttcaagcagacattccaaagaatctttactaaagattttaatggagatttccgaatggcatttggtgctactttggacgtaaagacctctcgggaactgaagattgcaggagccattggtccatgcgtatctctgaatgtgaaaggaccgtgtgtgtcagaaaatgagcttggtgttggtggcacgagtcagtggaaaatctgtggcctagatcctacatctacacttggcatctattttgaagttgtcaatcagcacaacaccccgatcccccaaggaggcagaggagccatccagtttgtcacgcattatcagcactccagcacccagagacgcatccgcgtgaccaccatcgcccgaaattgggcagatgtacagagtcagctcaggcacatagaagcagcatttgaccaggaggctgcggcagtgttgatggcacggcttggggtgttccgagcggagtcagaggaggggcccgatgtgctccggtggctggaccgacaactcatccgactgtgtcaaaagtttggacagtataacaaagaagaccccacttcttttaggttatcagattccttttctctatatcctcagtttatgttccatctgagaagatctccatttcttcaagtgtttaacaacagtcctgatgagtcgtcatattacagacatcattttgcccggcaggacctgacccagtccctcatcatgatccagcccattctctactcttactcctttcatgggccaccagagccagtactcttggatagcagcagcattctagctgacagaattttgctgatggatactttctttcaaattgtcatttatcttggtgagaccatagcccagtggcgtaaagctggctaccaggacatgcccgagtatgaaaacttcaagcaccttctgcaggcaccactggatgatgctcaagaaattctgcaagcacgcttcccgatgccacgttacatcaacacggagcatggaggcagtcaggctcgattccttttgtccaaagtgaacccatctcagacacacaataacctgtatgcttggggacaggaaactggagcacccatcctaactgatgatgttagcctgcaggtgttcatggaccatttgaagaagctggctgtctccagtgcctgttaagctgaggatacaaccaggaaatgcaacggtgtcagattgtgttcaaaatgtctagaaaggcttgataacattcctgttacttttctagcagattttaacaaataatcaaggacattttatatgtaactctttagattataatttatttgtattcctgtctttgtcctttttcttgcactataaaattataaggtcataaatgttttggtacttgtagatgtttatgtgctttttgtatcctaacttttagaatctaaataaaatcagaggtaatgtattttggcagcttgtttaggtgagaatcttaatgatcataaaggaaataaatctagatgcagaaagtactggctaaaatattgctaatacaaatgtgatttcctga

SEQ ID NO: 226482 - DNA, 3411 bp, Artificial Sequence
  derived and/or modified sequence
atcgttctcgctttccggtagctaaggcgatcagcgggacttcccactgagacgagcggatgtcatattgtatcagggcgaacctctgaggagcgctggctgcgcttaggcaacggtgcggcaggcgccggggttttctgaaacagaaacgtttaggggtggggaaacgtgttccgaggaactctcgttttgaagtgcgacatacacctgtcttgccctgttccaagatggtggcagagcttctctgagtctctcgcttcctccagtccgtcggagaagcgctctttgattggccagtggacagcgccgtggcatgacgcgctggggcgctggccaatcggttgagagctgagctggacttggcggtgggagccggagcctgcttgttgcagctgtgggtgaggacggctctagctagttcccttttagactatggcgacatacctggagttcatccagcagaatgaagaacgggatggtgtgcgttttagttggaacgtgtggccttccagccggctggaggctacaagaatggttgtacccctggcttgtctccttactcctttgaaagaacgtccagacctacctcctgtacaatatgaacctgtgctttgcagcaggccaacttgtaaagctgttctcaacccactttgtcaggttgattatcgagcaaaactttgggcctgtaatttctgttttcaaagaaatcagtttcctccagcttatggaggcatatctgaggtgaatcaacctgccgaattgatgccccagttttctacaattgagtacgtgatacagcgaggtgctcagtcccctctgatctttctctatgtggttgacacatgcctggaggaagatgaccttcaagcactcaaagagtccctgcagatgtccctgagtcttcttcctccagatgctctggtgggtctgatcacatttggaaggatggtgcaggttcatgagctaagctgtgaaggaatctccaaaagttatgtcttccgagggaccaaggatttaactgcaaagcaaatacaggatatgttgggcctgaccaagccagccatgcccatgcagcaagcacgacctgcacaaccacaggagcacccttttgcttcaagcagatttctgcagcctgttcacaagattgatatgaacctcactgatcttcttggggagctacagagggacccatggccagtaactcaggggaagagacctttgcgatccactggtgtggctttgtccattgctgttggcttgctggagggcacttttccaaacacaggagccaggatcatgctgtttactggaggtccccctacccaagggcctggcatggtggttggagatgaattaaagattcctattcgttcttggcatgatattgagaaagataatgcacgattcatgaaaaaggcaaccaagcactatgagatgcttgctaatcgaacagctgcaaatggtcactgcattgatatttatgcttgtgcccttgatcaaactggacttttggagatgaagtgttgtgcaaatcttactggaggctacatggtaatgggagattctttcaacacttctctcttcaagcagacattccaaagaatctttactaaagattttaatggagatttccgaatggcatttggtgctactttggacgtaaagacctctcgggaactgaagattgcaggagccattggtccatgcgtatctctgaatgtgaaaggaccgtgtgtgtcagaaaatgagcttggtgttggtggcacgagtcagtggaaaatctgtggcctagatcctacatctacacttggcatctattttgaagttgtcaatcagcacaacaccccgatcccccaaggaggcagaggagccatccagtttgtcacgcattatcagcactccagcacccagagacgcatccgcgtgaccaccatcgcccgaaattgggcagatgtacagagtcagctcaggcacatagaagcagcatttgaccaggaggctgcggcagtgttgatggcacggcttggggtgttccgagcggagtcagaggaggggcccgatgtgctccggtggctggaccgacaactcatccgactgtgtcaaaagtttggacagtataacaaagaagaccccacttcttttaggttatcagattccttttctctatatcctcagtttatgttccatctgagaagatctccatttcttcaagtgtttaacaacagtcctgatgagtcgtcatattacagacatcattttgcccggcaggacctgacccagtccctcatcatgatccagcccattctctactcttactcctttcatgggccaccagagccagtactcttggatagcagcagcattctagctgacagaattttgctgatggatactttctttcaaattgtcatttatcttggtgagaccatagcccagtggcgtaaagctggctaccaggacatgcccgagtatgaaaacttcaagcaccttctgcaggcaccactggatgatgctcaagaaattctgcaagcacgcttcccgatgccacgttacatcaacacggagcatggaggcagtcaggctcgattccttttgtccaaagtgaacccatctcagacacacaataacctgtatgcttggggacaggaaactggagcacccatcctaactgatgatgttagcctgcaggtgttcatggaccatttgaagaagctggctgtctccagtgcctgttaagctgaggatacaaccaggaaatgcaacggtgtcagattgtgttcaaaatgtctagaaaggcttgataacattcctgttacttttctagcagattttaacaaataatcaaggacattttatatgtaactctttagattataatttatttgtattcctgtctttgtcctttttcttgcactataaaattataaggtcataaatgttttggtacttgtagatgtttatgtgctttttgtatcctaacttttagaatctaaataaaatcagaggtaatgtattttggcagcttgtttaggtgagaatcttaatgatcataaaggaaataaatctagatgcagaaagtactggctaaaatattgctaatacaaatgtgatttcctgaggtctctgtgtgagtgtgtatgtgttttaagtgacttccttaagaggtgtttcctgaacctaattctcataattaaagtaatgtatatgcaggatcaaaatgaaacaaatataccttatcctaaagagctcataacaaataagttacctccactctataaactcagacctactttttgaagataactgcttttaacctctccttacaagatttttgttgttgatgtatttaattttagcccatgtctcaattctcattttcaaagaatcaatatattaatatacctttggtca

SEQ ID NO: 226483 - DNA, 3229 bp, Artificial Sequence
  derived and/or modified sequence
gcttctgggaggaggccttttcttgacagtttagggtagcgggggaatggatgatccgggagtcccctgcggatgtcgtcccgcaccaggccgggaccgatttctggctccagtttccccagaattgcggagtgcgcacacctggaaggacccaagtcccgttttatagttgagaaactcaagactcagacaagtgaaacgacttttgcttcatgacagctggaactggaacccagttcccttttagactatggcgacatacctggagttcatccagcagaatgaagaacgggatggtgtgcgttttagttggaacgtgtggccttccagccggctggaggctacaagaatggttgtacccctggcttgtctccttactcctttgaaagaacgtccagacctacctcctgtacaatatgaacctgtgctttgcagcaggccaacttgtaaagctgttctcaacccactttgtcaggttgattatcgagcaaaactttgggcctgtaatttctgttttcaaagaaatcagtttcctccagcttatggaggcatatctgaggtgaatcaacctgccgaattgatgccccagttttctacaattgagtacgtgatacagcgaggtgctcagtcccctctgatctttctctatgtggttgacacatgcctggaggaagatgaccttcaagcactcaaagagtccctgcagatgtccctgagtcttcttcctccagatgctctggtgggtctgatcacatttggaaggatggtgcaggttcatgagctaagctgtgaaggaatctccaaaagttatgtcttccgagggaccaaggatttaactgcaaagcaaatacaggatatgttgggcctgaccaagccagccatgcccatgcagcaagcacgacctgcacaaccacaggagcacccttttgcttcaagcagatttctgcagcctgttcacaagattgatatgaacctcactgatcttcttggggagctacagagggacccatggccagtaactcaggggaagagacctttgcgatccactggtgtggctttgtccattgctgttggcttgctggagggcacttttccaaacacaggagccaggatcatgctgtttactggaggtccccctacccaagggcctggcatggtggttggagatgaattaaagattcctattcgttcttggcatgatattgagaaagataatgcacgattcatgaaaaaggcaaccaagcactatgagatgcttgctaatcgaacagctgcaaatggtcactgcattgatatttatgcttgtgcccttgatcaaactggacttttggagatgaagtgttgtgcaaatcttactggaggctacatggtaatgggagattctttcaacacttctctcttcaagcagacattccaaagaatctttactaaagattttaatggagatttccgaatggcatttggtgctactttggacgtaaagacctctcgggaactgaagattgcaggagccattggtccatgcgtatctctgaatgtgaaaggaccgtgtgtgtcagaaaatgagcttggtgttggtggcacgagtcagtggaaaatctgtggcctagatcctacatctacacttggcatctattttgaagttgtcaatcagcacaacaccccgatcccccaaggaggcagaggagccatccagtttgtcacgcattatcagcactccagcacccagagacgcatccgcgtgaccaccatcgcccgaaattgggcagatgtacagagtcagctcaggcacatagaagcagcatttgaccaggaggctgcggcagtgttgatggcacggcttggggtgttccgagcggagtcagaggaggggcccgatgtgctccggtggctggaccgacaactcatccgactgtgtcaaaagtttggacagtataacaaagaagaccccacttcttttaggttatcagattccttttctctatatcctcagtttatgttccatctgagaagatctccatttcttcaagtgtttaacaacagtcctgatgagtcgtcatattacagacatcattttgcccggcaggacctgacccagtccctcatcatgatccagcccattctctactcttactcctttcatgggccaccagagccagtactcttggatagcagcagcattctagctgacagaattttgctgatggatactttctttcaaattgtcatttatcttggtgagaccatagcccagtggcgtaaagctggctaccaggacatgcccgagtatgaaaacttcaagcaccttctgcaggcaccactggatgatgctcaagaaattctgcaagcacgcttcccgatgccacgttacatcaacacggagcatggaggcagtcaggctcgattccttttgtccaaagtgaacccatctcagacacacaataacctgtatgcttggggacaggaaactggagcacccatcctaactgatgatgttagcctgcaggtgttcatggaccatttgaagaagctggctgtctccagtgcctgttaagctgaggatacaaccaggaaatgcaacggtgtcagattgtgttcaaaatgtctagaaaggcttgataacattcctgttacttttctagcagattttaacaaataatcaaggacattttatatgtaactctttagattataatttatttgtattcctgtctttgtcctttttcttgcactataaaattataaggtcataaatgttttggtacttgtagatgtttatgtgctttttgtatcctaacttttagaatctaaataaaatcagaggtaatgtattttggcagcttgtttaggtgagaatcttaatgatcataaaggaaataaatctagatgcagaaagtactggctaaaatattgctaatacaaatgtgatttcctgaggtctctgtgtgagtgtgtatgtgttttaagtgacttccttaagaggtgtttcctgaacctaattctcataattaaagtaatgtatatgcaggatcaaaatgaaacaaatataccttatcctaaagagctcataacaaataagttacctccactctataaactcagacctactttttgaagataactgcttttaacctctccttacaagatttttgttgttgatgtatttaattttagcccatgtctcaattctcattttcaaagaatcaatatattaatatacctttggtca

SEQ ID NO: 226484 - DNA, 3405 bp, Artificial Sequence
  derived and/or modified sequence
aggcgatcagcgggacttcccactgagacgagcggatgtcatattgtatcagggcgaacctctgaggagcgctggctgcgcttaggcaacggtgcggcaggcgccggggttttctgaaacagaaacgtttaggggtggggaaacgtgttccgaggaactctcgttttgaagtgcgacatacacctgtcttgccctgttccaagatggtggcagagcttctctgagtctctcgcttcctccagtccgtcggagaagcgctctttgattggccagtggacagcgccgtggcatgacgcgctggggcgctggccaatcggttgagagctgagctggacttggcggtgggagccggagcctgcttgttgcagctgtgggtgaggacggctctagctaggtgagcggctccggccagttcccttttagactatggcgacatacctggagttcatccagcagaatgaagaacgggatggtgtgcgttttagttggaacgtgtggccttccagccggctggaggctacaagaatggttgtacccctggcttgtctccttactcctttgaaagaacgtccagacctacctcctgtacaatatgaacctgtgctttgcagcaggccaacttgtaaagctgttctcaacccactttgtcaggttgattatcgagcaaaactttgggcctgtaatttctgttttcaaagaaatcagtttcctccagcttatggaggcatatctgaggtgaatcaacctgccgaattgatgccccagttttctacaattgagtacgtgatacagcgaggtgctcagtcccctctgatctttctctatgtggttgacacatgcctggaggaagatgaccttcaagcactcaaagagtccctgcagatgtccctgagtcttcttcctccagatgctctggtgggtctgatcacatttggaaggatggtgcaggttcatgagctaagctgtgaaggaatctccaaaagttatgtcttccgagggaccaaggatttaactgcaaagcaaatacaggatatgttgggcctgaccaagccagccatgcccatgcagcaagcacgacctgcacaaccacaggagcacccttttgcttcaagcagatttctgcagcctgttcacaagattgatatgaacctcactgatcttcttggggagctacagagggacccatggccagtaactcaggggaagagacctttgcgatccactggtgtggctttgtccattgctgttggcttgctggagggcacttttccaaacacaggagccaggatcatgctgtttactggaggtccccctacccaagggcctggcatggtggttggagatgaattaaagattcctattcgttcttggcatgatattgagaaagataatgcacgattcatgaaaaaggcaaccaagcactatgagatgcttgctaatcgaacagctgcaaatggtcactgcattgatatttatgcttgtgcccttgatcaaactggacttttggagatgaagtgttgtgcaaatcttactggaggctacatggtaatgggagattctttcaacacttctctcttcaagcagacattccaaagaatctttactaaagattttaatggagatttccgaatggcatttggtgctactttggacgtaaagacctctcgggaactgaagattgcaggagccattggtccatgcgtatctctgaatgtgaaaggaccgtgtgtgtcagaaaatgagcttggtgttggtggcacgagtcagtggaaaatctgtggcctagatcctacatctacacttggcatctattttgaagttgtcaatcagcacaacaccccgatcccccaaggaggcagaggagccatccagtttgtcacgcattatcagcactccagcacccagagacgcatccgcgtgaccaccatcgcccgaaattgggcagatgtacagagtcagctcaggcacatagaagcagcatttgaccaggaggctgcggcagtgttgatggcacggcttggggtgttccgagcggagtcagaggaggggcccgatgtgctccggtggctggaccgacaactcatccgactgtgtcaaaagtttggacagtataacaaagaagaccccacttcttttaggttatcagattccttttctctatatcctcagtttatgttccatctgagaagatctccatttcttcaagtgtttaacaacagtcctgatgagtcgtcatattacagacatcattttgcccggcaggacctgacccagtccctcatcatgatccagcccattctctactcttactcctttcatgggccaccagagccagtactcttggatagcagcagcattctagctgacagaattttgctgatggatactttctttcaaattgtcatttatcttggtgagaccatagcccagtggcgtaaagctggctaccaggacatgcccgagtatgaaaacttcaagcaccttctgcaggcaccactggatgatgctcaagaaattctgcaagcacgcttcccgatgccacgttacatcaacacggagcatggaggcagtcaggctcgattccttttgtccaaagtgaacccatctcagacacacaataacctgtatgcttggggacaggaaactggagcacccatcctaactgatgatgttagcctgcaggtgttcatggaccatttgaagaagctggctgtctccagtgcctgttaagctgaggatacaaccaggaaatgcaacggtgtcagattgtgttcaaaatgtctagaaaggcttgataacattcctgttacttttctagcagattttaacaaataatcaaggacattttatatgtaactctttagattataatttatttgtattcctgtctttgtcctttttcttgcactataaaattataaggtcataaatgttttggtacttgtagatgtttatgtgctttttgtatcctaacttttagaatctaaataaaatcagaggtaatgtattttggcagcttgtttaggtgagaatcttaatgatcataaaggaaataaatctagatgcagaaagtactggctaaaatattgctaatacaaatgtgatttcctgaggtctctgtgtgagtgtgtatgtgttttaagtgacttccttaagaggtgtttcctgaacctaattctcataattaaagtaatgtatatgcaggatcaaaatgaaacaaatataccttatcctaaagagctcataacaaataagttacctccactctataaactcagacctactttttgaagataactgcttttaacctctccttacaagatttttgttgttgatgtatttaattttagcccatgtctcaattctcattttcaaagaatcaatatattaatatacctttggtca

SEQ ID NO: 226485 - DNA, 1184 bp, Artificial Sequence
  derived and/or modified sequence
cttcttccggcagccttagtttcttccaaccagtgcagctccctgttccgcgagcatacgtcatcgttctcgctttccggtagctaaggcgatcagcgggacttcccactgagacgagcggatgtcatattgtatcagggcgaacctctgaggagcgctggctgcgcttaggcaacgttcccttttagactatggcgacatacctggagttcatccagcagaatgaagaacgggatggtgtgcgttttagttggaacgtgtggccttccagccggctggaggctacaagaatggttgtacccctggcttgtctccttactcctttgaaagaacgtccagacctacctcctgtacaatatgaacctgtgctttgcagcaggccaacttgtaaagctgttctcaacccactttgtcaggttgattatcgagcaaaactttgggcctgtaatttctgttttcaaagaaatcagtttcctccagcttatggaggcatatctgaggtgaatcaacctgccgaattgatgccccagttttctacaattgagtacgtgatacagcgaggtgctcagtcccctctgatctttctctatgtggttgacacatgcctggaggaagatgaccttcaagcactcaaagagtccctgcagatgtccctgagtcttcttcctccagatgctctggtgggtctgatcacatttggaaggatggtgcaggttcatgagctaagctgtgaaggaatctccaaaagttatgtcttccgagggaccaaggatttaactgcaaagcaaatacaggatatgttgggcctgaccaagccagccatgcccatgcagcaagcacgacctgcacaaccacaggagcacccttttgcttcaagcagatttctgcagcctgttcacaagattgatatgaacctcactgatcttcttggggagctacagagggacccatggccagtaactcaggggaagagacctttgcgatccactggtgtggctttgtccattgctgttggcttgctggagggcacttttccaaacacaggagccaggatcatgctgtttactggaggtccccctacccaagggcctggcatggtggttggagatgaattaaagattcctattcgttcttggcatgatattgagaaagataatgcacgattcatgaaaaaggcaaccaag

SEQ ID NO: 226486 - DNA, 2304 bp, Artificial Sequence
  derived and/or modified sequence
atggccacctacctggagttcatccagcagaacgaggagagagacggcgtgagattcagctggaacgtgtggcccagcagcagactggaggccaccagaatggtggtgcccctggcctgcctgctgacccccctgaaggagagacccgacctgccccccgtgcagtacgagcccgtgctgtgcagcagacccacctgcaaggccgtgctgaaccccctgtgccaggtggactacagagccaagctgtgggcctgcaacttctgcttccagagaaaccagttcccccccgcctacggcggcatcagcgaggtgaaccagcccgccgagctgatgccccagttcagcaccatcgagtacgtgatccagagaggcgcccagagccccctgatcttcctgtacgtggtggacacctgcctggaggaggacgacctgcaggccctgaaggagagcctgcagatgagcctgagcctgctgccccccgacgccctggtgggcctgatcaccttcggcagaatggtgcaggtgcacgagctgagctgcgagggcatcagcaagagctacgtgttcagaggcaccaaggacctgaccgccaagcagatccaggacatgctgggcctgaccaagcccgccatgcccatgcagcaggccagacccgcccagccccaggagcaccccttcgccagcagcagattcctgcagcccgtgcacaagatcgacatgaacctgaccgacctgctgggcgagctgcagagagacccctggcccgtgacccagggcaagagacccctgagaagcaccggcgtggccctgagcatcgccgtgggcctgctggagggcaccttccccaacaccggcgccagaatcatgctgttcaccggcggcccccccacccagggccccggcatggtggtgggcgacgagctgaagatccccatcagaagctggcacgacatcgagaaggacaacgccagattcatgaagaaggccaccaagcactacgagatgctggccaacagaaccgccgccaacggccactgcatcgacatctacgcctgcgccctggaccagaccggcctgctggagatgaagtgctgcgccaacctgaccggcggctacatggtgatgggcgacagcttcaacaccagcctgttcaagcagaccttccagagaatcttcaccaaggacttcaacggcgacttcagaatggccttcggcgccaccctggacgtgaagaccagcagagagctgaagatcgccggcgccatcggcccctgcgtgagcctgaacgtgaagggcccctgcgtgagcgagaacgagctgggcgtgggcggcaccagccagtggaagatctgcggcctggaccccaccagcaccctgggcatctacttcgaggtggtgaaccagcacaacacccccatcccccagggcggcagaggcgccatccagttcgtgacccactaccagcacagcagcacccagagaagaatcagagtgaccaccatcgccagaaactgggccgacgtgcagagccagctgagacacatcgaggccgccttcgaccaggaggccgccgccgtgctgatggccagactgggcgtgttcagagccgagagcgaggagggccccgacgtgctgagatggctggacagacagctgatcagactgtgccagaagttcggccagtacaacaaggaggaccccaccagcttcagactgagcgacagcttcagcctgtacccccagttcatgttccacctgagaagaagccccttcctgcaggtgttcaacaacagccccgacgagagcagctactacagacaccacttcgccagacaggacctgacccagagcctgatcatgatccagcccatcctgtacagctacagcttccacggcccccccgagcccgtgctgctggacagcagcagcatcctggccgacagaatcctgctgatggacaccttcttccagatcgtgatctacctgggcgagaccatcgcccagtggagaaaggccggctaccaggacatgcccgagtacgagaacttcaagcacctgctgcaggcccccctggacgacgcccaggagatcctgcaggccagattccccatgcccagatacatcaacaccgagcacggcggcagccaggccagattcctgctgagcaaggtgaaccccagccagacccacaacaacctgtacgcctggggccaggagaccggcgcccccatcctgaccgacgacgtgagcctgcaggtgttcatggaccacctgaagaagctggccgtgagcagcgcctgctag

SEQ ID NO: 226487 - DNA, 996 bp, Artificial Sequence
  derived and/or modified sequence
atggccacctacctggagttcatccagcagaacgaggagagagacggcgtgagattcagctggaacgtgtggcccagcagcagactggaggccaccagaatggtggtgcccctggcctgcctgctgacccccctgaaggagagacccgacctgccccccgtgcagtacgagcccgtgctgtgcagcagacccacctgcaaggccgtgctgaaccccctgtgccaggtggactacagagccaagctgtgggcctgcaacttctgcttccagagaaaccagttcccccccgcctacggcggcatcagcgaggtgaaccagcccgccgagctgatgccccagttcagcaccatcgagtacgtgatccagagaggcgcccagagccccctgatcttcctgtacgtggtggacacctgcctggaggaggacgacctgcaggccctgaaggagagcctgcagatgagcctgagcctgctgccccccgacgccctggtgggcctgatcaccttcggcagaatggtgcaggtgcacgagctgagctgcgagggcatcagcaagagctacgtgttcagaggcaccaaggacctgaccgccaagcagatccaggacatgctgggcctgaccaagcccgccatgcccatgcagcaggccagacccgcccagccccaggagcaccccttcgccagcagcagattcctgcagcccgtgcacaagatcgacatgaacctgaccgacctgctgggcgagctgcagagagacccctggcccgtgacccagggcaagagacccctgagaagcaccggcgtggccctgagcatcgccgtgggcctgctggagggcaccttccccaacaccggcgccagaatcatgctgttcaccggcggcccccccacccagggccccggcatggtggtgggcgacgagctgaagatccccatcagaagctggcacgacatcgagaaggacaacgccagattcatgaagaaggccaccaagtag

SEQ ID NO: 226488 - protein, 204 aa, Artificial Sequence
  derived and/or modified sequence
MSSASGLRRGHPAVSTVSHADADCFVCVFLSHGEGNHIYAYDAKIEIQTLTGLFKGDKCHSLVGKPKIFIIQACRGNQHDVPVIPLDVVDNQTEKLDTNITEVDAASVYTLPAGADFLMCYSVAEGYYSHRETVNGSWYIQDLCEMLGKYGSSLEFTELLTLVNRKVSQRRVDFCKDPSAIGKKQVPCFASMLTKKLHFFPKSN

SEQ ID NO: 226489 - DNA, 615 bp, Artificial Sequence
  derived and/or modified sequence
atgtccagcgcatctgggctgagacggggccaccctgcggtgtccactgttagtcacgcagatgctgattgcttcgtttgcgtatttctctcacacggagaaggcaatcacatctacgcatacgatgctaaaattgagattcagacactgaccggactttttaaaggagataaatgccattccctagtcggaaaacctaagatcttcatcatccaagcttgtcgcggcaatcagcatgatgtgcccgtgatccccctggatgtggtggacaaccagaccgagaaactggatactaacatcaccgaagtggatgcagcaagcgtgtatacactgcctgccggtgcagactttctgatgtgctattctgtagccgaaggatactatagccatcgtgagaccgtgaacggaagctggtacatacaagatctttgtgagatgctcggtaaatacgggtcatccctagagtttaccgaattactcacattagttaataggaaagtgtcccaacgtcgggtggatttctgtaaagacccctccgctattgggaagaaacaagtgccttgttttgcttctatgttaactaaaaagctgcatttttttccaaaatcaaattag

SEQ ID NO: 226490 - DNA, 615 bp, Artificial Sequence
  derived and/or modified sequence
atgagcagcgccagcggcctgcggcggggccaccctgctgtgtccacagtgtcccatgctgatgctgactgctttgtgtgtgtgttcctgagccacggggagggcaaccacatctatgcctatgatgccaagattgagatccagaccctgaccggcctcttcaagggggacaagtgccacagcctggtgggcaagcccaagatcttcatcatccaggcctgccggggcaaccagcatgatgtgcctgtgatccccctggatgtggtggacaaccagacagagaagctggacaccaacatcacagaggtggatgctgcctctgtgtacaccctgcctgctggagctgacttcctgatgtgctacagcgtggccgagggctactacagccaccgggagaccgtgaatggctcctggtacatccaggacctgtgtgagatgctgggcaagtatggcagcagcctggagttcacagagctgctgaccctggtgaacaggaaggtgtcccagaggagagtggacttctgcaaggaccccagcgccatcggcaagaagcaggtgccctgctttgcctccatgctgaccaagaagctgcacttcttccccaagagcaactag

SEQ ID NO: 226491 - DNA, 615 bp, Artificial Sequence
  derived and/or modified sequence
atgagcagcgccagcggcctgcggcggggccaccccgccgtgagcacagtgtctcacgcagatgcggactgcttcgtttgtgtgtttctgtcccatggcgagggcaaccacatctatgcctatgacgctaaaatcgaaattcagacattgacaggacttttcaagggagacaagtgccacagcttggtcggaaagcccaagatttttattattcaagcatgcagagggaatcaacatgatgtgcccgtgattcccctagatgtcgtggataaccagaccgaaaagctagacacgaatatcaccgaagtcgatgctgccagtgtgtatactctgcccgccggggccgactttctgatgtgctactctgttgcagaggggtactactctcaccgtgagacagtgaacggcagctggtacatccaagacctctgtgaaatgctggggaagtacgggtctagtttagaatttaccgaactgctgaccctcgtcaatagaaaggtttcccagcgcagggtggacttctgtaaagacccttccgccatcggaaaaaaacaggtgccctgctttgctagtatgctgactaaaaagctgcactttttccccaaaagcaattag

SEQ ID NO: 226492 - DNA, 615 bp, Artificial Sequence
  derived and/or modified sequence
atgagctcagctagtgggctgagaagggggcatcccgctgtttccacagtttcccacgctgacgccgactgtttcgtttgtgtttttctctctcacggtgagggtaatcacatttatgcgtacgacgccaaaatcgaaattcaaactctgacaggattgtttaagggggacaagtgtcattccctggtgggtaagccaaaaatcttcatcatccaggcctgccgtggcaaccagcacgatgtccctgtcatccctttagatgtggtcgataatcaaactgagaagcttgatacaaacattactgaggtggatgccgcatccgtgtacacattgccagcaggagcagatttccttatgtgttactctgttgccgagggctactactcacaccgggaaactgtgaacggaagctggtacatacaggacctgtgtgaaatgctgggaaaatatggctccagtctggaatttactgagctcctgactctcgttaatcggaaagtctcacagcgaagggttgacttttgcaaagatcctagcgctataggaaaaaaacaggtgccatgttttgcatccatgttgactaaaaaactccattttttccccaagagcaactag

SEQ ID NO: 226493 - DNA, 1340 bp, Artificial Sequence
  derived and/or modified sequence
tgtctggctgcgcgtttggctgcaatgagctcggcctcggggctccgcagggggcacccggcagtgtcaactgttagccacgcagatgccgattgctttgtgtgtgtcttcctgagccatggcgaaggcaatcacatttatgcatatgatgctaaaatcgaaattcagacattaactggcttgttcaaaggagacaagtgtcacagcctggttggaaaacccaagatatttatcattcaggcatgtcggggaaaccagcacgatgtgccagtcattcctttggatgtagtagataatcagacagagaagttggacaccaacataactgaggtggatgcagcctccgtttacacgctgcctgctggagctgacttcctcatgtgttactctgttgcagaaggatattattctcaccgggaaactgtgaacggctcatggtacattcaagatttgtgtgagatgttgggaaaatatggctcctccttagagttcacagaactcctcacactggtgaacaggaaagtttctcagcgccgagtggacttttgcaaagacccaagtgcaattggaaagaagcaggttccctgttttgcctcaatgctaactaaaaagctgcatttctttccaaaatctaattaattaatagaggctatctaattttacactctgtattgaaaatggctttctcagccaggcgtggttactcacacctgtaatcccagcactttgggagtccaaggtgggcggatcacctgaggtcgggagttcgagaccagcctgaccaacatggagaagccccgtctctactaaaaatgcaaaaaaaaatttagctaggcatggcggcgcatgcctgcaatcccagctacttggaaggctgaggcaggagaatcacttgaacccaggaggtggaggctgcggtgagccgagattgcgccattgcactccagcctgggcaacgagtgaaactccgtctcaaaaaaaagaaaatgtctttctcttccttttatataaatatcgttagggtgaagcattatggtctaatgattcaaatgttttaaagtttaatgcctagcagagaactgccttaaaaaaaaaaaaaaaaagttcatgttggccatggtgaaagggtttgatatggagaaacaaaatcctcaggaaattagataaataaaaatttataagcatttgtattattttttaataaactgcagggttacacaaaaatctagctgatttaacttgtattttgtcacttttttataaaagtttattgtttgatgtttttaaaggtttttgaaatccaggaattaaatcatcccttaataaaatattcgaaattc

SEQ ID NO: 226494 - DNA, 615 bp, Artificial Sequence
  derived and/or modified sequence
atgagcagcgccagcggcctgagaagaggccaccccgccgtgagcaccgtgagccacgccgacgccgactgcttcgtgtgcgtgttcctgagccacggcgagggcaaccacatctacgcctacgacgccaagatcgagatccagaccctgaccggcctgttcaagggcgacaagtgccacagcctggtgggcaagcccaagatcttcatcatccaggcctgcagaggcaaccagcacgacgtgcccgtgatccccctggacgtggtggacaaccagaccgagaagctggacaccaacatcaccgaggtggacgccgccagcgtgtacaccctgcccgccggcgccgacttcctgatgtgctacagcgtggccgagggctactacagccacagagagaccgtgaacggcagctggtacatccaggacctgtgcgagatgctgggcaagtacggcagcagcctggagttcaccgagctgctgaccctggtgaacagaaaggtgagccagagaagagtggacttctgcaaggaccccagcgccatcggcaagaagcaggtgccctgcttcgccagcatgctgaccaagaagctgcacttcttccccaagagcaactag

SEQ ID NO: 226495 - protein, 670 aa, Artificial Sequence
  derived and/or modified sequence
MPWEEPAGEKPSCSHSQKAFHMEPAQKPCFTTDMVTWALLCISAETVRGEAPSQPRGIPHRSPVSVDDLWLEKTQRKKLQKQAHVERRLHIGAVHKDGVKCWRKTIITSPESLNLPRRSHPLSQSAPTGLNHMGWPEHTPGTAMPDGALDTAVCADEVGSEEDLYDDLHSSSHHYSHPGGGGEQLAINELISDGSVVCAEALWDHVTMDDQELGFKAGDVIEVMDATNREWWWGRVADGEGWFPASFVRLRVNQDEPADDDAPLAGNSGAEDGGAEAQSSKDQMRTNVINEILSTERDYIKHLRDICEGYVRQCRKRADMFSEEQLRTIFGNIEDIYRCQKAFVKALEQRFNRERPHLSELGACFLEHQADFQIYSEYCNNHPNACVELSRLTKLSKYVYFFEACRLLQKMIDISLDGFLLTPVQKICKYPLQLAELLKYTHPQHRDFKDVEAALHAMKNVAQLINERKRRLENIDKIAQWQSSIEDWEGEDLLVRSSELIYSGELTRVTQPQAKSQQRMFFLFDHQLIYCKKDLLRRDVLYYKGRLDMDGLEVVDLEDGKDRDLHVSIKNAFRLHRGATGDSHLLCTRKPEQKQRWLKAFAREREQVQLDQETGFSITELQRKQAMLNASKQQVTGKPKGRRTAAPPPRLPGPYPADIIPFSEPQSQAS

SEQ ID NO: 226496 - DNA, 2013 bp, Artificial Sequence
  derived and/or modified sequence
atgccttgggaggaacccgcaggagaaaagcccagttgctcacattcacaaaaagcttttcatatggaacccgctcagaagccctgtttcactaccgacatggttacatgggccttgctatgcatttctgcagaaaccgtgcgtggcgaggccccttctcagcccaggggcattccacaccggtctcccgtgtccgtggacgacctttggttagaaaaaacccagcggaaaaaactccagaagcaagcccacgttgagcggcggttgcacatcggcgcagtccataaggacggggtgaaatgttggcgtaagaccattatcaccagccccgaaagcctgaatcttccacgacggagccacccactgtcccagtcagcccctacaggtctaaatcacatgggatggcccgagcacacccctggaacagctatgccagacggtgccttggatacggcggtctgcgcagatgaagtcggctctgaggaggacctctacgacgacctgcactcgtcgagccaccactatagtcatccaggtggcggtggggagcagcttgccatcaacgaactgatcagcgatgggtcggttgtttgcgcagaagcgctttgggatcacgtgaccatggacgaccaggagcttggttttaaagccggagatgttattgaagtaatggatgccactaatcgggagtggtggtggggtcgggtggcagacggcgagggatggtttccagcatccttcgtcagactgagggtcaatcaggacgaacctgctgatgatgacgctccccttgctgggaatagcggcgcagaggatggcggcgcagaagctcagtcgtccaaggatcagatgcgaaccaatgttatcaacgaaatcctctctactgaacgcgactatataaagcatctacgcgatatatgtgaggggtacgtgcgccaatgccgcaaaagggcagatatgttttccgaggagcagttgagaactatctttgggaacattgaagacatctacaggtgccagaaggcatttgtgaaagctcttgagcagcgtttcaatagggagcggcctcacctctccgaactgggcgcttgctttctcgagcaccaggccgactttcagatttatagcgaatactgtaataatcatcccaatgcatgcgttgagctgagccgcctgacaaaactctctaaatatgtgtattttttcgaagcctgtcgtctacttcagaagatgatcgacatatccctggatgggttcctgctgacccccgtgcagaaaatatgtaaataccccttacagctggctgaactcctgaagtatacacatcctcaacacagagactttaaagacgtggaagccgctcttcatgctatgaaaaacgtcgcgcaactgatcaacgagcgaaaaagaagactggaaaatatcgataagatagctcagtggcagagctcaatcgaagattgggaaggtgaggatctcttggttcggagctccgaattgatctacagtggcgaacttaccagggtgacccaaccgcaggcgaagtctcagcagcggatgttcttcctattcgaccatcaattgatctattgcaagaaggacctgctgcggagagatgtgctgtattacaaaggacgtctggatatggacggcctggaagtggttgatctggaggatggtaaagatagagatttacatgtgtccatcaagaatgccttcaggctacatcggggcgccacgggcgacagtcacctgctgtgtacacgcaagccggaacaaaagcagaggtggctgaaagctttcgctagagagcgcgagcaggtccagctggaccaggagacaggtttttctataaccgagctgcagagaaaacaggcaatgttaaacgcttcaaaacagcaagtgactggcaagcctaagggaaggcggacggctgctcctcctccccgattgcccgggccttaccctgctgacatcatccctttcagcgagccacagtcccaggcctcttag

SEQ ID NO: 226497 - DNA, 579 bp, Artificial Sequence
  derived and/or modified sequence
atgccttgggaagagccagctggggaaaaaccttcctgtagccattctcagaaggccttccacatggaacccgcgcagaagccctgcttcaccaccgacatggtcacttgggctttactgtgcattagtgctgaaaccgtgcggggggaagcaccatcccagccacgggggatcccccacagaagccccgtgagtgtggacgacctctggctggagaaaacgcaacggaagaaactccagaaacaggctcacgtggagagacggctgcacatcggtgccgtccacaaggacggagtgaaatgttggcggaagacaataataacaagtcccgaaagtttaaatctcccacgccggagccacccactgtctcagagtgcgcctacaggactgaaccatatgggttggccagagcacacccctggtacagcggtggggcggccttgctacttgacccgtcagaaacaccctgcactaccaagcaatcggccacagcagcaagtgctggttctagccgaaccaagaaggaaaccgtccaccttctggcatagcatctcacgcctagctcctttccggaagtag

SEQ ID NO: 226498 - DNA, 2013 bp, Artificial Sequence
  derived and/or modified sequence
atgccttgggaggagccggcaggagagaaaccatcttgctcccattcccaaaaggcctttcatatggagccagcccaaaaaccttgttttaccacggacatggttacctgggccctcctctgcattagcgccgaaacggtgagaggggaggcgccttctcaacccagggggatccctcacagaagtcctgtgtccgtcgatgacctctggctggagaaaacacaacgtaagaaactacagaagcaggcacatgttgagcggcggctgcacatcggcgctgtgcataaggacggggttaagtgctggagaaagactataatcaccagtcctgagtccctcaatctacctaggagatctcatccactgagccagtccgcccctactggcctcaatcatatgggatggccagaacataccccgggcaccgctatgcccgacggggccctggatacagctgtatgtgcagatgaagtgggttctgaggaggacctgtatgacgacctacattcatcgtcccatcattattcccacccaggaggcggcggcgaacagctcgctattaatgaactaatttctgacggctccgtcgtgtgcgcagaggcgctgtgggatcacgtcactatggacgaccaggagttgggctttaaagctggagatgtgatcgaggtgatggacgcaaccaatagggagtggtggtgggggagagtggcagacggggaggggtggtttcctgcttcattcgtgcgcctccgagtgaatcaggacgagcccgcagatgacgatgcacccttggcggggaactccggtgccgaagacggcggtgcggaagcccagagctcaaaagatcagatgcgcaccaacgtcatcaacgagatactctcgacagaaagagattacattaagcatcttcgggacatttgtgagggatatgtgaggcagtgccgaaagcgtgccgacatgttttctgaggagcagctaaggacgatttttgggaacatcgaggatatatataggtgtcagaaagcctttgtcaaagcattggagcaaagatttaatagggagcgacctcacctatccgagcttggcgcttgcttcctcgagcaccaagccgatttccagatatattctgagtactgcaataaccacccaaatgcctgcgtcgagctgtcccggctcacaaaactttctaagtacgtctatttttttgaggcatgcagactgctgcagaagatgatcgatatatccctcgacggattcctcttaacaccagtccaaaagatatgtaagtacccgctccagctggcagagctgttaaagtacactcatccccagcatcgggattttaaagacgtggaagccgcgctacacgcaatgaaaaacgtggcccagctcatcaacgaaaggaaaaggagacttgagaatatcgacaagatcgcgcagtggcagtcatccatcgaggattgggagggtgaggatctgctggttaggtcttctgagcttatttactcaggggaacttacacgcgtcactcaaccacaggctaaatcacaacagcgtatgttttttctctttgatcatcaactgatttactgcaagaaagacctcctcagaagggacgtgctttattacaagggcaggctcgacatggacggcctggaggtcgtggacctcgaagatggcaaggatagggacctccacgtcagcatcaaaaatgctttccgcttgcaccggggcgcaaccggcgactcccatctgctgtgtacacggaagccggagcagaaacagaggtggctgaaggcgtttgctagggagcgggagcaggtgcagctcgatcaggagaccgggtttagcatcaccgagctccagcgcaagcaagccatgctaaatgcctcaaaacagcaggttaccgggaagcccaaagggcgaagaactgccgccccacctcccaggcttccgggaccataccccgctgacataatccccttttccgagccgcagagccaagcatcctag

SEQ ID NO: 226499 - DNA, 2013 bp, Artificial Sequence
  derived and/or modified sequence
atgccctgggaggagcctgctggggagaagcccagctgcagccacagccagaaggccttccacatggagcccgcccagaagccctgcttcaccacagacatggtgacctgggccctgctgtgcatctctgctgagaccgtgcggggggaggcccccagccagccccggggcatcccccacaggagccctgtgtctgtggatgacctgtggctggagaagacccagaggaagaagctgcagaagcaggcccacgtggagcggcggctgcacatcggggctgtgcacaaggatggagtgaagtgctggaggaagaccatcatcaccagccctgagagcctgaacctgcccaggaggagccaccccctgagccagagcgcccccaccggcctgaaccacatgggctggccagagcacaccccaggcacagccatgccagatggagccctggacacagctgtgtgtgctgatgaggtgggcagcgaggaggacctgtatgatgacctgcacagcagcagccaccactacagccaccctgggggcggcggggagcagctggccatcaatgagctgatcagtgatggctctgtggtgtgtgccgaggccctgtgggaccacgtgaccatggatgaccaggagctgggcttcaaggctggagatgtgattgaggtgatggatgccaccaaccgggagtggtggtggggccgggtggctgatggagagggctggttccctgccagctttgtgcggctgcgggtgaaccaggatgagccagcagatgatgatgcccccctggccggcaacagcggggctgaagatggcggcgctgaggcccagagcagcaaggaccagatgaggaccaacgtcatcaatgagatcctgagcacagagcgggactacatcaagcacctgcgggacatctgtgagggctacgtgcggcagtgcaggaagagagctgacatgttcagcgaggagcagctgcggaccatcttcggcaacatcgaggacatctaccgctgccagaaggcctttgtgaaggccctggagcagcgcttcaaccgggagcggccccacctgtctgagctgggcgcctgcttcctggagcaccaggccgacttccagatctacagcgagtactgcaacaaccaccccaatgcctgtgtggagctgagccggctgaccaagctgagcaaatatgtgtacttctttgaggcctgccgcctgctgcagaagatgattgacatcagcctggatggcttcctgctgacccctgtgcagaagatctgcaagtaccccctgcagctggccgagctgctgaagtacacccacccccagcaccgggacttcaaggatgtggaggccgccctgcacgccatgaagaatgtggcccagctgatcaatgaaaggaagaggcggctggagaacatcgacaagatcgcccagtggcagagcagcattgaggactgggagggggaggacctgctggtgcgcagcagcgagctgatctacagcggggagctgaccagggtgacccagccccaggccaagagccagcagaggatgttcttcctgtttgaccaccagctgatctactgcaagaaggacctgctgcggagagatgtgctgtactacaagggccgcctggacatggatggcctggaggtggtggacctggaggatggcaaggaccgggacctgcacgtgtccatcaagaatgccttccggctgcacagaggagccaccggggacagccacctgctgtgcaccaggaagccagagcagaagcagcgctggctgaaggcctttgcccgggagcgggagcaggtgcagctggaccaggagaccggcttcagcatcacagagctgcagaggaagcaggccatgctgaatgccagcaagcagcaggtgacaggcaagcccaagggccgcaggacagctgcccccccaccccggctgcccggcccctacccagctgacatcatccccttcagcgagccccagagccaggccagctag

SEQ ID NO: 226500 - DNA, 579 bp, Artificial Sequence
  derived and/or modified sequence
atgccctgggaggagcctgctggggagaagcccagctgcagccacagccagaaggccttccacatggagcccgcccagaagccctgcttcaccacagacatggtgacctgggccctgctgtgcatctctgctgagaccgtgcggggggaggcccccagccagccccggggcatcccccacaggagccctgtgtctgtggatgacctgtggctggagaagacccagaggaagaagctgcagaagcaggcccacgtggagcggcggctgcacatcggggctgtgcacaaggatggagtgaagtgctggaggaagaccatcatcaccagccctgagagcctgaacctgcccaggaggagccaccccctgagccagagcgcccccaccggcctgaaccacatgggctggccagagcacaccccaggcacagctgtgggccggccctgctacctgacccggcagaagcacccagccctgcccagcaaccggccccagcagcaggtgctggtgctggccgagcccaggaggaagcccagcaccttctggcacagcatcagccggctggcccccttcaggaagtag

SEQ ID NO: 226501 - DNA, 2013 bp, Artificial Sequence
  derived and/or modified sequence
atgccctgggaggagcccgccggcgagaagcccagctgcagccactctcagaaagccttccacatggagcccgcacaaaaaccgtgcttcacaacggacatggtgacctgggccttattatgcattagtgcagagaccgttaggggagaagctccttctcagccccgcggcatcccccaccgatcgccagtgagcgtggacgacctctggttagagaaaacacaaagaaaaaagctgcagaagcaggctcacgtggagagaaggcttcacattggcgccgtgcacaaggacggggtcaaatgttggcgaaagactattatcacttcaccagagtcacttaatttgccgagacggagtcatccattatcccagtctgctcctactggcctaaaccatatggggtggcctgagcatacccccggaaccgccatgccagatggtgcccttgataccgcagtttgcgcagatgaggtcgggagtgaggaagacctctacgatgacctccattctagctctcatcactattcccatccggggggggggggcgaacaacttgcaataaatgagctgatcagcgatggcagcgtggtttgcgccgaggcactgtgggaccacgtgacaatggatgaccaagagctggggtttaaggctggcgacgtgatagaggttatggacgcaacaaatagggaatggtggtggggaagggtagccgatggagagggttggttccccgcgagcttcgtacggctcagagtcaaccaggatgaacctgcagacgatgatgctcctctcgctggcaattccggagctgaggatggaggtgccgaggcccagagtagcaaggaccagatgcggactaatgtgattaatgaaatcctatccaccgaacgggattacataaaacatttgcgggacatttgcgaaggctacgtccgtcagtgcaggaaaagggcagacatgttctcagaggagcagttgcgtaccatttttggtaatatagaggacatatataggtgtcagaaagcctttgttaaggcgttggaacagcgtttcaacagagagagacctcatctgtccgaactgggggcatgcttcctcgaacaccaggctgactttcagatctattccgaatattgtaataatcacccaaacgcctgcgtcgaattaagccgcctgaccaaactttctaagtacgtgtactttttcgaagcctgccgtcttttgcaaaaaatgatcgatatttcgctcgatggcttcctgctaactcccgtgcaaaaaatttgcaagtaccccttacaactcgccgagcttcttaaatatactcacccacaacatagagatttcaaggatgttgaggcggccttacacgccatgaaaaacgtcgcacaactcattaacgaaagaaagagaaggttagaaaatatcgataaaatcgctcaatggcagagttcaatcgaggactgggaaggcgaggatctgctcgtccggagcagcgaacttatctattccggtgaacttactcgtgtgacgcaaccgcaggcgaagagccaacagcgcatgtttttcttgttcgaccaccagcttatatactgcaaaaaggacctgcttcgtcgggacgtcttatactataagggacgactggatatggacgggttagaggttgtagatctagaagatgggaaagatagagatctgcacgtcagtattaagaacgcattcaggttgcaccggggcgccacaggcgacagccacttgttatgtacccgaaaaccagagcagaagcagcgttggctcaaagcgttcgcaagggagcgcgaacaggtgcagctggatcaggagacaggcttttcaattaccgagctgcagcgcaaacaggctatgctgaatgcatcaaagcagcaggtcacaggcaaacctaaagggcggcgcacagcggctccgcccccccgcttgcccgggccttatccggccgacattattccttttagcgaaccgcaaagccaagcttcttag

SEQ ID NO: 226502 - DNA, 579 bp, Artificial Sequence
  derived and/or modified sequence
atgccctgggaggagcccgccggcgagaagcccagctgcagccactctcagaaggcatttcatatggaaccagcccagaaaccctgttttaccaccgacatggtgacctgggctctcctctgtatctcagcggagaccgtgaggggcgaagcccctagccagcctagaggcatcccgcaccgatctccagtgtctgttgatgatctatggttggaaaagacgcaacgaaagaagcttcagaaacaagcacacgtggagcgacggcttcatatcggcgcagtccacaaagacggagttaagtgctggcggaagacaattatcacatcaccagaaagcctgaatctgccccgtaggagccatcctctgtctcagtccgccccgacgggactcaatcacatgggttggcctgagcacactccaggcactgccgtgggacgtccttgctacctcacgaggcagaagcaccctgccctccctagtaacagaccacagcagcaggtgctggttctcgcggagccccgcaggaaaccatcaaccttctggcattctatctcacgcctcgccccctttaggaaatag

SEQ ID NO: 226503 - DNA, 2013 bp, Artificial Sequence
  derived and/or modified sequence
atgccctgggaggagcccgccggcgagaagcccagctgcagccactcacaaaaagccttccacatggagccagctcaaaagccatgtttcaccactgacatggtaacttgggccttgctttgtatttctgccgagacggtgagaggagaagccccgagccagcctagaggtataccgcaccgttcccctgtgagcgtggatgatctttggcttgagaaaacccaaaggaaaaaactgcagaagcaggcacacgtcgagagaaggctgcatatcggagccgtgcacaaggacggggttaaatgctggcggaaaactataatcacgtctcccgagagcctcaacctgcctcgccgttcacaccccttaagccagagcgcacctacggggctgaatcatatggggtggcctgaacacactcctggaactgcaatgccagatggcgctcttgatacagccgtgtgcgcagatgaagtggggagtgaagaagatctttatgatgatctgcattcctcctctcaccattattcccaccctggtggcggcggggaacagctggcaataaatgaactgatcagcgatgggagcgttgtgtgtgcggaggcactatgggaccatgtgaccatggatgatcaggagcttggttttaaggcaggagacgtgatcgaagtgatggatgccacaaatcgggaatggtggtgggggagagttgcagatggcgaggggtggtttccggcttctttcgtgagactgagggtgaatcaagatgaaccagccgacgatgacgcacccttagcgggcaactccggcgctgaagacgggggcgccgaggcccagtcatccaaagaccagatgcgtacaaacgtcatcaatgagattctttctactgaaagagattacatcaagcacttacgcgacatctgcgaaggctacgtcagacaatgtaggaaacgggcggacatgttctccgaagagcagctgaggaccattttcggaaatatcgaagatatctacagatgtcaaaaggctttcgtaaaggcactagagcagcgcttcaatagggagcgtccccacttaagcgagttaggggcctgtttcttggagcaccaagcagactttcaaatctatagtgagtactgcaacaaccacccaaacgcatgcgtcgaattgtcccggcttaccaaactgagcaaatatgtttattttttcgaagcttgtcgtctgctgcagaagatgatcgatatttcactagatggcttcctcctgacacctgtacagaagatctgcaagtacccgctccagcttgcagaactcttaaagtatacccatccccagcatcgggactttaaggatgtggaagcagctctgcacgcaatgaaaaacgtggcccagcttatcaacgagcggaagaggagactggaaaacatcgataaaatcgcccagtggcagtcgtcaattgaggattgggagggggaagacctgctggtgcggtctagtgaactcatctactctggggagctgacccgtgtcacacaaccccaggccaagtcccagcagaggatgttctttctctttgaccaccagcttatttactgcaagaaggatcttctgaggcgcgatgtgctgtattataaaggtcggttggacatggacggtctagaggttgtagacctcgaggacggtaaggatagagacctccatgtgtccataaagaacgctttcaggctgcaccgcggggcaaccggcgacagccacctactctgcactcgtaaacctgagcaaaaacagcggtggttaaaagcctttgcaagggaaagagagcaagtacagctcgatcaggagactggtttcagcattacggagctgcagaggaagcaggccatgttgaatgctagtaagcagcaggtcacaggaaagccgaaggggagacggacagctgcaccacccccccggctgcctgggccctaccctgccgatatcattcctttctccgaacctcaatcccaggctagctag

SEQ ID NO: 226504 - DNA, 2013 bp, Artificial Sequence
  derived and/or modified sequence
atgccttgggaggagcccgcaggcgaaaaaccgtcatgcagtcatagccagaaggcctttcacatggagcccgctcagaaaccctgctttacaaccgacatggttacctgggccctgttgtgcatcagcgctgagacggtgcggggtgaagcaccctcccagcccaggggtatacctcatagatctcccgtgtccgtggacgatctgtggctcgaaaagacacagaggaaaaaattgcagaaacaggcccacgttgaacgacgcctgcacatcggtgcggtgcacaaggacggcgtgaaatgctggcgcaagactatcatcacctcacccgaaagtctgaatctacccagaagatcccatcctctctctcagagcgccccaacaggactgaaccacatgggctggcccgagcatacacctggtactgcgatgcctgacggagctctggataccgccgtatgcgctgatgaagtaggtagcgaggaggatctgtatgacgatcttcactctagtagccatcactattcgcaccccggtggaggcggtgagcagctcgcaattaacgagctgattagcgacggcagcgtggtctgtgctgaggccctgtgggaccatgtcactatggacgaccaggagctcggttttaaggccggagacgttatcgaggtgatggatgcgaccaatcgggagtggtggtgggggagggtggctgacggggaaggttggtttcccgcatcattcgtgcggcttagagttaaccaggatgagcccgcagacgatgatgcacccctcgcaggtaacagcggggctgaggatggcggagctgaagcccagtcttccaaagaccaaatgagaacgaatgtgattaatgagatcctctctaccgaacgtgactatattaagcatctcagagacatatgcgaaggctatgttcgccaatgccgcaagcgagcagatatgttcagtgaggagcaactgcggacaatcttcgggaacattgaggatatttataggtgtcagaaggccttcgtcaaagcactggaacagcggtttaaccgggaacggcctcacttatccgagctcggagcctgtttcctggaacaccaggctgattttcagatttacagcgagtactgcaataatcatcccaacgcttgtgtggaactgtcccgtctgactaagctcagcaagtacgtttattttttcgaagcgtgccgcttgctacaaaagatgatagacattagtctcgatggtttcttgctgacacccgtacagaaaatctgtaagtatcccctacagctcgctgagctgctgaagtacacccaccctcagcaccgcgattttaaggatgtcgaggcagcgctacatgcaatgaagaatgtcgcacagctcattaatgaaaggaaacgaaggttggagaatatcgacaaaattgcgcaatggcagagctccatcgaggactgggagggcgaagatctgctggtgcggagtagcgagttaatatactccggcgagctgacacgagtcacccagccccaggcaaaatctcagcagcgtatgttttttttgttcgaccaccagctcatttattgtaagaaggatttattgcgcagggacgtgttgtactacaaaggcaggcttgatatggacggcctcgaggtggtcgacctggaggatggcaaagatcgtgacctgcatgtgtcaattaagaacgctttccggctccacagaggcgcaacaggcgacagtcatttactttgtacaaggaaacccgaacagaaacagcgatggctgaaagccttcgctcgcgagcgcgaacaggtgcagctcgaccaagaaacgggattctccataacggaactgcagaggaaacaagccatgcttaacgccagtaaacagcaggtgaccggcaaacctaagggtcgccgtacagccgctcccccaccacgccttccaggcccataccccgctgacataataccattctcagaaccccagtcccaggctagctag

SEQ ID NO: 226505 - DNA, 579 bp, Artificial Sequence
  derived and/or modified sequence
atgccctgggaggagcccgcaggcgaaaagccgtcttgttcgcactctcagaaggcttttcatatggagccagcacagaaaccttgcttcacaacagacatggttacatgggcactgctgtgcatttccgccgaaacagtaaggggggaggcaccgtcacagcctcgaggaatccctcaccgctctccagtgtccgtggacgacctctggctggaaaagacccaacggaagaagttgcaaaaacaagctcacgttgaaaggcgcttgcacatcggtgctgtacataaggatggcgtcaagtgttggcgcaagactataattacgtcacccgagtccttgaatttgccccgacggagccaccccctttcccaatccgccccaaccggcctgaaccacatgggttggccggagcataccccgggtacagccgtcggacggccttgctatctgacccgtcagaaacatcccgcacttccttcgaatcggccacagcagcaggtactcgtactggctgaaccgcgacggaagccctcgacattctggcattccatctcccgcctcgccccatttaggaaatag

SEQ ID NO: 226506 - DNA, 2013 bp, Artificial Sequence
  derived and/or modified sequence
atgccctgggaggaacctgccggtgagaaacctagctgtagccattctcagaaggctttccacatggagcccgctcagaagccttgcttcactaccgacatggtgacctgggcgctgctgtgtataagtgctgagacagttcggggtgaggcaccctctcagccacggggaatcccgcatagatctccagtaagcgtcgacgacctatggcttgagaaaacccagcggaagaaacttcaaaaacaggcccacgtcgaacgcagattgcacataggggctgtgcacaaagacggcgtgaagtgttggaggaagacaatcattacatctccagagtccctcaatctgcctagaagatctcacccactgtcacagagtgccccaacaggtttaaaccatatggggtggccggagcatacccccggaacggctatgccagacggggctttagacaccgccgtgtgcgccgatgaggtgggcagcgaggaagacctatacgatgacctgcattcaagttcccatcactacagtcatcccggaggcggtggcgagcaactagcaataaatgagctgatctcagatgggagtgtggtctgtgccgaagcgttgtgggaccacgtgactatggatgaccaggagctaggtttcaaggcaggagatgttatcgaagtcatggatgctaccaacagagaatggtggtggggacgcgtggcagacggcgaaggttggttcccagcttcatttgtgcggttgagggtcaatcaagacgagccggcagacgatgatgctcctctggcaggcaacagcggcgctgaagacggcggagctgaggcacagagttccaaggaccaaatgagaaccaatgtcattaacgagattctttctaccgagcgagattatataaaacatctacgtgacatatgtgaaggctacgttcggcagtgtaggaagagagccgatatgttttctgaggaacagttgcgcaccatatttggcaatattgaagatatttaccgatgccagaaagcttttgtgaaggctctcgaacagagattcaaccgagagcgtcctcacctgtctgagctgggagcatgcttcctagagcaccaggccgattttcagatttattcggagtactgcaacaaccatcctaacgcttgtgtggagctctctcggcttaccaagctgagtaaatacgtgtatttttttgaagcctgtcgtttgctccagaagatgatcgacatctcactggacggcttcctcctgacccccgtgcagaaaatttgtaagtaccccctccaattggccgagctgcttaaatatacccatccacagcatcgggactttaaagacgtggaagccgctctgcacgcgatgaagaacgtggcacaacttattaacgagagaaaaagacgactggagaatatagacaaaattgcccagtggcagtcgagcatagaagactgggagggagaagacttgttagtgcgcagtagtgagctgatatacagtggagagctgacacgggtgacacagccccaggccaaatcacaacaaaggatgttttttcttttcgaccatcagttaatctactgtaagaaagatcttcttaggagagacgtactgtattacaaagggaggttggacatggatggccttgaagtggtggatctggaggacgggaaagatcgagacttgcacgtatccattaagaatgctttcagacttcacagaggtgccaccggcgattctcatctcctgtgcactagaaaacccgaacagaagcagcgatggttgaaagcgttcgctcgcgaacgcgagcaagtgcaactcgaccaggagacggggttcagtatcaccgaactgcagaggaagcaggctatgctcaacgctagcaaacagcaggtcaccgggaaaccaaaaggacgtaggactgccgctccacccccacgcctgccgggaccttaccccgctgacataatcccattctcggaacctcagagccaagccagttag

SEQ ID NO: 226507 - DNA, 2013 bp, Artificial Sequence
  derived and/or modified sequence
atgccctgggaggagcccgccggcgagaagcccagctgcagccacagccagaaggccttccacatggagcccgcccagaagccctgcttcaccaccgacatggtgacctgggccctgctgtgcatcagcgccgagaccgtgagaggcgaggcccccagccagcccagaggcatcccccacagaagccccgtgagcgtggacgacctgtggctggagaagacccagagaaagaagctgcagaagcaggcccacgtggagagaagactgcacatcggcgccgtgcacaaggacggcgtgaagtgctggagaaagaccatcatcaccagccccgagagcctgaacctgcccagaagaagccaccccctgagccagagcgcccccaccggcctgaaccacatgggctggcccgagcacacccccggcaccgccatgcccgacggcgccctggacaccgccgtgtgcgccgacgaggtgggcagcgaggaggacctgtacgacgacctgcacagcagcagccaccactacagccaccccggcggcggcggcgagcagctggccatcaacgagctgatcagcgacggcagcgtggtgtgcgccgaggccctgtgggaccacgtgaccatggacgaccaggagctgggcttcaaggccggcgacgtgatcgaggtgatggacgccaccaacagagagtggtggtggggcagagtggccgacggcgagggctggttccccgccagcttcgtgagactgagagtgaaccaggacgagcccgccgacgacgacgcccccctggccggcaacagcggcgccgaggacggcggcgccgaggcccagagcagcaaggaccagatgagaaccaacgtgatcaacgagatcctgagcaccgagagagactacatcaagcacctgagagacatctgcgagggctacgtgagacagtgcagaaagagagccgacatgttcagcgaggagcagctgagaaccatcttcggcaacatcgaggacatctacagatgccagaaggccttcgtgaaggccctggagcagagattcaacagagagagaccccacctgagcgagctgggcgcctgcttcctggagcaccaggccgacttccagatctacagcgagtactgcaacaaccaccccaacgcctgcgtggagctgagcagactgaccaagctgagcaagtacgtgtacttcttcgaggcctgcagactgctgcagaagatgatcgacatcagcctggacggcttcctgctgacccccgtgcagaagatctgcaagtaccccctgcagctggccgagctgctgaagtacacccacccccagcacagagacttcaaggacgtggaggccgccctgcacgccatgaagaacgtggcccagctgatcaacgagagaaagagaagactggagaacatcgacaagatcgcccagtggcagagcagcatcgaggactgggagggcgaggacctgctggtgagaagcagcgagctgatctacagcggcgagctgaccagagtgacccagccccaggccaagagccagcagagaatgttcttcctgttcgaccaccagctgatctactgcaagaaggacctgctgagaagagacgtgctgtactacaagggcagactggacatggacggcctggaggtggtggacctggaggacggcaaggacagagacctgcacgtgagcatcaagaacgccttcagactgcacagaggcgccaccggcgacagccacctgctgtgcaccagaaagcccgagcagaagcagagatggctgaaggccttcgccagagagagagagcaggtgcagctggaccaggagaccggcttcagcatcaccgagctgcagagaaagcaggccatgctgaacgccagcaagcagcaggtgaccggcaagcccaagggcagaagaaccgccgcccccccccccagactgcccggcccctaccccgccgacatcatccccttcagcgagccccagagccaggccagctag

SEQ ID NO: 226508 - DNA, 579 bp, Artificial Sequence
  derived and/or modified sequence
atgccctgggaggagcccgccggcgagaagcccagctgcagccacagccagaaggccttccacatggagcccgcccagaagccctgcttcaccaccgacatggtgacctgggccctgctgtgcatcagcgccgagaccgtgagaggcgaggcccccagccagcccagaggcatcccccacagaagccccgtgagcgtggacgacctgtggctggagaagacccagagaaagaagctgcagaagcaggcccacgtggagagaagactgcacatcggcgccgtgcacaaggacggcgtgaagtgctggagaaagaccatcatcaccagccccgagagcctgaacctgcccagaagaagccaccccctgagccagagcgcccccaccggcctgaaccacatgggctggcccgagcacacccccggcaccgccgtgggcagaccctgctacctgaccagacagaagcaccccgccctgcccagcaacagaccccagcagcaggtgctggtgctggccgagcccagaagaaagcccagcaccttctggcacagcatcagcagactggcccccttcagaaagtag

SEQ ID NO: 226509 - protein, 998 aa, Artificial Sequence
  derived and/or modified sequence
MAQVAMSTLPVEDEESSESRMVVTFLMSALESMCKELAKSKAEVACIAVYETDVFVVGTERGRAFVNTRKDFQKDFVKYCVEEEEKAAEMHKMKSTTQANRMSVDAVEIETLRKTVEDYFCFCYGKALGKSTVVPVPYEKMLRDQSAVVVQGLPEGVAFKHPENYDLATLKWILENKAGISFIIKRPFLEPKKHVGGRVMVTDADRSILSPGGSCGPIKVKTEPTEDSGISLEMAAVTVKEESEDPDYYQYNIQAGPSETDDVDEKQPLSKPLQGSHHSSEGNEGTEMEVPAEDSTQHVPSETSEDPEVEVTIEDDDYSPPSKRPKANELPQPPVPEPANAGKRKVREFNFEKWNARITDLRKQVEELFERKYAQAIKAKGPVTIPYPLFQSHVEDLYVEGLPEGIPFRRPSTYGIPRLERILLAKERIRFVIKKHELLNSTREDLQLDKPASGVKEEWYARITKLRKMVDQLFCKKFAEALGSTEAKAVPYQKFEAHPNDLYVEGLPENIPFRSPSWYGIPRLEKIIQVGNRIKFVIKRPELLTHSTTEVTQPRTNTPVKEDWNVRITKLRKQVEEIFNLKFAQALGLTEAVKVPYPVFESNPEFLYVEGLPEGIPFRSPTWFGIPRLERIVRGSNKIKFVVKKPELVISYLPPGMASKINTKALQSPKRPRSPGSNSKVPEIEVTVEGPNNNNPQTSAVRTPTQTNGSNVPFKPRGREFSFEAWNAKITDLKQKVENLFNEKCGEALGLKQAVKVPFALFESFPEDFYVEGLPEGVPFRRPSTFGIPRLEKILRNKAKIKFIIKKPEMFETAIKESTSSKSPPRKINSSPNVNTTASGVEDLNIIQVTIPDDDNERLSKVEKARQLREQVNDLFSRKFGEAIGMGFPVKVPYRKITINPGCVVVDGMPPGVSFKAPSYLEISSMRRILDSAEFIKFTVIRPFPGLVINNQLVDQSESEGPVIQESAEPSQLEVPATEEIKETDGSSQIKQEPDPTW

SEQ ID NO: 226510 - protein, 993 aa, Artificial Sequence
  derived and/or modified sequence
MSTLPVEDEESSESRMVVTFLMSALESMCKELAKSKAEVACIAVYETDVFVVGTERGRAFVNTRKDFQKDFVKYCVEEEEKAAEMHKMKSTTQANRMSVDAVEIETLRKTVEDYFCFCYGKALGKSTVVPVPYEKMLRDQSAVVVQGLPEGVAFKHPENYDLATLKWILENKAGISFIIKRPFLEPKKHVGGRVMVTDADRSILSPGGSCGPIKVKTEPTEDSGISLEMAAVTVKEESEDPDYYQYNIQAGPSETDDVDEKQPLSKPLQGSHHSSEGNEGTEMEVPAEDSTQHVPSETSEDPEVEVTIEDDDYSPPSKRPKANELPQPPVPEPANAGKRKVREFNFEKWNARITDLRKQVEELFERKYAQAIKAKGPVTIPYPLFQSHVEDLYVEGLPEGIPFRRPSTYGIPRLERILLAKERIRFVIKKHELLNSTREDLQLDKPASGVKEEWYARITKLRKMVDQLFCKKFAEALGSTEAKAVPYQKFEAHPNDLYVEGLPENIPFRSPSWYGIPRLEKIIQVGNRIKFVIKRPELLTHSTTEVTQPRTNTPVKEDWNVRITKLRKQVEEIFNLKFAQALGLTEAVKVPYPVFESNPEFLYVEGLPEGIPFRSPTWFGIPRLERIVRGSNKIKFVVKKPELVISYLPPGMASKINTKALQSPKRPRSPGSNSKVPEIEVTVEGPNNNNPQTSAVRTPTQTNGSNVPFKPRGREFSFEAWNAKITDLKQKVENLFNEKCGEALGLKQAVKVPFALFESFPEDFYVEGLPEGVPFRRPSTFGIPRLEKILRNKAKIKFIIKKPEMFETAIKESTSSKSPPRKINSSPNVNTTASGVEDLNIIQVTIPDDDNERLSKVEKARQLREQVNDLFSRKFGEAIGMGFPVKVPYRKITINPGCVVVDGMPPGVSFKAPSYLEISSMRRILDSAEFIKFTVIRPFPGLVINNQLVDQSESEGPVIQESAEPSQLEVPATEEIKETDGSSQIKQEPDPTW

SEQ ID NO: 226511 - DNA, 2997 bp, Artificial Sequence
  derived and/or modified sequence
atggcacaagtggctatgtcaacgctccctgtagaagacgaagaatctagcgagagtaggatggtggtgacctttcttatgtctgcccttgaaagtatgtgtaaagaactggccaagagtaaagccgaagtggcgtgtatagccgtgtatgagacagacgtgttcgtggtggggactgagcggggtcgcgccttcgttaacacacgaaaggatttccagaaggactttgtgaaatactgcgtcgaagaagaggagaaagcggcagagatgcacaagatgaagagcactacacaggccaataggatgtcagttgatgccgtcgaaatagagacattaaggaagacagtcgaagactatttctgcttttgttatggaaaggcactggggaagtctacggtcgtgcctgtaccttacgagaaaatgctgcgggatcaatcagccgttgtggttcagggcctgcctgagggggtggcattcaagcacccagagaactacgatctggctaccttgaagtggatcctggaaaataaagccggcatttcctttattataaagcggccgtttctcgagcctaagaaacacgtgggaggaagagtaatggtgactgatgctgaccggagtattctgagtcccggaggctcatgcggccccatcaaagtcaaaaccgagcctacagaggactcagggattagtctcgagatggccgcagtaactgtcaaggaggagtcggaagacccggattattatcaatataatatccaagcaggcccgagcgagacagacgatgttgatgagaagcagcctctgtccaagccattacagggctcccaccatagttcggaaggaaacgagggaacggagatggaggtccctgccgaggactccacacagcacgtcccgtcggaaacgtctgaagaccctgaggtcgaggtgaccattgaggatgatgactactcccctccatctaagcggcctaaggcgaacgagttacctcagccaccagtaccagagccagctaacgccgggaagagaaaggtgcgtgagttcaatttcgaaaaatggaacgcgaggatcaccgatttgcgtaagcaggttgaggagctgttcgagagaaaatatgcccaggcaatcaaagcaaagggaccagtcaccataccttacccgctctttcagtcacacgtggaagatctgtatgttgagggtctgcccgaaggcataccatttaggagaccctccacctacggaatccctcgactggagcgaattcttctggccaaagaaagaattagattcgtgataaaaaagcacgagctgcttaatagcaccagggaagaccttcagctggacaaaccggcttcaggtgttaaggaggaatggtacgcacggatcactaaactgagaaagatggtggatcagttattctgcaaaaaattcgctgaagcactggggtcaaccgaggcaaaggccgtgccataccaaaagtttgaggctcaccctaatgacctctacgttgagggcctccccgagaatattccctttcgatctccgagctggtacggtattccacgcctggaaaagatcattcaggtgggcaaccgcataaagtttgtgatcaaacgtcctgagctgctgacacactctaccaccgaagtgacgcagccgcgtacaaatacccccgtgaaggaggattggaatgttaggatcacgaagctcagaaaacaagtggaagagatcttcaatctgaaatttgctcaggctctgggattgaccgaggcagttaaagtgccctaccccgtgtttgagtctaatccggaattcctgtatgtagaggggctccctgagggcattcctttcaggagccccacctggtttggcataccccggttggaacgtatcgtgagaggcagcaataagattaaattcgtggtcaaaaaacccgaactggtaatcagctacctacctccagggatggcatctaagatcaacactaaagccttgcagtcgcccaagaggcccagatcacccgggagcaatagcaaagtccctgaaattgaggtaacggtcgaagggcccaataataataatcctcaaaccagcgctgtccgtacccccacgcagaccaacggctccaacgttccctttaagcccagagggcgagagtttagctttgaggcctggaacgcgaagattaccgacctgaaacagaaagtcgaaaatttgttcaatgagaaatgcggggaagcactgggcttgaaacaagctgtgaaagtgccttttgccctgtttgaatcgtttcctgaagacttttacgtcgagggcttgcctgaaggggttccgttccgcaggccttctacgtttgggatcccaaggttggaaaagattctgagaaataaggcaaagattaagtttataatcaagaaaccagagatgttcgaaactgccatcaaggaatctacgtcctccaagagcccgccccggaaaattaattcgtcgcccaatgtgaacacaacagcaagcggcgtagaggacctaaatatcattcaggtcaccatcccagatgatgacaacgaaaggctgagtaaggttgaaaaagctaggcagctacgtgagcaggtcaacgatctcttctctcggaagtttggagaagcaattggcatgggctttcccgtgaaggtaccatataggaagatcactataaatcctggttgtgttgtcgtggatggtatgcccccgggcgtgtctttcaaagctccttcctatttagaaatctcaagcatgagaaggattctcgactccgctgaatttatcaaatttacggtcattagacctttcccaggtctcgtgatcaataatcagctagtcgaccagtctgagagcgagggacccgtgatccaggaaagcgccgaaccaagccagctcgaggtgcctgccacagaagagatcaaggagaccgacggtagtagccagattaagcaggaacccgatcctacatggtag

SEQ ID NO: 226512 - DNA, 2982 bp, Artificial Sequence
  derived and/or modified sequence
atgtccaccctccctgtggaggacgaggagagctccgaatcgagaatggtggtcaccttccttatgtctgccctcgagagtatgtgtaaggagctcgcgaagtctaaagccgaggtggcgtgtatcgctgtgtatgaaaccgatgttttcgtcgttggcacagagagaggacgcgcctttgtgaacacacgtaaggattttcagaaagattttgtcaagtactgcgtggaggaggaagaaaaagctgccgaaatgcacaagatgaaatctacaacccaggccaaccggatgtcagtggatgccgtggagatagagaccctgaggaagaccgtggaggactacttttgcttttgttatggaaaggctttaggaaaatccacagtggtgcccgtgccttatgagaaaatgctgagagatcagagcgcggtggtggtccaaggactccccgagggggtagccttcaagcatccagagaactacgatctcgctaccctgaaatggattctggagaacaaagcgggcatcagcttcatcatcaaaaggccttttcttgagcctaagaaacacgtaggaggtagagtgatggtaactgacgctgatagatctatcctctcgcctggaggttcctgtgggccaattaaggttaagactgagcccacagaagacagcgggatctccctggagatggcagccgtcacagtcaaggaggagagcgaagatcccgattactatcagtataatattcaagcaggtccttccgagaccgatgacgtggacgaaaagcagcctctgtctaagcccctccagggaagccatcactcctccgaagggaatgaaggcactgagatggaagtgccagccgaggactccacgcagcacgtgccaagcgagacatcagaggaccccgaggtggaagtgacgatcgaggacgacgattattcccctccctctaagaggcctaaggcaaacgagcttcctcagccaccagtccctgagccggcaaatgccgggaagcggaaagttagggagtttaacttcgaaaaatggaatgcgcggattacagatttaagaaaacaggtggaggagctttttgagcgaaagtatgcccaagccattaaggccaaggggccagtgactattccataccccctctttcagtcccacgtggaggacctgtacgtcgaaggtctgccagagggaattccttttaggcggcctagtacctacggaatccctcggcttgagcgcatccttttggccaaggagaggataagattcgttatcaagaaacatgagcttctaaattccaccagagaggacttgcaactggataaacctgcctcgggggtaaaagaggaatggtacgcacggattaccaagctccgtaagatggttgaccagctgttctgcaagaagtttgccgaggcattgggttccaccgaggcgaaagctgtgccctatcaaaagtttgaagctcaccccaacgatttgtacgtcgaaggactcccagagaacattccttttagatctcccagctggtatgggatcccccgactcgagaaaattatccaggtgggcaaccgcataaaatttgttatcaaacggcccgaattgctcacccacagcacaaccgaggtcactcagccccggacaaacactccggttaaagaggattggaatgtgcgaattactaagcttcgaaagcaggtggaagaaatttttaaccttaagttcgctcaggccttaggattaacagaagctgttaaggtcccttatcctgttttcgagtccaatcccgaatttctatatgtggaggggttgccagaggggatcccgtttagaagtcccacttggttcgggataccacggttggaacggattgtccggggctcgaacaaaattaagttcgtcgtgaaaaagcccgagttagttattagctatctgccccccgggatggcaagtaagatcaacacgaaagctctccagagccctaagcggccccggagcccaggaagcaactcaaaggtgcccgaaattgaagtgactgttgaggggccaaataacaacaaccctcaaactagtgcagtgcggacacccacgcagaccaatgggagcaatgttccgttcaaaccccgggggcgtgaatttagctttgaggcatggaacgccaaaataacggacttaaagcagaaagtcgaaaacttgttcaacgagaaatgtggtgaggcgttgggcttaaaacaggctgttaaagttccatttgctctgtttgaaagctttccggaggatttctacgtggaagggctgccagagggtgtccccttcagacggccctccacatttggcatccctcgccttgaaaagattctaaggaataaggccaagatcaagtttattattaagaaaccagaaatgtttgagaccgctattaaagagagtacaagctcaaagtcacctcctcggaagattaacagttccccgaatgtcaacacgaccgcttccggagttgaggacctgaatataatccaggtgacaattcctgatgacgacaacgaacggttgagcaaggttgagaaggctcgccaactcagggaacaggtaaacgaccttttctccaggaaattcggagaagccataggaatgggattcccggtaaaggtgccatatcgcaagattacaattaacccaggctgcgttgtggtggatggtatgcctccaggagtatccttcaaggctcctagctatttggagatctctagcatgcgtaggatattggacagcgcagagttcataaagtttaccgtgatacgcccttttccagggctggtcattaataaccagctggttgaccagagtgagtcagagggacccgtcatacaggaatccgccgagccttcccagttggaagtccccgctacagaggagataaaggagaccgatggctcctctcagatcaagcaggagccggaccccacctggtag

SEQ ID NO: 226513 - DNA, 4548 bp, Artificial Sequence
  derived and/or modified sequence
aaagaaaaaaaaaaggaggaggaggaggagggtgagagagaagctgggagagcagagaaaaggggccaccggtcgcccccccgcttccccgcacgcgctctccagccgcggccgcccgcctgccgcggtcaccccggcctctgcctctgtcccccagtgatcggatcaaggcgctgagcgaggccctgcctgcggggcggccatgcggcggtgacaggagcgcgaccgacacgcacgggcccctcgccccctctcgcctcccgtccgctcgccagctcccctcagccgaggctgctccgcggcggccgcagcccgcgcgcggcccacactcgcctcccctcggcacccccggccccggagctgcctggaggcggccgcactcggggatcatggcccaagttgcaatgtccaccctccccgttgaagatgaggagtcctcggagagcaggatggtggtgacattcctcatgtcagctctcgagtccatgtgtaaagaactggccaagtccaaagccgaagtggcctgcattgcagtgtatgaaacagacgtgtttgtcgtcggaactgaaagaggacgtgcttttgtcaataccagaaaggattttcaaaaagattttgtaaaatattgtgttgaagaagaagaaaaagctgcagagatgcataaaatgaaatctacaacccaggcaaatcggatgagtgtagatgctgtagaaattgaaacactcagaaaaacagttgaggactatttctgcttttgctatgggaaagctttaggcaaatccacagtggtacctgtaccatatgagaagatgctgcgagaccagtcggctgtggtagtgcaggggcttccggaaggtgttgcctttaaacaccccgagaactatgatcttgcaaccctgaaatggattttggagaacaaagcagggatttcattcatcattaagagaccttttttagagccaaagaagcatgtaggtggtcgtgtgatggtaacagatgctgacaggtcaatactatctccaggtggaagttgtggccccatcaaagtgaaaactgaacccacagaagattctggcatttccctggaaatggcagctgtgacagtaaaggaagaatcagaagatcctgattattatcaatataacattcaagcaggcccttctgaaactgatgatgttgatgaaaaacagcccctatcgaagcctttgcaaggaagccaccattcttcagagggcaatgaaggcacagaaatggaagtaccagcagaagattctactcaacatgtcccttcagaaacaagtgaggaccctgaagttgaggtgactattgaagatgatgattattctccaccgtctaagagaccaaaggccaatgagctaccgcagccaccagtcccggaacccgccaatgctgggaagcggaaagtgagggagttcaacttcgagaaatggaatgctcgcatcactgatctacgtaaacaagttgaagaattgtttgaaaggaaatatgctcaagccataaaagccaaaggtccggtgacgatcccgtaccctcttttccagtctcatgttgaagatctttatgtagaaggacttcctgaaggaattccttttagaaggccatctacttacggaattcctcgcctggagaggatattacttgcaaaggaaaggattcgttttgtgattaagaaacatgagcttctgaattcaacacgtgaagatttacagcttgataagccagcttcaggagtaaaggaagaatggtatgccagaatcactaaattaagaaagatggtggatcagcttttctgcaaaaaatttgcggaagccttggggagcactgaagccaaggctgtaccgtaccaaaaatttgaggcacacccgaatgatctgtacgtggaaggactgccagaaaacattcctttccgaagtccctcatggtatggaatcccaaggctggaaaaaatcattcaagtgggcaatcgaattaaatttgttattaaaagaccagaacttctgactcacagtaccactgaagttactcagccaagaacgaatacaccagtcaaagaagattggaatgtcagaattaccaagctacggaagcaagtggaagagatttttaatttgaaatttgctcaagctcttggactcaccgaggcagtaaaagtaccatatcctgtgtttgaatcaaacccggagttcttgtatgtggaaggcttgccagaggggattcccttccgaagccctacctggtttggaattccacgacttgaaaggatcgtccgcgggagtaataaaatcaagttcgttgttaaaaaacctgaactagttatttcctacttgcctcctgggatggctagtaaaataaacactaaagctttgcagtcccccaaaagaccacgaagtcctgggagtaattcaaaggttcctgaaattgaggtcaccgtggaaggccctaataacaacaatcctcaaacctcagctgttcgaaccccgacccagactaacggttctaacgttcccttcaagccacgagggagagagttttcctttgaggcctggaatgccaaaatcacggacctaaaacagaaagttgaaaatctcttcaatgagaaatgtggggaagctcttggccttaaacaagctgtgaaggtgccgttcgcgttatttgagtctttcccggaagacttttatgtggaaggcttacctgagggtgtgccattccgaagaccatcgacttttggcattccgaggctggagaagatactcagaaacaaagccaaaattaagttcatcattaaaaagcccgaaatgtttgagacggcgattaaggagagcacctcctctaagagccctcccagaaaaataaattcatcacccaatgttaatactactgcatcaggtgttgaagaccttaacatcattcaggtgacaattccagatgatgataatgaaagactctcgaaagttgaaaaagctagacagctaagagaacaagtgaatgacctctttagtcggaaatttggtgaagctattggtatgggttttcctgtgaaagttccctacaggaaaatcacaattaaccctggctgtgtggtggttgatggcatgcccccgggggtgtccttcaaagcccccagctacctggaaatcagctccatgagaaggatcttagactctgccgagtttatcaaattcacggtcattagaccatttccaggacttgtgattaataaccagctggttgatcagagtgagtcagaaggccccgtgatacaagaatcagctgaaccaagccagttggaagttccagccacagaagaaataaaagagactgatggaagctctcagatcaagcaagaaccagaccccacgtggtagacctcttccctcctaggcttaaagtatcagtggttgagaagagcttttcggacctgttactaccccaagctgtgtaatatacttgtataacagaaataccttctatacaaacctttttttctacttttagatagaaatgtctactttttcagcagttctgtgaattaaagagcagagtgactgtgggtctggaatggctggtgtacttgggaatgtactatcaggattttacagcaatgctgggaaatgacagggaaaatgacaggaatgaatctcaccagattttttatgtactcagcagagccttgagttacggtgtttattttccaatcaagtgaagatatctcctacttctcctactggaacatctcagcttctgcagtgaagaaaaattcctgtgatagttcagttctttagtttttctatttgaaaaaaaaaaatcatttaaatgatcctttgttcacggctctccttaatgactgagtgaacagttcctatctgtatatttgactaaaccttttcctaagctatctctcatggttcctatgtttttttatcataattaaaagcaaaaccatctggatcacctaacagtcagaggtcagtatctcagcgtgtgaattatagaggaaatacagagagaacctcttccacttttacttttcgtccaaataaaatgcatggtgtaccagaagttgaagatcgggttgaggattggggctagctcgatgacactaaggccccaacatcgcgggacctgctgtggcgcggattcttaggaacgctgttctagccggccccctctccaggggtcgccgtggccggcattatttcctagttcttcttgtaaccctgaggtgccagcgcggggagtgaggaggggtcagggggctaaggatgcaacctctgacgttctgcgccttcctaggagagtcttacatgtgttgagatttcacaagcaatgcgagttgtaaaataccagctctacaagaagctaggctctgtgacggcatagttttcagtagctttatcacaatattcacaatggagaattatatgacatggtagcagaaataggcccttttatgtgttgcttctattttacctcaaattgtagatatagggtaatcaataaaatccatccatgcctttcacacactaa

SEQ ID NO: 226514 - DNA, 3492 bp, Artificial Sequence
  derived and/or modified sequence
agagaaaaggggccaccggtcgcccccccgcttccccgcacgcgctctccagccgcggccgcccgcctgccgcggtcaccccggcctctgcctctgtcccccagtgatcggatcaaggcgctgagcgaggccctgcctgcggggcggccatgcggcggtgacaggagcgcgaccgacacgcacgggcccctcgccccctctcgcctcccgtccgctcgccagctcccctcagcacccccggccccggcccaagttgcaatgtccaccctccccgttgaagatgaggagtcctcggagagcaggatggtggtgacattcctcatgtcagctctcgagtccatgtgtaaagaactggccaagtccaaagccgaagtggcctgcattgcagtgtatgaaacagacgtgtttgtcgtcggaactgaaagaggacgtgcttttgtcaataccagaaaggattttcaaaaagattttgtaaaatattgtgttgaagaagaagaaaaagctgcagagatgcataaaatgaaatctacaacccaggcaaatcggatgagtgtagatgctgtagaaattgaaacactcagaaaaacagttgaggactatttctgcttttgctatgggaaagctttaggcaaatccacagtggtacctgtaccatatgagaagatgctgcgagaccagtcggctgtggtagtgcaggggcttccggaaggtgttgcctttaaacaccccgagaactatgatcttgcaaccctgaaatggattttggagaacaaagcagggatttcattcatcattaagagaccttttttagagccaaagaagcatgtaggtggtcgtgtgatggtaacagatgctgacaggtcaatactatctccaggtggaagttgtggccccatcaaagtgaaaactgaacccacagaagattctggcatttccctggaaatggcagctgtgacagtaaaggaagaatcagaagatcctgattattatcaatataacattcaagcaggcccttctgaaactgatgatgttgatgaaaaacagcccctatcgaagcctttgcaaggaagccaccattcttcagagggcaatgaaggcacagaaatggaagtaccagcagaagattctactcaacatgtcccttcagaaacaagtgaggaccctgaagttgaggtgactattgaagatgatgattattctccaccgtctaagagaccaaaggccaatgagctaccgcagccaccagtcccggaacccgccaatgctgggaagcggaaagtgagggagttcaacttcgagaaatggaatgctcgcatcactgatctacgtaaacaagttgaagaattgtttgaaaggaaatatgctcaagccataaaagccaaaggtccggtgacgatcccgtaccctcttttccagtctcatgttgaagatctttatgtagaaggacttcctgaaggaattccttttagaaggccatctacttacggaattcctcgcctggagaggatattacttgcaaaggaaaggattcgttttgtgattaagaaacatgagcttctgaattcaacacgtgaagatttacagcttgataagccagcttcaggagtaaaggaagaatggtatgccagaatcactaaattaagaaagatggtggatcagcttttctgcaaaaaatttgcggaagccttggggagcactgaagccaaggctgtaccgtaccaaaaatttgaggcacacccgaatgatctgtacgtggaaggactgccagaaaacattcctttccgaagtccctcatggtatggaatcccaaggctggaaaaaatcattcaagtgggcaatcgaattaaatttgttattaaaagaccagaacttctgactcacagtaccactgaagttactcagccaagaacgaatacaccagtcaaagaagattggaatgtcagaattaccaagctacggaagcaagtggaagagatttttaatttgaaatttgctcaagctcttggactcaccgaggcagtaaaagtaccatatcctgtgtttgaatcaaacccggagttcttgtatgtggaaggcttgccagaggggattcccttccgaagccctacctggtttggaattccacgacttgaaaggatcgtccgcgggagtaataaaatcaagttcgttgttaaaaaacctgaactagttatttcctacttgcctcctgggatggctagtaaaataaacactaaagctttgcagtcccccaaaagaccacgaagtcctgggagtaattcaaaggttcctgaaattgaggtcaccgtggaaggccctaataacaacaatcctcaaacctcagctgttcgaaccccgacccagactaacggttctaacgttcccttcaagccacgagggagagagttttcctttgaggcctggaatgccaaaatcacggacctaaaacagaaagttgaaaatctcttcaatgagaaatgtggggaagctcttggccttaaacaagctgtgaaggtgccgttcgcgttatttgagtctttcccggaagacttttatgtggaaggcttacctgagggtgtgccattccgaagaccatcgacttttggcattccgaggctggagaagatactcagaaacaaagccaaaattaagttcatcattaaaaagcccgaaatgtttgagacggcgattaaggagagcacctcctctaagagccctcccagaaaaataaattcatcacccaatgttaatactactgcatcaggtgttgaagaccttaacatcattcaggtgacaattccagatgatgataatgaaagactctcgaaagttgaaaaagctagacagctaagagaacaagtgaatgacctctttagtcggaaatttggtgaagctattggtatgggttttcctgtgaaagttccctacaggaaaatcacaattaaccctggctgtgtggtggttgatggcatgcccccgggggtgtccttcaaagcccccagctacctggaaatcagctccatgagaaggatcttagactctgccgagtttatcaaattcacggtcattagaccatttccaggacttgtgattaataaccagctggttgatcagagtgagtcagaaggccccgtgatacaagaatcagctgaaccaagccagttggaagttccagccacagaagaaataaaagagactgatggaagctctcagatcaagcaagaaccagaccccacgtggtagacctcttccctcctaggcttaaagtatcagtggttgagaagagcttttcggacctgttactaccccaagctgtgtaatatacttgtataacagaaataccttctatacaaacctttttttctacttttagatagaaatgtctactttttcagcagttctgtgaattaaagagcagagtgactgtgggtctggaatggctggtgtacttgggaatgtactatcaggattttacagcaatgctgggaaatgaca

SEQ ID NO: 226515 - DNA, 2997 bp, Artificial Sequence
  derived and/or modified sequence
atggcccaggtggccatgagcaccctgcctgtggaggatgaggagagcagcgagagcaggatggtggtgaccttcctgatgtctgccctggagagcatgtgcaaggagctggccaagagcaaggccgaggtggcctgcatcgctgtgtatgaaacagatgtgtttgtggtgggcacagagcggggccgggcctttgtgaacaccaggaaggacttccagaaggactttgtgaagtactgtgtggaggaggaggagaaggctgctgagatgcacaagatgaagagcaccacccaggccaacaggatgtctgtggatgctgtggagattgagaccctgaggaagacagtggaggactacttctgcttctgctacggcaaggccctgggcaagagcacagtggtgcctgtgccctatgagaagatgctgcgggaccagagcgctgtggtggtgcagggcctgcctgagggcgtggccttcaagcacccagaaaattatgacctggccaccctgaagtggatcctggagaacaaggccggcatctccttcatcatcaagaggcccttcctggagcccaagaagcacgtgggcggccgggtgatggtgacagatgctgacaggagcatcctgagccctgggggcagctgtggccccatcaaggtgaagacagagcccacagaggacagcggcatcagcctggagatggctgctgtgacagtgaaggaggagagcgaggaccctgactactaccagtacaacatccaggccggccccagcgagacagatgatgtggatgagaagcagcccctgagcaagcccctgcagggcagccaccacagcagcgagggcaatgaaggaacagagatggaggtgcctgctgaggacagcacccagcacgtgcccagcgagaccagtgaagatcctgaggtggaggtgaccattgaagatgatgactacagcccccccagcaagaggcccaaggccaatgagctgccccagccccctgtgcctgagcccgccaatgccggcaagaggaaggtgcgggagttcaactttgagaagtggaatgcccgcatcacagacctgaggaagcaggtggaggagctgtttgagaggaaatatgcccaggccatcaaggccaagggccctgtgaccatcccctaccccctcttccagagccacgtggaggacctgtatgtggagggcctgcctgagggcatccccttcagaagacccagcacctacggcatcccccggctggagcgcatcctgctggccaaggagcgcatccgctttgtgatcaagaagcatgagctgctgaacagcacccgggaggacctgcagctggacaagccagccagcggcgtgaaggaggagtggtacgcccgcatcaccaagctgaggaagatggtggaccagctgttctgcaagaagtttgctgaggccctgggcagcacagaggccaaggctgtgccctaccagaagtttgaggcccaccccaatgacctgtatgtggagggcctgcctgagaacatccccttccgcagccccagctggtacggcatcccccggctggagaagatcatccaggtgggcaaccgcatcaagtttgtgatcaagaggcctgagctgctgacccacagcaccacagaggtgacccagcccaggaccaacacccctgtgaaggaggactggaatgtgcgcatcaccaagctgaggaagcaggtggaggagatcttcaacctgaagtttgcccaggccctgggcctgacagaggccgtgaaggtgccctaccctgtgtttgagagcaaccctgagttcctgtatgtggagggcctgcctgagggcatccccttccgcagccccacctggtttggcatcccccggctggagcgcatcgtgcggggcagcaacaagatcaagtttgtggtgaagaagccagagctggtgatctcctacctgcccccaggcatggccagcaagatcaacaccaaggccctgcagagccccaagaggcccaggagccctggcagcaacagcaaggtgcctgagattgaggtgacagtggagggccccaacaacaacaacccccagaccagcgctgtgaggacccccacccagaccaacggcagcaatgtgcccttcaagccccggggccgggagttctcctttgaggcctggaatgccaagatcacagacctgaagcagaaggtggagaacctcttcaatgagaagtgtggggaggccctgggcctgaagcaggccgtgaaggtgccctttgccctgtttgagagcttccctgaggacttctacgtggagggcctgcctgagggcgtgcccttcagaagacccagcaccttcggcatcccccggctggagaagatcctgaggaacaaggccaagatcaagttcatcatcaagaagccagagatgtttgaaacagccatcaaggagagcaccagcagcaagagcccccccaggaagatcaacagcagccccaacgtgaacaccacagccagcggcgtggaggacctgaacatcatccaggtgaccatcccagatgatgacaatgaaaggctgagcaaggtggagaaggcccggcagctgcgggagcaggtgaatgacctcttcagcaggaagtttggagaggccatcggcatgggcttccctgtgaaggtgccctacaggaagatcaccatcaaccctggctgtgtggtggtggatggcatgcctcctggggtgtccttcaaggcccccagctacctggagatcagctccatgaggcgcatcctggacagcgctgagttcatcaagttcaccgtcatccggcccttccctggcctggtgatcaacaaccagctggtggaccagagcgagagcgagggccctgtgatccaggagagcgctgagcccagccagctggaggtgcctgccacagaggagatcaaggagacagatggcagcagccagatcaagcaggagccagaccccacctggtag

SEQ ID NO: 226516 - DNA, 2982 bp, Artificial Sequence
  derived and/or modified sequence
atgagcaccctgcctgtggaggatgaggagagcagcgagagcaggatggtggtgaccttcctgatgtctgccctggagagcatgtgcaaggagctggccaagagcaaggccgaggtggcctgcatcgctgtgtatgaaacagatgtgtttgtggtgggcacagagcggggccgggcctttgtgaacaccaggaaggacttccagaaggactttgtgaagtactgtgtggaggaggaggagaaggctgctgagatgcacaagatgaagagcaccacccaggccaacaggatgtctgtggatgctgtggagattgagaccctgaggaagacagtggaggactacttctgcttctgctacggcaaggccctgggcaagagcacagtggtgcctgtgccctatgagaagatgctgcgggaccagagcgctgtggtggtgcagggcctgcctgagggcgtggccttcaagcaccctgagaactatgacctggccaccctgaagtggatcctggagaacaaggccggcatctccttcatcatcaagaggcccttcctggagcccaagaagcacgtgggcggccgggtgatggtgacagatgctgacaggagcatcctgagccctgggggcagctgtggccccatcaaggtgaagacagagcccacagaagattctggcatcagcctggagatggctgctgtgacagtgaaggaggagagtgaagatcctgactactaccagtacaacatccaggccggccccagcgagacagatgatgtggatgagaagcagcccctgagcaagcccctgcagggcagccaccacagcagcgagggcaatgaaggaacagagatggaggtgcctgctgaggacagcacccagcacgtgcccagcgagaccagcgaggaccctgaggtggaggtgaccattgaagatgatgactacagcccccccagcaagaggcccaaggccaatgagctgccccagccccctgtgcctgagcccgccaatgctgggaagaggaaggtgcgggagttcaactttgagaagtggaatgcccgcatcacagacctgaggaagcaggtggaggagctgtttgagaggaaatatgcccaggccatcaaggccaagggccctgtgaccatcccctaccccctcttccagagccacgtggaggacctgtatgtggagggcctgcctgagggcatccccttccggcggcccagcacctacggcatcccccggctggagcgcatcctgctggccaaggagcgcatccgcttcgtcatcaagaagcatgagctgctgaacagcacccgggaggacctgcagctggacaagccagccagcggcgtgaaggaggagtggtacgcccgcatcaccaagctgaggaagatggtggaccagctgttctgcaagaagtttgctgaggccctgggcagcacagaggccaaggctgtgccctaccagaagtttgaggcccaccccaatgacctgtatgtggagggcctgcctgagaacatccccttccgcagccccagctggtacggcatcccccggctggagaagatcatccaggtgggcaaccgcatcaagtttgtgatcaagaggcctgagctgctgacccacagcaccacagaggtgacccagcccaggaccaacacccctgtgaaggaggactggaatgtgcgcatcaccaagctgaggaagcaggtggaggagatcttcaacctgaagtttgcccaggccctgggcctgacagaagctgtgaaggtgccctaccctgtgtttgagagcaaccctgagttcctgtatgtggagggcctgcctgagggcatccccttccgcagccccacctggtttggcatcccccggctggagagaattgtgcggggcagcaacaagatcaagtttgtggtgaagaagccagagctggtgatctcctacctgcccccaggcatggccagcaagatcaacaccaaggccctgcagagccccaagaggcccaggagccctggcagcaacagcaaggtgcctgagattgaggtgacagtggagggccccaacaacaacaacccccagaccagcgctgtgaggacccccacccagaccaacggcagcaatgtgcccttcaagccccggggccgggagttctcctttgaggcctggaatgccaagatcacagacctgaagcagaaggtggagaacctcttcaatgaaaaatgtggggaggccctgggcctgaagcaggccgtgaaggtgccctttgccctgtttgagagcttccctgaggacttctacgtggagggcctgcctgagggcgtgcccttccggcggcccagcaccttcggcatcccccggctggagaagatcctgaggaacaaggccaagatcaagttcatcatcaagaagccagagatgtttgaaacagccatcaaggagagcaccagcagcaagagcccccccaggaagatcaacagcagccccaacgtgaacaccacagccagcggcgtggaggacctgaacatcatccaggtgaccatcccagatgatgacaatgaaaggctgagcaaggtggagaaggcccggcagctgcgggagcaggtgaatgacctcttcagcaggaagtttggagaggccatcggcatgggcttccctgtgaaggtgccctacaggaagatcaccatcaaccctggctgtgtggtggtggatggcatgcctcctggggtgtccttcaaggcccccagctacctggagatcagctccatgaggcgcatcctggacagcgctgagttcatcaagttcaccgtcatccggcccttccctggcctggtgatcaacaaccagctggtggaccagagcgagagcgagggccctgtgatccaggagagcgctgagcccagccagctggaggtgcctgccacagaggagatcaaggagacagatggcagcagccagatcaagcaggagccagaccccacctggtag

SEQ ID NO: 226517 - DNA, 2997 bp, Artificial Sequence
  derived and/or modified sequence
atggcccaggtggccatgagcaccctgcccgtggaggacgaggagtcctccgagtcgaggatggttgtgacatttttgatgagcgctctggaaagtatgtgtaaggagctggccaagagtaaagcggaggttgcctgtattgccgtctacgagaccgacgtgttcgtcgtgggaactgagagagggagggccttcgtgaacacgcggaaggatttccaaaaggacttcgtgaagtactgtgtggaggaggaggagaaagcggcagagatgcataagatgaaatccacaacccaggccaatcgaatgagtgtggacgcagttgaaattgagaccctgcgaaagaccgtggaggactacttctgcttttgctatggaaaagccctgggcaagtcaacagtggtgccagtaccttacgagaagatgctgcgggaccaatctgccgttgtcgttcaggggctgcctgagggcgtagcctttaagcatcctgagaattacgatttggccactctgaagtggatcctcgagaataaggccggcatcagttttattattaagagacccttccttgagccgaagaaacacgtgggcggtcgcgtgatggttaccgatgccgaccgctcgatcctctccccagggggcagctgtggaccaatcaaagttaagacagaaccaaccgaagacagcggcatatcactcgagatggccgccgtgactgtgaaggaagagtccgaagacccagattactaccaatataatattcaggctgggccgtccgagaccgatgatgtcgacgagaaacagcccttgtctaagcctctgcagggttcacaccattcctcagagggaaacgaagggaccgagatggaggtccccgctgaagatagtacccagcacgtccccagtgaaacctccgaggatcccgaggttgaagttactattgaagatgacgattactcacctccttcaaagagacccaaggccaatgagcttccccagcccccagtacccgaacctgcaaacgcaggtaagcgcaaggtgagagaatttaacttcgagaaatggaacgcaagaattaccgacctgcggaagcaggttgaagagctgttcgaacggaaatatgctcaagcaataaaagccaagggtccagtaaccattccctaccccctgtttcagagccacgtggaggacctctacgttgaaggtctacctgaaggtattcccttccgaagacctagcacgtatggtattccgagactggaacggatactgctggccaaagagcggatccggttcgttatcaaaaagcatgagctgctgaactcaacccgtgaagacctgcagctcgacaagcccgccagcggcgttaaggaggagtggtatgcacggataacaaagcttcgtaaaatggttgatcaactgttttgtaagaagttcgctgaggccctggggtccacagaagctaaagccgtgccttaccagaagttcgaagctcatcccaatgacctgtatgtcgagggtcttccagagaatatcccatttagatcaccttcctggtatggaatcccccgtctcgagaagatcatccaagtgggcaaccggattaaatttgttatcaagagacccgaactcctcacccacagtactactgaagtcacacagccccgcaccaacacccccgtgaaggaggactggaacgtgcgaatcacaaaactgcgaaaacaggtcgaagaaatattcaaccttaaatttgcccaagctcttgggctcaccgaggcggtcaaggttccttacccagtctttgaaagtaatcccgaatttctgtatgtggagggtctcccggaaggaattccatttaggtcccctacatggttcggcataccgcggcttgaaagaattgtgagaggttcaaacaaaataaaatttgtggtgaagaagcccgagctcgtaataagctacctgccgccaggaatggcctctaaaattaataccaaagcacttcagagccccaagcggccgcgcagccccggctctaatagcaaagttcccgagatagaagtgaccgtagaggggcctaataacaataaccctcagacaagcgcagtgagaacccccacccaaacgaatggctcaaacgtcccgtttaagcctaggggcagagagttttctttcgaagcctggaatgcaaaaataaccgatctcaaacaaaaagttgaaaatctgttcaacgaaaaatgtggggaagctttaggcttaaagcaggccgtcaaagtaccgttcgctctcttcgagtccttccccgaagatttctatgtggagggactaccagaaggtgttccattcaggcgcccaagcacttttgggattcctaggctggagaagatactgcggaacaaagccaaaataaagtttatcattaaaaagcctgaaatgttcgagaccgcaatcaaagagtctacatcttccaaatctccgccccggaagattaactcctcgccaaacgttaacactacggcctccggcgtagaggacctgaacatcatacaggttacaatcccagacgatgacaacgagagactatcaaaggttgagaaggcccgccagctgcgggagcaggtgaacgatctgttttcccgaaagtttggagaagccatcgggatgggcttccccgttaaggtcccctacagaaagatcactatcaatccaggatgcgtggttgttgacgggatgcccccgggagtgtcattcaaggctccatcctatctagagatttccagcatgagacggatcctcgacagtgccgagttcataaagtttaccgttatccgccctttccctggattagtcattaataaccagctggtggaccagagcgagagcgaagggcccgtgatccaggagagcgcagaacctagccaattggaagtgcctgctactgaagagatcaaggagactgatggcagctcacagattaagcaggaacctgaccccacctggtag

SEQ ID NO: 226518 - DNA, 2982 bp, Artificial Sequence
  derived and/or modified sequence
atgagcaccctgcccgtggaggacgaggagagcagcgagagccggatggtggtgactttcttgatgagcgcgctggaatccatgtgcaaggagttagctaagagcaaggctgaggtggcttgcatagctgtctatgaaactgatgtgtttgtcgtcggaacagaaagggggagagctttcgtgaatacgcgaaaggacttccagaaagattttgttaagtactgcgttgaggaggaggaaaaggctgccgagatgcataagatgaagtcaactacgcaggccaaccggatgtccgtggacgcagtggagattgagacccttaggaagacggtggaggattacttctgcttttgctatggcaaagcccttggtaagtctaccgtagttccagtcccgtatgagaaaatgctgagggaccaatccgcggtggtggttcaggggctccctgagggggtggcgttcaagcacccagagaattatgacctcgctaccttgaagtggatcctcgagaataaggcaggaatatcattcatcatcaagagacccttcctggaacctaagaaacatgtaggagggcgcgtgatggtgaccgatgcggaccggtctattctatccccaggaggctcctgtggcccgatcaaagtcaagacggaacctaccgaagattccggcatcagcctggagatggccgctgtgaccgtgaaggaagaatccgaggaccccgattattaccagtataatatacaagctggaccctctgagaccgatgatgtcgacgagaagcagccactcagtaaacctctccagggatcccatcatagctctgaaggaaacgagggtacagaaatggaagttccagccgaagattcaactcaacacgttccatctgagacaagcgaagaccctgaagtcgaggtcacaattgaggacgatgactactccccgccttccaagcgtcctaaagcaaatgagctgccccaaccccctgtgccagagccagcaaacgctggcaaacgaaaggtgagagagttcaattttgaaaaatggaacgccagaatcacagatctcagaaaacaggtggaggagctgtttgagcggaagtacgcacaggcaataaaggccaaaggccccgtcactataccctatcctctattccaaagtcacgtggaggacttgtatgtggagggacttcccgaaggaatcccattccgaagacccagcacttatgggattccaagactcgaaagaattctcctcgccaaggagaggattcgtttcgtgattaagaagcatgaactcctcaactctacccgggaggatttacagttggataagccagcctcaggagtcaaggaggaatggtatgcgcgcattacgaaactcaggaagatggtggaccaactgttttgcaagaagttcgccgaggcccttggttctaccgaagctaaggctgttccgtaccagaagtttgaggcccacccaaacgatttgtacgttgaagggttgccagagaacattcccttcaggagccccagttggtacgggattcctcgattggagaagattatccaggtgggtaatagaatcaaattcgtcatcaaacgtcctgagttgcttactcactctactacagaggtcacacaaccgcgtacgaatacgcccgtcaaagaagattggaatgtcagaataaccaagcttcgcaaacaggtggaagaaatcttcaatctgaaatttgcccaggctttgggtctgacagaggccgtgaaggtgccctaccctgtgtttgagtcaaacccggaatttttatatgtcgaaggcttgcctgaaggaattccttttaggagcccaacgtggttcggcatcccccgcctggagagaatcgtacgtggaagcaacaagattaagttcgtcgtcaagaaacccgaactggtcatcagttatttgcctcccgggatggcctccaaaatcaacacaaaggccctgcaaagcccaaaacggccccgcagtcccgggtccaacagtaaagtgcccgaaatcgaggtgacggtggaggggccaaataataacaacccccaaacgagcgcagtgaggaccccaacgcaaactaacggcagtaacgtgccatttaaaccaagagggcgcgagtttagcttcgaagcttggaacgcgaagataacggaccttaagcagaaggtggagaacctgttcaatgagaagtgtggggaggccttagggctgaagcaagccgtgaaggtgccttttgcactttttgaatcgtttccagaagatttttatgtggagggattgccagaaggagtccctttcaggagacctagtacgtttggtatccctagactcgagaagattctgagaaataaggccaagatcaaatttattataaaaaagcccgaaatgtttgagactgctattaaggagtccacttcttctaagagtccccctaggaagattaacagtagccccaatgttaatacaacagcctcaggggttgaggatctcaacattatccaggtgacgattcccgacgacgacaacgagagattgagcaaggtcgagaaggccaggcagttaagagaacaagtgaacgacctgttttcccggaaattcggggaggctatagggatgggtttcccggtcaaagtgccctacagaaaaatcactattaatccaggatgtgtcgtggtggacggaatgccgcccggggtatcctttaaagcaccgagttacttggagatctcgagcatgagacgaatcttggacagtgctgaattcatcaagttcactgtcataagaccttttccagggctggtgatcaacaatcagcttgtggatcaatcagagagcgaaggtccagtgatccaggaatctgctgaaccaagccaactcgaggttcctgcaaccgaagagatcaaagagacagatgggtcctcccagattaagcaggagccagatccaacctggtag

SEQ ID NO: 226519 - DNA, 2997 bp, Artificial Sequence
  derived and/or modified sequence
atggcacaagtggcgatgtctacccttcctgtcgaagacgaggaaagcagcgagagtaggatggtagtgacatttttgatgagcgcattagagagcatgtgtaaagaacttgctaaatcaaaggcagaggtggcctgcatcgctgtctacgagactgatgtattcgtcgttggcacagaaagaggcagggcttttgtcaataccagaaaggatttccaaaaggacttcgttaagtactgcgtcgaagaagaagaaaaagcggctgaaatgcacaagatgaagagtaccacacaggcaaatcgcatgtccgttgacgctgtggagatcgaaactctgcggaagaccgtcgaggattatttctgtttctgctatggcaaggccctcggaaagagtacggtcgtcccagtaccatacgagaagatgctgcgagaccagagtgcagtggtcgtccagggcttaccagaaggcgtcgcctttaagcatcctgaaaactacgacttagccaccctgaaatggattctggagaacaaagcgggaatcagtttcattatcaagagaccctttttggagccgaaaaagcacgtgggcggtcgagttatggtcaccgatgccgaccgctccattctctcccctggtggctcttgtggcccaattaaggtcaaaacggaacctactgaggactctgggataagcctcgaaatggcagccgttacagttaaggaggagagtgaggatcctgactattaccaatacaacattcaggccggaccctccgagacagatgacgtagacgaaaaacagcctctgtctaagccgctgcagggatcccatcactcttcagagggcaacgaaggcacagagatggaagttccggcagaagacagtactcaacacgtcccctccgagaccagtgaagatcccgaggtagaggtcaccattgaagacgatgactacagccctcctagtaagagacctaaagcaaacgaactgccccagccaccagtcccagagccagctaatgccggtaaaagaaaagtgcgagagttcaattttgagaagtggaacgctcggattactgacctacggaagcaggtggaagagctgtttgagcgaaagtacgcacaggcaattaaggccaagggccctgtcaccatcccttatcccctgttccagtcgcacgtggaggatctgtatgtggagggcctgcctgaaggcatccccttccgcaggccaagcacctatggaattccaaggctggagaggatattgctggctaaggagaggatcagatttgttatcaagaaacacgaactgctcaatagcacacgggaggacctgcaactggacaagccagcgtccggcgtcaaagaggaatggtacgcaagaatcacgaagctcaggaaaatggtagatcagctcttttgcaaaaaatttgcagaggcactcggctctaccgaggcaaaagccgtgccatatcagaagttcgaggcccaccctaacgatctgtatgtcgaaggattgcctgaaaacataccattcaggtctccgagctggtatggaatccctcgcttggagaagattatccaggttgggaatagaatcaagtttgttataaagagacctgagctccttacccattctacaaccgaagtgactcagcccaggactaacacccccgttaaagaagactggaacgtcaggatcacaaagttaaggaaacaggtggaagagatctttaacttgaagttcgcacaggctttggggctgaccgaagccgtgaaggtgccttaccccgtcttcgaatctaatccagagtttctttatgtggagggcctgcccgaaggcatcccgttccgcagccctacttggtttggcattcccaggctggaacggatcgttcgcggttcaaacaagatcaaattcgttgttaaaaaaccggagcttgttatttcataccttccgccagggatggcctctaaaattaatactaaagccctccagagccccaaaaggccgagaagccctggctccaactcaaaggtgcccgagatcgaggtcacagtggagggaccaaacaacaataaccctcagactagcgccgttagaactcccactcagacaaacggctcgaatgtcccgttcaagccaagaggcagggagtttagttttgaagcttggaatgccaaaatcactgacctcaagcagaaggttgagaacctgtttaatgaaaaatgcggagaagctctcggcctgaaacaggccgtgaaggtcccatttgcccttttcgagtccttccctgaagatttttatgtggaaggtttgcccgaaggagtgccctttagaaggccctccacctttggaatacctagactggaaaaaatcttacggaataaagcaaaaataaagttcattattaagaagcctgagatgtttgaaactgctatcaaagaaagtacctcatctaagagccccccacgcaagataaactcatcccctaatgtgaataccactgcctcgggggtcgaggatctaaacattatccaggtgacaattccagacgatgataatgagaggctgagtaaggtggaaaaggctcggcagctgcgagagcaggtcaatgacctgttcagtcggaagtttggcgaggccattggaatgggctttcccgtgaaggtaccctatcggaagataaccattaatcctggttgcgtggtggtggacggaatgcctcccggagtgagcttcaaggcccctagctatctggagattagtagcatgcgcagaatactcgattcggcggaattcatcaagtttaccgtcattagaccctttccaggccttgtaataaacaaccaactcgtcgaccagagcgagtccgaagggccagtgatccaggagtccgctgagccgagccagctggaagtcccagcaactgaggagatcaaggaaactgatgggtctagccaaattaagcaggagccagaccccacctggtag

SEQ ID NO: 226520 - DNA, 2982 bp, Artificial Sequence
  derived and/or modified sequence
atgagcaccctccccgtggaggacgaagagagttctgaatcaaggatggtggtgacttttctcatgagtgctctagagagcatgtgcaaggagctagctaagtctaaagccgaggtggcttgcattgccgtatacgagaccgacgtgttcgtggtggggacagaaaggggacgtgctttcgtgaacacacgaaaggactttcagaaggacttcgtgaaatactgcgtcgaggaagaagaaaaggctgctgagatgcataagatgaagtccactactcaggcaaacaggatgtctgttgacgcggtcgaaattgaaacactgagaaagaccgtggaggactacttttgcttctgctacggaaaagccctcggcaaatccacggttgtgcccgtgccctatgaaaagatgcttcgcgatcagtctgcggttgtggtccaggggctgccggaaggggtggcttttaaacaccctgagaattatgacctggccacccttaaatggatcttggagaacaaggccggaatctccttcatcataaaaagaccctttcttgaaccaaagaagcacgtgggcggacgagtcatggtgactgatgcagatcgcagtatattatccccgggagggagctgtggcccaattaaggtcaaaactgagcctaccgaagactctgggatctctttggagatggcagccgtgaccgtgaaggaagagtctgaagatccggactactaccagtacaatattcaggccggaccctctgaaacagacgatgtggatgaaaagcaaccacttagcaagccattgcaaggatctcaccactccagcgaggggaacgagggaaccgagatggaggtgcccgcagaggacagtacacaacatgtcccgagtgagaccagtgaagatccagaagttgaagtgactatcgaggatgacgactattcgcccccaagcaaacggccaaaagcaaatgagctgccccagcctccagtgccagaacccgcaaatgcaggcaagcggaaagtacgggagttcaactttgaaaaatggaacgccagaattaccgacctcaggaagcaggtggaagaactctttgagcgcaaatatgctcaagcaattaaggccaaggggcctgtgaccataccctatccactattccagagtcacgtggaggatctctacgtcgagggactccccgagggaatcccttttcgtcgtccctcaacatacgggataccacgcctggaaagaatcctgctcgccaaggagcggattcggtttgtgattaagaaacacgaactcttgaatagcaccagagaagatctacaacttgataagccggcaagcggggttaaggaagagtggtacgctcgtattaccaaactccggaaaatggtcgatcagctattttgcaagaagttcgcagaagccctcggaagcaccgaggccaaggccgtcccttatcagaaattcgaggctcatcctaacgacctgtacgttgagggattacccgaaaatattcccttccggtccccgtcctggtatggaatcccgcgattggagaagattatacaggtgggcaatcggattaagttcgtcattaaacgacccgaactccttacccacagtacaacggaggtgacccagcctagaacaaatactcctgttaaggaagactggaatgtcaggattacaaagttgcgcaagcaggttgaagagattttcaacctcaagttcgcacaggccttggggctgaccgaagcggtcaaggtcccgtaccccgtgttcgagtccaatccagagtttctgtacgtagaggggctgcccgagggcattccattcaggtcgccaacatggtttggcatcccaaggttggagagaattgtgcggggaagtaataaaattaagttcgttgtgaaaaagcccgaactggtcataagctacttgccgccaggcatggctagcaagatcaacaccaaagccctgcagtccccaaaacgacccagaagtccagggagtaactccaaggtccccgaaattgaagtcaccgtggaggggcctaacaacaacaacccccagacgagcgcagtgcggacaccaacacagaccaacgggtcaaacgtccccttcaaaccacggggacgcgagttcagcttcgaagcgtggaacgctaaaataacagatctgaaacagaaggtggaaaacttgtttaacgaaaagtgcggcgaggccctcggtctgaagcaggccgtgaaagtgcctttcgccctgttcgaatcattcccagaggatttctacgtggagggtctgccggaaggtgtgcctttcagaagaccaagcaccttcggtattccacgactcgaaaagatcctgaggaataaggccaaaataaagtttatcatcaagaaaccagaaatgtttgaaacagctataaaggaatcgactagttctaagagtccacccaggaagataaactcatctcccaatgtcaacaccactgcctcaggagtagaggacctgaatattatccaggttactataccagacgacgacaatgaacgactgagcaaggtggagaaagcgaggcagctccgtgagcaggttaatgaccttttttccaggaagttcggcgaggccattggaatgggatttccagttaaggtcccatacaggaaaattacgattaatcctggatgtgtggttgtggatggtatgcccccaggtgtaagtttcaaggctccgtcctacctcgagattagcagcatgcgaagaatactcgactctgccgagtttataaaatttaccgttataagaccttttcccggtctagtcattaacaatcagctggtggaccagagcgagagcgaaggccctgttattcaggaaagcgctgagccgagccagcttgaggtacccgctaccgaggagatcaaagagacggatgggagctctcagatcaagcaggaaccagatcccacctggtag

SEQ ID NO: 226521 - DNA, 2997 bp, Artificial Sequence
  derived and/or modified sequence
atggcccaggtggccatgagcaccctgcccgtggaggacgaggagagcagcgagagcagaatggtggtgaccttcctgatgagcgccctggagagcatgtgcaaggagctggccaagagcaaggccgaggtggcctgcatcgccgtgtacgagaccgacgtgttcgtggtgggcaccgagagaggcagagccttcgtgaacaccagaaaggacttccagaaggacttcgtgaagtactgcgtggaggaggaggagaaggccgccgagatgcacaagatgaagagcaccacccaggccaacagaatgagcgtggacgccgtggagatcgagaccctgagaaagaccgtggaggactacttctgcttctgctacggcaaggccctgggcaagagcaccgtggtgcccgtgccctacgagaagatgctgagagaccagagcgccgtggtggtgcagggcctgcccgagggcgtggccttcaagcaccccgagaactacgacctggccaccctgaagtggatcctggagaacaaggccggcatcagcttcatcatcaagagacccttcctggagcccaagaagcacgtgggcggcagagtgatggtgaccgacgccgacagaagcatcctgagccccggcggcagctgcggccccatcaaggtgaagaccgagcccaccgaggacagcggcatcagcctggagatggccgccgtgaccgtgaaggaggagagcgaggaccccgactactaccagtacaacatccaggccggccccagcgagaccgacgacgtggacgagaagcagcccctgagcaagcccctgcagggcagccaccacagcagcgagggcaacgagggcaccgagatggaggtgcccgccgaggacagcacccagcacgtgcccagcgagaccagcgaggaccccgaggtggaggtgaccatcgaggacgacgactacagcccccccagcaagagacccaaggccaacgagctgccccagccccccgtgcccgagcccgccaacgccggcaagagaaaggtgagagagttcaacttcgagaagtggaacgccagaatcaccgacctgagaaagcaggtggaggagctgttcgagagaaagtacgcccaggccatcaaggccaagggccccgtgaccatcccctaccccctgttccagagccacgtggaggacctgtacgtggagggcctgcccgagggcatccccttcagaagacccagcacctacggcatccccagactggagagaatcctgctggccaaggagagaatcagattcgtgatcaagaagcacgagctgctgaacagcaccagagaggacctgcagctggacaagcccgccagcggcgtgaaggaggagtggtacgccagaatcaccaagctgagaaagatggtggaccagctgttctgcaagaagttcgccgaggccctgggcagcaccgaggccaaggccgtgccctaccagaagttcgaggcccaccccaacgacctgtacgtggagggcctgcccgagaacatccccttcagaagccccagctggtacggcatccccagactggagaagatcatccaggtgggcaacagaatcaagttcgtgatcaagagacccgagctgctgacccacagcaccaccgaggtgacccagcccagaaccaacacccccgtgaaggaggactggaacgtgagaatcaccaagctgagaaagcaggtggaggagatcttcaacctgaagttcgcccaggccctgggcctgaccgaggccgtgaaggtgccctaccccgtgttcgagagcaaccccgagttcctgtacgtggagggcctgcccgagggcatccccttcagaagccccacctggttcggcatccccagactggagagaatcgtgagaggcagcaacaagatcaagttcgtggtgaagaagcccgagctggtgatcagctacctgccccccggcatggccagcaagatcaacaccaaggccctgcagagccccaagagacccagaagccccggcagcaacagcaaggtgcccgagatcgaggtgaccgtggagggccccaacaacaacaacccccagaccagcgccgtgagaacccccacccagaccaacggcagcaacgtgcccttcaagcccagaggcagagagttcagcttcgaggcctggaacgccaagatcaccgacctgaagcagaaggtggagaacctgttcaacgagaagtgcggcgaggccctgggcctgaagcaggccgtgaaggtgcccttcgccctgttcgagagcttccccgaggacttctacgtggagggcctgcccgagggcgtgcccttcagaagacccagcaccttcggcatccccagactggagaagatcctgagaaacaaggccaagatcaagttcatcatcaagaagcccgagatgttcgagaccgccatcaaggagagcaccagcagcaagagcccccccagaaagatcaacagcagccccaacgtgaacaccaccgccagcggcgtggaggacctgaacatcatccaggtgaccatccccgacgacgacaacgagagactgagcaaggtggagaaggccagacagctgagagagcaggtgaacgacctgttcagcagaaagttcggcgaggccatcggcatgggcttccccgtgaaggtgccctacagaaagatcaccatcaaccccggctgcgtggtggtggacggcatgccccccggcgtgagcttcaaggcccccagctacctggagatcagcagcatgagaagaatcctggacagcgccgagttcatcaagttcaccgtgatcagacccttccccggcctggtgatcaacaaccagctggtggaccagagcgagagcgagggccccgtgatccaggagagcgccgagcccagccagctggaggtgcccgccaccgaggagatcaaggagaccgacggcagcagccagatcaagcaggagcccgaccccacctggtag

SEQ ID NO: 226522 - DNA, 2982 bp, Artificial Sequence
  derived and/or modified sequence
atgagcaccctgcccgtggaggacgaggagagcagcgagagcagaatggtggtgaccttcctgatgagcgccctggagagcatgtgcaaggagctggccaagagcaaggccgaggtggcctgcatcgccgtgtacgagaccgacgtgttcgtggtgggcaccgagagaggcagagccttcgtgaacaccagaaaggacttccagaaggacttcgtgaagtactgcgtggaggaggaggagaaggccgccgagatgcacaagatgaagagcaccacccaggccaacagaatgagcgtggacgccgtggagatcgagaccctgagaaagaccgtggaggactacttctgcttctgctacggcaaggccctgggcaagagcaccgtggtgcccgtgccctacgagaagatgctgagagaccagagcgccgtggtggtgcagggcctgcccgagggcgtggccttcaagcaccccgagaactacgacctggccaccctgaagtggatcctggagaacaaggccggcatcagcttcatcatcaagagacccttcctggagcccaagaagcacgtgggcggcagagtgatggtgaccgacgccgacagaagcatcctgagccccggcggcagctgcggccccatcaaggtgaagaccgagcccaccgaggacagcggcatcagcctggagatggccgccgtgaccgtgaaggaggagagcgaggaccccgactactaccagtacaacatccaggccggccccagcgagaccgacgacgtggacgagaagcagcccctgagcaagcccctgcagggcagccaccacagcagcgagggcaacgagggcaccgagatggaggtgcccgccgaggacagcacccagcacgtgcccagcgagaccagcgaggaccccgaggtggaggtgaccatcgaggacgacgactacagcccccccagcaagagacccaaggccaacgagctgccccagccccccgtgcccgagcccgccaacgccggcaagagaaaggtgagagagttcaacttcgagaagtggaacgccagaatcaccgacctgagaaagcaggtggaggagctgttcgagagaaagtacgcccaggccatcaaggccaagggccccgtgaccatcccctaccccctgttccagagccacgtggaggacctgtacgtggagggcctgcccgagggcatccccttcagaagacccagcacctacggcatccccagactggagagaatcctgctggccaaggagagaatcagattcgtgatcaagaagcacgagctgctgaacagcaccagagaggacctgcagctggacaagcccgccagcggcgtgaaggaggagtggtacgccagaatcaccaagctgagaaagatggtggaccagctgttctgcaagaagttcgccgaggccctgggcagcaccgaggccaaggccgtgccctaccagaagttcgaggcccaccccaacgacctgtacgtggagggcctgcccgagaacatccccttcagaagccccagctggtacggcatccccagactggagaagatcatccaggtgggcaacagaatcaagttcgtgatcaagagacccgagctgctgacccacagcaccaccgaggtgacccagcccagaaccaacacccccgtgaaggaggactggaacgtgagaatcaccaagctgagaaagcaggtggaggagatcttcaacctgaagttcgcccaggccctgggcctgaccgaggccgtgaaggtgccctaccccgtgttcgagagcaaccccgagttcctgtacgtggagggcctgcccgagggcatccccttcagaagccccacctggttcggcatccccagactggagagaatcgtgagaggcagcaacaagatcaagttcgtggtgaagaagcccgagctggtgatcagctacctgccccccggcatggccagcaagatcaacaccaaggccctgcagagccccaagagacccagaagccccggcagcaacagcaaggtgcccgagatcgaggtgaccgtggagggccccaacaacaacaacccccagaccagcgccgtgagaacccccacccagaccaacggcagcaacgtgcccttcaagcccagaggcagagagttcagcttcgaggcctggaacgccaagatcaccgacctgaagcagaaggtggagaacctgttcaacgagaagtgcggcgaggccctgggcctgaagcaggccgtgaaggtgcccttcgccctgttcgagagcttccccgaggacttctacgtggagggcctgcccgagggcgtgcccttcagaagacccagcaccttcggcatccccagactggagaagatcctgagaaacaaggccaagatcaagttcatcatcaagaagcccgagatgttcgagaccgccatcaaggagagcaccagcagcaagagcccccccagaaagatcaacagcagccccaacgtgaacaccaccgccagcggcgtggaggacctgaacatcatccaggtgaccatccccgacgacgacaacgagagactgagcaaggtggagaaggccagacagctgagagagcaggtgaacgacctgttcagcagaaagttcggcgaggccatcggcatgggcttccccgtgaaggtgccctacagaaagatcaccatcaaccccggctgcgtggtggtggacggcatgccccccggcgtgagcttcaaggcccccagctacctggagatcagcagcatgagaagaatcctggacagcgccgagttcatcaagttcaccgtgatcagacccttccccggcctggtgatcaacaaccagctggtggaccagagcgagagcgagggccccgtgatccaggagagcgccgagcccagccagctggaggtgcccgccaccgaggagatcaaggagaccgacggcagcagccagatcaagcaggagcccgaccccacctggtag

SEQ ID NO: 226523 - protein, 978 aa, Artificial Sequence
  derived and/or modified sequence
MAQVAMSTLPVEDEESSESRMVVTFLMSALESMCKELAKSKAEVACIAVYETDVFVVGTERGRAFVNTRKDFQKDFVKYCVEEEEKAAEMHKMKSTTQANRMSVDAVEIETLRKTVEDYFCFCYGKALGKSTVVPVPYEKMLRDQSAVVVQGLPEGVAFKHPENYDLATLKWILENKAGISFIIKRPFLEPKKHVGGRVMVTDADRSILSPGGSCGPIKVKTEPTEDSGISLEMAAVTVKEESEDPDYYQYNIQGSHHSSEGNEGTEMEVPAEDSTQHVPSETSEDPEVEVTIEDDDYSPPSKRPKANELPQPPVPEPANAGKRKVREFNFEKWNARITDLRKQVEELFERKYAQAIKAKGPVTIPYPLFQSHVEDLYVEGLPEGIPFRRPSTYGIPRLERILLAKERIRFVIKKHELLNSTREDLQLDKPASGVKEEWYARITKLRKMVDQLFCKKFAEALGSTEAKAVPYQKFEAHPNDLYVEGLPENIPFRSPSWYGIPRLEKIIQVGNRIKFVIKRPELLTHSTTEVTQPRTNTPVKEDWNVRITKLRKQVEEIFNLKFAQALGLTEAVKVPYPVFESNPEFLYVEGLPEGIPFRSPTWFGIPRLERIVRGSNKIKFVVKKPELVISYLPPGMASKINTKALQSPKRPRSPGSNSKVPEIEVTVEGPNNNNPQTSAVRTPTQTNGSNVPFKPRGREFSFEAWNAKITDLKQKVENLFNEKCGEALGLKQAVKVPFALFESFPEDFYVEGLPEGVPFRRPSTFGIPRLEKILRNKAKIKFIIKKPEMFETAIKESTSSKSPPRKINSSPNVNTTASGVEDLNIIQVTIPDDDNERLSKVEKARQLREQVNDLFSRKFGEAIGMGFPVKVPYRKITINPGCVVVDGMPPGVSFKAPSYLEISSMRRILDSAEFIKFTVIRPFPGLVINNQLVDQSESEGPVIQESAEPSQLEVPATEEIKETDGSSQIKQEPDPTW

SEQ ID NO: 226524 - protein, 274 aa, Artificial Sequence
  derived and/or modified sequence
MAQVAMSTLPVEDEESSESRMVVTFLMSALESMCKELAKSKAEVACIAVYETDVFVVGTERGRAFVNTRKDFQKDFVKYCVEEEEKAAEMHKMKSTTQANRMSVDAVEIETLRKTVEDYFCFCYGKALGKSTVVPVPYEKMLRDQSAVVVQGLPEGVAFKHPENYDLATLKWILENKAGISFIIKRPFLEPKKHVGGRVMVTDADRSILSPGGSCGPIKVKTEPTEDSGISLEMAAVTVKEESEDPDYYQYNIQGSHHSSEGNEGTEMEVPAEG

SEQ ID NO: 226525 - DNA, 2937 bp, Artificial Sequence
  derived and/or modified sequence
atggcacaagtggccatgtccaccttacccgtggaggacgaagagagctctgaatctcggatggtggtgacatttctgatgagcgccctggagtcaatgtgcaaggagttggcaaagtcaaaggctgaagtagcatgcatcgctgtgtacgagaccgatgtgttcgtggtgggaactgaacgcggaagggcctttgttaatactcgcaaggacttccagaaggacttcgttaaatactgtgtggaggaagaagaaaaagcggcagaaatgcataagatgaagtccacaacgcaggctaataggatgtcagtggatgccgtagagatagagacgctgcgaaagacagtggaagactacttctgcttctgctacggaaaggctctcggaaaatcaactgtggttcccgtgccatacgaaaagatgctcagggatcagagcgcagttgtcgtccagggcctgcccgagggagtggcattcaagcaccccgagaactacgatctagccacattgaagtggattctcgaaaacaaggctggtatcagcttcattattaagaggcctttccttgaacccaaaaaacacgtcggtggccgtgttatggtgacagacgcagacagatcaattttgagcccagggggttcctgtggccccataaaagtcaagacagaacccaccgaagatagcggaatcagcttagagatggccgccgttaccgtgaaggaggagtcagaggatcccgactactaccagtacaacattcagggatctcaccatagcagtgaaggaaacgaaggcaccgagatggaggtgcctgcagaggacagcacgcaacacgtgccaagtgagacatccgaggaccccgaggttgaggtgacaatcgaggacgatgactacagccccccatctaagcggcctaaggcaaacgagctgccgcaacctcccgtacctgagccagctaacgctggtaagcgcaaggtgagggaattcaactttgagaaatggaatgcaaggatcaccgacctaagaaagcaggttgaggagcttttcgaaaggaaatatgcccaggctattaaagcgaaaggaccagtaaccatcccttaccccctgtttcaatctcacgtcgaggacctgtacgttgagggactgccggagggcattcccttcaggagaccgtctacatatggcatccctcggctggaaagaatattactggctaaagaaagaattaggttcgttatcaaaaaacacgagctcttaaactccacgcgcgaggacttacagctggataagcccgcttctggcgttaaggaggagtggtatgcacggatcacaaagttgcggaagatggtggaccagctcttctgcaagaaattcgccgaagctcttgggtcaacagaagccaaggccgtcccctatcaaaagtttgaggcccaccccaatgatctatacgtcgaaggactgcccgagaacatccccttccgtagtccatcttggtatgggatacctcggctggagaaaatcatacaggtgggcaaccgtatcaaattcgttatcaagaggccagagctgctcactcattctactactgaagtcacccagccacgtactaatactcctgtgaaagaggattggaacgtgaggattaccaaactacgaaaacaggtagaagaaattttcaacctgaagttcgcacaggcactgggattgaccgaggccgtgaaagtcccttatcctgtttttgaatccaacccagagttcttatatgtagaaggtctccctgagggcattccatttcgttctccgacgtggttcggaatcccccgtctcgaacgtattgtgagaggaagcaacaaaatcaagtttgtggtcaagaaacctgaactcgttatatcatacctgccaccaggaatggcgtcaaaaattaataccaaggctctgcaatctcccaagcgtcctaggtcacccggctccaactctaaggtgcccgaaattgaggttaccgtggagggtcccaacaacaacaacccacagacgtcggccgtgcgtaccccgacacagactaatgggagcaacgtgccgtttaagcccagagggagggaattcagtttcgaggcttggaatgcgaaaataactgatctcaagcagaaggtagagaatctgtttaatgaaaaatgtggggaggctcttggactgaaacaagcggtgaaggtgccgtttgcgctattcgagagttttcctgaggatttctacgtcgaaggcctgcccgagggcgtgcctttccggcggccttctacttttggaatacctcgtctggagaaaatcctgagaaacaaagcaaagataaaatttataatcaaaaaaccggaaatgttcgagacagctattaaggagtccactagcagcaagtctccacccagaaagatcaacagttctccaaacgtcaataccacagcttccggagttgaggatctcaatatcatccaggtgactatccccgatgatgacaatgagagactgtcaaaagtggagaaagctcgacagctgcgggagcaggtgaatgatcttttttctagaaaattcggggaagcaataggtatgggctttcccgtgaaggtgccttatcgtaagattacgataaatccagggtgtgtggtggttgatggtatgccgcccggagtgagcttcaaagctcccagctatttagaaatcagctctatgagacgcattttggatagcgccgaatttatcaagtttacagtgatccgtccattccctgggctggtcatcaataaccaactcgtggatcagtccgagtcagaaggacccgtgatccaagagtctgctgaacccagtcaactagaggtaccagctaccgaagagatcaaggaaactgatgggtcgtcccaaataaagcaggaacccgatccaacctggtag

SEQ ID NO: 226526 - DNA, 4415 bp, Artificial Sequence
  derived and/or modified sequence
cgcccccccgcttccccgcacgcgctctccagccgcggccgcccgcctgccgcggtcaccccggcctctgcctctgtcccccagtgatcggatcaaggcgctgagcgaggccctgcctgcggggcggccatgcggcggtgacaggagcgcgaccgacacgcacgggcccctcgccccctctcgcctcccgtccgctcgccagctcccctcagccgaggctgctccgcggcggccgcagcccgcgcgcggcccacactcgcctcccctcggcacccccggccccggagctgcctggaggcggccgcactcggggatcatggcccaagttgcaatgtccaccctccccgttgaagatgaggagtcctcggagagcaggatggtggtgacattcctcatgtcagctctcgagtccatgtgtaaagaactggccaagtccaaagccgaagtggcctgcattgcagtgtatgaaacagacgtgtttgtcgtcggaactgaaagaggacgtgcttttgtcaataccagaaaggattttcaaaaagattttgtaaaatattgtgttgaagaagaagaaaaagctgcagagatgcataaaatgaaatctacaacccaggcaaatcggatgagtgtagatgctgtagaaattgaaacactcagaaaaacagttgaggactatttctgcttttgctatgggaaagctttaggcaaatccacagtggtacctgtaccatatgagaagatgctgcgagaccagtcggctgtggtagtgcaggggcttccggaaggtgttgcctttaaacaccccgagaactatgatcttgcaaccctgaaatggattttggagaacaaagcagggatttcattcatcattaagagaccttttttagagccaaagaagcatgtaggtggtcgtgtgatggtaacagatgctgacaggtcaatactatctccaggtggaagttgtggccccatcaaagtgaaaactgaacccacagaagattctggcatttccctggaaatggcagctgtgacagtaaaggaagaatcagaagatcctgattattatcaatataacattcaaggaagccaccattcttcagagggcaatgaaggcacagaaatggaagtaccagcagaagattctactcaacatgtcccttcagaaacaagtgaggaccctgaagttgaggtgactattgaagatgatgattattctccaccgtctaagagaccaaaggccaatgagctaccgcagccaccagtcccggaacccgccaatgctgggaagcggaaagtgagggagttcaacttcgagaaatggaatgctcgcatcactgatctacgtaaacaagttgaagaattgtttgaaaggaaatatgctcaagccataaaagccaaaggtccggtgacgatcccgtaccctcttttccagtctcatgttgaagatctttatgtagaaggacttcctgaaggaattccttttagaaggccatctacttacggaattcctcgcctggagaggatattacttgcaaaggaaaggattcgttttgtgattaagaaacatgagcttctgaattcaacacgtgaagatttacagcttgataagccagcttcaggagtaaaggaagaatggtatgccagaatcactaaattaagaaagatggtggatcagcttttctgcaaaaaatttgcggaagccttggggagcactgaagccaaggctgtaccgtaccaaaaatttgaggcacacccgaatgatctgtacgtggaaggactgccagaaaacattcctttccgaagtccctcatggtatggaatcccaaggctggaaaaaatcattcaagtgggcaatcgaattaaatttgttattaaaagaccagaacttctgactcacagtaccactgaagttactcagccaagaacgaatacaccagtcaaagaagattggaatgtcagaattaccaagctacggaagcaagtggaagagatttttaatttgaaatttgctcaagctcttggactcaccgaggcagtaaaagtaccatatcctgtgtttgaatcaaacccggagttcttgtatgtggaaggcttgccagaggggattcccttccgaagccctacctggtttggaattccacgacttgaaaggatcgtccgcgggagtaataaaatcaagttcgttgttaaaaaacctgaactagttatttcctacttgcctcctgggatggctagtaaaataaacactaaagctttgcagtcccccaaaagaccacgaagtcctgggagtaattcaaaggttcctgaaattgaggtcaccgtggaaggccctaataacaacaatcctcaaacctcagctgttcgaaccccgacccagactaacggttctaacgttcccttcaagccacgagggagagagttttcctttgaggcctggaatgccaaaatcacggacctaaaacagaaagttgaaaatctcttcaatgagaaatgtggggaagctcttggccttaaacaagctgtgaaggtgccgttcgcgttatttgagtctttcccggaagacttttatgtggaaggcttacctgagggtgtgccattccgaagaccatcgacttttggcattccgaggctggagaagatactcagaaacaaagccaaaattaagttcatcattaaaaagcccgaaatgtttgagacggcgattaaggagagcacctcctctaagagccctcccagaaaaataaattcatcacccaatgttaatactactgcatcaggtgttgaagaccttaacatcattcaggtgacaattccagatgatgataatgaaagactctcgaaagttgaaaaagctagacagctaagagaacaagtgaatgacctctttagtcggaaatttggtgaagctattggtatgggttttcctgtgaaagttccctacaggaaaatcacaattaaccctggctgtgtggtggttgatggcatgcccccgggggtgtccttcaaagcccccagctacctggaaatcagctccatgagaaggatcttagactctgccgagtttatcaaattcacggtcattagaccatttccaggacttgtgattaataaccagctggttgatcagagtgagtcagaaggccccgtgatacaagaatcagctgaaccaagccagttggaagttccagccacagaagaaataaaagagactgatggaagctctcagatcaagcaagaaccagaccccacgtggtagacctcttccctcctaggcttaaagtatcagtggttgagaagagcttttcggacctgttactaccccaagctgtgtaatatacttgtataacagaaataccttctatacaaacctttttttctacttttagatagaaatgtctactttttcagcagttctgtgaattaaagagcagagtgactgtgggtctggaatggctggtgtacttgggaatgtactatcaggattttacagcaatgctgggaaatgacagggaaaatgacaggaatgaatctcaccagattttttatgtactcagcagagccttgagttacggtgtttattttccaatcaagtgaagatatctcctacttctcctactggaacatctcagcttctgcagtgaagaaaaattcctgtgatagttcagttctttagtttttctatttgaaaaaaaaaaatcatttaaatgatcctttgttcacggctctccttaatgactgagtgaacagttcctatctgtatatttgactaaaccttttcctaagctatctctcatggttcctatgtttttttatcataattaaaagcaaaaccatctggatcacctaacagtcagaggtcagtatctcagcgtgtgaattatagaggaaatacagagagaacctcttccacttttacttttcgtccaaataaaatgcatggtgtaccagaagttgaagatcgggttgaggattggggctagctcgatgacactaaggccccaacatcgcgggacctgctgtggcgcggattcttaggaacgctgttctagccggccccctctccaggggtcgccgtggccggcattatttcctagttcttcttgtaaccctgaggtgccagcgcggggagtgaggaggggtcagggggctaaggatgcaacctctgacgttctgcgccttcctaggagagtcttacatgtgttgagatttcacaagcaatgcgagttgtaaaataccagctctacaagaagctaggctctgtgacggcatagttttcagtagctttatcacaatattcacaatggagaattatatgacatggtagcagaaataggcccttttatgtgttgcttctattttacctcaaattgtagatatagggtaatcaataaaatccatccatgcctttcacacactaa

SEQ ID NO: 226527 - DNA, 2937 bp, Artificial Sequence
  derived and/or modified sequence
atggcccaggtggccatgagcaccctgcctgtggaggatgaggagagcagcgagagcaggatggtggtgaccttcctgatgtctgccctggagagcatgtgcaaggagctggccaagagcaaggccgaggtggcctgcatcgctgtgtatgaaacagatgtgtttgtggtgggcacagagcggggccgggcctttgtgaacaccaggaaggacttccagaaggactttgtgaagtactgtgtggaggaggaggagaaggctgctgagatgcacaagatgaagagcaccacccaggccaacaggatgtctgtggatgctgtggagattgagaccctgaggaagacagtggaggactacttctgcttctgctacggcaaggccctgggcaagagcacagtggtgcctgtgccctatgagaagatgctgcgggaccagagcgctgtggtggtgcagggcctgcctgagggcgtggccttcaagcacccagaaaattatgacctggccaccctgaagtggatcctggagaacaaggccggcatctccttcatcatcaagaggcccttcctggagcccaagaagcacgtgggcggccgggtgatggtgacagatgctgacaggagcatcctgagccctgggggcagctgtggccccatcaaggtgaagacagagcccacagaggacagcggcatcagcctggagatggctgctgtgacagtgaaggaggagagcgaggaccctgactactaccagtacaacatccagggcagccaccacagcagcgagggcaatgaaggaacagagatggaggtgcctgctgaggacagcacccagcacgtgcccagcgagaccagtgaagatcctgaggtggaggtgaccattgaagatgatgactacagcccccccagcaagaggcccaaggccaatgagctgccccagccccctgtgcctgagcccgccaatgccggcaagaggaaggtgcgggagttcaactttgagaagtggaatgcccgcatcacagacctgaggaagcaggtggaggagctgtttgagaggaaatatgcccaggccatcaaggccaagggccctgtgaccatcccctaccccctcttccagagccacgtggaggacctgtatgtggagggcctgcctgagggcatccccttcagaagacccagcacctacggcatcccccggctggagcgcatcctgctggccaaggagcgcatccgctttgtgatcaagaagcatgagctgctgaacagcacccgggaggacctgcagctggacaagccagccagcggcgtgaaggaggagtggtacgcccgcatcaccaagctgaggaagatggtggaccagctgttctgcaagaagtttgctgaggccctgggcagcacagaggccaaggctgtgccctaccagaagtttgaggcccaccccaatgacctgtatgtggagggcctgcctgagaacatccccttccgcagccccagctggtacggcatcccccggctggagaagatcatccaggtgggcaaccgcatcaagtttgtgatcaagaggcctgagctgctgacccacagcaccacagaggtgacccagcccaggaccaacacccctgtgaaggaggactggaatgtgcgcatcaccaagctgaggaagcaggtggaggagatcttcaacctgaagtttgcccaggccctgggcctgacagaggccgtgaaggtgccctaccctgtgtttgagagcaaccctgagttcctgtatgtggagggcctgcctgagggcatccccttccgcagccccacctggtttggcatcccccggctggagcgcatcgtgcggggcagcaacaagatcaagtttgtggtgaagaagccagagctggtgatctcctacctgcccccaggcatggccagcaagatcaacaccaaggccctgcagagccccaagaggcccaggagccctggcagcaacagcaaggtgcctgagattgaggtgacagtggagggccccaacaacaacaacccccagaccagcgctgtgaggacccccacccagaccaacggcagcaatgtgcccttcaagccccggggccgggagttctcctttgaggcctggaatgccaagatcacagacctgaagcagaaggtggagaacctcttcaatgagaagtgtggggaggccctgggcctgaagcaggccgtgaaggtgccctttgccctgtttgagagcttccctgaggacttctacgtggagggcctgcctgagggcgtgcccttcagaagacccagcaccttcggcatcccccggctggagaagatcctgaggaacaaggccaagatcaagttcatcatcaagaagccagagatgtttgaaacagccatcaaggagagcaccagcagcaagagcccccccaggaagatcaacagcagccccaacgtgaacaccacagccagcggcgtggaggacctgaacatcatccaggtgaccatcccagatgatgacaatgaaaggctgagcaaggtggagaaggcccggcagctgcgggagcaggtgaatgacctcttcagcaggaagtttggagaggccatcggcatgggcttccctgtgaaggtgccctacaggaagatcaccatcaaccctggctgtgtggtggtggatggcatgcctcctggggtgtccttcaaggcccccagctacctggagatcagctccatgaggcgcatcctggacagcgctgagttcatcaagttcaccgtcatccggcccttccctggcctggtgatcaacaaccagctggtggaccagagcgagagcgagggccctgtgatccaggagagcgctgagcccagccagctggaggtgcctgccacagaggagatcaaggagacagatggcagcagccagatcaagcaggagccagaccccacctggtag

SEQ ID NO: 226528 - DNA, 2937 bp, Artificial Sequence
  derived and/or modified sequence
atggcccaggtggccatgagcaccctgcccgtggaggacgaggagagctctgaaagccgtatggtggtcactttcttaatgtctgcccttgaatccatgtgcaaggaacttgccaaatcaaaggcagaggtggcatgcatagccgtgtatgagacagatgtctttgttgtcggcacagagaggggcagagcattcgtgaacaccaggaaggactttcagaaagatttcgttaaatactgtgtggaggaagaagagaaagccgccgagatgcataagatgaaatcgacgactcaagccaatcgtatgagcgtggatgctgtggagattgagacactgagaaagaccgtcgaggactacttctgtttctgttacgggaaggcattaggcaagagcactgtggtgcctgtgccttatgagaagatgcttagggaccagagtgctgtggtagttcagggcttgccagaaggagtggcttttaaacatcccgaaaattatgatcttgcaacactcaaatggatcttggaaaataaagcgggcatctcttttatcatcaagcgcccctttctcgaacctaagaagcatgttggtggccgggtgatggtgaccgatgcagataggtcaattctgagcccaggcgggtcatgtggaccaattaaggtgaagactgaacccacggaggattctggtatatccctcgaaatggccgctgtgaccgtgaaagaagagagcgaagatccggattactatcagtataatatccagggttcacaccactcctccgaaggtaatgaaggcacagagatggaagtccccgccgaggatagcactcaacacgtcccttccgagacatccgaagatcccgaggtggaagtcacaatagaggatgatgattactcaccaccatctaagcggccaaaagccaacgagctgccacaaccacctgtgccagaacctgccaacgccgggaagcggaaggtgcgcgagtttaactttgaaaagtggaatgcccgtataacagatctgcgcaagcaagtagaggagttgttcgagcgcaaatacgctcaggccattaaagctaagggccctgtaactattccctatcccctgttccagtcacatgtcgaggatctgtacgtcgaaggcttgcccgagggaataccattccggaggccatccacttatggcattccccgacttgagcgcattctgctggctaaagaacggataaggtttgttatcaaaaagcatgaactgcttaatagcacgcgtgaggatttgcagttggataaacctgcctcaggggtcaaggaggagtggtatgcgaggataaccaaactccggaagatggtggaccagctcttctgcaaaaagttcgcggaggctcttgggagtaccgaggccaaagctgtcccgtaccagaaattcgaggcgcatcctaatgatctgtatgtcgagggtttacctgaaaacatcccctttcgttcaccttcttggtatgggattcccaggttggaaaagataattcaggttggcaataggatcaagttcgtgattaagagaccagaattactgacccattctacaacagaagtcacccaaccgcggacaaacacacctgtaaaagaggactggaatgttaggatcactaaattgaggaagcaggttgaagagatctttaacctcaaatttgcccaggccctggggcttaccgaagccgtcaaggttccatatcccgtcttcgaatctaacccggagtttttgtatgttgaaggacttccagaaggtatcccattccgctctcccacttggttcggaatacctagactagagcggattgttcggggcagcaataagataaagtttgttgtgaagaagccagaactggtgatctcatacctaccaccaggcatggcttcgaagatcaataccaaggccctgcagtctccaaagcgccctcgctcccccgggtctaattctaaggtgcccgaaatcgaagtgaccgtggaggggccaaataataataacccacagactagcgcagttaggaccccaactcaaactaacggctctaacgttccattcaaacctcgcgggagagaatttagcttcgaggcctggaacgctaaaattactgacctcaagcagaaggtggaaaacctcttcaatgagaaatgcggggaagcccttggactaaagcaggcagtgaaagttcccttcgcactctttgaatcattccctgaagatttttatgtagagggcttacccgagggcgtgccatttcgcaggcccagtacttttggcatccctcggttagagaagatattaaggaataaggccaagataaagtttattattaagaaacccgaaatgtttgaaaccgcaatcaaagagtcgacatctagcaaaagccccccccgaaagatcaacagtagccctaatgtaaataccacggcctccggggttgaagatctcaatatcatccaggtcaccatccctgatgatgataatgaaagactgagtaaggtggaaaaggcacggcagctgcgggagcaggtcaatgatctcttctcacgcaaattcggggaagcaatcgggatgggttttcccgtgaaagtcccgtatcgtaaaatcaccattaatcccggttgtgtcgtggtcgatggtatgcctccaggcgtttcattcaaagccccttcttacctcgaaatcagcagcatgcggcgcatactggattccgcggagttcatcaagtttactgtaatccgaccattcccgggattggtgatcaataaccagttggtcgatcagagcgaatccgagggcccagttattcaagaaagtgctgagccttcccaactggaggtgccagctacggaggaaatcaaagagacggatggcagctcccagatcaagcaggagccagatcccacgtggtag

SEQ ID NO: 226529 - DNA, 2937 bp, Artificial Sequence
  derived and/or modified sequence
atggcccaagtggctatgtcgacattacccgttgaggacgaggaatcctctgagagcaggatggtggtaacttttctgatgtcagccttagaaagtatgtgtaaggagctggccaaatcaaaagccgaggtcgcatgcattgccgtctatgagaccgacgtcttcgtcgtgggtaccgaaagggggcgagcttttgttaatactcgtaaagattttcagaaggacttcgtcaagtactgcgtcgaggaagaggaaaaggctgctgagatgcataagatgaaaagcactacgcaggccaataggatgtcagttgatgctgttgagatagagacgttgaggaaaacagtagaggattacttttgcttctgttatggcaaggccctggggaagtctaccgtggttcccgttccttacgagaagatgttgcgtgaccagagtgccgtggtcgtgcagggcctacccgagggggttgcttttaagcaccccgaaaactatgacctggcaacgcttaaatggattcttgaaaacaaagccggtatctcttttatcatcaaaagaccgttcctggaaccgaagaagcacgtcggaggacgagtaatggtgaccgacgctgataggagtatcctgtccccgggtggatcatgcggccctatcaaagttaaaactgagcctacggaagactcaggcatatcacttgaaatggccgctgtaacagtgaaagaggagagcgaagatcccgattattaccagtataatatccaaggaagtcatcactcatcagagggcaacgagggaaccgaaatggaagttcccgcagaagactctacacagcacgtccccagcgagacgtctgaggacccggaagtggaagtgactattgaggacgacgactactctcctcccagcaaaagaccaaaagctaatgagttgcctcagcctcctgtgcctgaacctgccaatgccggaaagagaaaagtgagggagtttaacttcgagaaatggaacgctcggattaccgacttgagaaaacaggttgaagagctgttcgagcgaaaatacgcacaggctattaaggccaagggacccgtcaccatcccctaccccctgtttcagtcacacgttgaagatttatatgtggagggcttaccagaaggaattcctttcaggcgcccttccacttacggtatccccagactcgaacgcattctattggctaaggagcgcattaggttcgtgataaaaaaacacgaactgctcaattccactagagaagaccttcagttggataagccagcttccggagtcaaggaagaatggtatgccaggattaccaagctccgcaagatggtggatcagctgttttgcaagaagtttgccgaagcgctaggctccacggaagcaaaagccgttccttatcaaaagttcgaagcacacccaaacgacctttacgtagaggggctgcccgagaacatcccattccggtccccctcctggtacggtattccaaggctggagaaaattattcaggtgggcaaccggatcaagttcgtaattaaacggccagaactcctgacccattccaccacagaagtcactcagcctcgcacaaacacaccagttaaggaagactggaacgtgcgaatcacaaagttgagaaagcaggttgaagagatctttaatctgaagttcgcacaagcactgggtttgaccgaagccgttaaagtgccatatcctgtttttgaatcaaaccccgagtttctctacgtcgaaggactccccgagggcatacctttcaggtcccccacttggttcgggatccccagacttgagaggatcgttaggggctctaacaagattaagttcgtggtgaagaaacccgaactggtgatttcatacttaccacccggaatggcatccaaaattaatactaaggcccttcagtctcccaaacgccctcgcagtcccggaagcaacagcaaggttcccgaaatcgaagtgaccgtggaaggaccaaataataataatccgcagacgagcgctgtgagaaccccaacccaaaccaacggaagcaatgtgccattcaagcctcggggtagggagtttagttttgaggcttggaacgccaaaatcactgacctgaagcagaaggtagaaaacctttttaacgagaagtgtggcgaagctttaggactcaagcaggcagtcaaggtgcccttcgccttgttcgaaagctttcccgaagatttctacgtagaagggttaccagaaggcgtcccattccgcagacccagcaccttcggaatccctagactcgagaaaattttacgtaacaaagcgaagattaaattcatcattaaaaaacccgaaatgttcgagactgccatcaaggagagtacctcatccaaatctccccctcgaaagattaactcaagcccaaatgtcaatacaactgccagtggtgtggaggatctcaacatcatacaggtgactatccccgatgatgataatgaaaggctgagtaaagtcgaaaaagcccgtcaactcagggaacaagtaaatgatctgtttagtcggaagttcggggaggcaatcggaatggggtttcccgtcaaagtgccttataggaaaataacaattaaccctgggtgcgttgtcgttgatgggatgccgcctggagtgtcatttaaggccccatcttatttggagatctcaagcatgaggagaatactggatagcgccgagttcatcaaattcacagtcattagaccctttcctgggcttgtgatcaataaccagctggttgaccaatccgaatcagagggcccagtcatccaggagtctgctgaaccatcccagctagaggtccctgcaaccgaagagattaaggaaacagacggctcctctcagatcaaacaggagcctgatcccacatggtag

SEQ ID NO: 226530 - DNA, 2937 bp, Artificial Sequence
  derived and/or modified sequence
atggcccaggtggccatgagcaccctgcccgtggaggacgaggagagcagcgagagcagaatggtggtgaccttcctgatgagcgccctggagagcatgtgcaaggagctggccaagagcaaggccgaggtggcctgcatcgccgtgtacgagaccgacgtgttcgtggtgggcaccgagagaggcagagccttcgtgaacaccagaaaggacttccagaaggacttcgtgaagtactgcgtggaggaggaggagaaggccgccgagatgcacaagatgaagagcaccacccaggccaacagaatgagcgtggacgccgtggagatcgagaccctgagaaagaccgtggaggactacttctgcttctgctacggcaaggccctgggcaagagcaccgtggtgcccgtgccctacgagaagatgctgagagaccagagcgccgtggtggtgcagggcctgcccgagggcgtggccttcaagcaccccgagaactacgacctggccaccctgaagtggatcctggagaacaaggccggcatcagcttcatcatcaagagacccttcctggagcccaagaagcacgtgggcggcagagtgatggtgaccgacgccgacagaagcatcctgagccccggcggcagctgcggccccatcaaggtgaagaccgagcccaccgaggacagcggcatcagcctggagatggccgccgtgaccgtgaaggaggagagcgaggaccccgactactaccagtacaacatccagggcagccaccacagcagcgagggcaacgagggcaccgagatggaggtgcccgccgaggacagcacccagcacgtgcccagcgagaccagcgaggaccccgaggtggaggtgaccatcgaggacgacgactacagcccccccagcaagagacccaaggccaacgagctgccccagccccccgtgcccgagcccgccaacgccggcaagagaaaggtgagagagttcaacttcgagaagtggaacgccagaatcaccgacctgagaaagcaggtggaggagctgttcgagagaaagtacgcccaggccatcaaggccaagggccccgtgaccatcccctaccccctgttccagagccacgtggaggacctgtacgtggagggcctgcccgagggcatccccttcagaagacccagcacctacggcatccccagactggagagaatcctgctggccaaggagagaatcagattcgtgatcaagaagcacgagctgctgaacagcaccagagaggacctgcagctggacaagcccgccagcggcgtgaaggaggagtggtacgccagaatcaccaagctgagaaagatggtggaccagctgttctgcaagaagttcgccgaggccctgggcagcaccgaggccaaggccgtgccctaccagaagttcgaggcccaccccaacgacctgtacgtggagggcctgcccgagaacatccccttcagaagccccagctggtacggcatccccagactggagaagatcatccaggtgggcaacagaatcaagttcgtgatcaagagacccgagctgctgacccacagcaccaccgaggtgacccagcccagaaccaacacccccgtgaaggaggactggaacgtgagaatcaccaagctgagaaagcaggtggaggagatcttcaacctgaagttcgcccaggccctgggcctgaccgaggccgtgaaggtgccctaccccgtgttcgagagcaaccccgagttcctgtacgtggagggcctgcccgagggcatccccttcagaagccccacctggttcggcatccccagactggagagaatcgtgagaggcagcaacaagatcaagttcgtggtgaagaagcccgagctggtgatcagctacctgccccccggcatggccagcaagatcaacaccaaggccctgcagagccccaagagacccagaagccccggcagcaacagcaaggtgcccgagatcgaggtgaccgtggagggccccaacaacaacaacccccagaccagcgccgtgagaacccccacccagaccaacggcagcaacgtgcccttcaagcccagaggcagagagttcagcttcgaggcctggaacgccaagatcaccgacctgaagcagaaggtggagaacctgttcaacgagaagtgcggcgaggccctgggcctgaagcaggccgtgaaggtgcccttcgccctgttcgagagcttccccgaggacttctacgtggagggcctgcccgagggcgtgcccttcagaagacccagcaccttcggcatccccagactggagaagatcctgagaaacaaggccaagatcaagttcatcatcaagaagcccgagatgttcgagaccgccatcaaggagagcaccagcagcaagagcccccccagaaagatcaacagcagccccaacgtgaacaccaccgccagcggcgtggaggacctgaacatcatccaggtgaccatccccgacgacgacaacgagagactgagcaaggtggagaaggccagacagctgagagagcaggtgaacgacctgttcagcagaaagttcggcgaggccatcggcatgggcttccccgtgaaggtgccctacagaaagatcaccatcaaccccggctgcgtggtggtggacggcatgccccccggcgtgagcttcaaggcccccagctacctggagatcagcagcatgagaagaatcctggacagcgccgagttcatcaagttcaccgtgatcagacccttccccggcctggtgatcaacaaccagctggtggaccagagcgagagcgagggccccgtgatccaggagagcgccgagcccagccagctggaggtgcccgccaccgaggagatcaaggagaccgacggcagcagccagatcaagcaggagcccgaccccacctggtag

SEQ ID NO: 226531 - protein, 977 aa, Artificial Sequence
  derived and/or modified sequence
MAQVAMSTLPVEDEESSESRMVVTFLMSALESMCKELAKSKAEVACIAVYETDVFVVGTERGRAFVNTRKDFQKDFVKYCVEEEEKAAEMHKMKSTTQANRMSVDAVEIETLRKTVEDYFCFCYGKALGKSTVVPVPYEKMLRDQSAVVVQGLPEGVAFKHPENYDLATLKWILENKAGISFIIKRPFLEPKKHVGGRVMVTDADRSILSPGGSCGPIKVKTEPTEDSGISLEMAAVTVKEESEDPDYYQYNIQAGPSETDDVDEKQPLSKPLQGSHHSSEGNEGTEMEVPAEDDDYSPPSKRPKANELPQPPVPEPANAGKRKVREFNFEKWNARITDLRKQVEELFERKYAQAIKAKGPVTIPYPLFQSHVEDLYVEGLPEGIPFRRPSTYGIPRLERILLAKERIRFVIKKHELLNSTREDLQLDKPASGVKEEWYARITKLRKMVDQLFCKKFAEALGSTEAKAVPYQKFEAHPNDLYVEGLPENIPFRSPSWYGIPRLEKIIQVGNRIKFVIKRPELLTHSTTEVTQPRTNTPVKEDWNVRITKLRKQVEEIFNLKFAQALGLTEAVKVPYPVFESNPEFLYVEGLPEGIPFRSPTWFGIPRLERIVRGSNKIKFVVKKPELVISYLPPGMASKINTKALQSPKRPRSPGSNSKVPEIEVTVEGPNNNNPQTSAVRTPTQTNGSNVPFKPRGREFSFEAWNAKITDLKQKVENLFNEKCGEALGLKQAVKVPFALFESFPEDFYVEGLPEGVPFRRPSTFGIPRLEKILRNKAKIKFIIKKPEMFETAIKESTSSKSPPRKINSSPNVNTTASGVEDLNIIQVTIPDDDNERLSKVEKARQLREQVNDLFSRKFGEAIGMGFPVKVPYRKITINPGCVVVDGMPPGVSFKAPSYLEISSMRRILDSAEFIKFTVIRPFPGLVINNQLVDQSESEGPVIQESAEPSQLEVPATEEIKETDGSSQIKQEPDPTW

SEQ ID NO: 226532 - DNA, 2934 bp, Artificial Sequence
  derived and/or modified sequence
atggctcaggtggcaatgtccaccctgccggtggaggacgaggagagtagcgagagccgtatggtggtcactttccttatgtctgccttggagtccatgtgtaaggaactggcaaagtccaaagccgaggtagcttgtatagccgtctacgagacagatgttttcgtggtcggcaccgaacgagggcgggcgtttgtgaatactcggaaggacttccagaaagatttcgtaaagtattgcgtagaagaagaagagaaagcggcagaaatgcacaagatgaaatccaccacccaggcaaacagaatgtccgtggatgctgtggagatcgagacgctgcggaaaaccgtagaggattacttttgtttctgttacggcaaggccttggggaaatcaacagtggtccccgtcccatacgaaaaaatgcttcgggaccagtctgccgtggtagtacagggtttgccggagggggtggcattcaagcatccggagaattacgacctcgccactctaaaatggattctcgagaataaagccgggatttcctttattattaagcgcccttttcttgaaccaaaaaagcacgtcggaggacgcgtgatggtcaccgacgcagatcgctctattttgtccccagggggtagttgtgggcctattaaggtgaaaacggaaccaaccgaagactcggggatttcccttgagatggcagccgtcaccgttaaggaggagtccgaagaccctgattattatcagtacaacatccaggctggcccctctgaaaccgatgacgtggatgagaagcagcctctgagcaagcccctgcaggggtcccaccactcttcggaggggaacgaggggaccgagatggaggtgcccgccgaggatgacgattattcaccgcctagtaaaagacccaaggccaacgagctgccccagcctcctgttccggaacctgcaaatgcgggcaaaaggaaagttcgagagttcaattttgagaaatggaacgctcggattaccgacttaaggaagcaggtggaggagttatttgagaggaaatatgcgcaagcgatcaaagccaagggcccagtgacaataccctatcctttatttcaatcccatgtagaggacctgtatgtcgagggcttgccagaaggtattcccttcagaagacctagcacctacggtattccacgcctcgaaagaattctgcttgccaaagagcgaatccggtttgtgattaagaagcacgaactgctaaacagcactagagaggacctgcagctggacaaaccagcctcaggcgtaaaagaggagtggtacgccagaataacaaaacttagaaagatggttgaccaattattttgtaagaaattcgctgaagcccttggttctaccgaagcaaaggctgtgccttaccagaagttcgaagctcaccctaacgacctgtatgttgaggggctccccgaaaacattccgttccgatcaccaagctggtacggcatcccccgtctggaaaaaataattcaggtcgggaaccgcattaagtttgtgatcaaacggccagagctactgacccattcaaccaccgaagtgactcagccccggactaacacacctgttaaagaggattggaatgttcggatcacaaaactccggaagcaggtggaagagatctttaacctcaaattcgcccaagcactcggcctcacagaggcagtgaaggtcccctatcccgtgttcgagtctaaccccgaatttctctacgtcgaagggttgcccgaagggattcccttccgctctccaacgtggttcggaattccgcggctggagcgcatcgtcagggggtcaaataaaattaagtttgtagtgaaaaaaccagagttggtgatttcttatttgccaccaggcatggcctctaagattaacaccaaggccctgcagagcccaaagcgtcctaggtctcccggaagcaatagtaaggtgcctgagatcgaggtgacagtggaggggcctaataacaacaacccccaaacaagtgcagtgagaactcctacccagactaacggctcaaatgtacctttcaagcccaggggccgggagttcagtttcgaagcctggaatgcgaaaattaccgaccttaagcaaaaggtggaaaacctgttcaatgagaaatgtggcgaggccctagggctcaagcaagcagtcaaggtgccttttgcattattcgagtcgtttccagaagacttctatgtggagggccttccagaaggggtcccctttcgccgaccctctacattcggcatcccccggctggagaagatcctacgtaacaaggcaaagatcaagtttattatcaagaaaccagagatgttcgagaccgccataaaagagagtacaagtagcaagagtccaccccggaagattaattcttcccccaacgtgaacactaccgcttctggcgtggaggacctaaatatcattcaagtgaccatccccgacgacgacaatgaacgcttgtccaaagtcgagaaggctagacagttgcgggagcaagtgaatgacctgttctctagaaagttcggggaagccattggcatggggttccctgttaaggtgccctataggaagattactatcaacccaggctgcgtcgtggtggacggcatgcctcctggggtgagcttcaaggccccctcctatctggagatctcttctatgcgcagaattctggattctgctgagttcattaagtttacagtgatcagacctttcccaggcctggtcatcaacaatcaattagtggatcagagtgaaagtgagggtcccgtcatccaggaatccgcagagcctagccagttggaagtacccgccactgaagagatcaaagagaccgatgggtcaagtcaaatcaagcaagagcccgacccaacttggtag

SEQ ID NO: 226533 - DNA, 4412 bp, Artificial Sequence
  derived and/or modified sequence
cgcccccccgcttccccgcacgcgctctccagccgcggccgcccgcctgccgcggtcaccccggcctctgcctctgtcccccagtgatcggatcaaggcgctgagcgaggccctgcctgcggggcggccatgcggcggtgacaggagcgcgaccgacacgcacgggcccctcgccccctctcgcctcccgtccgctcgccagctcccctcagccgaggctgctccgcggcggccgcagcccgcgcgcggcccacactcgcctcccctcggcacccccggccccggagctgcctggaggcggccgcactcggggatcatggcccaagttgcaatgtccaccctccccgttgaagatgaggagtcctcggagagcaggatggtggtgacattcctcatgtcagctctcgagtccatgtgtaaagaactggccaagtccaaagccgaagtggcctgcattgcagtgtatgaaacagacgtgtttgtcgtcggaactgaaagaggacgtgcttttgtcaataccagaaaggattttcaaaaagattttgtaaaatattgtgttgaagaagaagaaaaagctgcagagatgcataaaatgaaatctacaacccaggcaaatcggatgagtgtagatgctgtagaaattgaaacactcagaaaaacagttgaggactatttctgcttttgctatgggaaagctttaggcaaatccacagtggtacctgtaccatatgagaagatgctgcgagaccagtcggctgtggtagtgcaggggcttccggaaggtgttgcctttaaacaccccgagaactatgatcttgcaaccctgaaatggattttggagaacaaagcagggatttcattcatcattaagagaccttttttagagccaaagaagcatgtaggtggtcgtgtgatggtaacagatgctgacaggtcaatactatctccaggtggaagttgtggccccatcaaagtgaaaactgaacccacagaagattctggcatttccctggaaatggcagctgtgacagtaaaggaagaatcagaagatcctgattattatcaatataacattcaagcaggcccttctgaaactgatgatgttgatgaaaaacagcccctatcgaagcctttgcaaggaagccaccattcttcagagggcaatgaaggcacagaaatggaagtaccagcagaagatgatgattattctccaccgtctaagagaccaaaggccaatgagctaccgcagccaccagtcccggaacccgccaatgctgggaagcggaaagtgagggagttcaacttcgagaaatggaatgctcgcatcactgatctacgtaaacaagttgaagaattgtttgaaaggaaatatgctcaagccataaaagccaaaggtccggtgacgatcccgtaccctcttttccagtctcatgttgaagatctttatgtagaaggacttcctgaaggaattccttttagaaggccatctacttacggaattcctcgcctggagaggatattacttgcaaaggaaaggattcgttttgtgattaagaaacatgagcttctgaattcaacacgtgaagatttacagcttgataagccagcttcaggagtaaaggaagaatggtatgccagaatcactaaattaagaaagatggtggatcagcttttctgcaaaaaatttgcggaagccttggggagcactgaagccaaggctgtaccgtaccaaaaatttgaggcacacccgaatgatctgtacgtggaaggactgccagaaaacattcctttccgaagtccctcatggtatggaatcccaaggctggaaaaaatcattcaagtgggcaatcgaattaaatttgttattaaaagaccagaacttctgactcacagtaccactgaagttactcagccaagaacgaatacaccagtcaaagaagattggaatgtcagaattaccaagctacggaagcaagtggaagagatttttaatttgaaatttgctcaagctcttggactcaccgaggcagtaaaagtaccatatcctgtgtttgaatcaaacccggagttcttgtatgtggaaggcttgccagaggggattcccttccgaagccctacctggtttggaattccacgacttgaaaggatcgtccgcgggagtaataaaatcaagttcgttgttaaaaaacctgaactagttatttcctacttgcctcctgggatggctagtaaaataaacactaaagctttgcagtcccccaaaagaccacgaagtcctgggagtaattcaaaggttcctgaaattgaggtcaccgtggaaggccctaataacaacaatcctcaaacctcagctgttcgaaccccgacccagactaacggttctaacgttcccttcaagccacgagggagagagttttcctttgaggcctggaatgccaaaatcacggacctaaaacagaaagttgaaaatctcttcaatgagaaatgtggggaagctcttggccttaaacaagctgtgaaggtgccgttcgcgttatttgagtctttcccggaagacttttatgtggaaggcttacctgagggtgtgccattccgaagaccatcgacttttggcattccgaggctggagaagatactcagaaacaaagccaaaattaagttcatcattaaaaagcccgaaatgtttgagacggcgattaaggagagcacctcctctaagagccctcccagaaaaataaattcatcacccaatgttaatactactgcatcaggtgttgaagaccttaacatcattcaggtgacaattccagatgatgataatgaaagactctcgaaagttgaaaaagctagacagctaagagaacaagtgaatgacctctttagtcggaaatttggtgaagctattggtatgggttttcctgtgaaagttccctacaggaaaatcacaattaaccctggctgtgtggtggttgatggcatgcccccgggggtgtccttcaaagcccccagctacctggaaatcagctccatgagaaggatcttagactctgccgagtttatcaaattcacggtcattagaccatttccaggacttgtgattaataaccagctggttgatcagagtgagtcagaaggccccgtgatacaagaatcagctgaaccaagccagttggaagttccagccacagaagaaataaaagagactgatggaagctctcagatcaagcaagaaccagaccccacgtggtagacctcttccctcctaggcttaaagtatcagtggttgagaagagcttttcggacctgttactaccccaagctgtgtaatatacttgtataacagaaataccttctatacaaacctttttttctacttttagatagaaatgtctactttttcagcagttctgtgaattaaagagcagagtgactgtgggtctggaatggctggtgtacttgggaatgtactatcaggattttacagcaatgctgggaaatgacagggaaaatgacaggaatgaatctcaccagattttttatgtactcagcagagccttgagttacggtgtttattttccaatcaagtgaagatatctcctacttctcctactggaacatctcagcttctgcagtgaagaaaaattcctgtgatagttcagttctttagtttttctatttgaaaaaaaaaaatcatttaaatgatcctttgttcacggctctccttaatgactgagtgaacagttcctatctgtatatttgactaaaccttttcctaagctatctctcatggttcctatgtttttttatcataattaaaagcaaaaccatctggatcacctaacagtcagaggtcagtatctcagcgtgtgaattatagaggaaatacagagagaacctcttccacttttacttttcgtccaaataaaatgcatggtgtaccagaagttgaagatcgggttgaggattggggctagctcgatgacactaaggccccaacatcgcgggacctgctgtggcgcggattcttaggaacgctgttctagccggccccctctccaggggtcgccgtggccggcattatttcctagttcttcttgtaaccctgaggtgccagcgcggggagtgaggaggggtcagggggctaaggatgcaacctctgacgttctgcgccttcctaggagagtcttacatgtgttgagatttcacaagcaatgcgagttgtaaaataccagctctacaagaagctaggctctgtgacggcatagttttcagtagctttatcacaatattcacaatggagaattatatgacatggtagcagaaataggcccttttatgtgttgcttctattttacctcaaattgtagatatagggtaatcaataaaatccatccatgcctttcacacactaa

SEQ ID NO: 226534 - DNA, 2934 bp, Artificial Sequence
  derived and/or modified sequence
atggcccaggtggccatgagcaccctgcctgtggaggatgaggagagcagcgagagcaggatggtggtgaccttcctgatgtctgccctggagagcatgtgcaaggagctggccaagagcaaggccgaggtggcctgcatcgctgtgtatgaaacagatgtgtttgtggtgggcacagagcggggccgggcctttgtgaacaccaggaaggacttccagaaggactttgtgaagtactgtgtggaggaggaggagaaggctgctgagatgcacaagatgaagagcaccacccaggccaacaggatgtctgtggatgctgtggagattgagaccctgaggaagacagtggaggactacttctgcttctgctacggcaaggccctgggcaagagcacagtggtgcctgtgccctatgagaagatgctgcgggaccagagcgctgtggtggtgcagggcctgcctgagggcgtggccttcaagcacccagaaaattatgacctggccaccctgaagtggatcctggagaacaaggccggcatctccttcatcatcaagaggcccttcctggagcccaagaagcacgtgggcggccgggtgatggtgacagatgctgacaggagcatcctgagccctgggggcagctgtggccccatcaaggtgaagacagagcccacagaggacagcggcatcagcctggagatggctgctgtgacagtgaaggaggagagcgaggaccctgactactaccagtacaacatccaggccggccccagcgagacagatgatgtggatgagaagcagcccctgagcaagcccctgcagggcagccaccacagcagcgagggcaatgaaggaacagagatggaggtgcctgcagaagatgatgactacagcccccccagcaagaggcccaaggccaatgagctgccccagccccctgtgcctgagcccgccaatgctgggaagaggaaggtgcgggagttcaactttgagaagtggaatgcccgcatcacagacctgaggaagcaggtggaggagctgtttgagaggaaatatgcccaggccatcaaggccaagggccctgtgaccatcccctaccccctcttccagagccacgtggaggacctgtatgtggagggcctgcctgagggcatccccttccggcggcccagcacctacggcatcccccggctggagcgcatcctgctggccaaggagcgcatccgcttcgtcatcaagaagcatgagctgctgaacagcacccgggaggacctgcagctggacaagccagccagcggcgtgaaggaggagtggtacgcccgcatcaccaagctgaggaagatggtggaccagctgttctgcaagaagtttgctgaggccctgggcagcacagaggccaaggctgtgccctaccagaagtttgaggcccaccccaatgacctgtatgtggagggcctgcctgagaacatccccttccgcagccccagctggtacggcatcccccggctggagaagatcatccaggtgggcaaccgcatcaagtttgtgatcaagaggcctgagctgctgacccacagcaccacagaggtgacccagcccaggaccaacacccctgtgaaggaggactggaatgtgcgcatcaccaagctgaggaagcaggtggaggagatcttcaacctgaagtttgcccaggccctgggcctgacagaagctgtgaaggtgccctaccctgtgtttgagagcaaccctgagttcctgtatgtggagggcctgcctgagggcatccccttccgcagccccacctggtttggcatcccccggctggagagaattgtgcggggcagcaacaagatcaagtttgtggtgaagaagccagagctggtgatctcctacctgcccccaggcatggccagcaagatcaacaccaaggccctgcagagccccaagaggcccaggagccctggcagcaacagcaaggtgcctgagattgaggtgacagtggagggccccaacaacaacaacccccagaccagcgctgtgaggacccccacccagaccaacggcagcaatgtgcccttcaagccccggggccgggagttctcctttgaggcctggaatgccaagatcacagacctgaagcagaaggtggagaacctcttcaatgaaaaatgtggggaggccctgggcctgaagcaggccgtgaaggtgccctttgccctgtttgagagcttccctgaggacttctacgtggagggcctgcctgagggcgtgcccttccggcggcccagcaccttcggcatcccccggctggagaagatcctgaggaacaaggccaagatcaagttcatcatcaagaagccagagatgtttgaaacagccatcaaggagagcaccagcagcaagagcccccccaggaagatcaacagcagccccaacgtgaacaccacagccagcggcgtggaggacctgaacatcatccaggtgaccatcccagatgatgacaatgaaaggctgagcaaggtggagaaggcccggcagctgcgggagcaggtgaatgacctcttcagcaggaagtttggagaggccatcggcatgggcttccctgtgaaggtgccctacaggaagatcaccatcaaccctggctgtgtggtggtggatggcatgcctcctggggtgtccttcaaggcccccagctacctggagatcagctccatgaggcgcatcctggacagcgctgagttcatcaagttcaccgtcatccggcccttccctggcctggtgatcaacaaccagctggtggaccagagcgagagcgagggccctgtgatccaggagagcgctgagcccagccagctggaggtgcctgccacagaggagatcaaggagacagatggcagcagccagatcaagcaggagccagaccccacctggtag

SEQ ID NO: 226535 - DNA, 2934 bp, Artificial Sequence
  derived and/or modified sequence
atggcccaggtggccatgagcaccctgcccgtggaggacgaggagagctcggaatctagaatggtggtgacgttcctgatgtccgccttggagtcaatgtgcaaggagctcgccaagagtaaggccgaggtggcctgcattgctgtgtacgagaccgacgtgttcgttgtgggcacagagcgaggacgagccttcgtgaacacacgcaaggacttccagaaagacttcgtgaaatactgcgttgaggaggaagaaaaggctgctgagatgcataaaatgaagagcacaactcaggccaatcggatgagtgtggatgccgtggagattgaaaccctgcggaagacggtggaggattatttctgtttttgctatggaaaggcactgggcaaaagcactgttgtcccagtgccttatgaaaaaatgttgcgcgaccagtctgccgtggtggtccaggggctgccagagggagttgcgtttaagcaccctgagaactatgatttggcaaccctgaagtggatcttggagaataaggccggtatctcatttatcatcaagcgcccattcctcgaacccaaaaagcacgtgggcggccgggtgatggtcacagatgccgaccgatcaatcctttccccaggcggctcttgtggtccgatcaaggtgaagactgagcctaccgaagactctggcatcagcctggagatggcagccgtcaccgtgaaggaagaatcagaggatcccgactactatcaatacaacattcaggcgggcccttccgaaaccgatgatgtggacgaaaagcagccactctcaaagcccctccaggggtctcatcactcgagtgagggtaacgaggggacagaaatggaggttcctgccgaggacgatgactatagcccacccagcaagcgcccaaaggctaatgagctgcctcagccgcccgtgccagaacctgcaaatgccggaaaaaggaaggtgagagaattcaattttgaaaagtggaacgccagaataacggacctccgaaagcaggtcgaggagcttttcgaaagaaaatacgcccaggccatcaaagcaaaggggcccgtgacaatcccttatccgctcttccagtcacatgtggaggacctatatgtggagggactgccagaagggataccatttcggagaccttctacctatgggataccccgattggaacgaatactcctcgccaaggagcgcatcaggttcgtaataaagaaacatgagttgttgaactccacaagagaggatctacagctggacaagcccgcttcgggagtcaaagaggagtggtatgccagaatcacaaaactccgtaagatggtggaccagctgttctgtaagaagttcgctgaggccttgggatccactgaagccaaggctgtaccatatcagaagtttgaggcgcaccctaacgacctgtacgtggaggggctcccagagaacataccatttagaagcccctcctggtatggaattcccagactcgagaagatcatccaggtcgggaataggattaaattcgtcattaagcggcctgaactgcttacacatagtaccacggaggtgacacaaccgaggacaaacaccccggtcaaggaggactggaacgtgagaattaccaaactgagaaagcaggtcgaagagatctttaacctcaagttcgcgcaggctctcgggctgaccgaggcagtgaaagtgccctacccagttttcgaatcaaatcctgagtttctgtacgtcgagggcctccctgagggcattccgtttcgcagtcctacctggttcggcatacctcgtcttgaacggattgtgcgtggcagtaataaaatcaaattcgtcgtgaaaaaaccagagttggtcatttcgtatctgcctcctggcatggcgtcaaagatcaacactaaggccttacagagtccaaagcgtcctcgaagccccggctccaattctaaagtccctgagatcgaggttactgtggaggggcctaacaacaataacccccagacgagcgccgtcaggacgccgactcagaccaatgggtctaatgtgccatttaagccaagaggccgtgagttttccttcgaagcctggaacgcgaagatcacagatctaaaacaaaaggtggagaatttgtttaatgagaaatgcggagaggccttgggtttgaaacaggctgtaaaagtcccttttgccctcttcgagtccttcccagaagacttttacgtggaaggtcttcccgagggggtgccgtttcgtcgaccctctactttcgggatacctagactggagaagatactccggaataaagccaaaatcaaatttatcatcaagaagcctgagatgttcgagacagccattaaggagtcgacaagctcaaagtcgcctccacgtaaaattaacagcagccctaacgtgaacaccactgcttcaggcgttgaagacctgaacatcattcaagtgaccatcccagacgatgacaatgagaggctgtctaaagtggaaaaagcccggcaactgcgggaacaggttaacgacttgttctcaaggaagttcggggaagccattgggatgggcttcccagtgaaggttccttataggaaaattacgatcaatcctggctgtgtggtggttgatggtatgccacccggggtttccttcaaggctccttcttacctcgagatcagttctatgcgaaggattttggattcagccgagtttatcaagtttacagttattaggccattcccagggctcgtgattaacaaccagctggtggaccagagcgaatccgaaggtccagtcatccaggagtccgctgagcccagccaactcgaggtccctgctacggaggagatcaaggaaaccgatgggagcagccagattaagcaggaacccgatcccacttggtag

SEQ ID NO: 226536 - DNA, 2934 bp, Artificial Sequence
  derived and/or modified sequence
atggcccaggtggccatgtcaacgctgcccgtggaagacgaggagagctctgaatctcggatggttgtcacttttctgatgtccgcactggagtcaatgtgtaaggaattggctaaaagtaaagcggaagtggcgtgcattgccgtttacgaaacagacgtgttcgtggtgggaactgaacggggtagagcctttgttaatacccggaaagattttcagaaagacttcgtgaagtactgtgtagaggaggaggagaaggccgcagaaatgcacaagatgaagtcaacaacccaggctaacaggatgagcgtggacgccgtggagattgagacactcagaaagaccgttgaggactatttctgcttctgttatgggaaagccttggggaagtccaccgtagtacccgtgccctatgaaaaaatgctgcgcgatcagtcagcagttgttgtgcagggactcccagagggagtggcttttaaacatcctgagaactatgatctcgcgaccttgaaatggattctggagaacaaagctggaatttcatttattatcaagcgccctttcctggaacccaagaagcacgttggcggacgggtgatggtgaccgatgcagatcggtcgatattgagtcccggaggcagctgtggccctatcaaagtgaaaactgagccaaccgaagatagcggaatttcgctcgaaatggctgcagttacagtaaaagaagagtctgaggaccctgattactatcagtataatatacaggccggacccagcgaaactgacgacgtcgacgagaagcaacccttgagtaaacccctccagggatcgcaccactcctcagagggaaatgaaggcaccgagatggaagtacccgctgaggacgatgattatagcccgccatccaagcgtccaaaagcaaatgagttgccgcagcctcctgtgcccgaaccagctaacgccggaaagagaaaagtgcgtgaatttaacttcgagaaatggaacgccaggattactgacctcagaaagcaggtggaggagttgttcgaaaggaagtatgctcaagctatcaaagctaaaggccctgtcaccataccgtatcccctttttcagtcccacgtcgaggacctctatgtggaaggtctccccgagggaatccctttcagacgtccatcaacatacggaatacccaggctggagcgcatcctcctggccaaggagagaattcgctttgtgattaagaagcatgagctgctaaatagcacccgtgaggacctgcagcttgacaagcccgcatcgggcgtaaaggaagagtggtacgcccgaataacaaagctgcgaaagatggttgaccaattgttttgtaagaagttcgctgaggccctcggcagtaccgaggctaaggctgtgccttaccaaaagttcgaagcacaccctaacgacctgtacgtcgaggggcttcctgagaacatccctttcaggtcaccgtcctggtacggaattccccgtctcgagaaaatcatccaggtgggcaaccggattaagtttgttattaaacggccagagctgctgacccattctacgaccgaggtcacccagccaaggaccaacacaccagtcaaagaggactggaatgttaggattactaaactgcgaaagcaagtagaggagatcttcaacctgaagtttgctcaggccctcggacttaccgaggcagttaaggtgccgtatcctgtttttgaatctaatcctgagtttctttacgttgagggtctcccagaagggatccctttcaggtccccaacgtggttcgggatcccaagactggagcgaatcgtccgagggtccaataagatcaaatttgttgtgaagaaaccagaactggtgatcagttatctgcccccaggcatggcaagcaagataaatactaaggcccttcagagccctaaacgccctagatcccctggatcaaatagcaaggtgcctgaaatcgaagtcactgtggaaggacctaataacaataacccgcaaacatccgccgtgcggaccccgacgcaaacaaatggtagcaacgttccattcaagccccgagggagggaattttcattcgaagcctggaacgccaagataaccgacctgaagcagaaggtggagaatctgtttaacgaaaagtgtggagaggcactcggcctaaagcaggctgtgaaggttccatttgccttattcgagtcattcccagaagatttctatgttgagggactgccagaaggtgttccctttagacgtcctagtactttcggcatcccaaggctggaaaagatcctcagaaataaagcaaaaattaagttcataatcaagaaaccagaaatgttcgaaactgccatcaaagaatccactagttccaagagcccgccacgtaaaattaacagtagtcccaatgttaatacgacagcctctggagtggaggatctgaatattatccaagtcacaattccagatgacgacaacgagcggttgtctaaggtggagaaggccaggcagctacgcgaacaggttaatgatctgttctctcgaaagttcggagaggcaatcggaatgggatttccagtaaaagtcccttaccgcaaaataaccataaacccgggttgcgttgtcgtcgatggcatgccgccaggcgttagttttaaggctccaagctatctggaaatctcttctatgagacgaattctggatagcgctgagttcatcaagttcacggtgatcagaccatttcccggacttgtgattaacaatcagttggtcgaccaaagcgaaagcgagggtccagtgatccaggagtccgccgaaccaagccagctggaagtccccgcaaccgaagaaattaaagagacagacggttcatcccaaatcaagcaggaaccagaccctacctggtag

SEQ ID NO: 226537 - DNA, 2934 bp, Artificial Sequence
  derived and/or modified sequence
atggcccaggtggccatgagcaccctgcccgtggaggacgaggagagcagcgagagcagaatggtggtgaccttcctgatgagcgccctggagagcatgtgcaaggagctggccaagagcaaggccgaggtggcctgcatcgccgtgtacgagaccgacgtgttcgtggtgggcaccgagagaggcagagccttcgtgaacaccagaaaggacttccagaaggacttcgtgaagtactgcgtggaggaggaggagaaggccgccgagatgcacaagatgaagagcaccacccaggccaacagaatgagcgtggacgccgtggagatcgagaccctgagaaagaccgtggaggactacttctgcttctgctacggcaaggccctgggcaagagcaccgtggtgcccgtgccctacgagaagatgctgagagaccagagcgccgtggtggtgcagggcctgcccgagggcgtggccttcaagcaccccgagaactacgacctggccaccctgaagtggatcctggagaacaaggccggcatcagcttcatcatcaagagacccttcctggagcccaagaagcacgtgggcggcagagtgatggtgaccgacgccgacagaagcatcctgagccccggcggcagctgcggccccatcaaggtgaagaccgagcccaccgaggacagcggcatcagcctggagatggccgccgtgaccgtgaaggaggagagcgaggaccccgactactaccagtacaacatccaggccggccccagcgagaccgacgacgtggacgagaagcagcccctgagcaagcccctgcagggcagccaccacagcagcgagggcaacgagggcaccgagatggaggtgcccgccgaggacgacgactacagcccccccagcaagagacccaaggccaacgagctgccccagccccccgtgcccgagcccgccaacgccggcaagagaaaggtgagagagttcaacttcgagaagtggaacgccagaatcaccgacctgagaaagcaggtggaggagctgttcgagagaaagtacgcccaggccatcaaggccaagggccccgtgaccatcccctaccccctgttccagagccacgtggaggacctgtacgtggagggcctgcccgagggcatccccttcagaagacccagcacctacggcatccccagactggagagaatcctgctggccaaggagagaatcagattcgtgatcaagaagcacgagctgctgaacagcaccagagaggacctgcagctggacaagcccgccagcggcgtgaaggaggagtggtacgccagaatcaccaagctgagaaagatggtggaccagctgttctgcaagaagttcgccgaggccctgggcagcaccgaggccaaggccgtgccctaccagaagttcgaggcccaccccaacgacctgtacgtggagggcctgcccgagaacatccccttcagaagccccagctggtacggcatccccagactggagaagatcatccaggtgggcaacagaatcaagttcgtgatcaagagacccgagctgctgacccacagcaccaccgaggtgacccagcccagaaccaacacccccgtgaaggaggactggaacgtgagaatcaccaagctgagaaagcaggtggaggagatcttcaacctgaagttcgcccaggccctgggcctgaccgaggccgtgaaggtgccctaccccgtgttcgagagcaaccccgagttcctgtacgtggagggcctgcccgagggcatccccttcagaagccccacctggttcggcatccccagactggagagaatcgtgagaggcagcaacaagatcaagttcgtggtgaagaagcccgagctggtgatcagctacctgccccccggcatggccagcaagatcaacaccaaggccctgcagagccccaagagacccagaagccccggcagcaacagcaaggtgcccgagatcgaggtgaccgtggagggccccaacaacaacaacccccagaccagcgccgtgagaacccccacccagaccaacggcagcaacgtgcccttcaagcccagaggcagagagttcagcttcgaggcctggaacgccaagatcaccgacctgaagcagaaggtggagaacctgttcaacgagaagtgcggcgaggccctgggcctgaagcaggccgtgaaggtgcccttcgccctgttcgagagcttccccgaggacttctacgtggagggcctgcccgagggcgtgcccttcagaagacccagcaccttcggcatccccagactggagaagatcctgagaaacaaggccaagatcaagttcatcatcaagaagcccgagatgttcgagaccgccatcaaggagagcaccagcagcaagagcccccccagaaagatcaacagcagccccaacgtgaacaccaccgccagcggcgtggaggacctgaacatcatccaggtgaccatccccgacgacgacaacgagagactgagcaaggtggagaaggccagacagctgagagagcaggtgaacgacctgttcagcagaaagttcggcgaggccatcggcatgggcttccccgtgaaggtgccctacagaaagatcaccatcaaccccggctgcgtggtggtggacggcatgccccccggcgtgagcttcaaggcccccagctacctggagatcagcagcatgagaagaatcctggacagcgccgagttcatcaagttcaccgtgatcagacccttccccggcctggtgatcaacaaccagctggtggaccagagcgagagcgagggccccgtgatccaggagagcgccgagcccagccagctggaggtgcccgccaccgaggagatcaaggagaccgacggcagcagccagatcaagcaggagcccgaccccacctggtag

SEQ ID NO: 226538 - protein, 1473 aa, Artificial Sequence
  derived and/or modified sequence
MAGGAWGRLACYLEFLKKEELKEFQLLLANKAHSRSSSGETPAQPEKTSGMEVASYLVAQYGEQRAWDLALHTWEQMGLRSLCAQAQEGAGHSPSFPYSPSEPHLGSPSQPTSTAVLMPWIHELPAGCTQGSERRVLRQLPDTSGRRWREISASLLYQALPSSPDHESPSQESPNAPTSTAVLGSWGSPPQPSLAPREQEAPGTQWPLDETSGIYYTEIREREREKSEKGRPPWAAVVGTPPQAHTSLQPHHHPWEPSVRESLCSTWPWKNEDFNQKFTQLLLLQRPHPRSQDPLVKRSWPDYVEENRGHLIEIRDLFGPGLDTQEPRIVILQGAAGIGKSTLARQVKEAWGRGQLYGDRFQHVFYFSCRELAQSKVVSLAELIGKDGTATPAPIRQILSRPERLLFILDGVDEPGWVLQEPSSELCLHWSQPQPADALLGSLLGKTILPEASFLITARTTALQNLIPSLEQARWVEVLGFSESSRKEYFYRYFTDERQAIRAFRLVKSNKELWALCLVPWVSWLACTCLMQQMKRKEKLTLTSKTTTTLCLHYLAQALQAQPLGPQLRDLCSLAAEGIWQKKTLFSPDDLRKHGLDGAIISTFLKMGILQEHPIPLSYSFIHLCFQEFFAAMSYVLEDEKGRGKHSNCIIDLEKTLEAYGIHGLFGASTTRFLLGLLSDEGEREMENIFHCRLSQGRNLMQWVPSLQLLLQPHSLESLHCLYETRNKTFLTQVMAHFEEMGMCVETDMELLVCTFCIKFSRHVKKLQLIEGRQHRSTWSPTMVVLFRWVPVTDAYWQILFSVLKVTRNLKELDLSGNSLSHSAVKSLCKTLRRPRCLLETLRLAGCGLTAEDCKDLAFGLRANQTLTELDLSFNVLTDAGAKHLCQRLRQPSCKLQRLQLVSCGLTSDCCQDLASVLSASPSLKELDLQQNNLDDVGVRLLCEGLRHPACKLIRLGLDQTTLSDEMRQELRALEQEKPQLLIFSRRKPSVMTPTEGLDTGEMSNSTSSLKRQRLGSERAASHVAQANLKLLDVSKIFPIAEIAEESSPEVVPVELLCVPSPASQGDLHTKPLGTDDDFWGPTGPVATEVVDKEKNLYRVHFPVAGSYRWPNTGLCFVMREAVTVEIEFCVWDQFLGEINPQHSWMVAGPLLDIKAEPGAVEAVHLPHFVALQGGHVDTSLFQMAHFKEEGMLLEKPARVELHHIVLENPSFSPLGVLLKMIHNALRFIPVTSVVLLYHRVHPEEVTFHLYLIPSDCSIRKAIDDLEMKFQFVRIHKPPPLTPLYMGCRYTVSGSGSGMLEILPKELELCYRSPGEDQLFSEFYVGHLGSGIRLQVKDKKDETLVWEALVKPGDLMPATTLIPPARIAVPSPLDAPQLLHFVDQYREQLIARVTSVEVVLDKLHGQVLSQEQYERVLAENTRPSQMRKLFSLSQSWDRKCKDGLYQALKETHPHLIMELWEKGSKKGLLPLSS

SEQ ID NO: 226539 - DNA, 4422 bp, Artificial Sequence
  derived and/or modified sequence
atggccggcggcgcctggggcagactggcctgctacctggagttcctgaagaaggaggagctgaaggagttccagctgctgctggccaacaaggcccacagcagaagcagcagcggcgagacccccgcccagcccgagaagaccagcggcatggaggtggccagctacctggtggcccagtacggcgagcagagagcctgggacctggccctgcacacctgggagcagatgggcctgagaagcctgtgcgcccaggcccaggagggcgccggccacagccccagcttcccctacagccccagcgagccccacctgggcagccccagccagcccaccagcaccgccgtgctgatgccctggatccacgagctgcccgccggctgcacccagggcagcgagagaagagtgctgagacagctgcccgacaccagcggcagaagatggagagagatcagcgccagcctgctgtaccaggccctgcccagcagccccgaccacgagagccccagccaggagagccccaacgcccccaccagcaccgccgtgctgggcagctggggcagccccccccagcccagcctggcccccagagagcaggaggcccccggcacccagtggcccctggacgagaccagcggcatctactacaccgagatcagagagagagagagagagaagagcgagaagggcagacccccctgggccgccgtggtgggcacccccccccaggcccacaccagcctgcagccccaccaccacccctgggagcccagcgtgagagagagcctgtgcagcacctggccctggaagaacgaggacttcaaccagaagttcacccagctgctgctgctgcagagaccccaccccagaagccaggaccccctggtgaagagaagctggcccgactacgtggaggagaacagaggccacctgatcgagatcagagacctgttcggccccggcctggacacccaggagcccagaatcgtgatcctgcagggcgccgccggcatcggcaagagcaccctggccagacaggtgaaggaggcctggggcagaggccagctgtacggcgacagattccagcacgtgttctacttcagctgcagagagctggcccagagcaaggtggtgagcctggccgagctgatcggcaaggacggcaccgccacccccgcccccatcagacagatcctgagcagacccgagagactgctgttcatcctggacggcgtggacgagcccggctgggtgctgcaggagcccagcagcgagctgtgcctgcactggagccagccccagcccgccgacgccctgctgggcagcctgctgggcaagaccatcctgcccgaggccagcttcctgatcaccgccagaaccaccgccctgcagaacctgatccccagcctggagcaggccagatgggtggaggtgctgggcttcagcgagagcagcagaaaggagtacttctacagatacttcaccgacgagagacaggccatcagagccttcagactggtgaagagcaacaaggagctgtgggccctgtgcctggtgccctgggtgagctggctggcctgcacctgcctgatgcagcagatgaagagaaaggagaagctgaccctgaccagcaagaccaccaccaccctgtgcctgcactacctggcccaggccctgcaggcccagcccctgggcccccagctgagagacctgtgcagcctggccgccgagggcatctggcagaagaagaccctgttcagccccgacgacctgagaaagcacggcctggacggcgccatcatcagcaccttcctgaagatgggcatcctgcaggagcaccccatccccctgagctacagcttcatccacctgtgcttccaggagttcttcgccgccatgagctacgtgctggaggacgagaagggcagaggcaagcacagcaactgcatcatcgacctggagaagaccctggaggcctacggcatccacggcctgttcggcgccagcaccaccagattcctgctgggcctgctgagcgacgagggcgagagagagatggagaacatcttccactgcagactgagccagggcagaaacctgatgcagtgggtgcccagcctgcagctgctgctgcagccccacagcctggagagcctgcactgcctgtacgagaccagaaacaagaccttcctgacccaggtgatggcccacttcgaggagatgggcatgtgcgtggagaccgacatggagctgctggtgtgcaccttctgcatcaagttcagcagacacgtgaagaagctgcagctgatcgagggcagacagcacagaagcacctggagccccaccatggtggtgctgttcagatgggtgcccgtgaccgacgcctactggcagatcctgttcagcgtgctgaaggtgaccagaaacctgaaggagctggacctgagcggcaacagcctgagccacagcgccgtgaagagcctgtgcaagaccctgagaagacccagatgcctgctggagaccctgagactggccggctgcggcctgaccgccgaggactgcaaggacctggccttcggcctgagagccaaccagaccctgaccgagctggacctgagcttcaacgtgctgaccgacgccggcgccaagcacctgtgccagagactgagacagcccagctgcaagctgcagagactgcagctggtgagctgcggcctgaccagcgactgctgccaggacctggccagcgtgctgagcgccagccccagcctgaaggagctggacctgcagcagaacaacctggacgacgtgggcgtgagactgctgtgcgagggcctgagacaccccgcctgcaagctgatcagactgggcctggaccagaccaccctgagcgacgagatgagacaggagctgagagccctggagcaggagaagccccagctgctgatcttcagcagaagaaagcccagcgtgatgacccccaccgagggcctggacaccggcgagatgagcaacagcaccagcagcctgaagagacagagactgggcagcgagagagccgccagccacgtggcccaggccaacctgaagctgctggacgtgagcaagatcttccccatcgccgagatcgccgaggagagcagccccgaggtggtgcccgtggagctgctgtgcgtgcccagccccgccagccagggcgacctgcacaccaagcccctgggcaccgacgacgacttctggggccccaccggccccgtggccaccgaggtggtggacaaggagaagaacctgtacagagtgcacttccccgtggccggcagctacagatggcccaacaccggcctgtgcttcgtgatgagagaggccgtgaccgtggagatcgagttctgcgtgtgggaccagttcctgggcgagatcaacccccagcacagctggatggtggccggccccctgctggacatcaaggccgagcccggcgccgtggaggccgtgcacctgccccacttcgtggccctgcagggcggccacgtggacaccagcctgttccagatggcccacttcaaggaggagggcatgctgctggagaagcccgccagagtggagctgcaccacatcgtgctggagaaccccagcttcagccccctgggcgtgctgctgaagatgatccacaacgccctgagattcatccccgtgaccagcgtggtgctgctgtaccacagagtgcaccccgaggaggtgaccttccacctgtacctgatccccagcgactgcagcatcagaaaggccatcgacgacctggagatgaagttccagttcgtgagaatccacaagcccccccccctgacccccctgtacatgggctgcagatacaccgtgagcggcagcggcagcggcatgctggagatcctgcccaaggagctggagctgtgctacagaagccccggcgaggaccagctgttcagcgagttctacgtgggccacctgggcagcggcatcagactgcaggtgaaggacaagaaggacgagaccctggtgtgggaggccctggtgaagcccggcgacctgatgcccgccaccaccctgatcccccccgccagaatcgccgtgcccagccccctggacgccccccagctgctgcacttcgtggaccagtacagagagcagctgatcgccagagtgaccagcgtggaggtggtgctggacaagctgcacggccaggtgctgagccaggagcagtacgagagagtgctggccgagaacaccagacccagccagatgagaaagctgttcagcctgagccagagctgggacagaaagtgcaaggacggcctgtaccaggccctgaaggagacccacccccacctgatcatggagctgtgggagaagggcagcaagaagggcctgctgcccctgagcagctag

SEQ ID NO: 226540 - DNA, 1527 bp, Artificial Sequence
  derived and/or modified sequence
atggcccacttcgaggagatgggcatgtgcgtggagaccgacatggagctgctggtgtgcaccttctgcatcaagttcagcagacacgtgaagaagctgcagctgatcgagggcagacagcacagaagcacctggagccccaccatggtggtgctgttcagatgggtgcccgtgaccgacgcctactggcagatcctgttcagcgtgctgaaggtgaccagaaacctgaaggagctggacctgagcggcaacagcctgagccacagcgccgtgaagagcctgtgcaagaccctgagaagacccagatgcctgctggagaccctgagactggccggctgcggcctgaccgccgaggactgcaaggacctggccttcggcctgagagccaaccagaccctgaccgagctggacctgagcttcaacgtgctgaccgacgccggcgccaagcacctgtgccagagactgagacagcccagctgcaagctgcagagactgcagctggtgagctgcggcctgaccagcgactgctgccaggacctggccagcgtgctgagcgccagccccagcctgaaggagctggacctgcagcagaacaacctggacgacgtgggcgtgagactgctgtgcgagggcctgagacaccccgcctgcaagctgatcagactgggcctggaccagaccaccctgagcgacgagatgagacaggagctgagagccctggagcaggagaagccccagctgctgatcttcagcagaagaaagcccagcgtgatgacccccaccgagggcctggacaccggcgagatgagcaacagcaccagcagcctgaagagacagagactgggcagcgagagagccgccagccacgtggcccaggccaacctgaagctgctggacgtgagcaagatcttccccatcgccgagatcgccgaggagagcagccccgaggtggtgcccgtggagctgctgtgcgtgcccagccccgccagccagggcgacctgcacaccaagcccctgggcaccgacgacgacttctggggccccaccggccccgtggccaccgaggtggtggacaaggagaagaacctgtacagagtgcacttccccgtggccggcagctacagatggcccaacaccggcctgtgcttcgtgatgagagaggccgtgaccgtggagatcgagttctgcgtgtgggaccagttcctgggcgagatcaacccccagcacagctggatggtggccggccccctgctggacatcaaggccgagcccggcgccgtggaggccgtgcacctgccccacttcgtggccctgcagggcggccacgtggacaccagcctgttccagatggcccacttcaaggaggagggcatgctgctggagaagcccgccagagtggagctgcaccacatcgtgctggagaaccccagcttcagccccctgggcgtgctgctgaagatgatccacaacgccctgagattcatccccgtgaccagcgtggtgctgctgtaccacagacccagctag

SEQ ID NO: 226541 - DNA, 4422 bp, Artificial Sequence
  derived and/or modified sequence
atggccgggggggcttgggggaggctcgcatgctacctagaattccttaaaaaggaagaactgaaagaatttcagctcctgttagcgaataaagcacacagccggagctcaagcggagagacccctgcccagcccgaaaagacatcaggtatggaggtggcatcatacctggtggcccagtacggtgagcagcgggcctgggacctcgcgctccacacctgggaacagatgggattgcgcagcttgtgtgctcaggctcaggagggggccgggcacagcccctctttcccatacagtccgtccgagccacacctaggttcgccctcacagccaacatctacggcggtcctcatgccttggatacacgagctgcctgccggatgcacccagggaagcgaaagacgggtacttaggcagctcccagacacctccggccgtaggtggcgggaaatcagtgccagtctgttgtaccaggctctgcccagctccccggatcacgaatcgcctagccaggagtctcctaacgcaccaacatccacagccgttctggggagctggggttcccccccgcagcccagcctcgcaccgcgcgagcaagaggctcctggcactcagtggccattggatgaaacctctggcatctactacacggagattagggagagggaacgggaaaagtctgagaaggggcgacccccctgggcagccgtggtgggcacacccccccaagcacacaccagtttacaacctcatcaccacccttgggaaccgtctgtcagggagtcgctgtgttccacctggccctggaagaatgaggacttcaatcaaaagtttacgcaactcctgctacttcagagaccgcatcccaggagccaagatcctttggtgaaacgttcttggcccgactacgtggaggagaaccggggccacctgatcgagatccgggacctgttcggacccggcctggatacccaggaaccgagaattgttatactccagggagccgccggaatagggaagtctactcttgccagacaggtcaaggaggcatggggtcgaggtcagctttacggggatcggtttcaacacgtattctacttctcctgtcgggaacttgctcagagcaaggtggtgtctctggccgagctgattggaaaagacggtaccgccactccagcacctattaggcaaattctctctaggcctgaacgcctcttatttatcctggatggagtggacgagcctggctgggtgctgcaagagccaagctccgagctgtgtctccattggagtcagccccagcctgccgacgctctcctggggtcactcctcggtaaaactatccttcctgaagcaagtttcctgatcacagcaagaactaccgctttacagaacttaataccgtctctggagcaggcaaggtgggtcgaagttctaggctttagcgagtcctctcgcaaggaatatttctaccgctatttcacggacgagcggcaagctatccgggctttccgcttagtgaaaagtaacaaggaactctgggccctctgcctggtgccatgggtatcctggctggcatgcacatgcctgatgcaacagatgaaacggaaagagaagctgacactgacttccaagactacaacgacactgtgtcttcattacttggcacaagccctgcaggcccagccgctgggcccgcagctcagagacctttgttcactggccgccgagggcatttggcagaagaaaaccctgttctccccagatgacctgcgcaaacacggcttggatggtgctatcatctccaccttcctgaagatgggcatactgcaggagcaccctatccccctgtcatatagctttattcacctctgcttccaggaatttttcgcagcaatgagctatgttctggaggatgagaagggtagaggtaaacatagcaactgcatcattgatctcgagaagaccctagaagcatatggcatccatggtctctttggggcctcgacgactcgctttctattgggcctgctgagtgatgagggtgaaagagaaatggaaaacattttccattgtcggctcagccagggccgtaacttgatgcagtgggtgccctcgttacaattgctgctccagccccatagccttgagtctttacattgtctgtatgagaccaggaataaaacattcttgacccaggtgatggctcatttcgaggagatgggaatgtgtgtggagactgacatggagctcctggtgtgtacattctgtattaaattttcacgccatgtgaaaaagctgcagctgattgagggcagacagcataggtctacatggtctccgactatggtcgtcctgtttagatgggtccctgtcaccgatgcctattggcaaatcctgttctccgtcctcaaagttacacggaatcttaaagagctggacctatctgggaacagcctcagccacagtgcggtaaaaagcctgtgtaagaccctaagaagaccacggtgtttattagagaccctgagactcgccggctgtgggcttacggccgaagattgcaaagacctggctttcggtttgcgtgcaaaccagacgctcaccgaactcgatctgagctttaacgtgttaaccgatgcaggcgccaagcacctatgtcagcgtctccgacagccttcctgtaagctgcagaggctgcagctggtctcttgcggtctaaccagcgactgctgccaggatctggcaagtgtgctatctgcaagcccaagcctgaaggagctggacctgcagcagaacaatctggacgatgtgggggtgcggctgctatgtgagggcttacgccacccggcgtgtaagcttatccgcctgggattggaccagaccaccctctctgacgagatgaggcaagagttacgggcgttagagcaggagaaaccccagcttctgatttttagtcgccgaaaacccagtgtaatgaccccgaccgaaggcttggatacaggcgaaatgtccaactctacatcgtccctcaagaggcaacggctaggttcagaaagagcggcttcccacgtcgcacaagccaatctgaagttgctggacgtgagtaaaatatttccaatcgccgagatcgctgaggaaagctctccagaggttgttcctgtggagctgctctgcgtgccaagccccgccagccagggcgatctacacactaagccattgggaaccgacgacgacttctggggccccacaggcccagtagccactgaggttgtcgacaaggaaaaaaacctgtacagggttcattttcctgttgccggaagttatcgatggcctaacacaggtctgtgcttcgtgatgcgagaagccgttaccgtggaaattgaattttgcgtctgggaccagtttttaggggaaataaacccacagcattcatggatggtggctggtccactcctcgacataaaggcagagccaggagccgtggaagccgtgcaccttccacatttcgtggccttacaagggggtcacgtggatacctccttgttccagatggctcacttcaaagaggaaggcatgttactcgagaagcctgcaagagtggaactgcaccacatcgttctggagaatcctagtttctcccccctgggggtcctgctcaaaatgatacacaacgcgttaaggtttattcccgtgaccagcgtagttctgctgtaccaccgtgttcatcctgaggaagtgactttccatttgtacctaattccctccgattgttctatcagaaaggccatcgatgatctggaaatgaagttccaattcgtgcgtatacacaagccacctcctctaacgcctctttatatgggttgtcggtacactgtgtccggatcaggctccgggatgctggaaatcctaccaaaagaattagaactgtgttatcgaagccctggggaggaccagcttttctccgagttttacgttggccacctgggaagtggaattcggctccaggtcaaggacaagaaagacgaaacattggtctgggaagccctggtgaagccaggggacttgatgcccgcaacaacattgataccaccagcgagaattgccgtgccctcacctctggacgctccccaactccttcactttgttgaccaataccgagaacagctgattgccagggtgacatccgtcgaagtggtgctggataagttacacggacaggtgctgtcccaggagcagtatgagagggtcctcgcagaaaatacacggccctcccagatgcggaaactgttcagtttgtcacagagttgggacaggaaatgtaaagacggcctgtaccaggccctcaaggagactcaccctcaccttatcatggagttgtgggagaagggatctaagaagggtctactcccattgtcctcatag

SEQ ID NO: 226542 - DNA, 4422 bp, Artificial Sequence
  derived and/or modified sequence
atggcagggggggcttgggggaggttagcgtgctacctggaatttctcaaaaaggaggagctgaaggaatttcagctcctgcttgccaataaagcccattctcgctctagcagtggcgagacacctgctcagccagaaaagaccagcggaatggaggttgcctcctaccttgtggcacagtatggggagcagagggcctgggatctggctctccacacttgggaacaaatgggcctgcgctcactgtgcgcccaggcccaggagggagccggacatagcccttccttcccttacagtcccagtgagcctcacctgggctccccctctcagcccacaagtacagctgttctcatgccatggatccacgagcttcccgctggatgtacgcagggcagtgaaaggcgggtgctgcgtcagctgcccgacacctcgggccggcggtggagagaaattagtgcatcactgctgtaccaggccctgccctcctcccccgaccatgagtctcccagtcaggaatctcctaatgctccaacaagtacagccgtgttaggaagctggggatctcctccacagccatccctggctccacgcgagcaggaagccccaggtacccaatggcctttggacgaaacatcggggatatattacaccgaaatccgggaacgagagagagaaaaatcagaaaagggcaggcctccctgggctgcggtggtgggaacgccccctcaggcacatacaagcctgcagccccatcaccacccttgggaaccatccgtgagagagtccctttgttccacatggccatggaaaaatgaagacttcaaccaaaagttcactcaactgcttctgctgcaacggccacaccctagatcgcaggacccgctcgttaagagaagctggcccgactacgtggaagaaaataggggtcacctcatcgaaatccgggacctcttcggacccggcttggacacacaggagcctcggatcgtaattctgcagggagctgccggcatcgggaaaagcaccctcgctagacaagtaaaggaagcctgggggcgcgggcagttgtacggtgatcgcttccagcacgtattttatttctcttgtcgggaactggctcagagtaaggttgtgagtctggccgagctgattggcaaagacggtacggcaaccccagctccgatcaggcaaatcttgtctagaccggaacggctgctatttatcttagacggcgtggacgaacctggatgggtccttcaagagccgtctagcgaactgtgcctccactggtcccagccacagccagctgacgccctgcttgggagcttgctcgggaagacgatcctgccggaagcatcctttctgattactgccaggaccactgcattacagaacctgattccttcactcgaacaggccagatgggtagaggttctgggcttttctgagtccagcaggaaggagtatttctaccggtacttcaccgatgagcgccaggccatacgggccttcagactggtgaaatcaaacaaagaactttgggctctctgcctggtgccatgggtctcttggctggcgtgtacgtgcctgatgcagcagatgaagagaaaggagaaattaaccctaacaagtaagactacaaccacactgtgcttgcattacctggcgcaagccctccaggcccaaccactgggccctcagctacgggacctgtgctccctggcagcagaagggatatggcagaagaaaaccctgttcagtcctgatgaccttcgcaagcacgggctagatggagcgattatctccacctttctgaaaatgggaattctgcaagagcatcctatacccctgtcttacagcttcatccacctgtgttttcaggagttcttcgccgcaatgagctatgtgctggaggatgagaaaggccgtgggaagcactcaaattgcattattgacctcgaaaagacccttgaggcttatgggatccatgggctgttcggggctagtacaacacgcttcctgctgggcttgctcagcgacgagggagagagagagatggaaaatatctttcactgtaggctctcccagggacgcaacttgatgcagtgggtccctagtctgcagctcctcctccaaccacatagtctggagtccctgcattgcctctatgagacacggaacaaaacatttctgacgcaggtgatggctcactttgaggaaatggggatgtgcgtggaaaccgatatggaactgctcgtctgcactttctgtatcaaattttccaggcatgtcaagaagttacagttaatcgaaggacgtcagcataggagtacctggagccccacaatggtagtgttgtttcggtgggtaccggtgaccgatgcatactggcagatcctgttttcagtgttgaaggttactcggaacctgaaggaactggacctatccggaaatagcctatcgcacagtgctgtcaagtctctatgcaaaactctccgccgtcccaggtgcttactcgaaacactgagactagcaggatgtgggctgactgccgaagattgtaaggacctcgcatttggccttcgggccaaccagaccctgaccgaattggatctttcattcaatgtccttacagatgctggggccaaacacctgtgccaacgcctgaggcaaccttcctgtaagctgcagcgcttgcaactcgtgtcctgcggactgacatccgattgttgtcaggacctcgcctccgtcctgagcgcctccccaagcctgaaagagctggatttgcaacagaacaaccttgacgacgttggtgtgcgtcttctgtgcgaggggcttcgccaccccgcatgtaaattaattagacttggtctcgatcagacaacactgagtgacgagatgcgccaggagctgcgcgccctagaacaggagaaacctcagttactgattttctcccgtagaaaaccgtcagtaatgacccccaccgagggcctggatacaggcgagatgtctaatagtaccagttctttaaagcgccagcggctgggttcagagcgcgccgcgagccatgtagcccaggcaaacctaaagttactggacgtttcaaaaatttttcctatcgccgaaatcgcagaggaaagctctccggaagtggtcccagtcgaactgttgtgcgtgccaagccccgcgagtcagggggatttgcataccaagcctttaggtacggatgatgatttttggggcccaacgggacctgtggcaacggaggtggttgacaaagagaaaaatctgtaccgggtgcacttccccgtcgccgggtcttatagatggcccaatacgggcctgtgttttgtcatgcgggaggcggtgaccgtggagatcgaattttgtgtttgggatcagttcttgggtgagataaaccctcagcactcttggatggttgctggtcctctactggacatcaaggccgagccaggcgccgtggaagccgtgcatctgccccatttcgtggccctccagggcggccacgtcgatacatccctgtttcagatggcacatttcaaggaggaagggatgctccttgagaagcctgcccgagtggagcttcatcatatcgttctggaaaatccctcgttcagcccattgggagttctgctgaaaatgatacataacgcgctccgcttcatcccagtgacaagcgtcgttcttctgtaccatagggtacacccagaggaagtgacctttcacctgtatctgatcccaagtgattgttctatccgcaaggccattgatgacctcgagatgaaattccagtttgtgcgcatccacaaaccaccccccctgaccccgctgtatatggggtgccgatataccgtgtcagggagcgggtctggaatgcttgagatactgccaaaggagctcgagctctgctatagatctccaggagaggaccagttatttagcgagttctatgtgggacacttgggatctggtattaggcttcaggtgaaagataaaaaagatgagactctggtatgggaagcattggttaaacccggtgatctcatgccagcaacaactcttatccccccagcgcggatcgcagttccatccccattggatgcaccacagctactccatttcgtggatcaatacagggagcagttaatcgctcgcgtaacttcagttgaagttgttttagacaagctgcacgggcaggtactgtcccaggagcagtacgaacgtgtcctcgcggaaaatacaaggcccagccagatgaggaagctgttctccctatctcagagctgggatagaaagtgtaaagatgggttataccaagctttaaaggagactcacccccatctgatcatggagctctgggagaaggggtctaagaagggattactgccactatcaagttag

SEQ ID NO: 226543 - DNA, 1527 bp, Artificial Sequence
  derived and/or modified sequence
atggcccacttcgaagagatggggatgtgtgttgaaaccgatatggagttgcttgtctgtaccttttgcatcaagttctctcgacatgtcaaaaagctgcagctgatcgaggggaggcaacacagaagcacttggagtcctaccatggtagtacttttccgatgggtccccgtgacagatgcctactggcagatcctgttctccgtcttgaaggtcactagaaacttgaaagagctggacttgagtggaaatagcctgtctcacagcgccgtgaagagtctctgtaaaacattgcgcaggcctcggtgcctgctggagaccctgaggttagccggctgtggccttacagctgaagactgtaaggacctggcctttggacttagggccaatcagacccttaccgagctggatttgtctttcaatgtcctaacagatgcaggggccaagcacttatgccaaagactaaggcaaccttcttgcaagctgcagaggctgcagttagtgtcttgcggtttgacgtctgattgctgccaggacctggcttcagtcctcagcgcctctccctctttgaaggaactcgacctgcagcagaacaatctggacgatgtgggcgtacgccttctctgcgagggcctccggcatcccgcgtgcaaactgattagactgggtctggatcagacgacactctccgatgagatgagacaggaattgagggccctcgaacaggagaagccacagttgctgatattttccagaagaaaaccctcagtgatgacacctacagaaggcctggacaccggtgaaatgtctaactcaacctcttctctgaaacggcagcgtttaggctccgaacgcgcggcgtcccacgtggctcaggctaacctcaaattactagatgtgtccaagatcttccccattgccgagattgccgaagaaagctcacccgaagttgtgcctgtggaactgttgtgcgtgcccagccctgcctctcaaggggacttgcacacaaagcctctcgggacggacgacgatttttggggcccaaccgggccagtggctacagaagtggtggacaaggaaaagaacctttacagggtgcactttccagtggctggatcttacagatggcccaatactgggctgtgcttcgtgatgcgagaggccgtgactgtggagatagaattttgcgtgtgggatcagtttcttggcgagattaaccctcagcattcctggatggtcgcagggcccctgctcgatataaaagcggagcctggcgctgtcgaagctgtccatctgcctcactttgtggctctgcagggcggccatgtggatacaagtctgttccaaatggcgcacttcaaggaagagggcatgctcttggagaaaccagcccgtgtggagcttcatcacatcgtcttggagaacccaagtttttctccgctgggtgtgctcctgaagatgattcacaatgcactccgattcattcccgttactagtgtcgtgctgctgtaccaccgtccttcttag

SEQ ID NO: 226544 - DNA, 4422 bp, Artificial Sequence
  derived and/or modified sequence
atggccggcggggcctggggccgcctggcctgctacctggagttcctgaagaaggaggagctgaaggagttccagctgctgctggccaacaaggcccacagccgcagcagcagcggggagaccccagcccagcctgagaagaccagcggcatggaggtggccagctacctggtggcccagtatggagagcagagggcctgggacctggccctgcacacctgggagcagatgggcctgcggagcctgtgtgcccaggcccaggagggcgccggccacagccccagcttcccctacagccccagcgagccccacctgggcagccccagccagcccaccagcacagctgtgctgatgccctggatccacgagctgcctgctggctgcacccagggcagcgagcggcgggtgctgcggcagctgcctgacaccagcggccgccgctggagggagatcagcgccagcctgctgtaccaggccctgcccagcagcccagaccacgagagccccagccaggagagccccaatgcccccaccagcacagctgtgctgggctcctggggcagccccccccagcccagcctggccccccgggagcaggaggcccctggcacccagtggcccctggatgagaccagcggcatctactacacagagatccgggagcgggagcgggagaagtctgagaagggccggcccccctgggccgctgtggtgggcaccccaccccaggcccacaccagcctgcagccccaccaccacccctgggagcccagcgtgcgggagagcctgtgcagcacctggccctggaagaatgaagacttcaaccagaagttcacccagctgctgctgctgcagaggccccaccccaggagccaggaccccctggtgaagaggtcctggccagactatgtggaggagaacagaggccacctgattgagatccgggacctgtttggacctggcctggacacccaggagcccagaattgtcatcctgcagggcgccgccggcatcggcaagagcaccctggcccggcaggtgaaggaggcctggggccggggccagctgtatggagaccgcttccagcacgtgttctacttcagctgccgggagctggcccagagcaaggtggtgtccctggccgagctgattggcaaggatggaacagccaccccagcccccatccggcagatcctgagcaggcctgagcggctgctcttcatcctggatggagtggatgagcccggctgggtgctgcaggagcccagcagcgagctgtgcctgcactggagccagccccagcctgcagatgccctgctgggcagcctgctgggcaagaccatcctgcctgaggccagcttcctgatcacagcccggaccacagccctgcagaacctgatccccagcctggagcaggcccgctgggtggaggtgctgggcttcagcgagagcagcaggaaggagtacttctaccgctacttcacagatgagcggcaggccatccgggccttccggctggtgaagagcaacaaggagctgtgggccctgtgcctggtgccctgggtgtcctggctggcctgcacctgcctgatgcagcagatgaagaggaaggagaagctgaccctgaccagcaagaccaccaccaccctgtgcctgcactacctggcccaggccctgcaggcccagcccctgggcccccagctgcgggacctgtgcagcctggccgctgagggcatctggcagaagaagaccctcttctccccagatgacctgaggaagcacggcctggatggagccatcatcagcaccttcctgaagatgggcatcctgcaggagcaccccatccccctgagctacagcttcatccacctgtgcttccaggagttctttgctgccatgtcctatgtgctggaggatgagaagggccggggcaagcacagcaactgcatcatcgacctggagaagaccctggaggcctacggcatccacggcctgtttggagccagcaccacccgcttcctgctgggcctgctgagtgatgaaggagagcgggagatggagaacatcttccactgccgcctgagccagggcaggaacctgatgcagtgggtgcccagcctgcagctgctgctgcagccccacagcctggagagcctgcactgcctgtatgagaccaggaacaagaccttcctgacccaggtgatggcccactttgaggagatgggcatgtgtgtggagacagacatggagctgctggtgtgcaccttctgcatcaagttcagcagacatgtgaagaagctgcagctgattgagggccggcagcacaggagcacctggagccccaccatggtggtgctcttccgctgggtgcctgtgacagatgcctactggcagatcctcttctctgtgctgaaggtgaccaggaacctgaaggagctggacctgagcggcaacagcctgagccacagcgctgtgaagagcctgtgcaagaccctgcggcggccccgctgcctgctggagaccctgcggctggccggctgcggcctgacagctgaggactgcaaggacctggccttcggcctgcgggccaaccagaccctgacagagctggacctgtccttcaacgtgctgacagatgctggggccaagcacctgtgccagaggctgcggcagcccagctgcaagctgcagaggctgcagctggtgtcctgtggcctgaccagtgactgctgccaggacctggcctctgtgctgagcgccagccccagcctgaaggagctggacctgcagcagaacaacctggatgatgtgggcgtgcggctgctgtgtgagggcctgcggcacccagcctgcaagctgatccggctgggcctggaccagaccaccctgagtgatgagatgaggcaggagctgcgggccctggagcaggagaagccccagctgctgatcttcagcaggaggaagcccagcgtgatgacccccacagagggcctggacaccggggagatgagcaacagcaccagcagcctgaagaggcagaggctgggcagcgagcgggccgccagccacgtggcccaggccaacctgaagctgctggatgtgtccaagatcttccccatcgccgagattgctgaggagagcagccctgaggtggtgcctgtggagctgctgtgtgtgcccagccctgccagccagggcgacctgcacaccaagcccctgggcacagatgatgacttctggggccccactggacctgtggccacagaggtggtggacaaggagaagaacctgtacagagtgcacttccctgtggccggcagctaccgctggcccaacacaggcctgtgctttgtgatgagggaggccgtgacagtggagattgagttctgtgtgtgggaccagttcctgggggagatcaacccccagcacagctggatggtggccggccccctgctggacatcaaggccgagcccggggctgtggaggccgtgcacctgccccactttgtggccctgcagggcggccacgtggacaccagcctcttccagatggcccacttcaaggaggagggcatgctgctggagaagccagcccgggtggagctgcaccacatcgtgctggagaaccccagcttcagccccctgggcgtgctgctgaagatgatccacaatgccctgcgcttcatccctgtgacctctgtggtgctgctgtaccaccgggtgcaccctgaggaggtgaccttccacctgtacctgatccccagcgactgcagcatcaggaaggccattgatgacctggagatgaagttccagtttgtgcgcatccacaagcccccacccctgacccccctgtacatgggctgccgctacacagtgtctggcagcggcagcggcatgctggagatcctgcccaaggagctggagctgtgctaccgcagccctggagaggaccagctgttcagcgagttctacgtgggccacctgggcagcggcatccggctgcaggtgaaggacaagaaggatgagaccctggtgtgggaggccctggtgaagccaggggacctgatgcctgccaccaccctcatccccccagccagaattgctgtgcccagccccctggatgccccccagctgctgcactttgtggaccagtaccgggagcagctgattgcccgggtgacctctgtggaggtggtgctggacaagctgcacggccaggtgctgagccaggagcagtatgagcgggtgctggccgagaacacccggcccagccagatgaggaagctgttcagcctgagccagagctgggacaggaagtgcaaggatggcctgtaccaggccctgaaggagacccacccccacctgatcatggagctgtgggagaagggcagcaagaagggcctgctgcccctgagcagctag

SEQ ID NO: 226545 - DNA, 1527 bp, Artificial Sequence
  derived and/or modified sequence
atggcccactttgaggagatgggcatgtgtgtggagacagacatggagctgctggtgtgcaccttctgcatcaagttcagcagacatgtgaagaagctgcagctgattgagggccggcagcacaggagcacctggagccccaccatggtggtgctcttccgctgggtgcctgtgacagatgcctactggcagatcctcttctctgtgctgaaggtgaccaggaacctgaaggagctggacctgagcggcaacagcctgagccacagcgctgtgaagagcctgtgcaagaccctgcggcggccccgctgcctgctggagaccctgcggctggccggctgcggcctgacagctgaggactgcaaggacctggccttcggcctgcgggccaaccagaccctgacagagctggacctgtccttcaacgtgctgacagatgctggggccaagcacctgtgccagaggctgcggcagcccagctgcaagctgcagaggctgcagctggtgtcctgtggcctgaccagtgactgctgccaggacctggcctctgtgctgagcgccagccccagcctgaaggagctggacctgcagcagaacaacctggatgatgtgggcgtgcggctgctgtgtgagggcctgcggcacccagcctgcaagctgatccggctgggcctggaccagaccaccctgagtgatgagatgaggcaggagctgcgggccctggagcaggagaagccccagctgctgatcttcagcaggaggaagcccagcgtgatgacccccacagagggcctggacaccggggagatgagcaacagcaccagcagcctgaagaggcagaggctgggcagcgagcgggccgccagccacgtggcccaggccaacctgaagctgctggatgtgtccaagatcttccccatcgccgagattgctgaggagagcagccctgaggtggtgcctgtggagctgctgtgtgtgcccagccctgccagccagggcgacctgcacaccaagcccctgggcacagatgatgacttctggggccccactggacctgtggccacagaggtggtggacaaggagaagaacctgtacagagtgcacttccctgtggccggcagctaccgctggcccaacacaggcctgtgctttgtgatgagggaggccgtgacagtggagattgagttctgtgtgtgggaccagttcctgggggagatcaacccccagcacagctggatggtggccggccccctgctggacatcaaggccgagcccggggctgtggaggccgtgcacctgccccactttgtggccctgcagggcggccacgtggacaccagcctcttccagatggcccacttcaaggaggagggcatgctgctggagaagccagcccgggtggagctgcaccacatcgtgctggagaaccccagcttcagccccctgggcgtgctgctgaagatgatccacaatgccctgcgcttcatccctgtgacctctgtggtgctgctgtaccaccggcccagctag

SEQ ID NO: 226546 - DNA, 4422 bp, Artificial Sequence
  derived and/or modified sequence
atggccggcggcgcctggggccggctggcctgctacctggagttcctcaagaaagaagagctgaaggaattccaattactgctcgcaaataaagctcattcaagaagctcgtcaggtgaaactcctgcgcagccagagaagacatcaggcatggaagtggcatcttatctcgttgcacagtacggggagcagagagcctgggatttagctctgcacacctgggaacagatgggcctgagaagtctctgcgcccaagctcaggagggcgcagggcacagtccatcgttcccttattccccatccgagccacacttaggatcaccttcccaaccaacctccacggccgttctgatgccttggattcacgagctcccagcaggatgcactcagggttctgagaggagagtcctgaggcagctccctgacacgtccggcagacggtggcgcgagatcagcgcctccttattatatcaagccttgccctctagccctgatcatgaatctccctcacaagaatccccaaatgcgccgacctcgacggcagttttgggcagctgggggagcccacctcagccctcattagcaccacgcgagcaagaggctccaggaactcaatggcccctggacgagacgtcaggcatttactacacagagatcagggagagagagcgggagaagagcgaaaaaggccggccaccttgggccgctgtggtgggtacccccccacaagcgcacacctcattgcagccccaccaccatccctgggagcccagcgtgcgcgagtctctttgtagcacctggccatggaagaacgaagatttcaaccagaagtttacccagctcttgctgctgcagaggcctcatccacgaagtcaggacccgctggtgaagcgttcctggccagactacgtggaagaaaaccggggccatctgattgagatccgggatctattcgggcctggcctagatacgcaggaacccaggattgtcatcctgcagggcgctgcagggatcggaaaaagtacgctcgcacggcaggtaaaagaagcctggggtagaggccagctgtatggcgatcgcttccagcacgtattctactttagctgtcgggagcttgcccagtccaaagtggtatctttggcggagctgatcgggaaagacgggacagcgacacccgcccccatcaggcagattctgtccagacctgagcgactgttgttcatcctcgacggcgtcgacgagccgggttgggtgcttcaagagccctctagcgagctctgcctccactggagtcagcctcagccggccgatgctctgctggggtccctcctgggaaagacaatcttacctgaagcgtcctttcttataaccgccagaactaccgcactgcagaatctgatcccctccctagagcaggcaagatgggttgaggtgctgggattctcggagtcaagccgaaaggaatacttctatagatacttcaccgacgagagacaggcaattcgcgcgtttcgtctggtcaaatccaacaaagagctttgggccctgtgcttagtcccttgggtgtcttggctggcatgtacctgcctcatgcagcagatgaagagaaaggagaaactgaccttgacctcaaagactacaaccaccctatgcctccattacttagcgcaggccctacaagcccagccactgggcccacaattgcgcgacttgtgcagcttagcggcggaaggaatttggcaaaaaaagaccctattttccccggacgacctgcggaagcacggcctggatggggctatcatatccacattcttgaagatgggcatccttcaagagcatcctattcccctgtcctattcattcatacatctttgcttccaggaatttttcgcagccatgagctacgtacttgaagacgaaaaaggcaggggcaaacacagcaattgtattattgacctggagaaaacgctggaggcttacgggatccacgggctgtttggtgctagtaccacacgcttccttcttggactgttgtctgatgaaggtgagagggagatggagaatattttccactgccgcctgtcccagggacgcaacttgatgcagtgggtgccgagcttgcagcttttgcttcagcctcacagtcttgaatcactgcattgtttatacgagactagaaacaagaccttcctaacacaggtcatggcccattttgaagaaatgggcatgtgcgtcgagaccgacatggaactgctcgtatgcacattctgtatcaagttctctcgtcatgttaaaaagctccagctgatcgaaggcaggcaacacaggtctacatggtctccaacaatggtggtactatttcgctgggttccggtaactgacgcatattggcagattctgttcagcgtgctgaaggtgacacgaaatttgaaggagttggatctctccgggaactctctttcccactccgcagttaagtccctatgcaagacactgagacggcctaggtgtttattggagacactgcggctggcgggatgcgggcttacagcagaggactgtaaggatctggccttcgggctccgcgctaaccagaccctaactgagctagacctgagtttcaatgtgcttactgatgccggtgcgaagcatttatgtcagcggctcagacaaccgtcatgcaagctgcaacggctccagttagtatcctgtgggttgacaagtgattgttgccaggatctggcctcagtcctcagcgccagcccctctctgaaggaactggaccttcagcagaacaacctcgatgatgttggggtgcggcttctgtgtgagggtctccgacatcctgcctgtaagttgattaggctgggcctggaccagaccaccctgagcgacgaaatgcgccaggagctacgcgccctggaacaggagaagcctcagttgctcattttttcaaggcgtaaaccgtccgtaatgaccccaaccgagggcctcgacacaggtgaaatgtcaaacagcacgtcctcactgaagagacagagacttgggtctgaaagggctgcttcccacgtcgcccaggcaaacctgaagctcctggatgtaagtaaaatttttcctattgccgagatagccgaggagagcagcccagaagtggtccccgtggagctcctgtgcgtgccgtccccggccagccagggagatcttcatacaaagccccttggcacagatgacgacttctggggtccaaccgggccggtagcaacggaggtcgtggataaggaaaagaacctatacagagtgcactttcctgtcgcaggaagctaccggtggccaaacaccggactctgttttgtgatgcgtgaggccgtgacggtggagattgagttttgcgtgtgggatcagtttctgggggaaatcaaccctcagcatagctggatggtcgcgggacctctcctggatatcaaggccgagcccggggccgtggaagccgtgcacctgcctcacttcgtagcattacagggcggacatgtcgatacatctctgtttcagatggcacacttcaaggaggagggaatgctcctggagaagccagccagggtggaattgcaccacatcgtgctggaaaatccttcttttagtccactcggagtgcttctgaaaatgattcataatgccctgcgctttatacctgtaacaagcgtggtactgttgtaccatagggtccatcccgaggaggttacctttcacctgtatctcatcccaagcgattgttctattcggaaagccatcgatgacttagaaatgaagttccagtttgtccgaatacataagcccccccccctgacacccctgtacatgggttgccgctataccgtttctgggtctggctcgggtatgctggaaatacttccgaaggagctagagctgtgttaccggagtccaggcgaagaccagctgttttccgagttttacgtgggacatcttggaagcggcatccgcctccaggtgaaggacaagaaagatgaaaccctggtatgggaggctctggttaagccaggtgatctcatgccagctacaaccctgattcctcccgcccggatcgcggttccctcacctctggatgccccacagctcctccacttcgttgaccagtaccgcgagcaactgatcgccagggtgaccagcgtcgaggtagtgcttgataaactgcacggccaggtgttgtcccaggagcagtacgagcgcgtactggcagagaacacccggccttcccagatgcggaaactgttctctctgagccagtcttgggacagaaaatgtaaggacggactgtatcaggcactaaaggaaacacatccgcatctgataatggagctttgggaaaaggggagtaaaaaaggccttctacctctcagctcatag

SEQ ID NO: 226547 - DNA, 4422 bp, Artificial Sequence
  derived and/or modified sequence
atggccggcggcgcctggggccggctggcctgctacctggagttcctgaaaaaggaggaattaaaggagtttcagctcttgctagccaataaggcccacagtcgtagcagctccggcgagactcccgcacagcctgagaaaacgagcggcatggaggtcgcttcttacctcgttgcgcagtacggcgaacagcgggcttgggatctcgctctccatacttgggagcagatgggcttgcggtcattgtgtgcgcaagctcaagagggggctggccactcaccctcttttccctactctccatccgaaccgcacttgggatctcctagccagccaacttcaaccgcagtgctgatgccttggatccacgaattacccgccgggtgtacacaagggagcgaacgccgagtcttacggcagctgccagatacatcgggcaggcggtggcgcgagatctcggcatccctgctgtaccaggcccttccttcgagccccgatcacgaaagtcccagtcaggagagcccaaacgcaccaacctcgactgcagtcctcgggtcttggggctctccaccccagccaagcctagcccccagggagcaggaagcgccaggcacacagtggcctctagacgagacgagtggaatctactacaccgagatccgcgagcgggaaagagagaaaagcgagaaagggcggcctccatgggccgccgttgttggcactcccccccaggctcacacctccttacaaccacatcatcatccctgggagcccagcgttagggaatccttgtgtagtacctggccttggaaaaacgaagattttaaccagaaattcacacaactgctcctgctccagcggcctcatccacgttcacaggatcccctcgtgaagagaagctggcccgattatgtggaggaaaaccgcggacacttgattgagatccgcgatcttttcggaccggggcttgacacacaggagccccggatagtgatcctgcagggagctgccgggatcggcaaatctacgctggcacggcaagtcaaggaggcctggggtagaggtcaactgtacggggatcgctttcagcacgtattctacttttcttgcagagaactcgcccagagcaaagtggtgtctttagctgagctcatcgggaaggacggcaccgctaccccagcaccaatacgtcagattctgtctaggcccgaacggctgttgtttattcttgatggtgtggatgaaccagggtgggttctgcaggaaccctcctcggaactgtgtttgcattggagccagccgcagcccgccgatgccctcctgggctccttgcttgggaaaaccatcctgccggaggcttccttcttgattacagcccgcacgaccgcgcttcagaatctcatcccttcactcgagcaggccaggtgggtcgaggtgctcggattctccgagagttctagaaaagagtacttttatagatattttactgacgaaagacaggccatcagagccttcagattggtaaaatccaacaaagagctttgggcactatgtcttgttccatgggtgtcttggctggcctgtacttgtctgatgcagcaaatgaaacgtaaagagaagctgacactaaccagtaagaccacaaccactctgtgtctgcattaccttgcccaggcactgcaggctcagcctctcggcccccagctcagagacctgtgttccctcgccgccgaaggtatatggcagaaaaaaacgttgtttagccccgatgacctaagaaaacacggattggatggcgctatcatctcgacgtttttaaaaatgggcattcttcaggaacaccccatacctctgtcatacagcttcattcacctgtgctttcaggaattttttgccgcaatgtcctacgtgctggaagacgagaaaggtcggggcaaacacagcaactgcataatagatctagaaaaaactctggaggcctacggaatacatgggctctttggagcatcgacaactcgatttctgctcggcctgctgagtgatgaaggggaacgggagatggaaaatatctttcattgtcgacttagtcaaggccgcaaccttatgcagtgggtgccctccctccagcttctcttgcagccccactcgctcgaaagtctgcattgcttgtatgaaactagaaacaaaacatttttgacccaggttatggctcacttcgaggagatggggatgtgtgtggagacagacatggaattacttgtgtgcactttttgtattaagttcagccgtcacgtgaaaaaactgcagctcatcgaaggcagacaacacagatccacctggagcccgactatggttgtgctttttcgatgggtgccagttaccgatgcctactggcagatcctgttcagtgtcctgaaggttacccgcaatctcaaggagttggatctgtccggaaatagcctctcacatagcgctgttaagtctttatgtaagaccctgcggcgccccaggtgcctgctagagacgctgaggcttgccggttgtggtcttactgccgaggattgcaaagacttggcattcgggttacgtgccaaccagacgctcactgaactggatctcagcttcaacgtgctcacagacgcaggcgctaagcacttgtgccagcggttaaggcaaccctcctgcaagctccaacgcctgcagctcgtcagctgcggcctgaccagcgactgctgccaggatcttgccagcgttctgtccgcttcccctagcctgaaggagctcgatttacaacagaataatctggacgatgtcggggtgcgtcttctgtgcgaagggcttaggcaccccgcctgcaagctgatccgactgggactagatcagaccactctgtctgatgagatgcgacaggaactccgagccctagaacaggagaaaccgcaactcctgatttttagcagacggaagccgtccgtaatgacccccactgaggggctggatactggtgaaatgagtaatagtaccagtagcctgaagcgccagcggttgggaagtgaacgagcagcaagccatgtcgcccaggccaacctgaaactcctggatgtgtccaagatctttcctatagctgagattgcggaagagtcatcacctgaggtggtcccagtcgaactcctctgcgttccttcgcctgcatcccaaggagatctccacacaaagcccctcgggacagacgatgacttctggggacctaccggaccggtggccaccgaagttgttgataaagagaagaatctgtacagagtgcattttcccgtggccggctcttacaggtggcccaacaccgggctttgttttgtgatgcgagaggcggttactgtggaaattgagttttgtgtctgggaccagtttctgggcgaaatcaaccctcagcattcatggatggtggcggggccattgcttgatattaaagctgagccaggagctgtcgaagccgtgcacctgccgcatttcgttgctctgcagggagggcacgttgacacttctttatttcagatggctcattttaaagaggagggaatgctgctggaaaagccagcgagggttgaacttcaccacatcgtgttggagaatccatcctttagccccctgggcgtcctcctcaagatgatacacaatgctctgcgctttattccggttacttcagtggtactgctgtaccacagagtgcatccggaagaggtgactttccacctctatctgatccccagtgactgttccatacggaaggcaatcgacgacctggaaatgaaatttcaatttgtacgcatccacaagcctccgccgttaacccccctgtacatggggtgtcggtatactgtaagtggatcagggagtgggatgctcgagatcttgcccaaggagctcgagctgtgttataggtcccctggagaagatcagttgttctccgaattctatgtgggccatcttggatccggcattcggttacaggtaaaggacaaaaaggatgagactttagtttgggaggcgctcgtgaagcccggcgacctgatgcctgcaacaacactgattccgcccgctaggatagctgtgccctctcccttggacgctcctcagctattgcatttcgttgaccagtaccgtgagcagttgatcgcacgggtgacgagtgtcgaggtagtgttagataaattacatggtcaggttttgagtcaggaacaatacgagcgtgtccttgctgagaacactcggccgtcccaaatgagaaaactgtttagcctaagccagtcgtgggaccggaaatgcaaggacggactgtatcaggccttgaaggaaactcacccacacttgataatggaactgtgggaaaagggctctaaaaaagggttgctacctctgagttcttag

SEQ ID NO: 226548 - DNA, 1527 bp, Artificial Sequence
  derived and/or modified sequence
atggcccacttcgaggagatgggcatgtgcgtggagaccgacatggaacttctcgtatgcaccttctgtatcaaattcagcagacatgttaagaagctgcagctgatcgagggcaggcagcaccgctccacctggagcccaaccatggtggtgctattccgttgggttcccgttaccgacgcatattggcagatcctcttcagcgtcctcaaggtgactagaaacctgaaagagctcgatctgtcaggaaacagcctgagtcactcagccgtaaaatctctgtgtaaaaccctgaggcgaccaagatgcctcctggagactcttaggcttgctggatgtggcctcactgcggaggattgtaaggatttggctttcggcctgcgagctaatcagaccttaaccgagcttgacttgtcttttaatgtattgaccgacgcaggcgcaaaacatctgtgccagcgactgcgccagccatcttgcaagctccaaagactccagctggttagttgtgggctgacatccgattgttgccaggatctcgcaagtgtgcttagtgcgagcccgtctctgaaggaactcgacttacagcagaataacctcgacgatgtgggagtgagacttttgtgtgaggggctgcgccacccggcatgcaagctgatacggcttggcttagaccagaccaccttgtctgatgagatgcgacaggagttacgcgccctggagcaagagaagccccagttgttaatcttcagcagacgaaagccatcagttatgacacccaccgaaggccttgacaccggggagatgtctaattcaacgagtagtctgaaacggcagcgcctaggcagcgagagagccgcttcccacgttgctcaagctaatctcaagctgcttgatgtctcgaagatatttcccatcgccgaaatagccgaggaatcttccccagaggttgttcctgtggaactactctgtgtgccctctcctgccagtcagggagacctgcacacaaagccactgggaactgatgatgacttctggggccctactggtcccgtggcaacagaggtcgtcgacaaagaaaagaatttgtatcgagtgcacttcccggtcgcgggaagttacagatggcctaacaccgggctctgtttcgtgatgagagaggccgtgactgtcgaaatcgagttttgtgtgtgggaccagttcttgggcgaaatcaatccccaacacagttggatggtggcaggcccgctcctggacatcaaggctgaaccaggtgcggtggaggccgtgcacttgcctcacttcgtggcgctgcaaggagggcacgtggacacctctttgtttcagatggcccactttaaagaggagggcatgctgctggaaaaaccagctagagtggagctgcaccatatcgtcctggaaaaccccagcttctctcctctcggggtgctgttaaagatgattcacaacgccctgcgtttcattccagttaccagtgtagtgttactgtatcatagaccatcatag

SEQ ID NO: 226549 - DNA, 4422 bp, Artificial Sequence
  derived and/or modified sequence
atggccggtggagcctggggccgtcttgcgtgctacctggagtttctgaagaaagaggagctcaaagagtttcaactcctcctggctaataaagcccatagtagaagttcatcgggtgagaccccggcacagcccgagaagacaagcggcatggaggtggctagctaccttgttgcccagtacggagaacagagggcatgggacctagctctgcatacttgggagcagatggggctaaggtcgctttgtgcccaagcccaggagggcgctggccacagccctagtttcccgtacagtccgtctgaaccccacctagggtccccctcacagcccacgagcacagccgtgctgatgccatggatccacgagctccccgctgggtgcacccagggctcagaacgtcgcgtgctccgacagctcccagacacttctggtaggagatggagggagatttctgcgtcactcttatatcaggcgttgccttccagccctgaccacgagtctcctagccaggaatcaccaaatgcaccaacgtccaccgctgtgctcgggtcatggggctcaccacctcagccatcactggcccctagggagcaggaggccccaggaactcagtggccgctcgacgaaacatccggtatatattatacagagatcagagagagggagagggagaagagcgagaaggggagaccgccatgggctgccgtggtgggtacaccgcctcaggcacacacctcactgcaaccacatcaccacccctgggagcccagtgtgcgggaaagcctgtgctctacatggccatggaaaaacgaagatttcaatcagaagttcacacagcttcttcttctccaacgtccgcacccccgttcgcaagatcctctggtgaagcgttcttggcccgattacgtggaagagaacagaggacatcttatcgaaatccgtgatctctttggacccggacttgatactcaggagcctcggattgtcatcctgcagggtgcagctgggatcggcaagagcacactggcacgccaagtaaaggaagcttggggacggggacagctttatggcgacagatttcaacacgtcttctatttcagctgtcgggagttggctcaaagcaaggtcgtcagtctggcagagctcataggcaaggacggtactgcaacaccagcacctattcgacaaatcctgagtcggcctgagcgcctcctgtttattctggacggagttgacgaacctggctgggtacttcaggaaccttcttcagaactgtgtctgcactggagccagccacagcccgcagacgccttgctgggatccctgctgggcaaaaccatcctccccgaggcttccttcttgattaccgccagaaccactgcactgcagaatctaataccgtctctggaacaagccagatgggtggaagtgttggggttttcagaatcctcgcggaaagaatatttctatcggtacttcactgacgagaggcaggccattagagcgtttcgattagtgaagtccaataaagagctctgggcgctgtgtctggtgccctgggtgtcttggttagcatgcacctgcctgatgcagcagatgaagcggaaagagaagctcacactgacatccaaaacaacgacgactttgtgcctgcattatctcgcgcaggccctgcaagcgcagcccctgggccctcagctgcgtgacctgtgctcattagccgcagaaggcatctggcagaagaagacactcttttcacccgacgacctccgcaaacatggtcttgatggtgccattatctctacgttcctgaagatgggcatcttgcaggagcaccctatacccctttcttattcttttatccatctgtgctttcaagaattcttcgccgcaatgtcttatgtgctggaggatgaaaaaggtcgaggaaagcactcaaattgtattattgatctcgagaaaacccttgaagcatatgggatacacggtctgtttggtgctagtacgacgcggtttctacttgggctgctgtcagatgagggtgagagagagatggagaacatctttcactgtagactgtcccagggcaggaacctaatgcagtgggtgccaagtcttcagctgctgctgcagccccacagcctggaatcgcttcattgcttgtacgagactaggaataaaacgttcttgactcaagtcatggcacatttcgaggaaatgggaatgtgtgtggagaccgatatggagcttttagtgtgtaccttctgtataaagtttagtcggcacgtcaagaagctgcagctcatcgaaggcagacagcatcgtagcacctggtctcctacaatggttgtgctgttccggtgggtcccagtaaccgacgcctattggcagatactcttctctgtcctgaaggtcacacggaacctcaaggagttggacctgtccggaaattcactgagccatagtgccgtcaaatccctctgtaagacccttaggagacccagatgtctcctcgagactttgcgcctggccggatgcggcctgacagccgaggactgcaaggacctcgcttttgggctacgtgcaaatcagactttgaccgagcttgacctgtccttcaacgttcttaccgacgccggagcgaaacacctctgccagcgactgcggcagcccagctgtaagctgcaacggctgcagctcgtgtcatgtggtctcacaagtgactgctgtcaagacctcgcaagcgtgctttccgcatccccatccctcaaagagctggaccttcagcaaaataatcttgatgacgttggagtgcggctgctctgtgaaggcctgcgccaccctgcctgcaagctgattaggttgggcttagaccagaccacactgagcgatgagatgcgccaggaattgagagcactagagcaagaaaagccgcagttgttgatcttctcgagaaggaaaccctccgtaatgacgccaacagaaggcctggatacaggagaaatgtcaaattctacctccagccttaaacggcagagacttggttccgaacgggcagcaagccacgtagcacaagctaatttaaagcttcttgatgtatccaagatctttccaatcgcagagatcgccgaggagtcctcccccgaggtagtaccagtggaacttctctgcgtgccaagtccagcgtcccaaggcgacctgcatacaaaaccattagggacagatgatgacttctggggtccaactgggcctgtggcaactgaagtcgtggacaaagagaaaaatttgtatcgagtgcacttccctgtagctggctcttaccgctggcccaacactgggctctgctttgtcatgagggaagccgtgacagtcgagattgagttctgtgtgtgggaccagttcttgggagagatcaacccacaacattcatggatggtagctgggccattgctcgacataaaggcagagccaggcgcagtggaggcagtgcatttacctcattttgtagcacttcagggaggccacgttgacacctcgttattccagatggcccactttaaggaagaaggaatgttgctggaaaagccagctagagttgagctgcaccacatagtgctcgagaacccaagcttcagccctctaggggttttgttgaagatgatccacaatgcactgagattcattcccgttaccagcgtcgtactgctttaccatagggtccatcctgaggaagtcacgttccatctttatcttatccccagtgattgctccattaggaaggcaatcgatgacttggagatgaaattccagtttgtccggatccacaaacccccacccttaactccactgtacatgggctgtagatacaccgttagcggatccggaagcgggatgctggagatcttgcccaaagagcttgaactgtgctatcgtagtccaggtgaggatcagctgttttcggaattttatgtcggtcacttgggcagcgggatacgcctgcaagtaaaagacaagaaggacgaaactctggtttgggaagccttggtcaagcctggggacttgatgcctgcaaccacattgattccgcctgcccgaattgcagtcccctctccgctggacgcaccccagcttttgcacttcgttgaccagtacagggagcagctaatcgcaagggtgacaagtgtcgaggtcgtgctcgacaaattgcacggtcaggttttatcacaggagcaatacgagcgcgtcttagccgagaatacccgccctagccaaatgcggaagctgtttagcctttctcagagttgggatcgcaagtgcaaggatgggctgtatcaggctttgaaggagacccatccacatttgataatggagctctgggagaaagggtctaaaaaaggattgttgcccctctccagctag

SEQ ID NO: 226550 - DNA, 4422 bp, Artificial Sequence
  derived and/or modified sequence
atggctgggggagcgtggggccgactggcttgctacttggagttcctcaaaaaagaagaactgaaagaatttcaactcctgttagctaacaaagctcattcccgctctagttccggtgagacacccgctcagcccgagaaaacttctggaatggaggttgcgagctatctggtggctcagtacggcgaacagagagcatgggatctagcacttcatacctgggagcaaatggggttgcgcagcctctgcgctcaagctcaggagggggctggccactctcccagctttccatattctcccagcgaaccccatctgggcagccctagccagcctacctcaacagctgtgctgatgccctggatccacgaacttcctgctgggtgcacacagggaagtgagagacgagtcctccggcaactgccagataccagcggcagaaggtggcgggaaatcagcgcctccctgctgtaccaggctctgccgtccagcccagatcatgagtccccaagtcaggaatccccaaatgcacccacctcaacagcggtgctgggcagttggggttcgcctccacagccttcccttgcaccacgggagcaggaggcccctggaacgcagtggccacttgatgaaacttcaggcatttactacactgaaatcagggagagagaaagagagaaatccgagaagggtaggccaccttgggccgctgtagtgggcacaccccctcaggcacacacctccctccagccacaccaccatccctgggaacctagtgtgagagagtccctgtgttctacgtggccatggaagaatgaagactttaatcaaaaatttacgcagctgctgctccttcaacgcccacatccacggagtcaggatccccttgttaagcgatcctggccagactacgtggaagagaatcggggacatctgatcgagatacgggatctgtttggcccaggtctggatactcaggaacccaggattgtgattcttcagggcgctgctgggatcggtaagagcacattagcccgtcaggtcaaagaggcctggggcaggggccaactctacggggaccggttccaacatgtgttctacttctcctgtagggaactcgctcagagcaaagtggtgagtcttgctgaacttattggcaaagacggtaccgcgaccccagcaccaattcggcagattctttcgcgcccagaaagacttctgtttattctggacggggtcgacgaacccggatgggtcttgcaagagccttcatccgagttgtgtcttcactggtcccagccacagcctgcagatgctctgctcggctccttactgggaaagacaatcctgcccgaagctagctttctgatcacagcaaggacaaccgcgcttcagaatcttattccctcactggaacaggccaggtgggttgaggtactggggtttagtgaaagtagccgaaaagagtacttctatagatatttcaccgatgaacgccaggccatcagggccttccggttggtgaaatcaaacaaagaattgtgggcactgtgcctagtaccatgggtatcatggttagcatgtacatgtttgatgcaacagatgaagagaaaagagaaattgaccctgacaagcaagaccaccacgaccctttgcctccactacctggcccaggcactgcaggcgcagcccttaggcccacagctcagggatctgtgcagtttagccgctgaaggaatctggcagaagaagacactgttctcaccagacgacctgaggaaacacggactggatggggcaatcattagtaccttccttaaaatgggcatcctgcaggagcacccaattccactgtcttactcatttatccacctttgtttccaggagttcttcgcagccatgagttacgtcctcgaagatgaaaagggcagaggtaagcatagcaactgtatcattgatctggaaaaaacactcgaggcttacggaattcacgggctgtttggagcatccacaactaggtttctccttggcctattatccgatgagggcgaacgggaaatggagaacattttccattgtcgtctgagccagggccgaaacctgatgcagtgggtgcctagtctgcagttattgctgcaaccacactcgttagagtctcttcactgcctctacgagacacggaacaagaccttcctcactcaagtcatggcccacttcgaggaaatggggatgtgcgtggagaccgatatggaactgctggtttgcaccttctgtattaagttttccaggcacgttaagaagcttcagctgatcgaaggccgacagcataggtcaacttggtcacccactatggtggtgttgtttcggtgggttccagtgaccgacgcttactggcagattttgttctccgttctgaaagtgacacgtaatctgaaagagctcgacctgtccggcaactctctctcacactccgcagtgaaatctctgtgtaagaccttgcgaaggccgcgttgtttgctggagactctgcgtctggcagggtgcggacttactgcggaagattgtaaggatctcgccttcgggctgcgtgctaaccagactctgaccgagcttgatctgagtttcaacgttctcacagatgctggagccaagcatctttgccaaagactccggcagccatcgtgcaaactccagcgccttcagctggtttcctgtggcctgacaagcgattgctgccaggatctagcctccgtccttagcgcaagcccatcccttaaggagctggatctccagcagaacaacctagacgatgtgggagtcaggctcctttgtgagggtctacgacaccccgcttgcaaactaatacgattgggcctggatcagactacgctatcggacgaaatgcgtcaggagctgcgggcactggagcaagagaagccccagttattgatcttttcgaggaggaaaccctcagtgatgactccaactgagggcttagatacaggagagatgtcaaatagcacgagttcattgaagcggcagcgcttgggaagtgaacgagccgcaagccacgtggcccaggccaatttaaagctcctggacgtgtctaagattttccccatcgccgagattgccgaggaaagctcccccgaagtcgtacccgtggagcttctctgtgtcccttccccagctagtcagggtgacctccacaccaaacccctgggtactgacgatgacttctggggtccgaccggccctgtggccaccgaagtggtggacaaagaaaagaacctataccgtgtacacttccccgtcgccggttcctaccgatggcccaacacaggcttgtgctttgtcatgagagaggcggtcacagtggagatcgaattctgtgtgtgggatcaatttctgggcgaaataaaccctcaacatagttggatggttgctggacctttgttggatatcaaggccgagcccggagctgtggaggccgtgcatctcccacatttcgttgctctgcaaggcggacatgtcgataccagcctgtttcagatggcgcatttcaaggaagaaggcatgctgctggaaaaacccgctagggtggaactgcaccatatcgttctggaaaacccatctttttctccactgggtgtgttactgaagatgatccataatgcactgagatttatccctgtgaccagtgtggttctgctttatcatcgagtccacccagaggaagtgacgttccacctgtatctaattccttcagactgcagcatccgcaaagcaattgacgaccttgagatgaagttccaatttgtgagaattcacaaaccacctcccctcacaccattgtacatgggctgccgctataccgtgtccggatctgggagtggaatgttagaaattcttccgaaagagctcgaactgtgttataggagtcccggtgaggaccaacttttcagtgagttctacgttggccaccttgggagtgggataagactccaagttaaagacaagaaagacgagactctggtgtgggaggccttggttaagcccggtgatctgatgcccgcaacaaccttgatcccacccgctcggatagccgtaccttcacctttggatgctcctcagttgcttcacttcgtagaccagtacagagagcagctgatcgctagggtgacgtcagtggaggttgtattagacaagttgcacgggcaggttttatcccaagagcaatacgaacgcgtccttgccgaaaacacacggccttctcaaatgcgaaagttattctcccttagccagtcgtgggatagaaagtgcaaggacggtctctaccaggcgcttaaggaaacccatccacacctgatcatggaactctgggagaagggctcaaagaaagggctgttgccactttcctcatag

SEQ ID NO: 226551 - DNA, 1527 bp, Artificial Sequence
  derived and/or modified sequence
atggcacatttcgaggaaatgggcatgtgtgtggagacagacatggagttacttgtttgtaccttttgcatcaaattttctcggcacgtgaaaaagctgcaacttattgagggcaggcagcatcgaagtacatggagcccaactatggtggtgctctttaggtgggttcccgtgactgatgcttactggcagattttattctcagtcctgaaggtgactcggaatctaaaggagctggatctgtcaggtaatagccttagtcattcagctgtgaagtcactctgtaaaactctccgccgaccccgttgcctgctggagacattgaggctggcaggatgcgggttaactgctgaggactgtaaggatctggccttcggactgcgtgcgaaccaaaccctgactgagctggacctgagtttcaatgtgctcaccgatgctggagccaagcacctctgtcaaagactaaggcagcctagctgcaaactgcagcggctccagctagtttcctgcggtctcactagcgactgctgtcaggatttagctagcgtcttatcagcgtctccttccctgaaggaactggacttgcagcagaataatctggacgatgtgggagtgcgcctactttgcgagggtctccgacatcccgcttgtaaactgatacgactggggctcgaccagacaacacttagcgacgaaatgcgtcaggaactcagggccctggagcaggagaaacctcagctactgatcttctccaggcgaaagcctagtgtcatgacaccaaccgagggcctggacacaggagaaatgtctaactccacatcgtcactgaagcgacagcgcctagggtctgagcgtgctgccagtcacgtagcccaggccaacttgaaacttttggacgttagcaaaatcttccccattgctgaaatcgccgaagagagttccccagaagtcgtgcccgtcgagctactttgtgtcccctctcctgcgagccaaggtgacctccatacaaagccactaggcacggatgatgacttttggggacccaccggtcccgtggccactgaggtggtggataaagaaaagaacctctacagagtccacttcccagtcgcaggaagttatcgctggcctaataccggcttgtgttttgtcatgagggaggccgttaccgtggagatagagttttgtgtgtgggaccagttcctcggtgaaattaaccctcaacactcatggatggtcgcaggacccctgctcgacattaaagcagagccaggcgctgtcgaggcggtccatctgccacactttgtcgctttgcagggagggcacgttgacacgagtctctttcagatggcacattttaaagaggaaggtatgctcctagaaaagccagccagggtcgagttgcatcatattgtcctggaaaaccctagcttttcgcctctgggcgtgttactgaagatgattcacaacgctctgaggttcatacccgtcacatcagttgtactgctgtaccatagaccaagctag

SEQ ID NO: 226552 - DNA, 4422 bp, Artificial Sequence
  derived and/or modified sequence
atggctggcggagcctggggccgcctggcctgttacttggagttcctgaagaaggaggagctgaaggagttccagcttctgctcgccaataaagcgcactccaggagctcttcgggtgagacacccgctcagccagagaagacgagtggcatggaggtggcctcgtacctggtggctcagtatggggagcagcgggcctgggacctagccctccatacctgggagcagatggggctgaggtcactgtgcgcccaagcccaggaaggggcaggccactctccctcattcccctacagcccaagtgaaccccacctggggtctcccagccaacccacctccaccgcagtgctaatgccctggatccatgaattgccggcggggtgcacccagggctcagagagaagggttttgagacagctgcctgacacatctggacgccgctggagagaaatctctgcctcactcctctaccaagctcttccaagctccccagaccatgagtctccaagccaggagtcacccaacgcccccacatccacagcagtgctggggagctggggatccccacctcagcccagcctagcacccagagagcaggaggctcctgggacccaatggcctctggatgaaacgtcaggaatttactacacagaaatcagagaaagagagagagagaaatcagagaaaggcaggcccccatgggcagcggtggtaggaacgcccccacaggcgcacaccagcctacagccccaccaccacccatgggagccttctgtgagagagagcctctgttccacatggccctggaaaaatgaggattttaaccaaaaattcacacagctgctacttctacaaagacctcaccccagaagccaagatcccctggtcaagagaagctggcctgattatgtggaggagaatcgaggacatttaattgagatcagagacttatttggcccaggcctggatacccaagaacctcgcatagtcatactgcagggggctgctggaattgggaagtcaacactggccaggcaggtgaaggaagcctgggggagaggccagctgtatggggaccgcttccagcatgtcttctacttcagctgcagagagctggcccagtccaaggtggtgagtctcgctgagctcatcggaaaagatgggacagccactccggctcccattagacagatcctgtctaggccagagcggctgctcttcatcctcgatggtgtagatgagccaggatgggtcttgcaggagccgagttctgagctctgtctgcactggagccagccacagccggcggatgcactgctgggcagtttgctggggaaaactatacttcccgaggcatccttcctgatcacggctcggaccacagctctgcagaacctcattccttctttggagcaggcacgttgggtagaggtcctggggttctctgagtccagcaggaaggaatatttctacagatatttcacagatgaaaggcaagcaattagagcctttaggttggtcaaatcaaacaaagagctctgggccctgtgtcttgtgccctgggtgtcctggctggcctgcacttgcctgatgcagcagatgaagcggaaggaaaaactcacactgacttccaagaccaccacaaccctctgtctacattaccttgcccaggctctccaagctcagccattgggaccccagctcagagacctctgctctctggctgctgagggcatctggcaaaaaaagacccttttcagtccagatgacctcaggaagcatgggttagatggggccatcatctccaccttcttgaagatgggtattcttcaagagcaccccatccctctgagctacagcttcattcacctctgtttccaagagttctttgcagcaatgtcctatgtcttggaggatgagaaggggagaggtaaacattctaattgcatcatagatttggaaaagacgctagaagcatatggaatacatggcctgtttggggcatcaaccacacgtttcctattgggcctgttaagtgatgagggggagagagagatggagaacatctttcactgccggctgtctcaggggaggaacctgatgcagtgggtcccgtccctgcagctgctgctgcagccacactctctggagtccctccactgcttgtacgagactcggaacaaaacgttcctgacacaagtgatggcccatttcgaagaaatgggcatgtgtgtagaaacagacatggagctcttagtgtgcactttctgcattaaattcagccgccacgtgaagaagcttcagctgattgagggcaggcagcacagatcaacatggagccccaccatggtagtcctgttcaggtgggtcccagtcacagatgcctattggcagattctcttctccgtcctcaaggtcaccagaaacctgaaggagctggacctaagtggaaactcgctgagccactctgcagtgaagagtctttgtaagaccctgagacgccctcgctgcctcctggagaccctgcggttggctggctgtggcctcacagctgaggactgcaaggaccttgcctttgggctgagagccaaccagaccctgaccgagctggacctgagcttcaatgtgctcacggatgctggagccaaacacctttgccagagactgagacagccgagctgcaagctacagcgactgcagctggtcagctgtggcctcacgtctgactgctgccaggacctggcctctgtgcttagtgccagccccagcctgaaggagctagacctgcagcagaacaacctggatgacgttggcgtgcgactgctctgtgaggggctcaggcatcctgcctgcaaactcatacgcctggggctggaccagacaactctgagtgatgagatgaggcaggaactgagggccctggagcaggagaaacctcagctgctcatcttcagcagacggaaaccaagtgtgatgacccctactgagggcctggatacgggagagatgagtaatagcacatcctcactcaagcggcagagactcggatcagagagggcggcttcccatgttgctcaggctaatctcaaactcctggacgtgagcaagatcttcccaattgctgagattgcagaggaaagctccccagaggtagtaccggtggaactcttgtgcgtgccttctcctgcctctcaaggggacctgcatacgaagcctttggggactgacgatgacttctggggccccacggggcctgtggctactgaggtagttgacaaagaaaagaacttgtaccgagttcacttccctgtagctggctcctaccgctggcccaacacgggtctctgctttgtgatgagagaagcggtgaccgttgagattgaattctgtgtgtgggaccagttcctgggtgagatcaacccacagcacagctggatggtggcagggcctctgctggacatcaaggctgagcctggagctgtggaagctgtgcacctccctcactttgtggctctccaagggggccatgtggacacatccctgttccaaatggcccactttaaagaggaggggatgctcctggagaagccagccagggtggagctgcatcacatagttctggaaaaccccagcttctcccccttgggagtcctcctgaaaatgatccataatgccctgcgcttcattcccgtcacctctgtggtgttgctttaccaccgcgtccatcctgaggaagtcaccttccacctctacctgatcccaagtgactgctccattcggaaggccatagatgatctagaaatgaaattccagtttgtgcgaatccacaagccacccccgctgaccccactttatatgggctgtcgttacactgtgtctgggtctggttcagggatgctggaaatactccccaaggaactggagctctgctatcgaagccctggagaagaccagctgttctcggagttctacgttggccacttgggatcagggatcaggctgcaagtgaaagacaagaaagatgagactctggtgtgggaggccttggtgaaaccaggagatctcatgcctgcaactactctgatccctccagcccgcatagccgtaccttcacctctggatgccccgcagttgctgcactttgtggaccagtatcgagagcagctgatagcccgagtgacatcggtggaggttgtcttggacaaactgcatggacaggtgctgagccaggagcagtacgagagggtgctggctgagaacacgaggcccagccagatgcggaagctgttcagcttgagccagtcctgggaccggaagtgcaaagatggactctaccaagccctgaaggagacccatcctcacctcattatggaactctgggagaagggcagcaaaaagggactcctgccactcagcagctga

SEQ ID NO: 226553 - DNA, 5612 bp, Artificial Sequence
  derived and/or modified sequence
cttgttgactaggcgctgttcttgctggctggtgccccagggcctggagaggtctgaagaaacctgggagccagcagcccggggctccactctgggttctgaaagcccattccctgctctgcggctcctcccaccccacctcttctcagccttgcagctcaagggttgatctcaggagtccaggacccaggagagggaagaatctgaggaacacagaacagtgagcgttgcccacaccccatctcccgtcaccacatctcccctcaccctcaccctccctgcctggccctggaccccatcccaggacctccctatcagctgacttcttccagtgtcttgcaggcccctctgggctcctccctcccctggcttttcctaccactccccctctatcggcgtctatctgtaggtgccctgggatttataaaactgggttccgaatgctgaataagagacggtaagagccaaggcaaaggacagcactgttctctgcctgcctgataccctcaccacctgggaacatcccccagacaccctcttaactccgggacagagatggctggcggagcctggggccgcctggcctgttacttggagttcctgaagaaggaggagctgaaggagttccagcttctgctcgccaataaagcgcactccaggagctcttcgggtgagacacccgctcagccagagaagacgagtggcatggaggtggcctcgtacctggtggctcagtatggggagcagcgggcctgggacctagccctccatacctgggagcagatggggctgaggtcactgtgcgcccaagcccaggaaggggcaggccactctccctcattcccctacagcccaagtgaaccccacctggggtctcccagccaacccacctccaccgcagtgctaatgccctggatccatgaattgccggcggggtgcacccagggctcagagagaagggttttgagacagctgcctgacacatctggacgccgctggagagaaatctctgcctcactcctctaccaagctcttccaagctccccagaccatgagtctccaagccaggagtcacccaacgcccccacatccacagcagtgctggggagctggggatccccacctcagcccagcctagcacccagagagcaggaggctcctgggacccaatggcctctggatgaaacgtcaggaatttactacacagaaatcagagaaagagagagagagaaatcagagaaaggcaggcccccatgggcagcggtggtaggaacgcccccacaggcgcacaccagcctacagccccaccaccacccatgggagccttctgtgagagagagcctctgttccacatggccctggaaaaatgaggattttaaccaaaaattcacacagctgctacttctacaaagacctcaccccagaagccaagatcccctggtcaagagaagctggcctgattatgtggaggagaatcgaggacatttaattgagatcagagacttatttggcccaggcctggatacccaagaacctcgcatagtcatactgcagggggctgctggaattgggaagtcaacactggccaggcaggtgaaggaagcctgggggagaggccagctgtatggggaccgcttccagcatgtcttctacttcagctgcagagagctggcccagtccaaggtggtgagtctcgctgagctcatcggaaaagatgggacagccactccggctcccattagacagatcctgtctaggccagagcggctgctcttcatcctcgatggtgtagatgagccaggatgggtcttgcaggagccgagttctgagctctgtctgcactggagccagccacagccggcggatgcactgctgggcagtttgctggggaaaactatacttcccgaggcatccttcctgatcacggctcggaccacagctctgcagaacctcattccttctttggagcaggcacgttgggtagaggtcctggggttctctgagtccagcaggaaggaatatttctacagatatttcacagatgaaaggcaagcaattagagcctttaggttggtcaaatcaaacaaagagctctgggccctgtgtcttgtgccctgggtgtcctggctggcctgcacttgcctgatgcagcagatgaagcggaaggaaaaactcacactgacttccaagaccaccacaaccctctgtctacattaccttgcccaggctctccaagctcagccattgggaccccagctcagagacctctgctctctggctgctgagggcatctggcaaaaaaagacccttttcagtccagatgacctcaggaagcatgggttagatggggccatcatctccaccttcttgaagatgggtattcttcaagagcaccccatccctctgagctacagcttcattcacctctgtttccaagagttctttgcagcaatgtcctatgtcttggaggatgagaaggggagaggtaaacattctaattgcatcatagatttggaaaagacgctagaagcatatggaatacatggcctgtttggggcatcaaccacacgtttcctattgggcctgttaagtgatgagggggagagagagatggagaacatctttcactgccggctgtctcaggggaggaacctgatgcagtgggtcccgtccctgcagctgctgctgcagccacactctctggagtccctccactgcttgtacgagactcggaacaaaacgttcctgacacaagtgatggcccatttcgaagaaatgggcatgtgtgtagaaacagacatggagctcttagtgtgcactttctgcattaaattcagccgccacgtgaagaagcttcagctgattgagggcaggcagcacagatcaacatggagccccaccatggtagtcctgttcaggtgggtcccagtcacagatgcctattggcagattctcttctccgtcctcaaggtcaccagaaacctgaaggagctggacctaagtggaaactcgctgagccactctgcagtgaagagtctttgtaagaccctgagacgccctcgctgcctcctggagaccctgcggttggctggctgtggcctcacagctgaggactgcaaggaccttgcctttgggctgagagccaaccagaccctgaccgagctggacctgagcttcaatgtgctcacggatgctggagccaaacacctttgccagagactgagacagccgagctgcaagctacagcgactgcagctggtcagctgtggcctcacgtctgactgctgccaggacctggcctctgtgcttagtgccagccccagcctgaaggagctagacctgcagcagaacaacctggatgacgttggcgtgcgactgctctgtgaggggctcaggcatcctgcctgcaaactcatacgcctggggctggaccagacaactctgagtgatgagatgaggcaggaactgagggccctggagcaggagaaacctcagctgctcatcttcagcagacggaaaccaagtgtgatgacccctactgagggcctggatacgggagagatgagtaatagcacatcctcactcaagcggcagagactcggatcagagagggcggcttcccatgttgctcaggctaatctcaaactcctggacgtgagcaagatcttcccaattgctgagattgcagaggaaagctccccagaggtagtaccggtggaactcttgtgcgtgccttctcctgcctctcaaggggacctgcatacgaagcctttggggactgacgatgacttctggggccccacggggcctgtggctactgaggtagttgacaaagaaaagaacttgtaccgagttcacttccctgtagctggctcctaccgctggcccaacacgggtctctgctttgtgatgagagaagcggtgaccgttgagattgaattctgtgtgtgggaccagttcctgggtgagatcaacccacagcacagctggatggtggcagggcctctgctggacatcaaggctgagcctggagctgtggaagctgtgcacctccctcactttgtggctctccaagggggccatgtggacacatccctgttccaaatggcccactttaaagaggaggggatgctcctggagaagccagccagggtggagctgcatcacatagttctggaaaaccccagcttctcccccttgggagtcctcctgaaaatgatccataatgccctgcgcttcattcccgtcacctctgtggtgttgctttaccaccgcgtccatcctgaggaagtcaccttccacctctacctgatcccaagtgactgctccattcggaaggccatagatgatctagaaatgaaattccagtttgtgcgaatccacaagccacccccgctgaccccactttatatgggctgtcgttacactgtgtctgggtctggttcagggatgctggaaatactccccaaggaactggagctctgctatcgaagccctggagaagaccagctgttctcggagttctacgttggccacttgggatcagggatcaggctgcaagtgaaagacaagaaagatgagactctggtgtgggaggccttggtgaaaccaggagatctcatgcctgcaactactctgatccctccagcccgcatagccgtaccttcacctctggatgccccgcagttgctgcactttgtggaccagtatcgagagcagctgatagcccgagtgacatcggtggaggttgtcttggacaaactgcatggacaggtgctgagccaggagcagtacgagagggtgctggctgagaacacgaggcccagccagatgcggaagctgttcagcttgagccagtcctgggaccggaagtgcaaagatggactctaccaagccctgaaggagacccatcctcacctcattatggaactctgggagaagggcagcaaaaagggactcctgccactcagcagctgaagtatcaacaccagcccttgacccttgagtcctggctttggctgacccttctttgggtctcagtttctttctctgcaaacaagttgccatctggtttgccttccagcactaaagtaatggaactttgatgatgcctttgctgggcattatgtgtccatgccagggatgccacagggggccccagtccaggtggcctaacagcatctcagggaatgtccatctggagctggcaagacccctgcagacctcatagagcctcatctggtggccacagcagccaagcctagagccctccggatcccatccaggcgcaaagaggaataggagggacatggaaccatttgcctctggctgtgtcacagggtgagccccaaaattggggttcagcgtgggaggccacgtggattcttggctttgtacaggaagatctacaagagcaagccaacagagtaaagtggaaggaagtttattcagaaaataaaggagtatcacagctcttttagaatttgtctagcaggctttccagtttttaccagaaaacccctataaattaaaaattttttacttaaatttaagaattaaaaaaatacaaaaaagaaaaaatgaaaataaaggaataagaagttacctactcc

SEQ ID NO: 226554 - DNA, 3401 bp, Artificial Sequence
  derived and/or modified sequence
caaatcaaacaaagagctctgggccctgtgtcttgtgccctgggtgtcctggctggcctgcacttgcctgatgcagcagatgaagcggaaggaaaaactcacactgacttccaagaccaccacaaccctctgtctacattaccttgcccaggctctccaagctcagccattgggaccccagctcagagacctctgctctctggctgctgagggcatctggcaaaaaaagacccttttcagtccagatgacctcaggaagcatgggttagatggggccatcatctccaccttcttgaagatgggtattcttcaagagcaccccatccctctgagctacagcttcattcacctctgtttccaagagttctttgcagcaatgtcctatgtcttggaggatgagaaggggagaggtaaacattctaattgcatcatagatttggaaaagacgctagaagcatatggaatacatggcctgtttggggcatcaaccacacgtttcctattgggcctgttaagtgatgagggggagagagagatggagaacatctttcactgccggctgtctcaggggaggaacctgatgcagtgggtcccgtccctgcagctgctgctgcagccacactctctggagtccctccactgcttgtacgagactcggaacaaaacgttcctgacacaagtgatggcccatttcgaagaaatgggcatgtgtgtagaaacagacatggagctcttagtgtgcactttctgcattaaattcagccgccacgtgaagaagcttcagctgattgagggcaggcagcacagatcaacatggagccccaccatggtagtcctgttcaggtgggtcccagtcacagatgcctattggcagattctcttctccgtcctcaaggtcaccagaaacctgaaggagctggacctaagtggaaactcgctgagccactctgcagtgaagagtctttgtaagaccctgagacgccctcgctgcctcctggagaccctgcggttggctggctgtggcctcacagctgaggactgcaaggaccttgcctttgggctgagagccaaccagaccctgaccgagctggacctgagcttcaatgtgctcacggatgctggagccaaacacctttgccagagactgagacagccgagctgcaagctacagcgactgcagctggtcagctgtggcctcacgtctgactgctgccaggacctggcctctgtgcttagtgccagccccagcctgaaggagctagacctgcagcagaacaacctggatgacgttggcgtgcgactgctctgtgaggggctcaggcatcctgcctgcaaactcatacgcctggggctggaccagacaactctgagtgatgagatgaggcaggaactgagggccctggagcaggagaaacctcagctgctcatcttcagcagacggaaaccaagtgtgatgacccctactgagggcctggatacgggagagatgagtaatagcacatcctcactcaagcggcagagactcggatcagagagggcggcttcccatgttgctcaggctaatctcaaactcctggacgtgagcaagatcttcccaattgctgagattgcagaggaaagctccccagaggtagtaccggtggaactcttgtgcgtgccttctcctgcctctcaaggggacctgcatacgaagcctttggggactgacgatgacttctggggccccacggggcctgtggctactgaggtagttgacaaagaaaagaacttgtaccgagttcacttccctgtagctggctcctaccgctggcccaacacgggtctctgctttgtgatgagagaagcggtgaccgttgagattgaattctgtgtgtgggaccagttcctgggtgagatcaacccacagcacagctggatggtggcagggcctctgctggacatcaaggctgagcctggagctgtggaagctgtgcacctccctcactttgtggctctccaagggggccatgtggacacatccctgttccaaatggcccactttaaagaggaggggatgctcctggagaagccagccagggtggagctgcatcacatagttctggaaaaccccagcttctcccccttgggagtcctcctgaaaatgatccataatgccctgcgcttcattcccgtcacctctgtggtgttgctttaccaccgcccatcctgaggaagtcaccttccacctctacctgatcccaagtgactgctccattcggaaggccatagatgatctagaaatgaaattccagtttgtgcgaatccacaagccacccccgctgaccccactttatatgggctgtcgttacactgtgtctgggtctggttcagggatgctggaaatactccccaaggaactggagctctgctatcgaagccctggagaagaccagctgttctcggagttctacgttggccacttgggatcagggatcaggctgcaagtgaaagacaagaaagatgagactctggtgtgggaggccttggtgaaaccaggagatctcatgcctgcaactactctgatccctccagcccgcatagccgtaccttcacctctggatgccccgcagttgctgcactttgtggaccagtatcgagagcagctgatagcccgagtgacatcggtggaggttgtcttggacaaactgcatggacaggtgctgagccaggagcagtacgagagggtgctggctgagaacacgaggcccagccagatgcggaagctgttcagcttgagccagtcctgggaccggaagtgcaaagatggactctaccaagccctgaaggagacccatcctcacctcattatggaactctgggagaagggcagcaaaaagggactcctgccactcagcagctgaagtatcaacaccagcccttgacccttgagtcctggctttggctgacccttctttgggtctcagtttctttctctgcaaacaagttgccatctggtttgccttccagcactaaagtaatggaactttgatgatgcctttgctgggcattatgtgtccatgccagggatgccacagggggccccagtccaggtggcctaacagcatctcagggaatgtccatctggagctggcaagacccctgcagacctcatagagcctcatctggtggccacagcagccaagcctagagccctccggatcccatccaggcgcaaagaggaataggagggacatggaaccatttgcctctggctgtgtcacagggtgagccccaaaattggggttcagcgtgggaggccacgtggattcttggctttgtacaggaagatctacaagagcaagccaacagagtaaagtggaaggaagtttattcagaaaataaaggagtatcacagctctttt

SEQ ID NO: 226555 - protein, 1443 aa, Artificial Sequence
  derived and/or modified sequence
MAGGAWGRLACYLEFLKKEELKEFQLLLANKAHSRSSSGETPAQPEKTSGMEVASYLVAQYGEQRAWDLALHTWEQMGLRSLCAQAQEGAGHSPSFPYSPSEPHLGSPSQPTSTAVLMPWIHELPAGCTQGSERRVLRQLPDTSGRRWREISASLLYQALPSSPDHESPSQESPNAPTSTAVLGSWGSPPQPSLAPREQEAPGTQWPLDETSGIYYTEIREREREKSEKGRPPWAAVVGTPPQAHTSLQPHHHPWEPSVRESLCSTWPWKNEDFNQKFTQLLLLQRPHPRSQDPLVKRSWPDYVEENRGHLIEIRDLFGPGLDTQEPRIVILQGAAGIGKSTLARQVKEAWGRGQLYGDRFQHVFYFSCRELAQSKVVSLAELIGKDGTATPAPIRQILSRPERLLFILDGVDEPGWVLQEPSSELCLHWSQPQPADALLGSLLGKTILPEASFLITARTTALQNLIPSLEQARWVEVLGFSESSRKEYFYRYFTDERQAIRAFRLVKSNKELWALCLVPWVSWLACTCLMQQMKRKEKLTLTSKTTTTLCLHYLAQALQAQPLGPQLRDLCSLAAEGIWQKKTLFSPDDLRKHGLDGAIISTFLKMGILQEHPIPLSYSFIHLCFQEFFAAMSYVLEDEKGRGKHSNCIIDLEKTLEAYGIHGLFGASTTRFLLGLLSDEGEREMENIFHCRLSQGRNLMQWVPSLQLLLQPHSLESLHCLYETRNKTFLTQVMAHFEEMGMCVETDMELLVCTFCIKFSRHVKKLQLIEGRQHRSTWSPTMVVLFRWVPVTDAYWQILFSVLKVTRNLKELDLSGNSLSHSAVKSLCKTLRRPRCLLETLRLAGCGLTAEDCKDLAFGLRANQTLTELDLSFNVLTDAGAKHLCQRLRQPSCKLQRLQLVSCGLTSDCCQDLASVLSASPSLKELDLQQNNLDDVGVRLLCEGLRHPACKLIRLGKPSVMTPTEGLDTGEMSNSTSSLKRQRLGSERAASHVAQANLKLLDVSKIFPIAEIAEESSPEVVPVELLCVPSPASQGDLHTKPLGTDDDFWGPTGPVATEVVDKEKNLYRVHFPVAGSYRWPNTGLCFVMREAVTVEIEFCVWDQFLGEINPQHSWMVAGPLLDIKAEPGAVEAVHLPHFVALQGGHVDTSLFQMAHFKEEGMLLEKPARVELHHIVLENPSFSPLGVLLKMIHNALRFIPVTSVVLLYHRVHPEEVTFHLYLIPSDCSIRKAIDDLEMKFQFVRIHKPPPLTPLYMGCRYTVSGSGSGMLEILPKELELCYRSPGEDQLFSEFYVGHLGSGIRLQVKDKKDETLVWEALVKPGDLMPATTLIPPARIAVPSPLDAPQLLHFVDQYREQLIARVTSVEVVLDKLHGQVLSQEQYERVLAENTRPSQMRKLFSLSQSWDRKCKDGLYQALKETHPHLIMELWEKGSKKGLLPLSS

SEQ ID NO: 226556 - DNA, 4332 bp, Artificial Sequence
  derived and/or modified sequence
atggccggcggcgcctggggcagactggcctgctacctggagttcctgaagaaggaggagctgaaggagttccagctgctgctggccaacaaggcccacagcagaagcagcagcggcgagacccccgcccagcccgagaagaccagcggcatggaggtggccagctacctggtggcccagtacggcgagcagagagcctgggacctggccctgcacacctgggagcagatgggcctgagaagcctgtgcgcccaggcccaggagggcgccggccacagccccagcttcccctacagccccagcgagccccacctgggcagccccagccagcccaccagcaccgccgtgctgatgccctggatccacgagctgcccgccggctgcacccagggcagcgagagaagagtgctgagacagctgcccgacaccagcggcagaagatggagagagatcagcgccagcctgctgtaccaggccctgcccagcagccccgaccacgagagccccagccaggagagccccaacgcccccaccagcaccgccgtgctgggcagctggggcagccccccccagcccagcctggcccccagagagcaggaggcccccggcacccagtggcccctggacgagaccagcggcatctactacaccgagatcagagagagagagagagagaagagcgagaagggcagacccccctgggccgccgtggtgggcacccccccccaggcccacaccagcctgcagccccaccaccacccctgggagcccagcgtgagagagagcctgtgcagcacctggccctggaagaacgaggacttcaaccagaagttcacccagctgctgctgctgcagagaccccaccccagaagccaggaccccctggtgaagagaagctggcccgactacgtggaggagaacagaggccacctgatcgagatcagagacctgttcggccccggcctggacacccaggagcccagaatcgtgatcctgcagggcgccgccggcatcggcaagagcaccctggccagacaggtgaaggaggcctggggcagaggccagctgtacggcgacagattccagcacgtgttctacttcagctgcagagagctggcccagagcaaggtggtgagcctggccgagctgatcggcaaggacggcaccgccacccccgcccccatcagacagatcctgagcagacccgagagactgctgttcatcctggacggcgtggacgagcccggctgggtgctgcaggagcccagcagcgagctgtgcctgcactggagccagccccagcccgccgacgccctgctgggcagcctgctgggcaagaccatcctgcccgaggccagcttcctgatcaccgccagaaccaccgccctgcagaacctgatccccagcctggagcaggccagatgggtggaggtgctgggcttcagcgagagcagcagaaaggagtacttctacagatacttcaccgacgagagacaggccatcagagccttcagactggtgaagagcaacaaggagctgtgggccctgtgcctggtgccctgggtgagctggctggcctgcacctgcctgatgcagcagatgaagagaaaggagaagctgaccctgaccagcaagaccaccaccaccctgtgcctgcactacctggcccaggccctgcaggcccagcccctgggcccccagctgagagacctgtgcagcctggccgccgagggcatctggcagaagaagaccctgttcagccccgacgacctgagaaagcacggcctggacggcgccatcatcagcaccttcctgaagatgggcatcctgcaggagcaccccatccccctgagctacagcttcatccacctgtgcttccaggagttcttcgccgccatgagctacgtgctggaggacgagaagggcagaggcaagcacagcaactgcatcatcgacctggagaagaccctggaggcctacggcatccacggcctgttcggcgccagcaccaccagattcctgctgggcctgctgagcgacgagggcgagagagagatggagaacatcttccactgcagactgagccagggcagaaacctgatgcagtgggtgcccagcctgcagctgctgctgcagccccacagcctggagagcctgcactgcctgtacgagaccagaaacaagaccttcctgacccaggtgatggcccacttcgaggagatgggcatgtgcgtggagaccgacatggagctgctggtgtgcaccttctgcatcaagttcagcagacacgtgaagaagctgcagctgatcgagggcagacagcacagaagcacctggagccccaccatggtggtgctgttcagatgggtgcccgtgaccgacgcctactggcagatcctgttcagcgtgctgaaggtgaccagaaacctgaaggagctggacctgagcggcaacagcctgagccacagcgccgtgaagagcctgtgcaagaccctgagaagacccagatgcctgctggagaccctgagactggccggctgcggcctgaccgccgaggactgcaaggacctggccttcggcctgagagccaaccagaccctgaccgagctggacctgagcttcaacgtgctgaccgacgccggcgccaagcacctgtgccagagactgagacagcccagctgcaagctgcagagactgcagctggtgagctgcggcctgaccagcgactgctgccaggacctggccagcgtgctgagcgccagccccagcctgaaggagctggacctgcagcagaacaacctggacgacgtgggcgtgagactgctgtgcgagggcctgagacaccccgcctgcaagctgatcagactgggcaagcccagcgtgatgacccccaccgagggcctggacaccggcgagatgagcaacagcaccagcagcctgaagagacagagactgggcagcgagagagccgccagccacgtggcccaggccaacctgaagctgctggacgtgagcaagatcttccccatcgccgagatcgccgaggagagcagccccgaggtggtgcccgtggagctgctgtgcgtgcccagccccgccagccagggcgacctgcacaccaagcccctgggcaccgacgacgacttctggggccccaccggccccgtggccaccgaggtggtggacaaggagaagaacctgtacagagtgcacttccccgtggccggcagctacagatggcccaacaccggcctgtgcttcgtgatgagagaggccgtgaccgtggagatcgagttctgcgtgtgggaccagttcctgggcgagatcaacccccagcacagctggatggtggccggccccctgctggacatcaaggccgagcccggcgccgtggaggccgtgcacctgccccacttcgtggccctgcagggcggccacgtggacaccagcctgttccagatggcccacttcaaggaggagggcatgctgctggagaagcccgccagagtggagctgcaccacatcgtgctggagaaccccagcttcagccccctgggcgtgctgctgaagatgatccacaacgccctgagattcatccccgtgaccagcgtggtgctgctgtaccacagagtgcaccccgaggaggtgaccttccacctgtacctgatccccagcgactgcagcatcagaaaggccatcgacgacctggagatgaagttccagttcgtgagaatccacaagcccccccccctgacccccctgtacatgggctgcagatacaccgtgagcggcagcggcagcggcatgctggagatcctgcccaaggagctggagctgtgctacagaagccccggcgaggaccagctgttcagcgagttctacgtgggccacctgggcagcggcatcagactgcaggtgaaggacaagaaggacgagaccctggtgtgggaggccctggtgaagcccggcgacctgatgcccgccaccaccctgatcccccccgccagaatcgccgtgcccagccccctggacgccccccagctgctgcacttcgtggaccagtacagagagcagctgatcgccagagtgaccagcgtggaggtggtgctggacaagctgcacggccaggtgctgagccaggagcagtacgagagagtgctggccgagaacaccagacccagccagatgagaaagctgttcagcctgagccagagctgggacagaaagtgcaaggacggcctgtaccaggccctgaaggagacccacccccacctgatcatggagctgtgggagaagggcagcaagaagggcctgctgcccctgagcagctag

SEQ ID NO: 226557 - DNA, 4332 bp, Artificial Sequence
  derived and/or modified sequence
atggccggaggtgcctggggcaggctcgcatgctacctggagtttttgaagaaggaggaactgaaagagtttcagctgctactcgccaacaaggcgcactcacgctcttcctctggagaaacccccgcacaacctgaaaagacatccggtatggaggtagcaagttacttagtcgcccagtatggcgaacagcgagcttgggacctggcgttgcacacatgggaacagatggggctacgatccctgtgtgcacaggcacaagagggagcaggacactcccccagttttccttattcccctagcgaaccccacctcggcagccctagtcagccaacgtctactgccgttttgatgccttggatccacgaactgcccgccgggtgcacacaaggtagcgagaggcgggttcttagacagctgccagatacctccgggcgccgatggcgggaaatctcagccagcctgctgtatcaggcattgccgagctcccccgatcacgaatcacccagccaggagagtcccaacgcacccacatccactgccgtactggggtcatggggaagcccaccacagcctagtctggcgcctcgcgagcaggaggcccccggcactcagtggcccctggacgaaacatcagggatctactatactgaaattagagagagagagagagagaaatctgaaaaaggccgacctccctgggccgccgtggtgggaacaccacctcaggcacatacatctctccaaccacaccaccacccctgggagcccagcgtgagggaaagtctctgctcaacctggccatggaaaaacgaagatttcaaccagaagtttacacaactgcttttactgcagcggcctcatcctaggagccaagaccccttagtgaagagatcatggccagattatgtggaagaaaaccgcggccatctcatcgagatcagggacctgtttggacctggtctggacacccaggagcctcggatagtaatcctgcagggtgcagcagggattggaaagagtaccttggcccgccaggtgaaggaagcctggggaagggggcagttgtacggtgatcggttccagcatgtgttctatttttcttgtagagagctggcccaaagtaaggtggtctctctggcagaactgatcgggaaagacggaaccgccacacctgcacctatcaggcagatactcagcaggcccgaaaggctgttatttattttagacggcgtggacgaacctggctgggtcctgcaggagcctagcagcgagttgtgcctccactggagtcagccacagcccgctgacgccttgctcgggagcttacttgggaagacaatcctccccgaagctagcttcctgatcactgcgcgcaccacagctctgcaaaatctcatccccagcctggaacaggccaggtgggtggaagttctgggattcagcgagtccagcaggaaggagtacttttaccgatactttaccgatgaaaggcaggcaattcgagcattccggctggtcaagtccaacaaggagctgtgggcactttgcctggtgccatgggtgagctggctggcctgcacatgcctgatgcagcagatgaagaggaaagaaaagttgacattaacctcaaagacaaccacgaccttgtgtctccattacctggctcaagctcttcaggctcagccccttggaccacaactgagggacctgtgttctctggcagctgaaggcatctggcaaaaaaagacactgttctcccccgacgatcttcgaaaacacggtctggacggagcaatcatctcaacatttcttaaaatgggaatccttcaggagcatccaattcctttgagttattcgtttatccacttgtgctttcaggagttctttgctgctatgtcatatgttctggaagatgaaaaaggcagggggaagcactctaactgtatcatagatttagaaaaaaccttggaagcttatggcatccacgggttgtttggggcaagcactacaaggttccttctcggcctcttaagcgatgagggcgaaagagagatggaaaacatttttcactgtcgtctgagccaggggcggaacctgatgcagtgggttcctagcttgcagctgctacttcagcctcactcactggagagtctgcactgcctgtatgaaacgagaaataagacctttctgacacaggtgatggctcatttcgaggagatgggcatgtgcgtggagaccgatatggaactccttgtgtgcactttctgcattaaatttagcagacacgtgaaaaagttgcaacttattgagggtaggcaacatagaagcacttggtctcctactatggttgtcctgttccgctgggtccccgtgactgatgcttactggcagatcttgttcagcgtgctgaaggtcacccggaatctgaaagaactggatctttccggcaatagcctgtcccactcagctgtcaaaagtttgtgcaagacactgcggcgcccgcggtgtctactagaaactctccgactggccggttgtggtctgactgcggaggactgcaaagacctcgccttcggcctgagagccaaccagactctgacggaactcgacctctccttcaacgtacttaccgatgctggggccaagcacctgtgccagaggcttaggcagccctcgtgtaagctacagcgcctccagctcgtttcatgtgggctgaccagtgactgctgccaagacctagcaagcgtgttatctgcctccccctcactgaaagagcttgatctgcagcaaaacaatttagatgacgtcggggtacggttattatgtgaaggcctgagacaccctgcttgtaaactgatccgactcgggaagccctcagtgatgacacccacagaggggctggatacaggagagatgagcaattccacatctagcttgaagcgccaacgactggggagtgagcgcgcagcttcacacgtggcccaggccaacctcaagctgctagatgtgagcaagatcttccctattgccgaaattgccgaagagagtagcccagaagtggtcccggtggagctcctgtgtgtgccaagtccagcatcccagggagacttgcacaccaaacctctcggcactgacgatgacttttggggccctacaggccccgtagctacagaggtggtggataaggagaaaaacctgtaccgcgtccattttcctgtcgccggatcatacaggtggcctaacacggggctctgctttgtcatgagggaagccgtgactgtcgagattgaattttgcgtttgggatcaattcctgggcgagatcaacccgcaacattcctggatggttgctgggccactgctggacattaaggcagaaccaggagccgtagaagctgtccatctgccgcactttgtggcacttcagggcgggcacgtggataccagcctctttcaaatggcacacttcaaggaggaagggatgctgttggagaaacccgcgcgggtcgaattacaccacatcgtactggaaaacccatcgtttagcccccttggcgtgctgctgaagatgattcacaacgctcttagatttattcctgtaacttctgtcgtcctgctctaccaccgggttcaccctgaggaagtgaccttccatctgtacttgattccaagcgactgctcaatccggaaagcaatcgatgacctggaaatgaagtttcagttcgtccggatccacaagcctcccccactcacccctctttacatgggatgtcgctataccgtgtctggatcaggcagcgggatgctcgaaatattgcctaaggaactcgaactgtgctaccgatcccccggcgaggaccagctctttagcgagttctacgttggacacttagggagtggcattcgtctccaggtgaaggataagaaagacgagacactggtttgggaggccctagttaaacccggtgatctcatgcctgcgaccaccctcattcctccagcaagaatcgcggtgccctcacccttagatgcgccccagctcctgcacttcgtagaccagtaccgggaacagttaattgcccgggtcacaagtgtggaagtggttctcgacaagctgcacggacaggtgctctctcaggagcagtatgaacgcgtgcttgccgagaacacgagacccagtcagatgcgcaagcttttcagtttgtcccagagctgggaccggaagtgcaaagatggactttaccaggccctgaaagaaacacaccctcatcttataatggagctttgggaaaaagggtctaagaaaggactgctgcctctcagcagctag

SEQ ID NO: 226558 - DNA, 4332 bp, Artificial Sequence
  derived and/or modified sequence
atggccggcggggcctggggccgcctggcctgctacctggagttcctgaagaaggaggagctgaaggagttccagctgctgctggccaacaaggcccacagccgcagcagcagcggggagaccccagcccagcctgagaagaccagcggcatggaggtggccagctacctggtggcccagtatggagagcagagggcctgggacctggccctgcacacctgggagcagatgggcctgcggagcctgtgtgcccaggcccaggagggcgccggccacagccccagcttcccctacagccccagcgagccccacctgggcagccccagccagcccaccagcacagctgtgctgatgccctggatccacgagctgcctgctggctgcacccagggcagcgagcggcgggtgctgcggcagctgcctgacaccagcggccgccgctggagggagatcagcgccagcctgctgtaccaggccctgcccagcagcccagaccacgagagccccagccaggagagccccaatgcccccaccagcacagctgtgctgggctcctggggcagccccccccagcccagcctggccccccgggagcaggaggcccctggcacccagtggcccctggatgagaccagcggcatctactacacagagatccgggagcgggagcgggagaagtctgagaagggccggcccccctgggccgctgtggtgggcaccccaccccaggcccacaccagcctgcagccccaccaccacccctgggagcccagcgtgcgggagagcctgtgcagcacctggccctggaagaatgaagacttcaaccagaagttcacccagctgctgctgctgcagaggccccaccccaggagccaggaccccctggtgaagaggtcctggccagactatgtggaggagaacagaggccacctgattgagatccgggacctgtttggacctggcctggacacccaggagcccagaattgtcatcctgcagggcgccgccggcatcggcaagagcaccctggcccggcaggtgaaggaggcctggggccggggccagctgtatggagaccgcttccagcacgtgttctacttcagctgccgggagctggcccagagcaaggtggtgtccctggccgagctgattggcaaggatggaacagccaccccagcccccatccggcagatcctgagcaggcctgagcggctgctcttcatcctggatggagtggatgagcccggctgggtgctgcaggagcccagcagcgagctgtgcctgcactggagccagccccagcctgcagatgccctgctgggcagcctgctgggcaagaccatcctgcctgaggccagcttcctgatcacagcccggaccacagccctgcagaacctgatccccagcctggagcaggcccgctgggtggaggtgctgggcttcagcgagagcagcaggaaggagtacttctaccgctacttcacagatgagcggcaggccatccgggccttccggctggtgaagagcaacaaggagctgtgggccctgtgcctggtgccctgggtgtcctggctggcctgcacctgcctgatgcagcagatgaagaggaaggagaagctgaccctgaccagcaagaccaccaccaccctgtgcctgcactacctggcccaggccctgcaggcccagcccctgggcccccagctgcgggacctgtgcagcctggccgctgagggcatctggcagaagaagaccctcttctccccagatgacctgaggaagcacggcctggatggagccatcatcagcaccttcctgaagatgggcatcctgcaggagcaccccatccccctgagctacagcttcatccacctgtgcttccaggagttctttgctgccatgtcctatgtgctggaggatgagaagggccggggcaagcacagcaactgcatcatcgacctggagaagaccctggaggcctacggcatccacggcctgtttggagccagcaccacccgcttcctgctgggcctgctgagtgatgaaggagagcgggagatggagaacatcttccactgccgcctgagccagggcaggaacctgatgcagtgggtgcccagcctgcagctgctgctgcagccccacagcctggagagcctgcactgcctgtatgagaccaggaacaagaccttcctgacccaggtgatggcccactttgaggagatgggcatgtgtgtggagacagacatggagctgctggtgtgcaccttctgcatcaagttcagcagacatgtgaagaagctgcagctgattgagggccggcagcacaggagcacctggagccccaccatggtggtgctcttccgctgggtgcctgtgacagatgcctactggcagatcctcttctctgtgctgaaggtgaccaggaacctgaaggagctggacctgagcggcaacagcctgagccacagcgctgtgaagagcctgtgcaagaccctgcggcggccccgctgcctgctggagaccctgcggctggccggctgcggcctgacagctgaggactgcaaggacctggccttcggcctgcgggccaaccagaccctgacagagctggacctgtccttcaacgtgctgacagatgctggggccaagcacctgtgccagaggctgcggcagcccagctgcaagctgcagaggctgcagctggtgtcctgtggcctgaccagtgactgctgccaggacctggcctctgtgctgagcgccagccccagcctgaaggagctggacctgcagcagaacaacctggatgatgtgggcgtgcggctgctgtgtgagggcctgcggcacccagcctgcaagctgatccggctgggcaagcccagcgtgatgacccccacagagggcctggacaccggggagatgagcaacagcaccagcagcctgaagaggcagaggctgggcagcgagcgggccgccagccacgtggcccaggccaacctgaagctgctggatgtgtccaagatcttccccatcgccgagattgctgaggagagcagccctgaggtggtgcctgtggagctgctgtgtgtgcccagccctgccagccagggcgacctgcacaccaagcccctgggcacagatgatgacttctggggccccactggacctgtggccacagaggtggtggacaaggagaagaacctgtacagagtgcacttccctgtggccggcagctaccgctggcccaacacaggcctgtgctttgtgatgagggaggccgtgacagtggagattgagttctgtgtgtgggaccagttcctgggggagatcaacccccagcacagctggatggtggccggccccctgctggacatcaaggccgagcccggggctgtggaggccgtgcacctgccccactttgtggccctgcagggcggccacgtggacaccagcctcttccagatggcccacttcaaggaggagggcatgctgctggagaagccagcccgggtggagctgcaccacatcgtgctggagaaccccagcttcagccccctgggcgtgctgctgaagatgatccacaatgccctgcgcttcatccctgtgacctctgtggtgctgctgtaccaccgggtgcaccctgaggaggtgaccttccacctgtacctgatccccagcgactgcagcatcaggaaggccattgatgacctggagatgaagttccagtttgtgcgcatccacaagcccccacccctgacccccctgtacatgggctgccgctacacagtgtctggcagcggcagcggcatgctggagatcctgcccaaggagctggagctgtgctaccgcagccctggagaggaccagctgttcagcgagttctacgtgggccacctgggcagcggcatccggctgcaggtgaaggacaagaaggatgagaccctggtgtgggaggccctggtgaagccaggggacctgatgcctgccaccaccctcatccccccagccagaattgctgtgcccagccccctggatgccccccagctgctgcactttgtggaccagtaccgggagcagctgattgcccgggtgacctctgtggaggtggtgctggacaagctgcacggccaggtgctgagccaggagcagtatgagcgggtgctggccgagaacacccggcccagccagatgaggaagctgttcagcctgagccagagctgggacaggaagtgcaaggatggcctgtaccaggccctgaaggagacccacccccacctgatcatggagctgtgggagaagggcagcaagaagggcctgctgcccctgagcagctag

SEQ ID NO: 226559 - DNA, 4332 bp, Artificial Sequence
  derived and/or modified sequence
atggccggcggcgcctggggccggctggcctgctacctggagttcttaaagaaagaggagctgaaagaattccagttgctgctggccaacaaagctcacagtagaagttcttctggggaaacccccgcccagccggagaagacctctggtatggaagtggcatcgtatcttgtggcgcaatacggcgagcagagggcgtgggatctggccctgcatacgtgggaacagatggggttgcgctccctttgtgctcaggctcaggaaggagccggacacagtccgtcctttccatattcaccaagtgagccccatctgggctcgccttcccaaccgacttccacagctgtgcttatgccctggatacatgaattacccgctggctgtactcagggttctgaacgaagagtgctacgtcagctccccgacaccagcgggagacgttggcgggaaatctccgcatcgctgctctatcaggccctcccatcttctcctgatcacgagagtccttctcaggaatcaccgaacgcccccacctccacagccgtcctcgggtcctggggatcccccccgcagcccagcctcgcaccgcgggagcaggaagcacccgggacccaatggcctctggatgagaccagtggcatttattacaccgaaatccgagagcgcgagcgtgagaagagtgaaaagggaagacctccttgggctgccgtcgtcggaaccccaccccaggcacacacatcactacagccccatcatcacccttgggagcctagcgtgagggaatccctgtgctccacctggccctggaaaaacgaggacttcaatcagaaattcactcaattgcttttgctccagcgtccccaccctcgatctcaggatcccctagtcaagcggtcttggcccgattacgttgaggaaaaccgcgggcatctcattgaaatccgcgatctttttggtcctggtttggatacccaggaacctcgaatcgtgattctccagggagcagcagggatcggcaagagtaccctagctagacaagtcaaggaagcgtggggcagaggccagctttatggcgataggttccagcacgtcttctacttctcttgtcgggagctcgcccagagcaaagtggtgtcactggcagaactcatcggcaaggacgggacggctactcctgcccccatccgccaaatcctctccagacccgaacggctgctgttcatcctagacggcgttgatgagcccggctgggttctgcaggagcctagcagtgagctgtgccttcactggagtcagccacagccagctgacgcacttttgggctctttattggggaaaaccattctccctgaagcatcgttcttaataactgcccggacgaccgccttacagaacctgattccctccttggaacaggcccggtgggtggaggttttgggattctctgagtcttcaaggaaggagtatttttatcgatattttaccgatgaaagacaggccataagagcctttcgcttagtcaaatcaaataaagagctgtgggccctgtgtttagttccctgggtcagctggctggcctgcacatgtctaatgcaacagatgaagagaaaggagaaactaactctgacttctaaaaccaccactacgctttgtctccactacctggcacaggccttgcaagcgcaacctctcggcccgcagcttagggacttatgcagcttggccgctgagggtatctggcaaaaaaagaccctgttctcccctgatgacttgcggaagcacggactggatggggccatcatttccacattcctgaaaatgggcattcttcaagagcaccccatacctctgtcttatagcttcattcatctgtgttttcaggagttctttgctgccatgagctatgtcctggaggacgagaaggggagagggaaacacagcaactgtatcattgacctcgagaagacccttgaggcttatgggattcacgggctttttggcgcctcgacgaccagattcctgctgggtctgctgagtgacgaaggtgagcgtgagatggagaacattttccactgtcgtttgagtcagggacgaaacttaatgcagtgggtgccttccctgcagctactgctgcaaccacacagcctggaaagcctacattgcttgtatgagacccgaaacaagaccttccttacccaggttatggcgcatttcgaagagatgggcatgtgcgtcgagaccgatatggaactcttggtatgcactttctgtattaagttctcaaggcatgtgaagaaacttcagcttattgaaggtaggcagcacaggagcacatggagccctactatggtagtactctttcggtgggtgcctgtgactgatgcatactggcaaattttgttctcagttctgaaggtaaccaggaacttaaaagagctagatttgtcagggaactctcttagccattctgcagtgaagtccctttgcaaaaccttgagacgccctaggtgtctcctggaaacactgagactcgccggttgcggactaacagcagaggattgtaaggacctggcttttggtctcagagccaaccagaccctgacggagctagatcttagctttaacgtgttgaccgacgccggcgccaaacacttgtgtcagcgtctgaggcagccatcctgcaagctacaacggttacagttagtgagctgcgggctcaccagcgattgttgtcaggatcttgccagcgtgctgagtgctagcccgtccctgaaagagctcgatctccaacagaacaatctggacgatgtgggagtccggctgctctgcgagggcttgaggcaccctgcctgtaaactgatcagacttggaaaaccaagtgtgatgactcccacagaaggattagacaccggggaaatgagtaattcgacgtcaagtctgaagcggcagaggctcggcagtgaacgagcggcctcacatgtggctcaggcaaatctgaaactgcttgacgtgtcgaaaatctttccgattgctgagatcgcagaggagtcatccccggaggtggtgcccgtcgaactgctgtgtgtgcccagcccagcgtctcaaggcgatttgcacaccaagcccctggggactgatgacgatttttggggccctacgggccctgtggcaaccgaggtcgtcgacaaagaaaagaacttatacagagtgcacttccctgtggcaggatcgtatagatggcccaacacaggcctttgcttcgtgatgcgcgaagctgtgactgttgagatcgagttctgtgtgtgggatcagtttctgggcgaaataaacccccagcattcttggatggttgccgggccactcctcgacatcaaagccgagcccggtgcagtagaagcggtgcatctgccgcacttcgtcgcccttcagggaggccatgtggatacatctctgtttcagatggcacacttcaaagaagagggcatgctcttagaaaaaccagcccgggttgagctccatcatatcgtactcgaaaatcccagcttttctccgctgggggtattactcaagatgatacataacgccctcaggttcattcccgtgacttccgtcgtcctattgtaccaccgggtgcaccccgaggaggtgacttttcacctgtatctgatcccatccgattgttctatccgaaaggctattgatgaccttgagatgaaatttcagttcgtgaggatccacaaaccgcctcccctgactccactgtacatggggtgtcggtacacggtgtctggctccggctcaggcatgctggaaattctaccgaaggaactggaactgtgctatcggtcccctggcgaagaccagctctttagtgagttttatgtggggcaccttggtagcggcataagactgcaagtcaaagataagaaggacgaaacattagtctgggaggcactggtcaagccaggcgatcttatgccagccaccaccctgattcctcctgcccgcattgctgtcccaagtcctctggacgccccgcagctgcttcactttgtcgaccagtaccgtgagcagctgatcgctagagtcacctcagtggaggtcgtgctggacaaactccatggacaagtattgtcgcaggaacagtacgaaagagtcctcgctgaaaatacaaggcctagccagatgcgcaaactcttctcactgtcccagagctgggatcgcaagtgtaaggatgggttgtatcaagctttgaaggagacccacccacatctaattatggaactgtgggagaaagggtccaagaagggtttgctgcctctgagcagttag

SEQ ID NO: 226560 - DNA, 4332 bp, Artificial Sequence
  derived and/or modified sequence
atggccggtggcgcatgggggcgtttagcttgctacctggaattcctgaagaaagaggagttgaaggagtttcaactgctgcttgctaacaaagctcactcccgcagtagttccggagagacaccagcgcagccggagaagacatctggcatggaggtggcctcctacctagtggctcagtacggcgagcagcgtgcttgggacctcgcgctgcacacatgggaacagatgggactcagatcactctgtgcccaggcccaggagggtgctggtcactccccgtctttcccatactccccatccgagccccatctcggttcaccctctcaacccacctccaccgcagtactaatgccgtggatccacgagctcccggctggatgcacacaaggctccgagcgcagagttctcagacagcttcctgacacttccggcagaagatggcgtgagattagcgcctccctgctgtaccaagctctaccgagttcccctgaccacgagtccccctcgcaggaatccccaaacgctcccactagcacggctgtcctgggctcctgggggagtccccctcagcctagcttggctccacgagaacaggaagccccaggaacgcagtggccattagacgaaaccagtggcatctactatacggaaatacgcgagcgcgagagagagaaatccgagaaaggcagacccccatgggcagccgtggtggggacaccccctcaggctcacacatctcttcagccacaccaccacccctgggaaccctccgtcagagaaagtttatgtagcacttggccctggaagaacgaagactttaatcagaagtttacccagctcctgctgctacagcgaccccatcccagatcccaggaccctctcgtcaagcgaagctggccagactacgttgaagagaacagggggcatctcatcgaaattagagacctgttcggcccaggactggacactcaggagccacgaatagtgatattgcagggagcagccggaatcggcaagagtaccctggccaggcaggttaaggaagcttggggtcgaggccagctgtacggagaccgcttccagcacgtcttttatttcagctgcagggagctagcccaatccaaggtggtgtctctcgccgaactcatcggcaaagacggaacagcaacgcctgctccgattcgtcagatcctgtcccggcctgaacgactgctcttcatactggatggggtggacgaacccggatgggtgttacaggaaccctcaagcgagttgtgtcttcactggtcacaaccccaacctgccgacgcacttttgggcagtctgctgggaaagaccattctgccggaggcctcatttctgattactgcacggaccacagcccttcagaatctcattccatctcttgagcaggccagatgggtcgaggtccttggctttagcgaatcgtcccgcaaggaatacttttacagatattttacagatgaaaggcaggccatcagggccttcagactcgtgaagtctaataaagaactgtgggcattgtgtctggtgccatgggtaagctggctggcttgcacatgtttgatgcagcaaatgaagcgtaaggagaaattgacactcacatctaagacaactacgactttatgtttgcactacctcgcccaagccctgcaggcgcaacccttagggccacagctccgagatctctgcagcctggccgctgaggggatctggcagaaaaaaacgctcttctctccggacgacctgaggaagcatggcctggatggagctatcatctccactttcctcaaaatgggcatcctgcaggaacaccccatccctctgtcttacagttttattcatttatgttttcaggagttttttgcagctatgagttatgtcctggaggatgagaagggcagagggaagcactcaaattgcattatcgacttggagaaaaccctcgaagcttacggtatccatgggctgtttggggcttcgaccactagattccttctcgggctgctctccgatgagggcgaacgcgaaatggaaaacatttttcactgtcggctgagccagggcaggaacctgatgcagtgggtccccagcctgcagcttctgctgcagcctcacagcctggaaagccttcattgtctgtacgagacccggaataagactttcctgacacaggtgatggctcattttgaagaaatgggaatgtgcgtcgaaactgacatggagcttctggtctgtaccttttgcatcaagttcagccggcacgtgaagaagctgcagctgatcgaaggtcgtcaacatagatcaacatggagcccaactatggtagtcctgttcagatgggtgccggtcaccgacgcttattggcaaatcctcttctccgtgctgaaggtcaccagaaacctcaaagagctggatctttccgggaatagcttatctcattctgccgtcaaaagcctctgcaaaaccctcagaagacctagatgtctcctggaaactctgaggctcgctgggtgtggactgactgccgaggattgcaaggatctcgctttcgggctacgcgctaaccagacgctgacggaactggacttaagcttcaacgtcctcacagacgccggtgctaagcacctgtgtcagcggttacgtcagccatcctgtaagctccagcggctgcagctcgttagttgcgggcttacatctgactgctgccaagatctggcatccgtgctgtctgcttctccatcattgaaggaactggatcttcaacaaaacaacctggacgatgtcggagtccgcttgctgtgtgaaggacttcgccatccagcctgcaaactcattcgattaggaaagccttctgtcatgactcctactgaaggactggataccggagaaatgagtaatagtactagctctctaaaacgtcagaggctgggttccgagcgcgcagcctcccatgttgcacaagccaaccttaaactcctagacgtctccaagattttccctatcgccgaaatcgcggaagaatccagcccggaggtagtccctgttgagcttctctgcgtgccatcacccgcatctcaaggtgatttgcatacaaagccattggggaccgacgacgatttctggggcccaacagggccagtggccactgaagtggttgacaaagagaaaaatctgtatcgcgtccactttcccgttgcgggatcataccgatggcctaacactgggttgtgctttgtcatgagggaggccgtgacggtagagatagagttctgtgtttgggaccagtttcttggcgaaataaatccccagcacagctggatggtggcagggcctctgttggacattaaagcggaaccgggagcagttgaagcggtccacctgccccactttgtcgccctgcaagggggtcacgttgatacgagtctctttcagatggctcactttaaagaagagggcatgcttctggaaaagccggctcgtgtggaactacaccacatcgtcctggagaatccgtcgttctcgcctctgggagtacttctcaagatgattcacaacgctttgcgcttcattcccgttacttccgtggtcctcctctaccaccgggtgcaccctgaagaggtgacattccacttgtacctgatcccaagcgattgttccatccgcaaagcaattgatgatctcgaaatgaagttccagttcgtgcgtatacataagccgcctcccctcacccccctctacatgggatgtagatataccgtgtccggttccgggtcagggatgttggagatcctgcccaaagagctagagctgtgctaccgtagtccaggggaagatcagctgttttcagaattctacgtgggccatctgggatctgggattcggctccaggttaaggacaaaaaggatgagactctcgtgtgggaggcacttgtgaagccaggagacctcatgccggcaacaacattgataccacctgcccgaatcgctgtgcccagccccctggacgcaccccagctgctgcacttcgtggaccagtatcgcgaacagctgattgcccgagtgactagcgtagaagtggttctggataagcttcacggccaggtgctctcacaggagcagtacgaaagagtgttggcagagaacacgaggccttcccagatgaggaaactctttagcctgtcccagtcctgggacaggaagtgcaaagacggcctctaccaggctcttaaggaaactcatccgcacctgatcatggagctctgggagaaaggttcaaagaagggcctccttcctcttagcagttag

SEQ ID NO: 226561 - DNA, 5522 bp, Artificial Sequence
  derived and/or modified sequence
cttgttgactaggcgctgttcttgctggctggtgccccagggcctggagaggtctgaagaaacctgggagccagcagcccggggctccactctgggttctgaaagcccattccctgctctgcggctcctcccaccccacctcttctcagccttgcagctcaagggttgatctcaggagtccaggacccaggagagggaagaatctgaggaacacagaacagtgagcgttgcccacaccccatctcccgtcaccacatctcccctcaccctcaccctccctgcctggccctggaccccatcccaggacctccctatcagctgacttcttccagtgtcttgcaggcccctctgggctcctccctcccctggcttttcctaccactccccctctatcggcgtctatctgtaggtgccctgggatttataaaactgggttccgaatgctgaataagagacggtaagagccaaggcaaaggacagcactgttctctgcctgcctgataccctcaccacctgggaacatcccccagacaccctcttaactccgggacagagatggctggcggagcctggggccgcctggcctgttacttggagttcctgaagaaggaggagctgaaggagttccagcttctgctcgccaataaagcgcactccaggagctcttcgggtgagacacccgctcagccagagaagacgagtggcatggaggtggcctcgtacctggtggctcagtatggggagcagcgggcctgggacctagccctccatacctgggagcagatggggctgaggtcactgtgcgcccaagcccaggaaggggcaggccactctccctcattcccctacagcccaagtgaaccccacctggggtctcccagccaacccacctccaccgcagtgctaatgccctggatccatgaattgccggcggggtgcacccagggctcagagagaagggttttgagacagctgcctgacacatctggacgccgctggagagaaatctctgcctcactcctctaccaagctcttccaagctccccagaccatgagtctccaagccaggagtcacccaacgcccccacatccacagcagtgctggggagctggggatccccacctcagcccagcctagcacccagagagcaggaggctcctgggacccaatggcctctggatgaaacgtcaggaatttactacacagaaatcagagaaagagagagagagaaatcagagaaaggcaggcccccatgggcagcggtggtaggaacgcccccacaggcgcacaccagcctacagccccaccaccacccatgggagccttctgtgagagagagcctctgttccacatggccctggaaaaatgaggattttaaccaaaaattcacacagctgctacttctacaaagacctcaccccagaagccaagatcccctggtcaagagaagctggcctgattatgtggaggagaatcgaggacatttaattgagatcagagacttatttggcccaggcctggatacccaagaacctcgcatagtcatactgcagggggctgctggaattgggaagtcaacactggccaggcaggtgaaggaagcctgggggagaggccagctgtatggggaccgcttccagcatgtcttctacttcagctgcagagagctggcccagtccaaggtggtgagtctcgctgagctcatcggaaaagatgggacagccactccggctcccattagacagatcctgtctaggccagagcggctgctcttcatcctcgatggtgtagatgagccaggatgggtcttgcaggagccgagttctgagctctgtctgcactggagccagccacagccggcggatgcactgctgggcagtttgctggggaaaactatacttcccgaggcatccttcctgatcacggctcggaccacagctctgcagaacctcattccttctttggagcaggcacgttgggtagaggtcctggggttctctgagtccagcaggaaggaatatttctacagatatttcacagatgaaaggcaagcaattagagcctttaggttggtcaaatcaaacaaagagctctgggccctgtgtcttgtgccctgggtgtcctggctggcctgcacttgcctgatgcagcagatgaagcggaaggaaaaactcacactgacttccaagaccaccacaaccctctgtctacattaccttgcccaggctctccaagctcagccattgggaccccagctcagagacctctgctctctggctgctgagggcatctggcaaaaaaagacccttttcagtccagatgacctcaggaagcatgggttagatggggccatcatctccaccttcttgaagatgggtattcttcaagagcaccccatccctctgagctacagcttcattcacctctgtttccaagagttctttgcagcaatgtcctatgtcttggaggatgagaaggggagaggtaaacattctaattgcatcatagatttggaaaagacgctagaagcatatggaatacatggcctgtttggggcatcaaccacacgtttcctattgggcctgttaagtgatgagggggagagagagatggagaacatctttcactgccggctgtctcaggggaggaacctgatgcagtgggtcccgtccctgcagctgctgctgcagccacactctctggagtccctccactgcttgtacgagactcggaacaaaacgttcctgacacaagtgatggcccatttcgaagaaatgggcatgtgtgtagaaacagacatggagctcttagtgtgcactttctgcattaaattcagccgccacgtgaagaagcttcagctgattgagggcaggcagcacagatcaacatggagccccaccatggtagtcctgttcaggtgggtcccagtcacagatgcctattggcagattctcttctccgtcctcaaggtcaccagaaacctgaaggagctggacctaagtggaaactcgctgagccactctgcagtgaagagtctttgtaagaccctgagacgccctcgctgcctcctggagaccctgcggttggctggctgtggcctcacagctgaggactgcaaggaccttgcctttgggctgagagccaaccagaccctgaccgagctggacctgagcttcaatgtgctcacggatgctggagccaaacacctttgccagagactgagacagccgagctgcaagctacagcgactgcagctggtcagctgtggcctcacgtctgactgctgccaggacctggcctctgtgcttagtgccagccccagcctgaaggagctagacctgcagcagaacaacctggatgacgttggcgtgcgactgctctgtgaggggctcaggcatcctgcctgcaaactcatacgcctggggaaaccaagtgtgatgacccctactgagggcctggatacgggagagatgagtaatagcacatcctcactcaagcggcagagactcggatcagagagggcggcttcccatgttgctcaggctaatctcaaactcctggacgtgagcaagatcttcccaattgctgagattgcagaggaaagctccccagaggtagtaccggtggaactcttgtgcgtgccttctcctgcctctcaaggggacctgcatacgaagcctttggggactgacgatgacttctggggccccacggggcctgtggctactgaggtagttgacaaagaaaagaacttgtaccgagttcacttccctgtagctggctcctaccgctggcccaacacgggtctctgctttgtgatgagagaagcggtgaccgttgagattgaattctgtgtgtgggaccagttcctgggtgagatcaacccacagcacagctggatggtggcagggcctctgctggacatcaaggctgagcctggagctgtggaagctgtgcacctccctcactttgtggctctccaagggggccatgtggacacatccctgttccaaatggcccactttaaagaggaggggatgctcctggagaagccagccagggtggagctgcatcacatagttctggaaaaccccagcttctcccccttgggagtcctcctgaaaatgatccataatgccctgcgcttcattcccgtcacctctgtggtgttgctttaccaccgcgtccatcctgaggaagtcaccttccacctctacctgatcccaagtgactgctccattcggaaggccatagatgatctagaaatgaaattccagtttgtgcgaatccacaagccacccccgctgaccccactttatatgggctgtcgttacactgtgtctgggtctggttcagggatgctggaaatactccccaaggaactggagctctgctatcgaagccctggagaagaccagctgttctcggagttctacgttggccacttgggatcagggatcaggctgcaagtgaaagacaagaaagatgagactctggtgtgggaggccttggtgaaaccaggagatctcatgcctgcaactactctgatccctccagcccgcatagccgtaccttcacctctggatgccccgcagttgctgcactttgtggaccagtatcgagagcagctgatagcccgagtgacatcggtggaggttgtcttggacaaactgcatggacaggtgctgagccaggagcagtacgagagggtgctggctgagaacacgaggcccagccagatgcggaagctgttcagcttgagccagtcctgggaccggaagtgcaaagatggactctaccaagccctgaaggagacccatcctcacctcattatggaactctgggagaagggcagcaaaaagggactcctgccactcagcagctgaagtatcaacaccagcccttgacccttgagtcctggctttggctgacccttctttgggtctcagtttctttctctgcaaacaagttgccatctggtttgccttccagcactaaagtaatggaactttgatgatgcctttgctgggcattatgtgtccatgccagggatgccacagggggccccagtccaggtggcctaacagcatctcagggaatgtccatctggagctggcaagacccctgcagacctcatagagcctcatctggtggccacagcagccaagcctagagccctccggatcccatccaggcgcaaagaggaataggagggacatggaaccatttgcctctggctgtgtcacagggtgagccccaaaattggggttcagcgtgggaggccacgtggattcttggctttgtacaggaagatctacaagagcaagccaacagagtaaagtggaaggaagtttattcagaaaataaaggagtatcacagctcttttagaatttgtctagcaggctttccagtttttaccagaaaacccctataaattaaaaattttttacttaaatttaagaattaaaaaaatacaaaaaagaaaaaatgaaaataaaggaataagaagttacctactcc

SEQ ID NO: 226562 - protein, 1399 aa, Artificial Sequence
  derived and/or modified sequence
MAGGAWGRLACYLEFLKKEELKEFQLLLANKAHSRSSSGETPAQPEKTSGMEVASYLVAQYGEQRAWDLALHTWEQMGLRSLCAQAQEGAGHSPSFPYSPSEPHLGSPSQPTSTAVLMPWIHELPAGCTQGSERRVLRQLPDTSGRRWREISASLLYQALPSSPDHESPSQESPNAPTSTAVLGSWGSPPQPSLAPREQEAPGTQWPLDETSGIYYTEIREREREKSEKGRPPWAAVVGTPPQAHTSLQPHHHPWEPSVRESLCSTWPWKNEDFNQKFTQLLLLQRPHPRSQDPLVKRSWPDYVEENRGHLIEIRDLFGPGLDTQEPRIVILQGAAGIGKSTLARQVKEAWGRGQLYGDRFQHVFYFSCRELAQSKVVSLAELIGKDGTATPAPIRQILSRPERLLFILDGVDEPGWVLQEPSSELCLHWSQPQPADALLGSLLGKTILPEASFLITARTTALQNLIPSLEQARWVEVLGFSESSRKEYFYRYFTDERQAIRAFRLVKSNKELWALCLVPWVSWLACTCLMQQMKRKEKLTLTSKTTTTLCLHYLAQALQAQPLGPQLRDLCSLAAEGIWQKKTLFSPDDLRKHGLDGAIISTFLKMGILQEHPIPLSYSFIHLCFQEFFAAMSYVLEDEKGRGKHSNCIIDLEKTLEAYGIHGLFGASTTRFLLGLLSDEGEREMENIFHCRLSQGRNLMQWVPSLQLLLQPHSLESLHCLYETRNKTFLTQVMAHFEEMGMCVETDMELLVCTFCIKFSRHVKKLQLIEGRQHRSTWSPTMVVLFRWVPVTDAYWQILFSVLKVTRNLKELDLSGNSLSHSAVKSLCKTLRRPRCLLETLRLAGCGLTAEDCKDLAFGLRANQTLTELDLSFNVLTDAGAKHLCQRLRQPSCKLQRLQLVSCGLTSDCCQDLASVLSASPSLKELDLQQNNLDDVGVRLLCEGLRHPACKLIRLGKPSVMTPTEGLDTGEMSNSTSSLKRQRLGSERAASHVAQANLKLLDVSKIFPIAEIAEESSPEVVPVELLCVPSPASQGDLHTKPLGTDDDFWGPTGPVATEVVDKEKNLYRVHFPVAGSYRWPNTGLCFVMREAVTVEIEFCVWDQFLGEINPQHSWMVAGPLLDIKAEPGAVEAVHLPHFVALQGGHVDTSLFQMAHFKEEGMLLEKPARVELHHIVLENPSFSPLGVLLKMIHNALRFIPVTSVVLLYHRVHPEEVTFHLYLIPSDCSIRKELELCYRSPGEDQLFSEFYVGHLGSGIRLQVKDKKDETLVWEALVKPGDLMPATTLIPPARIAVPSPLDAPQLLHFVDQYREQLIARVTSVEVVLDKLHGQVLSQEQYERVLAENTRPSQMRKLFSLSQSWDRKCKDGLYQALKETHPHLIMELWEKGSKKGLLPLSS

SEQ ID NO: 226563 - DNA, 4200 bp, Artificial Sequence
  derived and/or modified sequence
atggccggcggcgcctggggcagactggcctgctacctggagttcctgaagaaggaggagctgaaggagttccagctgctgctggccaacaaggcccacagcagaagcagcagcggcgagacccccgcccagcccgagaagaccagcggcatggaggtggccagctacctggtggcccagtacggcgagcagagagcctgggacctggccctgcacacctgggagcagatgggcctgagaagcctgtgcgcccaggcccaggagggcgccggccacagccccagcttcccctacagccccagcgagccccacctgggcagccccagccagcccaccagcaccgccgtgctgatgccctggatccacgagctgcccgccggctgcacccagggcagcgagagaagagtgctgagacagctgcccgacaccagcggcagaagatggagagagatcagcgccagcctgctgtaccaggccctgcccagcagccccgaccacgagagccccagccaggagagccccaacgcccccaccagcaccgccgtgctgggcagctggggcagccccccccagcccagcctggcccccagagagcaggaggcccccggcacccagtggcccctggacgagaccagcggcatctactacaccgagatcagagagagagagagagagaagagcgagaagggcagacccccctgggccgccgtggtgggcacccccccccaggcccacaccagcctgcagccccaccaccacccctgggagcccagcgtgagagagagcctgtgcagcacctggccctggaagaacgaggacttcaaccagaagttcacccagctgctgctgctgcagagaccccaccccagaagccaggaccccctggtgaagagaagctggcccgactacgtggaggagaacagaggccacctgatcgagatcagagacctgttcggccccggcctggacacccaggagcccagaatcgtgatcctgcagggcgccgccggcatcggcaagagcaccctggccagacaggtgaaggaggcctggggcagaggccagctgtacggcgacagattccagcacgtgttctacttcagctgcagagagctggcccagagcaaggtggtgagcctggccgagctgatcggcaaggacggcaccgccacccccgcccccatcagacagatcctgagcagacccgagagactgctgttcatcctggacggcgtggacgagcccggctgggtgctgcaggagcccagcagcgagctgtgcctgcactggagccagccccagcccgccgacgccctgctgggcagcctgctgggcaagaccatcctgcccgaggccagcttcctgatcaccgccagaaccaccgccctgcagaacctgatccccagcctggagcaggccagatgggtggaggtgctgggcttcagcgagagcagcagaaaggagtacttctacagatacttcaccgacgagagacaggccatcagagccttcagactggtgaagagcaacaaggagctgtgggccctgtgcctggtgccctgggtgagctggctggcctgcacctgcctgatgcagcagatgaagagaaaggagaagctgaccctgaccagcaagaccaccaccaccctgtgcctgcactacctggcccaggccctgcaggcccagcccctgggcccccagctgagagacctgtgcagcctggccgccgagggcatctggcagaagaagaccctgttcagccccgacgacctgagaaagcacggcctggacggcgccatcatcagcaccttcctgaagatgggcatcctgcaggagcaccccatccccctgagctacagcttcatccacctgtgcttccaggagttcttcgccgccatgagctacgtgctggaggacgagaagggcagaggcaagcacagcaactgcatcatcgacctggagaagaccctggaggcctacggcatccacggcctgttcggcgccagcaccaccagattcctgctgggcctgctgagcgacgagggcgagagagagatggagaacatcttccactgcagactgagccagggcagaaacctgatgcagtgggtgcccagcctgcagctgctgctgcagccccacagcctggagagcctgcactgcctgtacgagaccagaaacaagaccttcctgacccaggtgatggcccacttcgaggagatgggcatgtgcgtggagaccgacatggagctgctggtgtgcaccttctgcatcaagttcagcagacacgtgaagaagctgcagctgatcgagggcagacagcacagaagcacctggagccccaccatggtggtgctgttcagatgggtgcccgtgaccgacgcctactggcagatcctgttcagcgtgctgaaggtgaccagaaacctgaaggagctggacctgagcggcaacagcctgagccacagcgccgtgaagagcctgtgcaagaccctgagaagacccagatgcctgctggagaccctgagactggccggctgcggcctgaccgccgaggactgcaaggacctggccttcggcctgagagccaaccagaccctgaccgagctggacctgagcttcaacgtgctgaccgacgccggcgccaagcacctgtgccagagactgagacagcccagctgcaagctgcagagactgcagctggtgagctgcggcctgaccagcgactgctgccaggacctggccagcgtgctgagcgccagccccagcctgaaggagctggacctgcagcagaacaacctggacgacgtgggcgtgagactgctgtgcgagggcctgagacaccccgcctgcaagctgatcagactgggcaagcccagcgtgatgacccccaccgagggcctggacaccggcgagatgagcaacagcaccagcagcctgaagagacagagactgggcagcgagagagccgccagccacgtggcccaggccaacctgaagctgctggacgtgagcaagatcttccccatcgccgagatcgccgaggagagcagccccgaggtggtgcccgtggagctgctgtgcgtgcccagccccgccagccagggcgacctgcacaccaagcccctgggcaccgacgacgacttctggggccccaccggccccgtggccaccgaggtggtggacaaggagaagaacctgtacagagtgcacttccccgtggccggcagctacagatggcccaacaccggcctgtgcttcgtgatgagagaggccgtgaccgtggagatcgagttctgcgtgtgggaccagttcctgggcgagatcaacccccagcacagctggatggtggccggccccctgctggacatcaaggccgagcccggcgccgtggaggccgtgcacctgccccacttcgtggccctgcagggcggccacgtggacaccagcctgttccagatggcccacttcaaggaggagggcatgctgctggagaagcccgccagagtggagctgcaccacatcgtgctggagaaccccagcttcagccccctgggcgtgctgctgaagatgatccacaacgccctgagattcatccccgtgaccagcgtggtgctgctgtaccacagagtgcaccccgaggaggtgaccttccacctgtacctgatccccagcgactgcagcatcagaaaggagctggagctgtgctacagaagccccggcgaggaccagctgttcagcgagttctacgtgggccacctgggcagcggcatcagactgcaggtgaaggacaagaaggacgagaccctggtgtgggaggccctggtgaagcccggcgacctgatgcccgccaccaccctgatcccccccgccagaatcgccgtgcccagccccctggacgccccccagctgctgcacttcgtggaccagtacagagagcagctgatcgccagagtgaccagcgtggaggtggtgctggacaagctgcacggccaggtgctgagccaggagcagtacgagagagtgctggccgagaacaccagacccagccagatgagaaagctgttcagcctgagccagagctgggacagaaagtgcaaggacggcctgtaccaggccctgaaggagacccacccccacctgatcatggagctgtgggagaagggcagcaagaagggcctgctgcccctgagcagctag

SEQ ID NO: 226564 - DNA, 4200 bp, Artificial Sequence
  derived and/or modified sequence
atggcgggaggcgcatggggccgtttggcttgctacctcgaattcctgaaaaaagaagagctgaaagaattccagttgctgttagccaataaagcccacagccgatcctcttcaggcgagacacccgctcagccggaaaaaacgagcggcatggaggtggccagctatttggtggcgcagtatggcgaacagcgggcatgggatctggcactacatacctgggagcagatgggcctccgctcactttgcgcccaggcccaggaaggggctgggcacagcccctcttttccctattccccgagtgaacctcacctcgggtcacctagccagccaactagcacagctgtattgatgccatggatacatgaactgcccgcaggttgcactcaggggtccgagcgccgggtgcttagacagctgcctgacaccagcggacggagatggcgggagatttctgcgagcctcttatatcaggccttaccctcttccccagatcatgagtcaccttctcaagagagcccgaacgcacccacaagtaccgccgtcctaggctcttggggttccccacctcagccctctttagcccccagagagcaagaagctccaggcacacagtggcccctggatgagacctctggcatttattacacagagatcagagagcgagaacgggaaaaatcggaaaaaggccgccctccatgggccgctgtggttggcaccccccctcaggcccacacctctttgcagccccatcatcacccttgggagccttccgtcagggagtcgctctgctctacctggccatggaagaacgaggattttaatcagaagtttacccaattgcttctcctacagcggccacatcctcgtagtcaggatccattagtgaaaaggtcctggcccgactacgtggaggaaaatcgtggacacctaatcgaaatccgcgatctgttcgggcctggtctggatactcaagagcctcggatcgttatccttcagggagcagctggcatcggaaaatcaacgctagccaggcaggtaaaagaagcctggggacgagggcagttatacggggacagatttcagcatgttttttatttctcctgcagagagctggcccagtcgaaggtcgtttccctggccgaactcattggaaaagatgggacagcgacaccagcccctatccgacagattctgtccagacccgaaagactgctatttattctggatggagtggatgagccgggatgggtgctccaggagccatcttccgagctctgcttgcactggtctcagccccagccggcagacgcactccttggcagccttcttggtaagaccatcctgcccgaggcctcattcctcatcacagctcgtactacagcacttcagaacctcattccatctctagagcaggctcggtgggtggaggtgttggggttcagcgagagctccagaaaggaatacttctatcgctacttcacagacgaacgccaggccattcgcgcattcaggcttgttaaatcgaacaaagagctgtgggccctgtgcctggtgccatgggtctcctggcttgcatgcacgtgtctcatgcagcagatgaaaagaaaagaaaagcttacacttacctcgaaaaccacgacaaccctctgcctgcactatctcgcccaggccctccaagcccagcctctaggcccccagcttagagacttgtgctcattagcagccgaggggatctggcagaaaaagacgctctttagccccgacgatctgcgaaaacatggccttgacggcgccataattagcacctttttgaaaatggggatactccaagaacacccaattcccctgagttacagcttcatccacctttgtttccaggaattcttcgccgctatgtcttacgtcctggaggacgaaaagggacgtggtaagcatagcaattgtatcattgacctggagaaaacattggaggcctacggtattcacggtctcttcggcgcttcaaccactcgttttcttctcggcttgctttccgacgagggagagagggagatggaaaacatctttcactgtaggctgagtcagggacgcaacctgatgcaatgggttccttccttacagctgctgttgcaaccacacagcctagagagcctccactgtttgtacgagacacggaacaaaaccttcctgacccaagttatggctcactttgaggagatgggcatgtgcgtggagaccgatatggagcttctcgtatgcacattttgtataaagttcagtcggcatgtcaaaaagctccagcttatcgagggaagacagcaccggtcgacgtggagtccaacaatggtggtcctgttccgatgggtgcctgtcactgacgcctactggcaaattttattttccgtgctgaaagttacccgcaacctcaaggaactggatctcagcggcaatagtttgtcacacagcgcagtgaaatccctgtgtaaaaccctgcggcgcccccgatgtctgctggaaacccttcggcttgctggctgcggactgacagccgaggactgtaaggatctggcgttcgggctgagggcaaaccaaacgctcaccgaactcgacctcagttttaatgtgttgacagacgccggagccaagcacctgtgccagcgactaaggcaaccttcatgtaagctgcagcggttgcagctggtcagttgtgggctgacgtctgactgttgtcaggatctcgccagtgttctgagcgcgagcccctcactgaaggaactggatcttcagcagaataacctcgacgacgtcggggtgcgtctgttgtgcgaagggctgcgtcatccagcttgcaagttgattcgattggggaagcccagcgtgatgacccctacggaaggcctcgacacaggagagatgtccaattctacttcatctttgaaacgccagcgattgggctctgaacgggcagcaagtcatgttgcccaggccaacttgaagttgcttgacgtctctaaaatattccccatagcagagattgcagaggaatcttctcccgaagtggttcccgtggagttactgtgtgttccctcacccgcttcccaaggcgatctccataccaaacccttaggcaccgacgatgacttttggggtcctaccgggccggtggccaccgaggtggtggacaaagagaagaatctctatcgggttcattttcctgttgcaggatcctatcgatggccgaataccggactgtgctttgtgatgcgcgaggccgtgacggtcgaaatagaattttgcgtgtgggaccagttcctaggggagatcaatccccagcattcgtggatggtggccggtcccctcttagatattaaagccgagcctggcgccgtcgaagccgtacacctcccacattttgtggcactacagggtggccatgtggacactagcctttttcagatggcacacttcaaagaagaagggatgctccttgagaaaccggcaagagtggaactgcaccacatagtgctggaaaacccctccttttctcccctgggagtcctgcttaagatgattcataatgcccttcggttcattcctgtaaccagcgtcgtgttgctttaccatcgcgtccatcctgaggaggttacctttcacctctaccttattccttccgattgttccattcggaaagaacttgagctttgctaccgaagccctggcgaggaccagctgttttccgagttttacgtgggtcatttgggctctggtattaggctccaagtgaaggataaaaaagatgaaactctggtgtgggaggcactcgtgaaaccgggcgacctcatgccagcaaccacactgatcccgcccgcacggatcgccgttccctctcctctggacgccccacaactgctgcactttgtggaccagtatagagaacagctgatcgcccgcgtgacctctgtagaggttgtcctcgataaacttcacggacaggttctcagccaggagcagtatgagagggttcttgccgaaaataccagaccctcgcagatgagaaaactctttagcttgtctcaatcctgggaccgtaagtgcaaggatgggctctaccaagctttaaaggagacccatcctcatctgattatggagctgtgggagaaggggtccaaaaagggccttctgcctctgtcctcctag

SEQ ID NO: 226565 - DNA, 4200 bp, Artificial Sequence
  derived and/or modified sequence
atggccggcggggcctggggccgcctggcctgctacctggagttcctgaagaaggaggagctgaaggagttccagctgctgctggccaacaaggcccacagccgcagcagcagcggggagaccccagcccagcctgagaagaccagcggcatggaggtggccagctacctggtggcccagtatggagagcagagggcctgggacctggccctgcacacctgggagcagatgggcctgcggagcctgtgtgcccaggcccaggagggcgccggccacagccccagcttcccctacagccccagcgagccccacctgggcagccccagccagcccaccagcacagctgtgctgatgccctggatccacgagctgcctgctggctgcacccagggcagcgagcggcgggtgctgcggcagctgcctgacaccagcggccgccgctggagggagatcagcgccagcctgctgtaccaggccctgcccagcagcccagaccacgagagccccagccaggagagccccaatgcccccaccagcacagctgtgctgggctcctggggcagccccccccagcccagcctggccccccgggagcaggaggcccctggcacccagtggcccctggatgagaccagcggcatctactacacagagatccgggagcgggagcgggagaagtctgagaagggccggcccccctgggccgctgtggtgggcaccccaccccaggcccacaccagcctgcagccccaccaccacccctgggagcccagcgtgcgggagagcctgtgcagcacctggccctggaagaatgaagacttcaaccagaagttcacccagctgctgctgctgcagaggccccaccccaggagccaggaccccctggtgaagaggtcctggccagactatgtggaggagaacagaggccacctgattgagatccgggacctgtttggacctggcctggacacccaggagcccagaattgtcatcctgcagggcgccgccggcatcggcaagagcaccctggcccggcaggtgaaggaggcctggggccggggccagctgtatggagaccgcttccagcacgtgttctacttcagctgccgggagctggcccagagcaaggtggtgtccctggccgagctgattggcaaggatggaacagccaccccagcccccatccggcagatcctgagcaggcctgagcggctgctcttcatcctggatggagtggatgagcccggctgggtgctgcaggagcccagcagcgagctgtgcctgcactggagccagccccagcctgcagatgccctgctgggcagcctgctgggcaagaccatcctgcctgaggccagcttcctgatcacagcccggaccacagccctgcagaacctgatccccagcctggagcaggcccgctgggtggaggtgctgggcttcagcgagagcagcaggaaggagtacttctaccgctacttcacagatgagcggcaggccatccgggccttccggctggtgaagagcaacaaggagctgtgggccctgtgcctggtgccctgggtgtcctggctggcctgcacctgcctgatgcagcagatgaagaggaaggagaagctgaccctgaccagcaagaccaccaccaccctgtgcctgcactacctggcccaggccctgcaggcccagcccctgggcccccagctgcgggacctgtgcagcctggccgctgagggcatctggcagaagaagaccctcttctccccagatgacctgaggaagcacggcctggatggagccatcatcagcaccttcctgaagatgggcatcctgcaggagcaccccatccccctgagctacagcttcatccacctgtgcttccaggagttctttgctgccatgtcctatgtgctggaggatgagaagggccggggcaagcacagcaactgcatcatcgacctggagaagaccctggaggcctacggcatccacggcctgtttggagccagcaccacccgcttcctgctgggcctgctgagtgatgaaggagagcgggagatggagaacatcttccactgccgcctgagccagggcaggaacctgatgcagtgggtgcccagcctgcagctgctgctgcagccccacagcctggagagcctgcactgcctgtatgagaccaggaacaagaccttcctgacccaggtgatggcccactttgaggagatgggcatgtgtgtggagacagacatggagctgctggtgtgcaccttctgcatcaagttcagcagacatgtgaagaagctgcagctgattgagggccggcagcacaggagcacctggagccccaccatggtggtgctcttccgctgggtgcctgtgacagatgcctactggcagatcctcttctctgtgctgaaggtgaccaggaacctgaaggagctggacctgagcggcaacagcctgagccacagcgctgtgaagagcctgtgcaagaccctgcggcggccccgctgcctgctggagaccctgcggctggccggctgcggcctgacagctgaggactgcaaggacctggccttcggcctgcgggccaaccagaccctgacagagctggacctgtccttcaacgtgctgacagatgctggggccaagcacctgtgccagaggctgcggcagcccagctgcaagctgcagaggctgcagctggtgtcctgtggcctgaccagtgactgctgccaggacctggcctctgtgctgagcgccagccccagcctgaaggagctggacctgcagcagaacaacctggatgatgtgggcgtgcggctgctgtgtgagggcctgcggcacccagcctgcaagctgatccggctgggcaagcccagcgtgatgacccccacagagggcctggacaccggggagatgagcaacagcaccagcagcctgaagaggcagaggctgggcagcgagcgggccgccagccacgtggcccaggccaacctgaagctgctggatgtgtccaagatcttccccatcgccgagattgctgaggagagcagccctgaggtggtgcctgtggagctgctgtgtgtgcccagccctgccagccagggcgacctgcacaccaagcccctgggcacagatgatgacttctggggccccactggacctgtggccacagaggtggtggacaaggagaagaacctgtacagagtgcacttccctgtggccggcagctaccgctggcccaacacaggcctgtgctttgtgatgagggaggccgtgacagtggagattgagttctgtgtgtgggaccagttcctgggggagatcaacccccagcacagctggatggtggccggccccctgctggacatcaaggccgagcccggggctgtggaggccgtgcacctgccccactttgtggccctgcagggcggccacgtggacaccagcctcttccagatggcccacttcaaggaggagggcatgctgctggagaagccagcccgggtggagctgcaccacatcgtgctggagaaccccagcttcagccccctgggcgtgctgctgaagatgatccacaatgccctgcgcttcatccctgtgacctctgtggtgctgctgtaccaccgggtgcaccctgaggaggtgaccttccacctgtacctgatccccagcgactgcagcatcaggaaggagctggagctgtgctaccgcagccctggagaggaccagctgttcagcgagttctacgtgggccacctgggcagcggcatccggctgcaggtgaaggacaagaaggatgagaccctggtgtgggaggccctggtgaagccaggggacctgatgcctgccaccaccctcatccccccagccagaattgctgtgcccagccccctggatgccccccagctgctgcactttgtggaccagtaccgggagcagctgattgcccgggtgacctctgtggaggtggtgctggacaagctgcacggccaggtgctgagccaggagcagtatgagcgggtgctggccgagaacacccggcccagccagatgaggaagctgttcagcctgagccagagctgggacaggaagtgcaaggatggcctgtaccaggccctgaaggagacccacccccacctgatcatggagctgtgggagaagggcagcaagaagggcctgctgcccctgagcagctag

SEQ ID NO: 226566 - DNA, 4200 bp, Artificial Sequence
  derived and/or modified sequence
atggccggcggcgcctggggccggctggcctgctacctggagttccttaagaaggaggaactgaaggagttccaactgctcctggctaataaagctcacagtagatctagcagtggagaaactcctgcacagcccgaaaaaaccagcggaatggaggtggctagctatctagttgcccagtatggtgagcaacgggcgtgggatttggcgctccatacctgggaacagatgggtctgcgatctctgtgcgcccaggcccaggagggtgcgggccattcaccttcctttccttatagcccttctgaaccccacttgggcagcccaagtcaaccaacgtccacggccgtattgatgccgtggatccacgaattgcctgcaggttgcacccagggatccgagagaagagtcctgaggcagctgcccgataccagcggccggcggtggcgcgaaatctcagcgagccttctgtatcaggccctgccctcaagccccgaccatgagtctccgtcacaagaatcacctaacgcccctacgtcaaccgccgtcctcggcagctggggtagcccccctcaaccaagcctggccccgcgagaacaagaggcccccggaacccaatggcctttagatgagacgagcggcatctactataccgagatccgggagagggaacgcgagaagagtgagaaaggcagaccaccctgggcagccgtcgtcgggactccacctcaagcccacacgtccttgcagccccaccaccacccttgggagccgagcgtgagagagagcctgtgttctacatggccctggaagaatgaggacttcaatcagaaatttacccagctcttactgcttcagaggccccatccccggtcccaagatccattggtgaaaagatcttggccagactacgtggaggaaaaccgcggccatctgattgaaattagagacctgttcggaccgggtttggatacacaggagccacggattgtgatactgcagggggccgctggaataggcaaaagcacccttgcgagacaggttaaggaggcctgggggaggggacagttgtatggagacagatttcaacacgtattctacttctcttgtagggagctggcccagtcaaaggtggtttcacttgccgagctcatcggcaaagacggcacagctactcccgctcccataagacagattctgagcagaccagaacgcctgttgtttatcctcgatggcgtggatgaacccggctgggtgctgcaggagccaagctccgagctctgtcttcactggtcacagccccagccagccgatgcactgcttggatctctgttgggcaagaccatccttcctgaggcctcttttctgatcaccgccaggactactgccctccagaatctcattccatctctcgagcaggctcgctgggtggaggtcctcggattttccgaatccagtcgaaaggagtatttttatcggtatttcacggatgaacgtcaagcaatcagagctttccgactcgtgaagtccaacaaggaactatgggctctgtgtctggtgccatgggtgtcctggctggcttgcacgtgcctgatgcaacaaatgaaaagaaaagaaaagctcacactgacgagcaagaccactacaactctgtgcctccattacctggcccaggccctacaagcccagcctttggggccgcaactcagggatttgtgttctctggcggctgagggaatctggcaaaagaagactctcttcagcccggatgatctaaggaaacacggactggacggcgcgatcattagcacattcctcaaaatgggcatactgcaggagcaccctatacccctctcctatagcttcattcacctctgcttccaggaatttttcgcagctatgagctatgttctggaggacgaaaaaggtagaggaaagcactcaaattgtatcatcgaccttgaaaagacgttggaggcatacgggattcatggtctgttcggtgcaagcacaacccgatttctgctcggtcttctatctgacgaaggcgagcgtgaaatggagaacattttccattgccggctgtctcaggggcgaaacctgatgcagtgggtgccaagccttcagctgttgctgcagccgcactctctggagtcgctccactgtctctatgaaactagaaacaagacctttttgactcaggtcatggcccactttgaggagatgggaatgtgtgtcgaaacagatatggagctgcttgtgtgtaccttctgtatcaagtttagcagacacgttaagaagcttcagctcatcgagggtagacagcatagaagtacttggtccccaacaatggtcgtgctgtttcgttgggtgcctgtcacagacgcttactggcagattctttttagtgtcttaaaagtgaccaggaacctcaaagaacttgacctgtcaggtaacagccttagccattctgcagtcaaatcactgtgtaaaactctgcgccggccccgatgtctccttgagaccttaaggttggctggatgtggcttgacagcagaggactgcaaggatctggcgtttggactgagggccaaccagaccctcactgaactggatctatcttttaacgtcttaacagacgcgggcgccaaacatctgtgccagcgactcaggcagccaagctgtaaactgcagcggctacaattggtaagttgtggcttaacctctgattgttgccaagacctggcttcggtcctctctgcatctcctagtctgaaagaactggacttgcagcaaaacaacctggacgacgtaggtgtccggctgttgtgcgagggactgaggcatccggcatgtaagctcattcgactaggcaaaccaagtgtcatgacccctactgagggcctggataccggagagatgagcaacagcactagttctttgaagagacaacgtttgggatctgagagggccgcgtctcacgtggcccaggcaaacttaaaacttctcgatgtcagcaaaattttcccaatcgctgaaattgcagaagaatcatccccagaggttgtaccagtcgagttgttgtgtgttccatcccctgcctctcagggggatctgcacaccaaacccctcgggaccgacgatgacttctgggggcccacaggccccgtggctactgaggtggttgacaaagagaaaaacctgtaccgggtgcacttcccagtcgctggttcctataggtggcctaacacaggtctgtgctttgtcatgagagaggctgtcactgtggagatcgagttctgtgtgtgggatcagttcttgggggaaatcaacccacagcacagttggatggtggccggccccttgctggatattaaggctgagccgggagccgtagaagccgtgcacttacctcatttcgtcgcgctccaggggggccacgtggatacaagtttgtttcagatggcacatttcaaagaggaaggaatgctgttggaaaagcccgctcgcgtggaacttcaccatatcgtgctggagaacccatcctttagccccctgggcgtcctcttgaaaatgatccataatgcactgcgatttattcccgtgacctctgtcgtcctgctttatcatcgtgttcatccggaagaagtaaccttccacctgtacctgattccctccgattgcagtataagaaaggagttagaactctgctatagaagcccaggggaagaccaactattttccgaattctatgtggggcatctcgggagcgggatcagactgcaagttaaggacaagaaggacgagactctggtgtgggaagctctggttaaaccaggcgatctcatgcccgcaaccacacttatccccccggccagaatcgctgttccaagccccctggatgccccccagttactacactttgtagaccaatatcgtgagcagctcatcgctcgagtgacgtcggtggaggtggtgcttgacaaacttcacggccaggtattatctcaggagcagtatgagagggtcctggccgagaatacgcgaccctctcaaatgagaaaactcttttcactgagccagtcctgggataggaagtgcaaagatggcctataccaagccctgaaggagacccacccccatcttatcatggaactgtgggagaaagggagcaagaaggggctactcccactctctagttag

SEQ ID NO: 226567 - DNA, 4200 bp, Artificial Sequence
  derived and/or modified sequence
atggccggtggtgcctggggcagactggcctgctacttagagtttcttaagaaggaggagctcaaggagttccaactcctgctggccaataaagcccattccaggtcctctagtggggaaacccctgcccaacctgaaaagaccagcggtatggaagtggcctcatatctggtcgcccagtatggggagcagagagcatgggatctggccctgcacacatgggagcaaatgggcctgaggtccctgtgtgcccaggcccaggaaggcgcaggacatagccctagtttcccctatagcccctccgaacctcacctgggctcaccttcacagccaacaagcacggccgtgcttatgccatggatccacgaacttcccgcagggtgcactcaaggcagcgaacggagagtgctgcggcagctgcctgatacaagtggcaggcggtggcgagaaatttccgcatccctgctctatcaagcgctgcctagttctccagaccacgaatcaccctcccaggagtcccctaatgcacccaccagtaccgccgtcctgggttcctggggtagtcctccacagccctcccttgctcctagagagcaagaggccccaggaacccagtggcctctcgatgagacatcaggtatttactacaccgagattcgtgaacgagagcgtgaaaagtcagaaaaaggcaggcccccttgggccgctgtcgtcggcacacctccgcaagcacacacctctctccagcctcaccaccatccatgggagccgagcgtgcgggagagcctctgttcaacctggccatggaaaaacgaggactttaaccagaagtttacacagttactcctactgcagcgcccacatccacgctcgcaggatcctctggtaaagcggagttggccagactacgtagaagagaaccgaggccacctgattgaaattcgcgacctgtttggccctgggctagatacccaggagccaaggatcgtgattcttcagggggcagcaggcattgggaagtccaccctggctcggcaagtgaaggaggcttgggggcgaggccagctgtatggcgatcggtttcagcacgtcttctactttagttgcagagagcttgcccaaagcaaggtagtaagcttggctgagcttattggaaaagatgggacagctacaccggcacccattcgccagatcttgtcccgacctgagagactcctgttcattctcgacggtgtcgacgagcccggatgggttctccaagagccctcctcagaactgtgcctgcactggagtcagccccagcccgctgatgcactgctcggaagcctgctggggaaaaccatcctgcccgaagcatccttcctgattacagcaagaacaacggcccttcagaatctgatcccaagtttggagcaagccagatgggtcgaggtgctggggttttcggaatcctcacgaaaagaatacttctacagatactttacagacgagcgtcaggcaatcagggctttccggttggtgaaatccaataaggagttgtgggcgctatgtcttgtgccttgggttagctggttggcatgcacctgtcttatgcagcagatgaaaagaaaggagaagctaacactgacttctaagacaacaacgacgctctgtctgcattatttggcacaagcactgcaagcacagccacttggccctcagctgagagacctttgttccttagccgcagagggcatttggcagaagaaaacactctttagccccgatgacctcagaaaacatggcctcgacggcgctattatttcaactttcctgaagatggggatactgcaggaacaccctatccccctgtcatactccttcattcacttatgtttccaggaattcttcgcggcaatgtcatatgtcctcgaagatgagaaagggagaggcaagcattcaaactgcatcattgacctggagaagactctcgaagcttacgggattcatggactttttggagcttcaaccacccgtttccttctgggcttgctatccgacgagggggagagggaaatggagaatatcttccactgccggctctctcagggaaggaacctgatgcagtgggtgccatcattacagctgctccttcagccgcactccctcgagtccctacattgcctctacgaaacacgtaacaagacattcctaactcaggttatggcccacttcgaggagatgggaatgtgcgtggaaactgacatggaactgttggtgtgcactttttgcattaaattttctagacatgtgaagaaactgcagctcatcgaaggcagacagcatcgatcaacatggtcccccacaatggtggtattatttcgatgggtgcccgttacagacgcgtactggcagattttgttttccgtactgaaggtgacacggaacctcaaagagctggacctgtctggcaatagcctatcccatagcgcggttaagagcttgtgtaaaacactgcgacgaccaaggtgtcttctggaaacgctgagactggcaggctgtggactgacggccgaagattgcaaggacctggcgtttggtctgagggccaaccaaactttgacagaactggatctgtcgttcaacgttttgacagacgctggcgctaagcatctgtgtcagcgccttaggcagccatcctgcaaactgcaaaggctgcagctagtgagctgcggactgacgagcgactgctgccaggatttggcaagcgtgctgagcgcatctccctcgctgaaggagctagatctgcagcagaataacttggacgacgtgggtgtgcggctactctgtgaaggtctacgccaccccgcatgcaagctgattcgactggggaaaccgtccgtgatgacgccaaccgaagggcttgacactggagagatgagcaacagcacaagctcgcttaagcgacagagactgggatctgaaagggctgcctcccatgttgcccaggctaatctaaagctgctggacgtttccaagatttttcctattgcggagatcgccgaggagagtagccccgaggttgtccctgtggaactactgtgcgtcccatcaccagccagccagggggacctccacaccaagccactcgggacggacgacgatttctgggggccaacagggcctgtcgcaacagaggtcgtagataaagagaagaacctttacagggttcacttcccagtggcgggatcataccgctggcctaacactgggctgtgcttcgtgatgagggaggctgtcaccgtcgaaatcgagttttgtgtgtgggaccagttcctgggggagatcaatcctcaacatagttggatggtggctggccctttgctggatatcaaagcagaacccggtgctgtggaagctgtgcacctgcctcacttcgtggcactccaaggagggcacgtcgacacctccctgttccagatggcacattttaaggaggagggcatgttattagagaaacctgccagggtagaactgcaccacattgtcctggaaaatccttcttttagtccactaggcgtgttactgaaaatgattcataacgcactgcgattcatccccgtaacgtccgtggtcttgctttaccaccgagtccatccagaggaagtaacattccacctctacctgataccttccgattgctcaatccgaaaagagctggaactctgctataggtcacccggagaggaccagttattcagtgagttctacgtcggacatctgggttccggtatcaggctgcaggtaaaagataagaaggatgaaaccctcgtgtgggaggccctagtaaagcctggcgacctgatgcctgccacaaccttaatccccccagccaggatcgcagtaccctcacccctggacgctcctcagctgcttcacttcgtggatcagtaccgagaacagttaatcgctcgcgtaaccagtgtggaggtagtgctggacaaattgcatggccaggtcctgtcgcaggagcagtacgaacgcgtgctggccgaaaatacacggccaagccagatgcgcaaactgttttctttgtcccaaagctgggacaggaaatgtaaggacggtctgtaccaggccctcaaggaaacgcaccctcacctgattatggagttatgggagaaaggcagcaagaagggcctgctgcccctgtcttcatag

SEQ ID NO: 226568 - DNA, 4200 bp, Artificial Sequence
  derived and/or modified sequence
atggctggcggagcctggggccgcctggcctgttacttggagttcctgaagaaggaggagctgaaggagttccagcttctgctcgccaataaagcgcactccaggagctcttcgggtgagacacccgctcagccagagaagacgagtggcatggaggtggcctcgtacctggtggctcagtatggggagcagcgggcctgggacctagccctccatacctgggagcagatggggctgaggtcactgtgcgcccaagcccaggaaggggcaggccactctccctcattcccctacagcccaagtgaaccccacctggggtctcccagccaacccacctccaccgcagtgctaatgccctggatccatgaattgccggcggggtgcacccagggctcagagagaagggttttgagacagctgcctgacacatctggacgccgctggagagaaatctctgcctcactcctctaccaagctcttccaagctccccagaccatgagtctccaagccaggagtcacccaacgcccccacatccacagcagtgctggggagctggggatccccacctcagcccagcctagcacccagagagcaggaggctcctgggacccaatggcctctggatgaaacgtcaggaatttactacacagaaatcagagaaagagagagagagaaatcagagaaaggcaggcccccatgggcagcggtggtaggaacgcccccacaggcgcacaccagcctacagccccaccaccacccatgggagccttctgtgagagagagcctctgttccacatggccctggaaaaatgaggattttaaccaaaaattcacacagctgctacttctacaaagacctcaccccagaagccaagatcccctggtcaagagaagctggcctgattatgtggaggagaatcgaggacatttaattgagatcagagacttatttggcccaggcctggatacccaagaacctcgcatagtcatactgcagggggctgctggaattgggaagtcaacactggccaggcaggtgaaggaagcctgggggagaggccagctgtatggggaccgcttccagcatgtcttctacttcagctgcagagagctggcccagtccaaggtggtgagtctcgctgagctcatcggaaaagatgggacagccactccggctcccattagacagatcctgtctaggccagagcggctgctcttcatcctcgatggtgtagatgagccaggatgggtcttgcaggagccgagttctgagctctgtctgcactggagccagccacagccggcggatgcactgctgggcagtttgctggggaaaactatacttcccgaggcatccttcctgatcacggctcggaccacagctctgcagaacctcattccttctttggagcaggcacgttgggtagaggtcctggggttctctgagtccagcaggaaggaatatttctacagatatttcacagatgaaaggcaagcaattagagcctttaggttggtcaaatcaaacaaagagctctgggccctgtgtcttgtgccctgggtgtcctggctggcctgcacttgcctgatgcagcagatgaagcggaaggaaaaactcacactgacttccaagaccaccacaaccctctgtctacattaccttgcccaggctctccaagctcagccattgggaccccagctcagagacctctgctctctggctgctgagggcatctggcaaaaaaagacccttttcagtccagatgacctcaggaagcatgggttagatggggccatcatctccaccttcttgaagatgggtattcttcaagagcaccccatccctctgagctacagcttcattcacctctgtttccaagagttctttgcagcaatgtcctatgtcttggaggatgagaaggggagaggtaaacattctaattgcatcatagatttggaaaagacgctagaagcatatggaatacatggcctgtttggggcatcaaccacacgtttcctattgggcctgttaagtgatgagggggagagagagatggagaacatctttcactgccggctgtctcaggggaggaacctgatgcagtgggtcccgtccctgcagctgctgctgcagccacactctctggagtccctccactgcttgtacgagactcggaacaaaacgttcctgacacaagtgatggcccatttcgaagaaatgggcatgtgtgtagaaacagacatggagctcttagtgtgcactttctgcattaaattcagccgccacgtgaagaagcttcagctgattgagggcaggcagcacagatcaacatggagccccaccatggtagtcctgttcaggtgggtcccagtcacagatgcctattggcagattctcttctccgtcctcaaggtcaccagaaacctgaaggagctggacctaagtggaaactcgctgagccactctgcagtgaagagtctttgtaagaccctgagacgccctcgctgcctcctggagaccctgcggttggctggctgtggcctcacagctgaggactgcaaggaccttgcctttgggctgagagccaaccagaccctgaccgagctggacctgagcttcaatgtgctcacggatgctggagccaaacacctttgccagagactgagacagccgagctgcaagctacagcgactgcagctggtcagctgtggcctcacgtctgactgctgccaggacctggcctctgtgcttagtgccagccccagcctgaaggagctagacctgcagcagaacaacctggatgacgttggcgtgcgactgctctgtgaggggctcaggcatcctgcctgcaaactcatacgcctggggaaaccaagtgtgatgacccctactgagggcctggatacgggagagatgagtaatagcacatcctcactcaagcggcagagactcggatcagagagggcggcttcccatgttgctcaggctaatctcaaactcctggacgtgagcaagatcttcccaattgctgagattgcagaggaaagctccccagaggtagtaccggtggaactcttgtgcgtgccttctcctgcctctcaaggggacctgcatacgaagcctttggggactgacgatgacttctggggccccacggggcctgtggctactgaggtagttgacaaagaaaagaacttgtaccgagttcacttccctgtagctggctcctaccgctggcccaacacgggtctctgctttgtgatgagagaagcggtgaccgttgagattgaattctgtgtgtgggaccagttcctgggtgagatcaacccacagcacagctggatggtggcagggcctctgctggacatcaaggctgagcctggagctgtggaagctgtgcacctccctcactttgtggctctccaagggggccatgtggacacatccctgttccaaatggcccactttaaagaggaggggatgctcctggagaagccagccagggtggagctgcatcacatagttctggaaaaccccagcttctcccccttgggagtcctcctgaaaatgatccataatgccctgcgcttcattcccgtcacctctgtggtgttgctttaccaccgcgtccatcctgaggaagtcaccttccacctctacctgatcccaagtgactgctccattcggaaggaactggagctctgctatcgaagccctggagaagaccagctgttctcggagttctacgttggccacttgggatcagggatcaggctgcaagtgaaagacaagaaagatgagactctggtgtgggaggccttggtgaaaccaggagatctcatgcctgcaactactctgatccctccagcccgcatagccgtaccttcacctctggatgccccgcagttgctgcactttgtggaccagtatcgagagcagctgatagcccgagtgacatcggtggaggttgtcttggacaaactgcatggacaggtgctgagccaggagcagtacgagagggtgctggctgagaacacgaggcccagccagatgcggaagctgttcagcttgagccagtcctgggaccggaagtgcaaagatggactctaccaagccctgaaggagacccatcctcacctcattatggaactctgggagaagggcagcaaaaagggactcctgccactcagcagctga

SEQ ID NO: 226569 - protein, 516 aa, Artificial Sequence
  derived and/or modified sequence
MDAMKRGLCCVLLLCGAVFVSPSQEIHARFRRGARSYQGCSEPRCFNGGTCQQALYFSDFVCQCPEGFAGKCCEIDTRATCYEDQGISYRGTWSTAESGAECTNWNSSALAQKPYSGRRPDAIRLGLGNHNYCRNPDRDSKPWCYVFKAGKYSSEFCSTPACSEGNSDCYFGNGSAYRGTHSLTESGASCLPWNSMILIGKVYTAQNPSAQALGLGKHNYCRNPDGDAKPWCHVLKNRRLTWEYCDVPSCSTCGLRQYSQPQFRIKGGLFADIASHPWQAAIFAKHRRSPGERFLCGGILISSCWILSAAHCFQERFPPHHLTVILGRTYRVVPGEEEQKFEVEKYIVHKEFDDDTYDNDIALLQLKSDSSRCAQESSVVRTVCLPPADLQLPDWTECELSGYGKHEALSPFYSERLKEAHVRLYPSSRCTSQHLLNRTVTDNMLCAGDTRSGGPQANLHDACQGDSGGPLVCLNDGRMTLVGIISWGLGCGQKDVPGVYTKVTNYLDWIRDNMRP

SEQ ID NO: 226570 - protein, 473 aa, Artificial Sequence
  derived and/or modified sequence
MDAMKRGLCCVLLLCGAVFVSPSQEIHARFRRGARSYQVICRDEKTQMIYQQHQSWLRPVLRSNRVEYCWCNSGRAQCHSVPVKSCSEPRCFNGGTCQQALYFSDFVCQCPEGFAGKCCEIGNSDCYFGNGSAYRGTHSLTESGASCLPWNSMILIGKVYTAQNPSAQALGLGKHNYCRNPDGDAKPWCHVLKNRRLTWEYCDVPSCSTCGLRQYSQPQFRIKGGLFADIASHPWQAAIFAKHRRSPGERFLCGGILISSCWILSAAHCFQERFPPHHLTVILGRTYRVVPGEEEQKFEVEKYIVHKEFDDDTYDNDIALLQLKSDSSRCAQESSVVRTVCLPPADLQLPDWTECELSGYGKHEALSPFYSERLKEAHVRLYPSSRCTSQHLLNRTVTDNMLCAGDTRSGGPQANLHDACQGDSGGPLVCLNDGRMTLVGIISWGLGCGQKDVPGVYTKVTNYLDWIRDNMRP

SEQ ID NO: 226571 - DNA, 1548 bp, Artificial Sequence
  derived and/or modified sequence
atggacgccatgaagcgcggcctgtgctgcgtgctgctgctgtgcggcgccgtgttcgtgagccccagccaggagatccacgcccgcttccgccgcggcgcccgcagctaccagggctgcagcgagccccgctgcttcaacggcggcacctgccagcaggccctgtacttcagcgacttcgtgtgccagtgccccgagggcttcgccggcaagtgctgcgagatcgacacccgcgccacctgctacgaggaccagggcatcagctaccgcggcacctggagcaccgccgagagcggcgccgagtgcaccaactggaacagcagcgccctggcccagaagccctacagcggccgccgccccgacgccatccgcctgggcctgggcaaccacaactactgccgcaaccccgaccgcgacagcaagccctggtgctacgtgttcaaggccggcaagtacagcagcgagttctgcagcacccccgcctgcagcgagggcaacagcgactgctacttcggcaacggcagcgcctaccgcggcacccacagcctgaccgagagcggcgccagctgcctgccctggaacagcatgatcctgatcggcaaggtgtacaccgcccagaaccccagcgcccaggccctgggcctgggcaagcacaactactgccgcaaccccgacggcgacgccaagccctggtgccacgtgctgaagaaccgccgcctgacctgggagtactgcgacgtgcccagctgcagcacctgcggcctgcgccagtacagccagccccagttccgcatcaagggcggcctgttcgccgacatcgccagccacccctggcaggccgccatcttcgccaagcaccgccgcagccccggcgagcgcttcctgtgcggcggcatcctgatcagcagctgctggatcctgagcgccgcccactgcttccaggagcgcttccccccccaccacctgaccgtgatcctgggccgcacctaccgcgtggtgcccggcgaggaggagcagaagttcgaggtggagaagtacatcgtgcacaaggagttcgacgacgacacctacgacaacgacatcgccctgctgcagctgaagagcgacagcagccgctgcgcccaggagagcagcgtggtgcgcaccgtgtgcctgccccccgccgacctgcagctgcccgactggaccgagtgcgagctgagcggctacggcaagcacgaggccctgagccccttctacagcgagcgcctgaaggaggcccacgtgcgcctgtaccccagcagccgctgcaccagccagcacctgctgaaccgcaccgtgaccgacaacatgctgtgcgccggcgacacccgcagcggcggcccccaggccaacctgcacgacgcctgccagggcgacagcggcggccccctggtgtgcctgaacgacggccgcatgaccctggtgggcatcatcagctggggcctgggctgcggccagaaggacgtgcccggcgtgtacaccaaggtgaccaactacctggactggatccgcgacaacatgcgcccc

SEQ ID NO: 226572 - DNA, 1308 bp, Artificial Sequence
  derived and/or modified sequence
atggacgccatgaagcgcggcctgtgctgcgtgctgctgctgtgcggcgccgtgttcgtgagccccagccaggagatccacgcccgcttccgccgcggcgcccgcagctaccaggtgatctgccgcgacgagaagacccagatgatctaccagcagcaccagagctggctgcgccccgtgctgcgcagcaaccgcgtggagtactgctggtgcaacagcggccgcgcccagtgccacagcgtgcccgtgaagcgcaacagcgactgctacttcggcaacggcagcgcctaccgcggcacccacagcctgaccgagagcggcgccagctgcctgccctggaacagcatgatcctgatcggcaaggtgtacaccgcccagaaccccagcgcccaggccctgggcctgggcaagcacaactactgccgcaaccccgacggcgacgccaagccctggtgccacgtgctgaagaaccgccgcctgacctgggagtactgcgacgtgcccagctgcagcacctgcggcctgcgccagtacagccagccccagttccgcatcaagggcggcctgttcgccgacatcgccagccacccctggcaggccgccatcttcgccaagcaccgccgcagccccggcgagcgcttcctgtgcggcggcatcctgatcagcagctgctggatcctgagcgccgcccactgcttccaggagcgcttccccccccaccacctgaccgtgatcctgggccgcacctaccgcgtggtgcccggcgaggaggagcagaagttcgaggtggagaagtacatcgtgcacaaggagttcgacgacgacacctacgacaacgacatcgccctgctgcagctgaagagcgacagcagccgctgcgcccaggagagcagcgtggtgcgcaccgtgtgcctgccccccgccgacctgcagctgcccgactggaccgagtgcgagctgagcggctacggcaagcacgaggccctgagccccttctacagcgagcgcctgaaggaggcccacgtgcgcctgtaccccagcagccgctgcaccagccagcacctgctgaaccgcaccgtgaccgacaacatgctgtgcgccggcgacacccgcagcggcggcccccaggccaacctgcacgacgcctgccagggcgacagcggcggccccctggtgtgcctgaacgacggccgcatgaccctggtgggcatcatcagctggggcctgggctgcggccagaaggacgtgcccggcgtgtacaccaaggtgaccaactacctggactggatccgcgacaacatgcgcccc

SEQ ID NO: 226573 - DNA, 1419 bp, Artificial Sequence
  derived and/or modified sequence
atggacgccatgaagcgcggcctgtgctgcgtgctgctgctgtgcggcgccgtgttcgtgagccccagccaggagatccacgcccgcttccgccgcggcgcccgcagctaccaggtgatctgccgcgacgagaagacccagatgatctaccagcagcaccagagctggctgcgccccgtgctgcgcagcaaccgcgtggagtactgctggtgcaacagcggccgcgcccagtgccacagcgtgcccgtgaagagctgcagcgagccccgctgcttcaacggcggcacctgccagcaggccctgtacttcagcgacttcgtgtgccagtgccccgagggcttcgccggcaagtgctgcgagatcggcaacagcgactgctacttcggcaacggcagcgcctaccgcggcacccacagcctgaccgagagcggcgccagctgcctgccctggaacagcatgatcctgatcggcaaggtgtacaccgcccagaaccccagcgcccaggccctgggcctgggcaagcacaactactgccgcaaccccgacggcgacgccaagccctggtgccacgtgctgaagaaccgccgcctgacctgggagtactgcgacgtgcccagctgcagcacctgcggcctgcgccagtacagccagccccagttccgcatcaagggcggcctgttcgccgacatcgccagccacccctggcaggccgccatcttcgccaagcaccgccgcagccccggcgagcgcttcctgtgcggcggcatcctgatcagcagctgctggatcctgagcgccgcccactgcttccaggagcgcttccccccccaccacctgaccgtgatcctgggccgcacctaccgcgtggtgcccggcgaggaggagcagaagttcgaggtggagaagtacatcgtgcacaaggagttcgacgacgacacctacgacaacgacatcgccctgctgcagctgaagagcgacagcagccgctgcgcccaggagagcagcgtggtgcgcaccgtgtgcctgccccccgccgacctgcagctgcccgactggaccgagtgcgagctgagcggctacggcaagcacgaggccctgagccccttctacagcgagcgcctgaaggaggcccacgtgcgcctgtaccccagcagccgctgcaccagccagcacctgctgaaccgcaccgtgaccgacaacatgctgtgcgccggcgacacccgcagcggcggcccccaggccaacctgcacgacgcctgccagggcgacagcggcggccccctggtgtgcctgaacgacggccgcatgaccctggtgggcatcatcagctggggcctgggctgcggccagaaggacgtgcccggcgtgtacaccaaggtgaccaactacctggactggatccgcgacaacatgcgcccc

SEQ ID NO: 226574 - DNA, 1551 bp, Artificial Sequence
  derived and/or modified sequence
atggacgccatgaagagaggcctgtgctgcgtgctgctgctgtgcggcgccgtgttcgtgagccccagccaggagatccacgccagattcagaagaggcgccagaagctaccagggctgcagcgagcccagatgcttcaacggcggcacctgccagcaggccctgtacttcagcgacttcgtgtgccagtgccccgagggcttcgccggcaagtgctgcgagatcgacaccagagccacctgctacgaggaccagggcatcagctacagaggcacctggagcaccgccgagagcggcgccgagtgcaccaactggaacagcagcgccctggcccagaagccctacagcggcagaagacccgacgccatcagactgggcctgggcaaccacaactactgcagaaaccccgacagagacagcaagccctggtgctacgtgttcaaggccggcaagtacagcagcgagttctgcagcacccccgcctgcagcgagggcaacagcgactgctacttcggcaacggcagcgcctacagaggcacccacagcctgaccgagagcggcgccagctgcctgccctggaacagcatgatcctgatcggcaaggtgtacaccgcccagaaccccagcgcccaggccctgggcctgggcaagcacaactactgcagaaaccccgacggcgacgccaagccctggtgccacgtgctgaagaacagaagactgacctgggagtactgcgacgtgcccagctgcagcacctgcggcctgagacagtacagccagccccagttcagaatcaagggcggcctgttcgccgacatcgccagccacccctggcaggccgccatcttcgccaagcacagaagaagccccggcgagagattcctgtgcggcggcatcctgatcagcagctgctggatcctgagcgccgcccactgcttccaggagagattccccccccaccacctgaccgtgatcctgggcagaacctacagagtggtgcccggcgaggaggagcagaagttcgaggtggagaagtacatcgtgcacaaggagttcgacgacgacacctacgacaacgacatcgccctgctgcagctgaagagcgacagcagcagatgcgcccaggagagcagcgtggtgagaaccgtgtgcctgccccccgccgacctgcagctgcccgactggaccgagtgcgagctgagcggctacggcaagcacgaggccctgagccccttctacagcgagagactgaaggaggcccacgtgagactgtaccccagcagcagatgcaccagccagcacctgctgaacagaaccgtgaccgacaacatgctgtgcgccggcgacaccagaagcggcggcccccaggccaacctgcacgacgcctgccagggcgacagcggcggccccctggtgtgcctgaacgacggcagaatgaccctggtgggcatcatcagctggggcctgggctgcggccagaaggacgtgcccggcgtgtacaccaaggtgaccaactacctggactggatcagagacaacatgagaccctag

SEQ ID NO: 226575 - DNA, 1311 bp, Artificial Sequence
  derived and/or modified sequence
atggacgccatgaagagaggcctgtgctgcgtgctgctgctgtgcggcgccgtgttcgtgagccccagccaggagatccacgccagattcagaagaggcgccagaagctaccaggtgatctgcagagacgagaagacccagatgatctaccagcagcaccagagctggctgagacccgtgctgagaagcaacagagtggagtactgctggtgcaacagcggcagagcccagtgccacagcgtgcccgtgaagagaaacagcgactgctacttcggcaacggcagcgcctacagaggcacccacagcctgaccgagagcggcgccagctgcctgccctggaacagcatgatcctgatcggcaaggtgtacaccgcccagaaccccagcgcccaggccctgggcctgggcaagcacaactactgcagaaaccccgacggcgacgccaagccctggtgccacgtgctgaagaacagaagactgacctgggagtactgcgacgtgcccagctgcagcacctgcggcctgagacagtacagccagccccagttcagaatcaagggcggcctgttcgccgacatcgccagccacccctggcaggccgccatcttcgccaagcacagaagaagccccggcgagagattcctgtgcggcggcatcctgatcagcagctgctggatcctgagcgccgcccactgcttccaggagagattccccccccaccacctgaccgtgatcctgggcagaacctacagagtggtgcccggcgaggaggagcagaagttcgaggtggagaagtacatcgtgcacaaggagttcgacgacgacacctacgacaacgacatcgccctgctgcagctgaagagcgacagcagcagatgcgcccaggagagcagcgtggtgagaaccgtgtgcctgccccccgccgacctgcagctgcccgactggaccgagtgcgagctgagcggctacggcaagcacgaggccctgagccccttctacagcgagagactgaaggaggcccacgtgagactgtaccccagcagcagatgcaccagccagcacctgctgaacagaaccgtgaccgacaacatgctgtgcgccggcgacaccagaagcggcggcccccaggccaacctgcacgacgcctgccagggcgacagcggcggccccctggtgtgcctgaacgacggcagaatgaccctggtgggcatcatcagctggggcctgggctgcggccagaaggacgtgcccggcgtgtacaccaaggtgaccaactacctggactggatcagagacaacatgagaccctag

SEQ ID NO: 226576 - DNA, 1422 bp, Artificial Sequence
  derived and/or modified sequence
atggacgccatgaagagaggcctgtgctgcgtgctgctgctgtgcggcgccgtgttcgtgagccccagccaggagatccacgccagattcagaagaggcgccagaagctaccaggtgatctgcagagacgagaagacccagatgatctaccagcagcaccagagctggctgagacccgtgctgagaagcaacagagtggagtactgctggtgcaacagcggcagagcccagtgccacagcgtgcccgtgaagagctgcagcgagcccagatgcttcaacggcggcacctgccagcaggccctgtacttcagcgacttcgtgtgccagtgccccgagggcttcgccggcaagtgctgcgagatcggcaacagcgactgctacttcggcaacggcagcgcctacagaggcacccacagcctgaccgagagcggcgccagctgcctgccctggaacagcatgatcctgatcggcaaggtgtacaccgcccagaaccccagcgcccaggccctgggcctgggcaagcacaactactgcagaaaccccgacggcgacgccaagccctggtgccacgtgctgaagaacagaagactgacctgggagtactgcgacgtgcccagctgcagcacctgcggcctgagacagtacagccagccccagttcagaatcaagggcggcctgttcgccgacatcgccagccacccctggcaggccgccatcttcgccaagcacagaagaagccccggcgagagattcctgtgcggcggcatcctgatcagcagctgctggatcctgagcgccgcccactgcttccaggagagattccccccccaccacctgaccgtgatcctgggcagaacctacagagtggtgcccggcgaggaggagcagaagttcgaggtggagaagtacatcgtgcacaaggagttcgacgacgacacctacgacaacgacatcgccctgctgcagctgaagagcgacagcagcagatgcgcccaggagagcagcgtggtgagaaccgtgtgcctgccccccgccgacctgcagctgcccgactggaccgagtgcgagctgagcggctacggcaagcacgaggccctgagccccttctacagcgagagactgaaggaggcccacgtgagactgtaccccagcagcagatgcaccagccagcacctgctgaacagaaccgtgaccgacaacatgctgtgcgccggcgacaccagaagcggcggcccccaggccaacctgcacgacgcctgccagggcgacagcggcggccccctggtgtgcctgaacgacggcagaatgaccctggtgggcatcatcagctggggcctgggctgcggccagaaggacgtgcccggcgtgtacaccaaggtgaccaactacctggactggatcagagacaacatgagaccctag

SEQ ID NO: 226577 - DNA, 1551 bp, Artificial Sequence
  derived and/or modified sequence
atggacgccatgaagcggggcctgtgttgcgtattattgttatgtggtgccgtgtttgtgtctcccagtcaggagattcatgcccgctttcggcgaggagcaagatcctaccagggctgctctgagcctcgttgtttcaacggaggcacctgccagcaggccttatacttcagcgacttcgtgtgccagtgtccggagggctttgccgggaagtgttgtgagatcgacactcgcgccacgtgctacgaggaccagggaatctcatatagagggacatggagcacggcagagagcggcgccgagtgcacaaactggaactcttctgcactggcacagaagccctatagcggacgccgccccgacgccatcaggcttggccttggaaaccacaactactgccgtaatccagatagagattccaagccatggtgctatgtgttcaaagccggaaagtatagcagcgaattttgcagcacccctgcatgctcagaaggtaactctgattgttattttggaaacggctcagcctatagaggaacgcacagcttaacggagagcggggcctcatgcctgccctggaacagtatgattttgataggcaaagtgtacactgcacagaatccgtctgctcaggctctgggactgggtaagcataactattgccggaaccctgacggggacgcaaaaccatggtgtcacgtgctcaagaatcggagactcacatgggaatattgcgacgtccccagctgctctacctgcgggctccgccaatacagccagccccagtttcgcataaagggtggtctcttcgctgacattgcttctcacccctggcaagcagccatcttcgccaagcacagaagatctcctggggagagattcctttgtggcgggattctgatcagttcttgctggatcctgtctgccgcccactgcttccaggagagattccctccgcaccacttaaccgttatactaggcaggacctatcgcgtggttcccggagaggaggaacagaagttcgaagtggagaaatatatagtccataaagaattcgatgacgacacctacgacaatgatattgccctgttacagctgaagagcgactcctcccgctgcgcacaggaatcaagtgtagtaaggacagtgtgtcttccccccgcagatctacagcttccagattggactgagtgcgaactcagtggttacggcaagcacgaagccctgagtcccttctactccgagaggttgaaagaggctcatgtgcgcctgtatccctcatctaggtgcacctcgcaacatctcctaaaccgtaccgtgaccgacaacatgctgtgtgccggagatactaggtccggcggccctcaggctaacctccacgacgcatgccaaggggattccggcggcccgttggtgtgccttaatgacgggcgcatgactctggtcggcatcatatcttggggccttgggtgtggccagaaggacgtgccaggcgtctacactaaggtgaccaattacctcgattggattagggacaatatgcgaccatag

SEQ ID NO: 226578 - DNA, 1311 bp, Artificial Sequence
  derived and/or modified sequence
atggatgccatgaagaggggcctgtgttgcgtccttctcctctgcggcgccgtcttcgtgtccccatcccaagagatccacgcgagattccgtcgaggcgctcgctcgtaccaggtcatttgtcgggatgaaaaaacacagatgatctatcagcagcaccagagttggttacggcccgttctgcgctccaaccgcgtggaatactgctggtgcaatagcgggcgagctcagtgccactctgtccccgtgaaacggaatagcgactgctattttggaaacggctcagcctaccgcggaacgcatagtttaactgagtcaggtgcctcctgcctcccctggaattctatgatcctgatcggtaaggtgtacaccgctcagaatcctagcgcacaggcgcttggtctaggcaagcacaactattgtcggaaccctgatggcgacgctaagccttggtgtcatgtgttgaaaaaccgccggcttacttgggagtactgtgacgtgccatcttgcagcacgtgcggtctgcgtcagtattctcaaccacagttccgcataaaaggcggactgttcgctgacatcgccagtcacccatggcaggcagccatctttgcaaaacatagaagatctcctggagaacgattcctgtgcggcggcatcctgataagtagctgctggatccttagcgccgctcactgctttcaggagagattccccccacaccatcttacagtgattctggggcgaacataccgagtggttccaggcgaagaggagcagaagtttgaggttgaaaagtacattgtgcacaaggaatttgacgatgacacatacgacaacgatatagcgttgcttcagctcaaatctgactcaagccgatgcgcccaggaatcaagtgtggtcaggactgtctgcctcccccccgccgatctacagttacctgactggaccgagtgcgaactttccggttatggcaaacatgaggctctgtctccattctatagcgaacgcctgaaagaagcgcacgtcagactgtacccctccagtcgctgcaccagtcagcacctgctcaaccggacagtgactgataacatgctttgcgctggagatacacgcagcggaggcccccaggccaacctgcacgacgcttgtcagggagactctggggggccactcgtgtgtttgaatgacgggaggatgaccctggtgggcataatatcctggggcctggggtgtggtcagaaggacgtgcctggcgtgtataccaaagtgacgaactacctggattggatccgggataatatgcggccctag

SEQ ID NO: 226579 - DNA, 1422 bp, Artificial Sequence
  derived and/or modified sequence
atggacgctatgaaacgcggattgtgttgtgttctcctgctgtgtggcgcagttttcgtgagccctagccaggagatccacgcacggttcaggcggggtgccaggtcataccaagtcatatgtcgcgatgaaaaaacacagatgatttatcagcagcatcagagctggttgagaccagtcctccgatccaatagggtcgaatattgttggtgcaatagcggacgggcacagtgtcatagcgtgcccgtaaagtcatgttctgagccgaggtgctttaacgggggaacatgccagcaggctctttacttcagtgacttcgtttgccagtgccccgagggctttgccgggaagtgctgcgagatcggaaactcggactgttacttcggcaatgggtctgcttatagaggcacacactctctgacagaatcaggggctagctgcttgccatggaattctatgatattgatcggtaaggtctatacggcccagaatccctctgctcaggccttgggcctgggaaagcacaactactgtcggaaccccgacggtgatgcaaaaccatggtgccacgtcttaaagaatcggcgactaacctgggaatattgtgatgtcccctcttgtagtacttgcggcctgagacaatactcacagccccagtttaggattaaaggtggactcttcgccgacattgcatcacatccgtggcaggctgccatatttgcgaagcatagaaggagcccgggggagcgattcctctgcggtgggatactgattagctcttgctggattctgtctgccgcgcactgctttcaagagagatttcctcctcaccatctaacagtcatcctgggcaggacctatagggtcgtgccgggtgaggaggaacaaaagttcgaggtggaaaagtacatcgtgcacaaggagttcgacgacgatacctacgataatgacattgctttactgcaactgaagagcgactcttctaggtgtgctcaggagagcagcgtcgtccgcaccgtgtgtcttccacccgccgaccttcaactgcccgactggactgaatgcgaattgtctgggtatggcaaacacgaggccttatcacccttttattctgaacgcctgaaggaagctcatgttagactgtaccctagctcccgatgcacaagtcagcatctcctgaatcgtacagttactgacaatatgctgtgtgccggagacactcgaagcggaggacctcaggccaacttacacgacgcgtgtcagggagatagtgggggcccattggtgtgtctgaacgacggacggatgactcttgttggaattatcagttgggggctgggttgcgggcagaaagatgtcccgggtgtatacaccaaggtgaccaattatctggattggattcgggataacatgcgcccctag

SEQ ID NO: 226580 - DNA, 1551 bp, Artificial Sequence
  derived and/or modified sequence
atggatgccatgaagaggggcctgtgctgcgtgctgctgctgtgtggggctgtgtttgtgagccccagccaggagatccacgcccgcttcagaagaggagcccggagctaccagggctgcagcgagccccgctgcttcaatggaggcacctgccagcaggccctgtacttcagtgactttgtgtgccagtgcccagagggctttgctgggaagtgctgtgaaattgacacccgggccacctgctatgaggaccagggcatctcctaccggggcacctggagcacagctgagagcggggctgaatgtaccaactggaacagcagcgccctggcccagaagccctacagcggccggcggccagatgccatccggctgggcctgggcaaccacaactactgcaggaacccagaccgggacagcaagccctggtgctacgtgttcaaggccggcaagtacagcagcgagttctgcagcaccccagcctgcagcgagggcaacagcgactgctactttggaaatggaagtgcctaccggggcacccacagcctgacagagagcggggccagctgcctgccctggaacagcatgatcctgattggcaaggtgtacacagcccagaaccccagcgcccaggccctgggcctgggcaagcacaactactgcaggaacccagatggagatgccaagccctggtgccacgtgctgaagaacagaaggctgacctgggagtactgtgatgtgcccagctgcagcacctgtggcctgcggcagtacagccagccccagttccgcatcaagggcggcctgtttgctgacatcgccagccacccctggcaggccgccatctttgccaagcacagaagaagccctggagagcgcttcctgtgtggcggcatcctgatcagcagctgctggatcctgtctgctgcccactgcttccaggagcgcttccccccccaccacctgaccgtcatcctgggccgcacctacagagtggtgcctggagaggaggagcagaagtttgaggtggagaagtacatcgtgcacaaggagtttgatgatgacacctatgacaatgacatcgccctgctgcagctgaagagtgacagcagccgctgtgcccaggagagctctgtggtgaggacagtgtgcctgcccccagctgacctgcagctgcctgactggacagaatgtgagctgagcggctacggcaagcatgaggccctgagccccttctacagcgagcggctgaaggaggcccacgtgcggctgtaccccagcagccgctgcaccagccagcacctgctgaacagaacagtgacagacaacatgctgtgtgccggggacaccaggtctgggggcccccaggccaacctgcatgatgcctgccagggcgacagcggcggccccctggtgtgcctgaatgatggccgcatgaccctggtgggcatcatctcctggggcctgggctgcggccagaaggatgtgcctggggtgtacaccaaggtgaccaactacctggactggatccgggacaacatgaggccctag

SEQ ID NO: 226581 - DNA, 1311 bp, Artificial Sequence
  derived and/or modified sequence
atggatgccatgaagaggggcctgtgctgcgtgctgctgctgtgtggggctgtgtttgtgagccccagccaggagatccacgcccgcttcagaagaggagcccggagctaccaggtgatctgcagagatgagaagacccagatgatctaccagcagcaccagagctggctgcggcctgtgctgcggagcaacagagtggagtactgctggtgcaacagcggccgggcccagtgccacagcgtgcctgtgaagaggaacagcgactgctactttggaaatggaagtgcctaccggggcacccacagcctgacagagagcggggccagctgcctgccctggaacagcatgatcctgattggcaaggtgtacacagcccagaaccccagcgcccaggccctgggcctgggcaagcacaactactgcaggaacccagatggagatgccaagccctggtgccacgtgctgaagaacagaaggctgacctgggagtactgtgatgtgcccagctgcagcacctgtggcctgcggcagtacagccagccccagttccgcatcaagggcggcctgtttgctgacatcgccagccacccctggcaggccgccatctttgccaagcacagaagaagccctggagagcgcttcctgtgtggcggcatcctgatcagcagctgctggatcctgtctgctgcccactgcttccaggagcgcttccccccccaccacctgaccgtcatcctgggccgcacctacagagtggtgcctggagaggaggagcagaagtttgaggtggagaagtacatcgtgcacaaggagtttgatgatgacacctatgacaatgacatcgccctgctgcagctgaagagtgacagcagccgctgtgcccaggagagctctgtggtgaggacagtgtgcctgcccccagctgacctgcagctgcctgactggacagaatgtgagctgagcggctacggcaagcatgaggccctgagccccttctacagcgagcggctgaaggaggcccacgtgcggctgtaccccagcagccgctgcaccagccagcacctgctgaacagaacagtgacagacaacatgctgtgtgccggggacaccaggtctgggggcccccaggccaacctgcatgatgcctgccagggcgacagcggcggccccctggtgtgcctgaatgatggccgcatgaccctggtgggcatcatctcctggggcctgggctgcggccagaaggatgtgcctggggtgtacaccaaggtgaccaactacctggactggatccgggacaacatgaggccctag

SEQ ID NO: 226582 - DNA, 1422 bp, Artificial Sequence
  derived and/or modified sequence
atggatgccatgaagaggggcctgtgctgcgtgctgctgctgtgtggggctgtgtttgtgagccccagccaggagatccacgcccgcttcagaagaggagcccggagctaccaggtgatctgcagagatgagaagacccagatgatctaccagcagcaccagagctggctgcggcctgtgctgcggagcaacagagtggagtactgctggtgcaacagcggccgggcccagtgccacagcgtgcctgtgaagagctgcagcgagccccgctgcttcaatggaggcacctgccagcaggccctgtacttcagtgactttgtgtgccagtgcccagagggctttgctgggaagtgctgtgaaattggcaacagcgactgctactttggaaatggcagcgcctaccggggcacccacagcctgacagaaagtggggccagctgcctgccctggaacagcatgatcctgattggcaaggtgtacacagcccagaaccccagcgcccaggccctgggcctgggcaagcacaactactgcagaaatccagatggagatgccaagccctggtgccacgtgctgaagaacagaaggctgacctgggagtactgtgatgtgcccagctgcagcacctgtggcctgcggcagtacagccagccccagttccgcatcaagggcggcctgtttgctgacatcgccagccacccctggcaggccgccatctttgccaagcaccggcgcagccctggagagcgcttcctgtgtggcggcatcctgatcagcagctgctggatcctgtctgctgcccactgcttccaggagcgcttccccccccaccacctgaccgtcatcctgggccgcacctacagagtggtgcctggagaggaggagcagaagtttgaggtggagaagtacatcgtgcacaaggagtttgatgatgacacctatgacaatgacatcgccctgctgcagctgaagagtgacagcagccgctgtgcccaggagagctctgtggtgaggacagtgtgcctgcccccagctgacctgcagctgcctgactggacagaatgtgagctgagcggctacggcaagcatgaggccctgagccccttctacagcgagcggctgaaggaggcccacgtgcggctgtaccccagcagccgctgcaccagccagcacctgctgaacagaacagtgacagacaacatgctgtgtgccggggacaccaggtctgggggcccccaggccaacctgcatgatgcctgccagggcgacagcggcggccccctggtgtgcctgaatgatggccgcatgaccctggtgggcatcatctcctggggcctgggctgcggccagaaggatgtgcctggggtgtacaccaaggtgaccaactacctggactggatccgggacaacatgaggccctag

SEQ ID NO: 226583 - DNA, 1551 bp, Artificial Sequence
  derived and/or modified sequence
atggacgccatgaagcggggcctgtgctgcgtgctgctgctgtgcggggctgttttcgtgtcgccatctcaggaaatccacgcccgatttagacggggtgcaaggtcctatcagggctgtagcgaaccaaggtgcttcaatggaggtacttgtcagcaggctctgtatttcagcgactttgtatgtcaatgtccagagggctttgctggcaagtgctgtgagatagataccagagctacgtgctacgaggaccagggaatctcctacagggggacctggagtacagcagagtcaggggcagagtgtacgaactggaactcgtccgccctcgcacagaagccctactcaggccggcgccctgacgccatcagactgggtttggggaaccacaattactgtcgaaatcctgatcgggactctaaaccttggtgttatgtgttcaaagccggtaagtactctagcgaattctgtagcacgccagcttgcagtgaaggaaattcagattgctatttcgggaatgggtccgcttaccggggtacacatagtcttacagagtcaggagcgtcatgcttgccttggaactctatgatacttatcggtaaggtgtacactgcacagaatcccagtgcccaagctctgggactgggcaaacataattactgtcgtaatccagacggggatgccaagccctggtgccatgtactgaaaaatcgccggctgacatgggagtactgcgacgttccctcgtgtagcacgtgcggcctgcgtcagtatagccagcctcagttcaggatcaagggaggcctgttcgctgacatcgccagtcacccttggcaagctgccatcttcgctaaacacagaagaagcccgggtgagcgctttctgtgtggagggattctgatcagttcttgctggatcttgtccgcagcccattgtttccaggaacgcttccctcctcaccaccttacagtgattttgggcagaacttacagggtggttccgggcgaggaggaacagaagtttgaggtggaaaagtatatcgtgcacaaggaattcgacgatgatacctacgacaacgatatcgctctgctccagttgaaaagtgattcaagtcgctgtgcccaagagtcctccgtggtacggacagtgtgtctgcccccagctgatctccaacttccagattggacagagtgcgaactttcaggatacggtaaacatgaagctctctccccgttctattcagaacgcctgaaggaggcccatgtacgactgtaccccagcagccggtgtaccagccagcatctgctaaatcgcacagtaacagataatatgctgtgtgccggagatacgcgctccggaggtccgcaggctaatctgcacgatgcatgtcagggggactccgggggtcctttggtctgcctcaatgacggcagaatgaccctggtggggatcatcagttggggcctgggatgcggccagaaagacgttccaggcgtatacacgaaagtcactaactatttagactggattagagacaacatgcgtccatag

SEQ ID NO: 226584 - DNA, 1311 bp, Artificial Sequence
  derived and/or modified sequence
atggacgccatgaagcggggcctgtgctgcgtgctgctgctgtgcggggcggtgttcgtgagcccttcacaggaaatccacgccagatttcggaggggtgccagatcctatcaagtgatttgcagggacgaaaaaacgcagatgatttaccagcaacaccagagctggttgcggcccgtgttgcggagcaaccgggtggaatattgttggtgtaattcaggtcgagctcagtgccattccgttccagtaaagcgaaactctgactgttactttgggaacggcagcgcttacaggggaacccacagtcttacagagagcggagcatcatgcttaccatggaactctatgatcctgattggtaaggtctacaccgcccagaacccaagcgctcaagcactcggtcttggcaagcataattattgcaggaacccggatggggatgctaagccctggtgtcacgtgctgaagaacaggaggcttacgtgggaatattgcgacgtgccaagctgttctacctgcggcttaaggcaatatagtcagccacaatttcgcatcaagggtggcttgtttgccgacatagcttcccacccgtggcaagctgctatcttcgccaaacaccgtcgatcccctggggaaaggtttctatgcgggggaatcctgatcagctcatgctggattctttccgccgctcattgctttcaggaacgattccctccccaccatctcactgtgattctgggcagaacctacagagtggtgcctggggaagaagaacagaagttcgaagtcgaaaagtacatcgttcataaagagtttgatgatgacacgtacgacaacgatatcgcccttcttcagctgaaatcagattcaagcagatgtgctcaggaatcatcagttgtaagaaccgtctgcctcccacccgcagatctgcagctccccgattggaccgagtgtgagctgtctgggtatgggaagcacgaagccctgagccctttctacagcgaacggcttaaagaggctcacgtcaggttgtacccctcttccagatgcacaagccagcatcttctgaatcgcacggtgacagataacatgctgtgtgccggcgacactcggtctggtggtccccaagcgaatctgcacgatgcctgtcaaggggattcgggagggccactggtttgtttaaacgacggacgcatgacactggttggcattattagctggggtttgggctgcggccagaaagatgtgccaggcgtgtacaccaaggtgactaactacctggactggattcgggacaatatgagaccttag

SEQ ID NO: 226585 - DNA, 1422 bp, Artificial Sequence
  derived and/or modified sequence
atggacgccatgaagcggggcctgtgctgcgtgctgctgctgtgcggggcggtgtttgtttccccatcacaggaaatacacgcaaggttccgtaggggagcccgttcttatcaagtgatttgcagggacgaaaaaactcagatgatctatcagcagcaccaatcctggctgcgaccagtcctccggagtaatcgcgtggagtactgttggtgtaattcgggaagagctcagtgccactccgttcccgtgaagtcctgttccgagcctcgttgtttcaacgggggaacgtgtcaacaggctttgtacttttctgacttcgtatgccaatgccctgagggttttgctggaaagtgttgcgaaatcgggaactcagattgctattttggaaatgggagcgcttaccggggcacgcacagtctcacggagtctggtgcctcttgcctgccatggaactcaatgattcttattggaaaagtatatacagcacaaaacccatcggcccaggcccttgggctggggaaacacaattactgtcgaaacccagacggcgatgcaaagccatggtgccacgtactgaagaataggcgacttacttgggagtactgtgacgtacctagttgctcgacatgtggcctaaggcagtactctcagcctcagttcagaatcaaaggggggttatttgccgatatcgccagtcacccatggcaggctgcgatttttgccaaacatcgtagaagcccaggggagcggtttttgtgtggcggaattcttatctcctcctgctggattcttagcgccgcccactgctttcaggaaagatttcccccccatcaccttacagttattctcggaagaacataccgcgttgtgcccggcgaggaagaacagaagttcgaagtggagaagtatatcgtccacaaagagttcgacgacgacacatatgataatgatatagccctccttcagctgaaatccgattcttcccggtgtgcgcaggagagcagcgtggtgaggactgtgtgcctgccccccgcagatctgcagcttcccgactggacagagtgcgaactaagtggatatgggaaacatgaggctctatccccattctactctgaacgtctgaaagaagctcatgtgagactgtatccttcgagtaggtgcaccagccagcatctcttaaatcgcacagttactgataatatgctctgcgctggtgacactcgatcaggtgggccacaggcaaatctccacgacgcctgtcaaggggattcagggggtccactggtctgcctgaatgatggcagaatgaccctggttggcattatctcctggggactgggatgcggtcaaaaggatgtgcctggcgtctacaccaaagtgactaattaccttgactggatacgcgataacatgcgcccatag

SEQ ID NO: 226586 - DNA, 1551 bp, Artificial Sequence
  derived and/or modified sequence
atggatgctatgaagcgagggctctgttgcgtccttctcttgtgtggtgcagtgtttgtctctccctcccaggaaatccacgctcggtttaggaggggagcgcgaagttaccagggctgttcagaacctagatgtttcaacggcggaacctgccagcaagctctctattttagtgattttgtatgtcagtgccctgaggggtttgccggaaagtgctgcgaaatcgataccagggcaacttgttatgaagaccagggcatttcctatcggggtacatggtctaccgctgaatctggcgctgaatgcactaattggaacagctccgccctggcccaaaaaccttattccggtcgtagacctgacgccattagattagggttgggcaatcataattactgcaggaacccagacagggattcaaagccttggtgctacgtgtttaaagcaggaaaatatagctcagagttctgtagcaccccagcatgttccgaggggaacagcgactgctactttggcaacgggagcgcttacagagggacccattcgctcaccgaatctggcgcatcttgtctcccatggaattcaatgattttgattggtaaggtgtacaccgctcaaaatccttccgctcaggccctcgggcttggaaagcacaattactgcagaaacccagatggagatgctaagccgtggtgccacgtccttaaaaaccgacgcctgacatgggaatactgtgacgtccccagctgctccacgtgcggcctccgtcagtattcccagccacagttcagaattaaagggggattgtttgctgacatagcttcgcacccgtggcaggccgctatcttcgctaagcatcggaggagtccaggcgagcgtttcctctgcggaggaatcctgatctcgagctgttggattctttctgctgcccactgtttccaagagagattccctccacatcatctgaccgttatcctcgggcgtacatacagagtggtccccggtgaggaagagcagaaattcgaagtggaaaagtatattgtgcataaagaatttgacgatgacacatacgataacgacatcgccctgttgcaactgaaatcagattcgtcgcgttgcgcccaggagagttctgtggtaaggaccgtttgtctgcctccagccgatctacaactgcctgactggaccgagtgtgaactgtccggatacgggaaacacgaggcgttgtcccctttctacagtgaacgtctcaaggaggcccacgtcagactgtatccaagttccaggtgcacctcccaacacctgctcaaccgcacagtgacagacaatatgctatgcgctggggacacaaggtccgggggtccgcaggcaaatttgcacgatgcttgccagggagacagtggaggaccgttggtgtgcctcaacgatggacgaatgacactggttggtatcatcagctgggggctggggtgcgggcagaaggatgtcccaggcgtgtacactaaggtcactaattacctggactggatccgggacaatatgaggccctag

SEQ ID NO: 226587 - DNA, 1311 bp, Artificial Sequence
  derived and/or modified sequence
atggatgctatgaagcgcggactttgttgtgtgctgctcctctgcggcgcagtgttcgtttcccccagccaagaaattcacgccaggttcaggcgcggagctaggtcttatcaggtgatttgccgtgatgagaagactcagatgatttaccaacagcaccagtcttggctccggccagtcctgaggtccaatcgagttgagtactgttggtgcaattccgggagggcgcagtgccactctgtgcccgtgaagagaaattccgattgctatttcggcaacggaagcgcgtatcgcggtacacacagcctgaccgaatctggcgcaagctgtctgccctggaatagtatgatcctgatcggaaaggtttacacagctcagaatccctcggcacaggccctgggactgggaaagcataactattgccgaaatccggatggcgatgcgaaaccatggtgccacgtccttaagaataggcgcctcacatgggagtactgcgacgtcccgagctgttcaacctgtggactgagacagtactcccaaccccagttccggattaaaggcggactgttcgcagatattgctagccacccctggcaggccgcaattttcgcaaaacacaggcgaagccctggggagaggtttctgtgcggcggtatcctgattagctcctgttggatcctctcagccgcacattgcttccaggagaggtttcctccgcaccatctgaccgttattcttggcagaacgtacagagttgtacccggagaggaggaacagaaattcgaggtagaaaagtacatcgtccacaaggaattcgacgacgacacatacgacaacgacattgctctgcttcagttaaaaagcgactctagccgctgcgcacaggagagctctgttgtgaggacggtgtgtcttccacctgctgatctgcaattacccgactggaccgaatgcgaactgagtggttatggcaaacacgaggctctatcacctttctatagcgagagactcaaggaagcacacgtcagactgtatccaagctcaagatgtactagccagcacctgctcaataggacggtgaccgataatatgctctgtgcaggtgataccagatccgggggtccacaggccaacctacatgacgcctgccaaggcgattctggaggtcccttggtgtgcttgaacgatggtagaatgaccttggttgggatcatatcgtgggggctgggctgcggccagaaggacgtaccaggcgtctacaccaaagtcacaaattacctggactggattcgcgacaacatgagaccttag

SEQ ID NO: 226588 - DNA, 1422 bp, Artificial Sequence
  derived and/or modified sequence
atggatgccatgaaacgcggactgtgttgcgtccttctgctgtgtggcgctgtatttgtttcaccttcacaggagattcacgcacggtttcgtcgaggtgcaagatcctaccaagtcatctgccgcgacgagaagacgcaaatgatttaccaacagcatcagagttggctccgcccagtcctccggtcaaacagagtagaatattgctggtgcaactccggtagagctcagtgccatagcgtgccagtcaaatcctgttcagaaccaaggtgttttaatggaggaacatgccaacaggctctttacttcagcgacttcgtttgccagtgtcccgaagggttcgcaggaaagtgctgcgagattgggaattcagactgttacttcgggaatgggagtgcatacagaggcacacactctctgacagagagtggtgccagttgcctcccctggaatagtatgattctgatcggcaaggtttatactgctcagaatccatctgcgcaggctttaggcttgggaaaacataactactgcagaaatccagacggtgacgccaagccgtggtgtcacgttcttaaaaaccggaggctaacatgggagtattgtgatgtgcccagttgcagcacctgtggcctgaggcagtacagtcagccccagtttcgtatcaagggtggtctcttcgctgacattgcctcgcacccgtggcaggccgctatctttgctaaacacagacgcagcccaggcgagcgcttcttgtgtggaggcattctgattagctcttgctggatcctgtctgccgctcattgtttccaggagagattcccaccacatcacttgactgtgatcctgggcagaacatatcgcgtggtgccgggtgaggaggagcagaagtttgaagttgagaagtacatcgtacataaggaatttgacgatgatacatatgacaacgatattgcactcctgcagctgaaatccgactcttctcgctgcgcacaggagtcctctgtggtgcgcaccgtctgccttccaccggctgatctccaactgcccgattggaccgaatgcgagttgagcgggtacgggaaacacgaagcgctgagtcctttttatagtgagaggctgaaggaagcccatgtcagattgtacccctcctcacggtgtacgagccaacacctcctcaatcgtaccgtaactgataacatgctatgcgccggtgacacccgatctggagggccacaggcgaatctgcacgacgcatgccaaggcgactccgggggacccctggtctgtctcaatgatggacgcatgaccctcgttggcatcatcagttgggggctcggttgtgggcagaaagatgttcctggagtgtacactaaggtgaccaactatctggactggattcgcgataacatgagaccttag

SEQ ID NO: 226589 - DNA, 1551 bp, Artificial Sequence
  derived and/or modified sequence
atggatgccatgaaacgcggtctatgttgtgtccttctgctctgcggcgcagtttttgtgtccccttcacaggagattcacgcgaggttccgcagaggcgccaggagctaccagggatgctccgagcctaggtgtttcaacggggggacctgccaacaagccctgtacttctccgatttcgtatgtcagtgccccgaaggcttcgctggcaaatgttgtgaaatcgacactcgagcgacttgttatgaggaccaaggaatcagttatcgaggaacttggagtaccgccgaatcaggagctgaatgcactaactggaactcctctgctctggcccagaaaccatatagtggacggcgcccagacgccattcgtcttggacttgggaaccataattactgccgcaaccctgatagagacagtaaaccatggtgttacgtgtttaaagccggaaagtatagcagtgaattctgctctactcccgcttgcagcgaagggaattcagactgctactttgggaatgggtcagcctacagggggacccacagcctgacagagtccggcgccagttgtttgccgtggaacagcatgattctaattggcaaagtctataccgcgcagaacccctctgcacaggctctgggcctgggaaaacacaattattgcagaaatccggacggtgacgcgaagccttggtgccatgtacttaagaacagacgcctgacctgggaatactgcgacgttcctagttgttccacatgtggcctgagacagtactctcaaccccagtttcgaatcaaaggaggtttgtttgcagacatagcctctcatccctggcaggccgctatctttgccaagcatcgaaggagccccggagagcgtttcttgtgtggaggtattctcatcagttcctgctggattctgtctgctgcacactgtttccaggagaggtttcccccgcaccatctgacggtgattctggggagaacataccgagtagttcccggggaagaagaacaaaaattcgaagttgagaaatacatcgtccacaaagagttcgatgacgacacctacgacaatgacatagccctgctccagctgaaaagcgattcctcccgatgcgcccaggagtcctctgtggtccggaccgtctgtctcccaccggcggatctccaactaccagattggacagagtgcgagctcagcggctatgggaagcacgaagccttatctccattctactcagagaggttgaaagaagcccacgttagactctaccccagcagtcggtgtacatcccagcacctcctcaaccggaccgtgaccgataacatgctatgcgcaggagacactaggtccgggggcccccaggccaatttgcacgatgcctgccagggggattccggtggtcccctggtgtgtctgaacgacggacgtatgacactagttggcatcattagctgggggcttggttgcgggcagaaagatgttccaggtgtatacaccaaggtgaccaactacctggactggattcgagacaacatgcggccatag

SEQ ID NO: 226590 - DNA, 1311 bp, Artificial Sequence
  derived and/or modified sequence
atggacgcaatgaagcgaggtttgtgctgtgttttattactatgcggcgccgtttttgttagccctagtcaagaaatccatgccagatttcgcagaggagcgaggagctaccaagtgatttgtcgggacgagaagacccagatgatttatcagcagcatcagtcctggctcaggcccgtcctgcgaagcaatagagtggagtactgctggtgcaattcaggacgcgctcagtgtcactctgtgcctgtgaaacgcaactctgattgctactttggaaacggtagcgcatatagaggtacccatagcttaactgaaagcggcgccagctgcttaccctggaatagcatgatcctgataggtaaagtgtacacggcgcagaacccatcagcccaggccctgggcttgggcaaacacaattactgcaggaaccctgacggcgacgcgaaaccatggtgccatgttctgaagaatcggaggctcacctgggagtattgtgatgttccatcatgctccacatgcggattacgccaatactcacagccccagtttagaattaaaggaggcctgttcgcagacatcgcaagccacccctggcaggcggccatttttgcaaagcaccgacgtagccctggcgagagattcctctgcggcggtatcctcatctcttcatgctggatcctctcagctgcacactgtttccaagagaggttcccgccacaccacctgacagttattctgggacgaacctatcgcgtcgtccctggggaagaggaacagaaatttgaggttgagaaatacatcgttcacaaagaatttgacgatgatacatacgacaacgatattgccctgctgcagctgaagtccgatagctcacgatgcgcccaagaatccagtgtagtcagaaccgtctgcctccctcccgccgatctgcaattgcccgactggaccgagtgcgaactcagtggctacggcaaacacgaggccttgagccccttctattctgaaagactaaaagaggctcacgtgcgcttgtatcccagttccagatgtactagccagcacttgctgaaccgtaccgtcacagataatatgctgtgtgctggagatacacgctcaggcggtcctcaagccaatttgcatgatgcttgccaaggagatagtggcgggcccctagtatgtcttaacgatggaaggatgactctagttggcattatcagctggggtctcggctgtggccagaaagacgtcccaggtgtgtacacaaaggtcacgaactatctggattggattcgtgataatatgcggccttag

SEQ ID NO: 226591 - DNA, 1422 bp, Artificial Sequence
  derived and/or modified sequence
atggatgccatgaaacgtggactgtgttgtgttctgttgctctgtggggcagttttcgtgagcccctcccaagagatacatgccagatttaggagaggagcaaggagctatcaggtgatctgccgcgatgagaagactcagatgatttaccagcagcatcagtcctggcttagacccgtgctgcgctcaaaccgagtggaatactgttggtgtaactctggacgggctcagtgtcactctgtgccagtgaagtcttgtagcgagccacgctgcttcaatggtggaacttgccagcaggcactttacttttcggattttgtgtgtcagtgcccagaggggttcgctggtaaatgctgtgagattggaaattcagactgttacttcggtaacggatcagcatacaggggcactcacagtctgacagagagcggggctagttgtctgccctggaattcgatgatcctgatagggaaagtatatacagcacagaaccccagcgcgcaggccctcgggttaggtaaacataattactgtaggaacccagatggagatgccaaaccatggtgtcacgtgctaaagaacagacgactcacctgggaatattgcgatgtccccagctgctccacgtgcgggttacgtcagtattctcagcctcagttcagaatcaagggaggcctttttgcggatatcgcctcacacccatggcaagcagctatcttcgcaaaacacagacgcagtccaggagaacgctttctttgcggaggtattctaatctcttcttgttggattctttcagccgcgcattgttttcaagaaagatttccgccacaccaccttactgtgattttagggcggacataccgcgtcgtgcccggcgaagaggaacagaagttcgaggttgagaaatatattgtccataaggaattcgatgacgatacatatgacaatgatattgcactcctgcagcttaaatcagactcatcgagatgcgctcaagaatcctccgtggtcaggacggtgtgcctcccacccgcagacctgcaattacccgattggacagagtgcgaattaagcggctatggtaaacacgaggcattgtccccattttactcagaacggctaaaggaggcccatgtaaggctgtatcccagttcgcgatgcacttctcagcacttgttaaatcgtacagtgaccgacaacatgctctgtgctggtgacacaaggtccggaggacctcaagctaacctgcatgatgcctgtcaaggggattctggcggtccattggtgtgcttgaatgacgggaggatgacattggtcggtattatttcttgggggcttggatgcgggcagaaggatgtgcccggcgtatatacaaaggtgacaaattatctcgattggatcagagataacatgcgtccttag

SEQ ID NO: 226592 - DNA, 1551 bp, Artificial Sequence
  derived and/or modified sequence
atggacgcgatgaaacgtgggctgtgctgtgttctccttttatgtggcgcagtgtttgtttccccatctcaagagatccacgctcggtttcgcaggggagcccgaagttaccaaggttgcagtgagccccggtgtttcaatggcggaacatgccaacaggctctgtatttcagcgatttcgtatgtcaatgccctgagggattcgcaggaaagtgctgtgagattgatactcgagccacgtgttacgaagatcagggcattagttatagaggaacttggtcaactgctgagagcggcgcagagtgtacaaactggaacagctctgcactggcgcaaaagccctactccgggagacgaccagacgctatccgattaggacttgggaatcataactattgccgcaaccctgaccgcgactctaaaccatggtgctatgtttttaaagcgggtaagtacagcagcgagttctgcagcacacccgcctgctcagaagggaactcggattgctactttgggaatggaagcgcatataggggaacgcacagcctgaccgaatccggggccagctgcttaccctggaactccatgatactgattgggaaagtctataccgcgcagaacccctctgcacaggctctgggcctgggaaaacacaattattgcagaaatccggacggtgacgcgaagccttggtgccatgtacttaagaacagacgcctgacctgggaatactgcgacgttcctagttgttccacatgtggcctgagacagtactctcaaccccagtttcgaatcaaaggaggtttgtttgcagacatagcctctcatccctggcaggccgctatctttgccaagcatcgaaggagccccggagagcgtttcttgtgtggaggtattctcatttcatcctgctggattctgtcagctgcccactgtttccaggaaaggttccccccacatcacctgaccgtcatattagggagaacttacagagttgtgccaggcgaagaggagcaaaaattcgaggtcgaaaagtacattgtccacaaggagttcgatgacgacacatacgataacgacatcgcccttctccagctgaaatcggactcaagccgctgtgcccaagaatcaagtgtagtgcggaccgtctgtcttccgccagctgatctgcaactgccggactggaccgaatgcgaacttagtggctatggaaaacatgaggctctgtctcccttttacagtgagaggcttaaggaagcgcatgtaaggctgtacccctcttcccggtgtacatctcaacaccttttgaatcgtaccgtgactgataacatgttgtgcgctggtgatacccggtcaggaggcccacaggccaacttacacgacgcatgtcaaggagattctgggggacctctggtttgcctcaacgatgggcgaatgaccctggtaggcatcatttcctgggggctgggatgcggacagaaagacgtgcccggtgtatatacgaaagtcacgaattatttagattggattagagacaacatgagaccttag

SEQ ID NO: 226593 - DNA, 1311 bp, Artificial Sequence
  derived and/or modified sequence
atggatgctatgaagaggggtttatgttgtgtcctgctgctctgcggcgccgttttcgtgtcgccttcccaggagatccacgctcggtttcggagaggggctcggtcatatcaggttatatgtcgcgatgagaaaactcaaatgatctaccagcaacaccaaagctggctccgcccagtcctaagaagcaatagagtagagtactgctggtgtaattcgggccgggcccaatgccactctgtgccagtgaagagaaattccgattgctatttcgggaatggaagcgcctataggggcactcattcactcactgagtctggcgcctcatgcctgccttggaactcaatgattctgatcggcaaagtgtacaccgcccagaatccaagcgctcaggctctagggctcgggaaacacaattactgtagaaatcccgacggagatgctaagccctggtgccacgtcctgaaaaatagacgcctaacatgggagtactgtgacgtgccatcctgttccacctgtggtctccgacaatactcccagcctcaatttagaatcaaaggtggtctgttcgccgatatcgcaagccacccctggcaagctgcaatatttgctaaacatcgaagatctcccggggaaagatttctgtgtggaggcatactgatcagtagctgttggatcctgagcgccgcccactgtttccaggaacgattcccaccacaccacctgacggtaattttaggcaggacttaccgtgttgtccctggagaggaggagcagaaattcgaggtggaaaaatacattgttcacaaagaattcgatgacgacacatacgataacgatatcgccttacttcaacttaagagtgactccagtagatgcgcccaggaaagctctgttgtaagaactgtgtgcttacctcccgccgatctccaactcccagactggaccgaatgtgaactgtccggatatggcaagcacgaggcactgtctcctttttattctgaaagactgaaagaggctcacgttagactgtaccccagtagtcgctgtacttcccaacatcttctgaacagaacagtcacagacaatatgttgtgcgccggggacacccgatccgggggaccccaggccaatctccacgacgcatgtcagggcgactccggaggccccttagtatgcttgaatgacgggagaatgacgttagtggggatcatttcctggggattggggtgtggacaaaaggacgtaccaggagtgtatacgaaggtcacaaactatttggattggatcagagataatatgcgaccctag

SEQ ID NO: 226594 - DNA, 1422 bp, Artificial Sequence
  derived and/or modified sequence
atggatgccatgaaacgaggactgtgttgtgtgcttttgctttgcggagccgtctttgtaagcccatcacaggagatccatgcaagattcaggcgaggggcgcgttcctatcaggtcatatgcagagatgagaaaactcagatgatctaccagcagcatcaatcatggctacgtccagtcctgaggagcaaccgagttgaatattgttggtgcaattctggccgcgcccagtgccactccgtgccagtaaaatcttgttccgagcctcgctgtttcaatggaggtacatgccaacaggctctgtatttcagtgatttcgtttgtcagtgccccgaaggcttcgccgggaaatgctgcgagattggtaacagcgattgttactttggaaatggaagtgcttaccgaggaacccatagcctgacagaatccggtgcctcttgcttgccctggaacagcatgatacttattgggaaagtgtacaccgcacagaacccttctgcacaagcactgggactgggaaaacataattattgcaggaaccccgatggagacgcaaagccgtggtgccatgtgctgaaaaacaggaggctcacctgggagtactgcgatgtccctagctgttctacctgtggcctgaggcagtattcacaaccccagtttagaatcaaaggagggctttttgccgatatcgcctctcatccttggcaggctgctatcttcgctaaacaccggcgctcgcccggtgaaagatttttgtgcggaggaatcttgatttcgtcatgttggatcttaagcgctgcacactgcttccaagagcggttcccccctcatcatctcacagttattctgggccggacctatcgcgtcgtaccaggagaggaggaacaaaaattcgaagtcgaaaaatatatcgtccacaaagaattcgacgatgatacttatgacaatgacattgcattgctccagctgaagtccgattcctctcgctgtgcccaagagtcatccgtcgttaggactgtttgtttaccccccgctgatctgcagctgcccgattggacagaatgtgaactatcagggtacggaaaacacgaagctctgtcaccattttatagcgagcggctgaaggaagcccacgttagactctatccctcatcgcgctgtacaagtcaacatcttctgaaccggaccgttactgacaatatgctgtgcgctggcgatacaaggagtggcggtccccaggctaatttgcacgatgcttgtcagggtgatagcgggggacccctggtatgcttaaacgacggaaggatgacactagtaggaatcatctcatggggcctgggatgcggacagaaagatgtgccaggagtgtacaccaaggtgaccaattatctggattggattcgagacaatatgaggccatag

SEQ ID NO: 226595 - DNA, 2516 bp, Artificial Sequence
  derived and/or modified sequence
atggccctgtccactgagcatcctcccgccacacagaaacccgcccagccggggccaccgaccccaccccctgcctggaaacttaaaggaggccggagctgtggggagctcagagctgagatcctacaggagtccagggctggagagaaaacctctgcgaggaaagggaaggagcaagccgtgaatttaagggacgctgtgaagcaatcatggatgcaatgaagagagggctctgctgtgtgctgctgctgtgtggagcagtcttcgtttcgcccagccaggaaatccatgcccgattcagaagaggagccagatcttaccaaggttgcagcgagccaaggtgtttcaacgggggcacctgccagcaggccctgtacttctcagatttcgtgtgccagtgccccgaaggatttgctgggaagtgctgtgaaatagataccagggccacgtgctacgaggaccagggcatcagctacaggggcacgtggagcacagcggagagtggcgccgagtgcaccaactggaacagcagcgcgttggcccagaagccctacagcgggcggaggccagacgccatcaggctgggcctggggaaccacaactactgcagaaacccagatcgagactcaaagccctggtgctacgtctttaaggcggggaagtacagctcagagttctgcagcacccctgcctgctctgagggaaacagtgactgctactttgggaatgggtcagcctaccgtggcacgcacagcctcaccgagtcgggtgcctcctgcctcccgtggaattccatgatcctgataggcaaggtttacacagcacagaaccccagtgcccaggcactgggcctgggcaaacataattactgccggaatcctgatggggatgccaagccctggtgccacgtgctgaagaaccgcaggctgacgtgggagtactgtgatgtgccctcctgctccacctgcggcctgagacagtacagccagcctcagtttcgcatcaaaggagggctcttcgccgacatcgcctcccacccctggcaggctgccatctttgccaagcacaggaggtcgcccggagagcggttcctgtgcgggggcatactcatcagctcctgctggattctctctgccgcccactgcttccaggagaggtttccgccccaccacctgacggtgatcttgggcagaacataccgggtggtccctggcgaggaggagcagaaatttgaagtcgaaaaatacattgtccataaggaattcgatgatgacacttacgacaatgacattgcgctgctgcagctgaaatcggattcgtcccgctgtgcccaggagagcagcgtggtccgcactgtgtgccttcccccggcggacctgcagctgccggactggacggagtgtgagctctccggctacggcaagcatgaggccttgtctcctttctattcggagcggctgaaggaggctcatgtcagactgtacccatccagccgctgcacatcacaacatttacttaacagaacagtcaccgacaacatgctgtgtgctggagacactcggagcggcgggccccaggcaaacttgcacgacgcctgccagggcgattcgggaggccccctggtgtgtctgaacgatggccgcatgactttggtgggcatcatcagctggggcctgggctgtggacagaaggatgtcccgggtgtgtacaccaaggttaccaactacctagactggattcgtgacaacatgcgaccgtgaccaggaacacccgactcctcaaaagcaaatgagatcccgcctcttcttcttcagaagacactgcaaaggcgcagtgcttctctacagacttctccagacccaccacaccgcagaagcgggacgagaccctacaggagagggaagagtgcattttcccagatacttcccattttggaagttttcaggacttggtctgatttcaggatactctgtcagatgggaagacatgaatgcacactagcctctccaggaatgcctcctccctgggcagaaagtggccatgccaccctgttttcagctaaagcccaacctcctgacctgtcaccgtgagcagctttggaaacaggaccacaaaaatgaaagcatgtctcaatagtaaaagataacaagatctttcaggaaagacggattgcattagaaatagacagtatatttatagtcacaagagcccagcagggcctcaaagttggggcaggctggctggcccgtcatgttcctcaaaagcacccttgacgtcaagtctccttcccctttccccactccctggctctcagaaggtattccttttgtgtacagtgtgtaaagtgtaaatcctttttctttataaactttagagtagcatgagagaattgtatcatttgaacaactaggcttcagcatatttatagcaatccatgttagtttttactttctgttgccacaaccctgttttatactgtacttaataaattcagatatatttttcacagtttttcc

SEQ ID NO: 226596 - DNA, 1655 bp, Artificial Sequence
  derived and/or modified sequence
agagctgagatcctacaggagtccagggctggagagaaaacctctgcgaggaaagggaaggagcaagccgtgaatttaagggacgctgtgaagcaatcatggatgcaatgaagagagggctctgctgtgtgctgctgctgtgtggagcagtcttcgtttcgcccagccaggaaatccatgcccgattcagaagaggagccagatcttaccaagtgatctgcagagatgaaaaaacgcagatgatataccagcaacatcagtcatggctgcgccctgtgctcagaagcaaccgggtggaatattgctggtgcaacagtggcagggcacagtgccactcagtgcctgtcaaaagaaacagtgactgctactttgggaatgggtcagcctaccgtggcacgcacagcctcaccgagtcgggtgcctcctgcctcccgtggaattccatgatcctgataggcaaggtttacacagcacagaaccccagtgcccaggcactgggcctgggcaaacataattactgccggaatcctgatggggatgccaagccctggtgccacgtgctgaagaaccgcaggctgacgtgggagtactgtgatgtgccctcctgctccacctgcggcctgagacagtacagccagcctcagtttcgcatcaaaggagggctcttcgccgacatcgcctcccacccctggcaggctgccatctttgccaagcacaggaggtcgcccggagagcggttcctgtgcgggggcatactcatcagctcctgctggattctctctgccgcccactgcttccaggagaggtttccgccccaccacctgacggtgatcttgggcagaacataccgggtggtccctggcgaggaggagcagaaatttgaagtcgaaaaatacattgtccataaggaattcgatgatgacacttacgacaatgacattgcgctgctgcagctgaaatcggattcgtcccgctgtgcccaggagagcagcgtggtccgcactgtgtgccttcccccggcggacctgcagctgccggactggacggagtgtgagctctccggctacggcaagcatgaggccttgtctcctttctattcggagcggctgaaggaggctcatgtcagactgtacccatccagccgctgcacatcacaacatttacttaacagaacagtcaccgacaacatgctgtgtgctggagacactcggagcggcgggccccaggcaaacttgcacgacgcctgccagggcgattcgggaggccccctggtgtgtctgaacgatggccgcatgactttggtgggcatcatcagctggggcctgggctgtggacagaaggatgtcccgggtgtgtacaccaaggttaccaactacctagactggattcgtgacaacatgcgaccgtgaccaggaacacccgactcctcaaaagcaaatgagatcccgcctcttcttcttcagaagacactgcaaaggcgcagtgcttctctacagacttctccagacccaccacaccgcagaagcgggacgagaccctacaggagagggaagagtgcattttcccagatacttcccattttggaagttttcaggacttggtctgatttcaggatactctgtcagatgggaagacatgaatgcacactagcctct

SEQ ID NO: 226597 - DNA, 1613 bp, Artificial Sequence
  derived and/or modified sequence
agagctgagatcctacaggagtccagggctggagagaaaacctctgcgaggaaagggaaggagcaagccgtgaatttaagggacgctgtgaagcaatcatggatgcaatgaagagagggctctgctgtgtgctgctgctgtgtggagcagtcttcgtttcgcccagccaggaaatccatgcccgattcagaagaggagccagatcttaccaagtgatctgcagagatgaaaaaacgcagatgatataccagcaacatcagtcatggctgcgccctgtgctcagaagcaaccgggtggaatattgctggtgcaacagtggcagggcacagtgccactcagtgcctgtcaaaagttgcagcgagccaaggtgtttcaacgggggcacctgccagcaggccctgtacttctcagatttcgtgtgccagtgccccgaaggatttgctgggaagtgctgtgaaataggaaacagtgactgctactttgggaatgggtcagcctaccgtggcacgcacagcctcaccgagtcgggtgcctcctgcctcccgtggaattccatgatcctgataggcaaggtttacacagcacagaaccccagtgcccaggcactgggcctgggcaaacataattactgccggaatcctgatggggatgccaagccctggtgccacgtgctgaagaaccgcaggctgacgtgggagtactgtgatgtgccctcctgctccacctgcggcctgagacagtacagccagcctcagtttcgcatcaaaggagggctcttcgccgacatcgcctcccacccctggcaggctgccatctttgccaagcacaggaggtcgcccggagagcggttcctgtgcgggggcatactcatcagctcctgctggattctctctgccgcccactgcttccaggagaggtttccgccccaccacctgacggtgatcttgggcagaacataccgggtggtccctggcgaggaggagcagaaatttgaagtcgaaaaatacattgtccataaggaattcgatgatgacacttacgacaatgacattgcgctgctgcagctgaaatcggattcgtcccgctgtgcccaggagagcagcgtggtccgcactgtgtgccttcccccggcggacctgcagctgccggactggacggagtgtgagctctccggctacggcaagcatgaggccttgtctcctttctattcggagcggctgaaggaggctcatgtcagactgtacccatccagccgctgcacatcacaacatttacttaacagaacagtcaccgacaacatgctgtgtgctggagacactcggagcggcgggccccaggcaaacttgcacgacgcctgccagggcgattcgggaggccccctggtgtgtctgaacgatggccgcatgactttggtgggcatcatcagctggggcctgggctgtggacagaaggatgtcccgggtgtgtacaccaaggttaccaactacctagactggattcgtgacaacatgcgaccgtgaccaggaacacccgactcctcaaaagcaaatgagatcccgcctcttcttcttcagaagacactgcaaaggcgcagtgcttctctacagacttct

SEQ ID NO: 226598 - RNA, 1551 nt, Artificial Sequence
  derived and/or modified sequence
auggaugccaugaaacgcggucuauguuguguccuucugcucugcggcgcaguuuuuguguccccuucacaggagauucacgcgagguuccgcagaggcgccaggagcuaccagggaugcuccgagccuagguguuucaacggggggaccugccaacaagcccuguacuucuccgauuucguaugucagugccccgaaggcuucgcuggcaaauguugugaaaucgacacucgagcgacuuguuaugaggaccaaggaaucaguuaucgaggaacuuggaguaccgccgaaucaggagcugaaugcacuaacuggaacuccucugcucuggcccagaaaccauauaguggacggcgcccagacgccauucgucuuggacuugggaaccauaauuacugccgcaacccugauagagacaguaaaccaugguguuacguguuuaaagccggaaaguauagcagugaauucugcucuacucccgcuugcagcgaagggaauucagacugcuacuuugggaaugggucagccuacagggggacccacagccugacagaguccggcgccaguuguuugccguggaacagcaugauucuaauuggcaaagucuauaccgcgcagaaccccucugcacaggcucugggccugggaaaacacaauuauugcagaaauccggacggugacgcgaagccuuggugccauguacuuaagaacagacgccugaccugggaauacugcgacguuccuaguuguuccacauguggccugagacaguacucucaaccccaguuucgaaucaaaggagguuuguuugcagacauagccucucaucccuggcaggccgcuaucuuugccaagcaucgaaggagccccggagagcguuucuuguguggagguauucucaucaguuccugcuggauucugucugcugcacacuguuuccaggagagguuucccccgcaccaucugacggugauucuggggagaacauaccgaguaguucccggggaagaagaacaaaaauucgaaguugagaaauacaucguccacaaagaguucgaugacgacaccuacgacaaugacauagcccugcuccagcugaaaagcgauuccucccgaugcgcccaggaguccucugugguccggaccgucugucucccaccggcggaucuccaacuaccagauuggacagagugcgagcucagcggcuaugggaagcacgaagccuuaucuccauucuacucagagagguugaaagaagcccacguuagacucuaccccagcagucgguguacaucccagcaccuccucaaccggaccgugaccgauaacaugcuaugcgcaggagacacuagguccgggggcccccaggccaauuugcacgaugccugccagggggauuccggugguccccuggugugucugaacgacggacguaugacacuaguuggcaucauuagcugggggcuugguugcgggcagaaagauguuccagguguauacaccaaggugaccaacuaccuggacuggauucgagacaacaugcggccauag

SEQ ID NO: 226599 - RNA, 1311 nt, Artificial Sequence
  derived and/or modified sequence
auggacgcaaugaagcgagguuugugcuguguuuuauuacuaugcggcgccguuuuuguuagcccuagucaagaaauccaugccagauuucgcagaggagcgaggagcuaccaagugauuugucgggacgagaagacccagaugauuuaucagcagcaucaguccuggcucaggcccguccugcgaagcaauagaguggaguacugcuggugcaauucaggacgcgcucagugucacucugugccugugaaacgcaacucugauugcuacuuuggaaacgguagcgcauauagagguacccauagcuuaacugaaagcggcgccagcugcuuacccuggaauagcaugauccugauagguaaaguguacacggcgcagaacccaucagcccaggcccugggcuugggcaaacacaauuacugcaggaacccugacggcgacgcgaaaccauggugccauguucugaagaaucggaggcucaccugggaguauugugauguuccaucaugcuccacaugcggauuacgccaauacucacagccccaguuuagaauuaaaggaggccuguucgcagacaucgcaagccaccccuggcaggcggccauuuuugcaaagcaccgacguagcccuggcgagagauuccucugcggcgguauccucaucucuucaugcuggauccucucagcugcacacuguuuccaagagagguucccgccacaccaccugacaguuauucugggacgaaccuaucgcgucgucccuggggaagaggaacagaaauuugagguugagaaauacaucguucacaaagaauuugacgaugauacauacgacaacgauauugcccugcugcagcugaaguccgauagcucacgaugcgcccaagaauccaguguagucagaaccgucugccucccucccgccgaucugcaauugcccgacuggaccgagugcgaacucaguggcuacggcaaacacgaggccuugagccccuucuauucugaaagacuaaaagaggcucacgugcgcuuguaucccaguuccagauguacuagccagcacuugcugaaccguaccgucacagauaauaugcugugugcuggagauacacgcucaggcgguccucaagccaauuugcaugaugcuugccaaggagauaguggcgggccccuaguaugucuuaacgauggaaggaugacucuaguuggcauuaucagcuggggucucggcuguggccagaaagacgucccagguguguacacaaaggucacgaacuaucuggauuggauucgugauaauaugcggccuuag

SEQ ID NO: 226600 - RNA, 1422 nt, Artificial Sequence
  derived and/or modified sequence
auggaugccaugaaacguggacuguguuguguucuguugcucuguggggcaguuuucgugagccccucccaagagauacaugccagauuuaggagaggagcaaggagcuaucaggugaucugccgcgaugagaagacucagaugauuuaccagcagcaucaguccuggcuuagacccgugcugcgcucaaaccgaguggaauacuguugguguaacucuggacgggcucagugucacucugugccagugaagucuuguagcgagccacgcugcuucaaugguggaacuugccagcaggcacuuuacuuuucggauuuugugugucagugcccagagggguucgcugguaaaugcugugagauuggaaauucagacuguuacuucgguaacggaucagcauacaggggcacucacagucugacagagagcggggcuaguugucugcccuggaauucgaugauccugauagggaaaguauauacagcacagaaccccagcgcgcaggcccucggguuagguaaacauaauuacuguaggaacccagauggagaugccaaaccauggugucacgugcuaaagaacagacgacucaccugggaauauugcgauguccccagcugcuccacgugcggguuacgucaguauucucagccucaguucagaaucaagggaggccuuuuugcggauaucgccucacacccauggcaagcagcuaucuucgcaaaacacagacgcaguccaggagaacgcuuucuuugcggagguauucuaaucucuucuuguuggauucuuucagccgcgcauuguuuucaagaaagauuuccgccacaccaccuuacugugauuuuagggcggacauaccgcgucgugcccggcgaagaggaacagaaguucgagguugagaaauauauuguccauaaggaauucgaugacgauacauaugacaaugauauugcacuccugcagcuuaaaucagacucaucgagaugcgcucaagaauccuccguggucaggacggugugccucccacccgcagaccugcaauuacccgauuggacagagugcgaauuaagcggcuaugguaaacacgaggcauuguccccauuuuacucagaacggcuaaaggaggcccauguaaggcuguaucccaguucgcgaugcacuucucagcacuuguuaaaucguacagugaccgacaacaugcucugugcuggugacacaagguccggaggaccucaagcuaaccugcaugaugccugucaaggggauucuggcgguccauuggugugcuugaaugacgggaggaugacauuggucgguauuauuucuugggggcuuggaugcgggcagaaggaugugcccggcguauauacaaaggugacaaauuaucucgauuggaucagagauaacaugcguccuuag

SEQ ID NO: 226601 - RNA, 1551 nt, Artificial Sequence
  derived and/or modified sequence
auggacgcgaugaaacgugggcugugcuguguucuccuuuuauguggcgcaguguuuguuuccccaucucaagagauccacgcucgguuucgcaggggagcccgaaguuaccaagguugcagugagccccgguguuucaauggcggaacaugccaacaggcucuguauuucagcgauuucguaugucaaugcccugagggauucgcaggaaagugcugugagauugauacucgagccacguguuacgaagaucagggcauuaguuauagaggaacuuggucaacugcugagagcggcgcagaguguacaaacuggaacagcucugcacuggcgcaaaagcccuacuccgggagacgaccagacgcuauccgauuaggacuugggaaucauaacuauugccgcaacccugaccgcgacucuaaaccauggugcuauguuuuuaaagcggguaaguacagcagcgaguucugcagcacacccgccugcucagaagggaacucggauugcuacuuugggaauggaagcgcauauaggggaacgcacagccugaccgaauccggggccagcugcuuacccuggaacuccaugauacugauugggaaagucuauaccgcgcagaaccccucugcacaggcucugggccugggaaaacacaauuauugcagaaauccggacggugacgcgaagccuuggugccauguacuuaagaacagacgccugaccugggaauacugcgacguuccuaguuguuccacauguggccugagacaguacucucaaccccaguuucgaaucaaaggagguuuguuugcagacauagccucucaucccuggcaggccgcuaucuuugccaagcaucgaaggagccccggagagcguuucuuguguggagguauucucauuucauccugcuggauucugucagcugcccacuguuuccaggaaagguuccccccacaucaccugaccgucauauuagggagaacuuacagaguugugccaggcgaagaggagcaaaaauucgaggucgaaaaguacauuguccacaaggaguucgaugacgacacauacgauaacgacaucgcccuucuccagcugaaaucggacucaagccgcugugcccaagaaucaaguguagugcggaccgucugucuuccgccagcugaucugcaacugccggacuggaccgaaugcgaacuuaguggcuauggaaaacaugaggcucugucucccuuuuacagugagaggcuuaaggaagcgcauguaaggcuguaccccucuucccgguguacaucucaacaccuuuugaaucguaccgugacugauaacauguugugcgcuggugauacccggucaggaggcccacaggccaacuuacacgacgcaugucaaggagauucugggggaccucugguuugccucaacgaugggcgaaugacccugguaggcaucauuuccugggggcugggaugcggacagaaagacgugcccgguguauauacgaaagucacgaauuauuuagauuggauuagagacaacaugagaccuuag

SEQ ID NO: 226602 - RNA, 1311 nt, Artificial Sequence
  derived and/or modified sequence
auggaugcuaugaagagggguuuauguuguguccugcugcucugcggcgccguuuucgugucgccuucccaggagauccacgcucgguuucggagaggggcucggucauaucagguuauaugucgcgaugagaaaacucaaaugaucuaccagcaacaccaaagcuggcuccgcccaguccuaagaagcaauagaguagaguacugcugguguaauucgggccgggcccaaugccacucugugccagugaagagaaauuccgauugcuauuucgggaauggaagcgccuauaggggcacucauucacucacugagucuggcgccucaugccugccuuggaacucaaugauucugaucggcaaaguguacaccgcccagaauccaagcgcucaggcucuagggcucgggaaacacaauuacuguagaaaucccgacggagaugcuaagcccuggugccacguccugaaaaauagacgccuaacaugggaguacugugacgugccauccuguuccaccuguggucuccgacaauacucccagccucaauuuagaaucaaagguggucuguucgccgauaucgcaagccaccccuggcaagcugcaauauuugcuaaacaucgaagaucucccggggaaagauuucuguguggaggcauacugaucaguagcuguuggauccugagcgccgcccacuguuuccaggaacgauucccaccacaccaccugacgguaauuuuaggcaggacuuaccguguugucccuggagaggaggagcagaaauucgagguggaaaaauacauuguucacaaagaauucgaugacgacacauacgauaacgauaucgccuuacuucaacuuaagagugacuccaguagaugcgcccaggaaagcucuguuguaagaacugugugcuuaccucccgccgaucuccaacucccagacuggaccgaaugugaacuguccggauauggcaagcacgaggcacugucuccuuuuuauucugaaagacugaaagaggcucacguuagacuguaccccaguagucgcuguacuucccaacaucuucugaacagaacagucacagacaauauguugugcgccggggacacccgauccgggggaccccaggccaaucuccacgacgcaugucagggcgacuccggaggccccuuaguaugcuugaaugacgggagaaugacguuaguggggaucauuuccuggggauugggguguggacaaaaggacguaccaggaguguauacgaaggucacaaacuauuuggauuggaucagagauaauaugcgacccuag

SEQ ID NO: 226603 - RNA, 1422 nt, Artificial Sequence
  derived and/or modified sequence
auggaugccaugaaacgaggacuguguugugugcuuuugcuuugcggagccgucuuuguaagcccaucacaggagauccaugcaagauucaggcgaggggcgcguuccuaucaggucauaugcagagaugagaaaacucagaugaucuaccagcagcaucaaucauggcuacguccaguccugaggagcaaccgaguugaauauuguuggugcaauucuggccgcgcccagugccacuccgugccaguaaaaucuuguuccgagccucgcuguuucaauggagguacaugccaacaggcucuguauuucagugauuucguuugucagugccccgaaggcuucgccgggaaaugcugcgagauugguaacagcgauuguuacuuuggaaauggaagugcuuaccgaggaacccauagccugacagaauccggugccucuugcuugcccuggaacagcaugauacuuauugggaaaguguacaccgcacagaacccuucugcacaagcacugggacugggaaaacauaauuauugcaggaaccccgauggagacgcaaagccguggugccaugugcugaaaaacaggaggcucaccugggaguacugcgaugucccuagcuguucuaccuguggccugaggcaguauucacaaccccaguuuagaaucaaaggagggcuuuuugccgauaucgccucucauccuuggcaggcugcuaucuucgcuaaacaccggcgcucgcccggugaaagauuuuugugcggaggaaucuugauuucgucauguuggaucuuaagcgcugcacacugcuuccaagagcgguuccccccucaucaucucacaguuauucugggccggaccuaucgcgucguaccaggagaggaggaacaaaaauucgaagucgaaaaauauaucguccacaaagaauucgacgaugauacuuaugacaaugacauugcauugcuccagcugaaguccgauuccucucgcugugcccaagagucauccgucguuaggacuguuuguuuaccccccgcugaucugcagcugcccgauuggacagaaugugaacuaucaggguacggaaaacacgaagcucugucaccauuuuauagcgagcggcugaaggaagcccacguuagacucuaucccucaucgcgcuguacaagucaacaucuucugaaccggaccguuacugacaauaugcugugcgcuggcgauacaaggaguggcgguccccaggcuaauuugcacgaugcuugucagggugauagcgggggaccccugguaugcuuaaacgacggaaggaugacacuaguaggaaucaucucauggggccugggaugcggacagaaagaugugccaggaguguacaccaaggugaccaauuaucuggauuggauucgagacaauaugaggccauag

SEQ ID NO: 226604 - protein, 244 aa, Artificial Sequence
  derived and/or modified sequence
MDPNRISEDGTHCIYRILRLHENADFQDTTLESQDTKLIPDSCRRIKQAFQGAVQKELQHIVGSQHIRAEKAMVDGSWLDLAKRSKLEAQPFAHLTINATDIPSGSHKVSLSSWYHDRGWAKISNMTFSNGKLIVNQDGFYYLYANICFRHHETSGDLATEYLQLMVYVTKTSIKIPSSHTLMKGGSTKYWSGNSEFHFYSINVGGFFKLRSGEEISIEVSNPSLLDPDQDATYFGAFKVRDID

SEQ ID NO: 226605 - DNA, 735 bp, Artificial Sequence
  derived and/or modified sequence
atggaccccaacagaatcagcgaggacggcacccactgcatctacagaatcctgagactgcacgagaacgccgacttccaggacaccaccctggagagccaggacaccaagctgatccccgacagctgcagaagaatcaagcaggccttccagggcgccgtgcagaaggagctgcagcacatcgtgggcagccagcacatcagagccgagaaggccatggtggacggcagctggctggacctggccaagagaagcaagctggaggcccagcccttcgcccacctgaccatcaacgccaccgacatccccagcggcagccacaaggtgagcctgagcagctggtaccacgacagaggctgggccaagatcagcaacatgaccttcagcaacggcaagctgatcgtgaaccaggacggcttctactacctgtacgccaacatctgcttcagacaccacgagaccagcggcgacctggccaccgagtacctgcagctgatggtgtacgtgaccaagaccagcatcaagatccccagcagccacaccctgatgaagggcggcagcaccaagtactggagcggcaacagcgagttccacttctacagcatcaacgtgggcggcttcttcaagctgagaagcggcgaggagatcagcatcgaggtgagcaaccccagcctgctggaccccgaccaggacgccacctacttcggcgccttcaaggtgagagacatcgactag

SEQ ID NO: 226606 - DNA, 735 bp, Artificial Sequence
  derived and/or modified sequence
atggatcctaacagaatttcggaagacggtacccactgcatctaccggattttaaggctccacgagaacgcggacttccaggatactaccctagagtcacaggacacgaagcttatacctgactcctgtagaaggattaaacaagcgttccagggggcagtccagaaagagttacaacacattgtgggcagtcagcacatacgggctgagaaggcgatggtcgacggctcctggcttgaccttgctaaaaggtccaagctcgaggctcaaccatttgcccatctgaccatcaacgccaccgacattcctagcggcagccacaaggtgtctctcagctcttggtatcatgacaggggctgggccaaaatatctaatatgacattttctaatgggaagctcattgtgaaccaggatggtttctactacttgtacgctaacatttgctttagacatcacgagaccagcggcgacttagcgactgaatacctacagcttatggtctacgttactaagacatcgattaagatccccagctcccacactctaatgaagggaggcagcactaagtattggtccggtaacagcgagttccatttttattccattaatgtgggcggttttttcaagctaaggagtggggaagagatcagcattgaggtgtctaacccctctttgctggacccagatcaggacgccacatacttcggggcattcaaagtaagagacatcgattag

SEQ ID NO: 226607 - DNA, 735 bp, Artificial Sequence
  derived and/or modified sequence
atggaccccaaccgtatcagcgaagatgggacccattgtatctaccgaatcctcagactgcatgagaacgccgacttccaggacactacactggagagtcaagacaccaagctgatacctgactcctgccgacgaattaagcaagcctttcagggggccgtccaaaaggaactgcagcatattgtcggcagccaacacattcgagccgagaaagcaatggtcgacggcagttggcttgaccttgctaagcgttccaagttggaagctcagccgttcgctcacctcaccattaacgctacagatattccttctgggtcccacaaggttagcctctcctcatggtaccatgatagggggtgggccaagatctcaaatatgacttttagtaatggcaaattaatcgtcaatcaggacggcttctattacctttatgccaacatctgcttccggcaccacgagacttctggagatctggctacagaatacctccagctgatggtttatgtaaccaaaacctctatcaaaatcccatcatctcacaccctgatgaaaggtggctccacaaagtactggagtgggaatagcgagttccacttttatagcattaacgtggggggattctttaagctgcgatccggggaagagataagtatcgaggtgagtaatccttctcttctggacccagatcaggacgctacttactttggagccttcaaagtcagagatatcgactag

SEQ ID NO: 226608 - DNA, 735 bp, Artificial Sequence
  derived and/or modified sequence
atggacccaaacaggatcagcgaggatggcactcattgtatctatcggatactgaggttgcacgagaatgccgatttccaggatacaacccttgagagccaagacacaaagcttattccagattcatgtaggcgcatcaagcaggcatttcaaggggcagtccaaaaagagctgcagcatattgtcggaagccagcatatccgagcagaaaaggccatggtggatgggtcatggcttgatctcgccaaacgctcaaaactggaagcccagccgttcgctcatctgaccattaatgctactgacatcccgtctggctcccacaaggtatccctgtcaagttggtaccatgacagaggatgggcaaagatctcaaacatgactttcagcaatggtaaactgatcgtgaatcaagatggattttactacctttacgcaaatatctgttttagacatcacgagacctctggcgacttagcaaccgagtatttacagttgatggtttacgtcaccaaaacatctataaagatcccctctagccacaccctgatgaagggagggtctacgaaatattggagcggaaactccgagttccatttctatagcatcaacgtggggggtttcttcaagcttagatccggagaagaaatcagcatcgaggtttcaaacccatcgctgctcgaccctgaccaagatgccacatacttcggagcctttaaagtgagggacattgactag

SEQ ID NO: 226609 - DNA, 735 bp, Artificial Sequence
  derived and/or modified sequence
atggacccaaatcggatctctgaagatgggactcactgtatctaccggattttacggctccatgagaacgctgattttcaggatacgactctcgagagtcaggacacgaaactgattccagattcatgccgtagaatcaagcaggcattccaaggcgcagttcagaaagagctgcagcacatcgttggatctcagcatatccgggctgagaaagccatggttgacggaagttggctggacctcgcaaagaggtccaaactggaggcccagccatttgcccacctgactataaacgccaccgacatcccttcaggatcacacaaagtttctctcagctcttggtaccacgataggggctgggccaagatctctaacatgaccttttccaacggaaagctgatagtcaatcaggatggcttttactatctgtatgccaacatctgttttagacatcatgaaacctccggcgacctggcaaccgaatacctccagttaatggtttacgtaaccaagacctcaatcaagattccgtcgagccataccctcatgaagggaggctcaaccaaatattggtctggcaactctgagttccatttctattcaattaacgtggggggattcttcaagctgagatccggggaggaaattagtatcgaagtgtcaaacccgagtctgctcgaccctgaccaagatgccacttatttcggagcctttaaggttcgcgatatcgactag

SEQ ID NO: 226610 - DNA, 735 bp, Artificial Sequence
  derived and/or modified sequence
atggaccccaaccgcatcagtgaagatggcacccactgcatctaccgcatcctgcggctgcatgaaaatgctgacttccaggacaccaccctggagagccaggacaccaagctgatcccagacagctgccgccgcatcaagcaggccttccagggcgctgtgcagaaggagctgcagcacatcgtgggcagccagcacatccgggcagagaaggccatggtggatggctcctggctggacctggccaagaggagcaagctggaggcccagccctttgcccacctgaccatcaatgccacagacatccccagcggcagccacaaggtgtccctgagctcctggtaccatgaccggggctgggccaagatcagcaacatgaccttcagcaatggcaagctgattgtgaaccaggacggcttctactacctgtatgccaacatctgcttccgccaccacgagaccagcggggacctggccacagagtacctgcagctgatggtgtatgtgaccaagaccagcatcaagatccccagcagccacaccctgatgaagggcggcagcaccaagtactggagcggcaacagcgagttccacttctacagcatcaacgtgggcggcttcttcaagctgcggagcggggaggagatcagcattgaggtgagcaaccccagcctgctggaccctgaccaggatgccacctactttggagccttcaaggtgcgggacattgattag

SEQ ID NO: 226611 - DNA, 735 bp, Artificial Sequence
  derived and/or modified sequence
atggaccccaaccggatcagcgaggacggcacccactgcatctaccggattctgcgcctccacgagaacgccgactttcaggacacaacacttgagtcccaggacaccaaactaattccagactcctgcaggcgaattaaacaagcatttcagggggctgtccagaaagagttgcagcacattgttgggagtcaacacatacgcgccgaaaaggccatggttgacggaagttggctcgatctagcgaagcgtagcaaacttgaggcccagccttttgcccacttaaccattaacgctaccgatatacctagcgggagtcataaggtgtccctcagttcctggtaccatgacaggggctgggcaaagatctctaatatgacatttagtaatggcaagctaatcgttaaccaagatggtttctactacttgtacgccaatatatgttttaggcatcatgaaacatcaggggacctggccaccgagtacctgcagctgatggtgtacgtcactaagaccagcatcaagatcccctcctcccacacacttatgaagggcggtagcactaaatattggagtgggaacagcgaattccatttctactcgatcaacgtagggggtttttttaagctgcggtcgggagaggaaatctccattgaggtgagcaacccatctctgctcgatccagatcaagatgcaacttacttcggtgcctttaaagtgcgagatattgactag

SEQ ID NO: 226612 - DNA, 735 bp, Artificial Sequence
  derived and/or modified sequence
atggaccccaaccggatcagcgaggacggcacccactgcatctaccggatccttaggttacacgagaatgctgatttccaggacacaactttggagtctcaggacacgaaactcataccggatagctgccgacgcataaaacaggcatttcagggggccgtccagaaagagctgcagcacatcgtagggtcccagcatattagagcagaaaaggctatggtggacgggagctggctggatctcgcgaagagatcaaaactcgaggcccagccatttgcccatcttactatcaacgcaacagatatccccagtggctcacacaaggtgtccctgtcgtcttggtaccacgatagggggtgggctaagatctctaacatgaccttctcaaatggcaaattgattgtgaaccaggacgggttttactatctatatgccaatatctgctttaggcaccatgagaccagcggggaccttgcgacagaatatcttcagctgatggtatacgtgaccaagacttcaatcaagattcctagttctcatactctgatgaagggtgggtccactaaatattggtccggaaacagcgaatttcacttctattctattaacgtgggtggcttttttaagctgagatcaggtgaggagatctctatcgaggtatcaaatccctctttgctggatcccgaccaggacgcaacctatttcggcgcatttaaagtccgagacatcgactag

SEQ ID NO: 226613 - DNA, 735 bp, Artificial Sequence
  derived and/or modified sequence
atggaccccaaccggatcagcgaggacggcacccactgcatctaccggattcttcggctgcacgagaatgctgactttcaggacaccaccctggaaagccaagacaccaaattgattcccgactcctgcagacgcataaagcaggcttttcagggggcagttcagaaggagctgcaacatatcgttgggagccagcatatccgagcagaaaaggccatggtcgatggcagctggctggacctggccaagcggtcgaaacttgaggctcagccgttcgctcatctcacaataaatgctacagacataccttcaggcagtcacaaagtaagcctgtccagctggtaccatgatagggggtgggcaaaaattagcaacatgaccttcagtaatgggaaacttatcgtgaatcaagatggattttactacctctacgcaaatatttgtttccggcatcacgagacgtctggagatctagccacagaatatctccagctgatggtctatgttaccaagacctccattaagatcccctcaagccacaccctgatgaagggcggctcgaccaaatattggagtggaaattctgaattccacttctactcgatcaacgtcggaggattttttaagctgcggtcaggcgaagagatctctatcgaggtatctaacccctccctgcttgaccccgatcaggatgccacctattttggtgctttcaaagtcagggatatcgactag

SEQ ID NO: 226614 - DNA, 735 bp, Artificial Sequence
  derived and/or modified sequence
atggaccccaaccggatcagcgaggacggcacccactgcatctaccgcatactaaggctccacgagaatgcggacttccaagacaccactctagaaagccaggataccaaactgatcccagacagttgtcgccgtataaaacaggccttccagggagctgtgcagaaggagctccagcatatcgttggatcacagcacatacgggcagagaaagcaatggtggatgggagttggcttgacctggcgaagcgatccaagctagaggctcagccgtttgctcacctcaccattaatgcaacagacatcccttcggggtcccataaagtatcactttccagctggtaccacgacaggggctgggcgaagatcagcaacatgacctttagcaacggaaagctgattgtcaatcaggatggtttctactacctgtatgctaatatctgctttcggcaccacgaaacttccggagaccttgccacagaatatctgcaactcatggtctacgtgaccaagacctcaattaaaattcctagcagtcacacccttatgaagggcggatctacaaagtattggagtggaaacagcgagttccacttttatagtattaatgtggggggattcttcaagctccgctcgggggaagagatctctatcgaagtgtccaacccgtcacttctcgatcctgaccaggatgctacctatttcggagcatttaaagttcgggatattgattag

SEQ ID NO: 226615 - DNA, 735 bp, Artificial Sequence
  derived and/or modified sequence
atggaccctaacagaatcagcgaggatgggacacattgcatctaccgcatactccgcctccatgagaacgcagacttccaggacacgacactggagagccaggataccaaactgattcccgactcatgcaggagaatcaagcaggcgtttcagggcgctgtgcaaaaagaattacagcatatagtaggcagtcagcatattcgcgcagaaaaagccatggtagacggttcttggctggatttggccaaaagatcaaaacttgaggctcagccttttgcacacctgactattaatgccaccgatatcccaagcgggtctcacaaagtgtccctatctagctggtaccatgataggggctgggccaaaatttccaatatgactttttccaacgggaagctgattgtcaaccaagacggattttattatttatacgccaatatctgtttccgccatcacgaaacctccggggacctcgcaaccgaatacctgcagctgatggtatatgtgaccaagactagcataaaaataccgagctcacataccctgatgaagggagggtccaccaaatactggtctgggaacagtgaattccacttctattccattaacgtcggcggtttcttcaagctgaggagcggcgaagagatatcaatcgaggtatcaaacccctccctgctggaccctgatcaggacgcgacttatttcggagcttttaaggttcgtgacatcgactag

SEQ ID NO: 226616 - DNA, 735 bp, Artificial Sequence
  derived and/or modified sequence
atggatccaaatcgcatctcagaggatgggactcattgtatctataggatcctgaggctccacgagaacgcagatttccaagataccacacttgagtcccaagataccaaactaatccctgactcatgtagacgaatcaagcaagctttccagggcgcagtccagaaggaactccagcacatcgtcggatcacagcatattagagccgagaaggccatggtcgacgggtcttggctggacctggccaaaagatcgaaactggaagctcagccattcgcacacctcaccatcaacgcgaccgatattccctctggtagtcacaaagtttctttaagttcatggtaccacgatcgtggctgggcaaaaatatctaacatgacattctccaacgggaagctgatagtgaaccaggatggcttttactacctgtatgcgaatatctgctttcgacatcatgaaacttcgggagatcttgccaccgagtatctacaactgatggtctacgtgactaagacgtctattaaaatacccagctcacacacccttatgaaggggggttcgaccaagtattggtctgggaacagcgaattccacttctattccattaatgtagggggtttctttaagttgcgcagtggggaggagataagcatcgaagtgtctaacccaagcctcctggacccggatcaagacgcgacttactttggagcctttaaggttagggatattgattag

SEQ ID NO: 226617 - DNA, 735 bp, Artificial Sequence
  derived and/or modified sequence
atggaccccaatcggatcagcgaagacggaacacactgcatctataggatcttacgacttcatgaaaatgctgatttccaggataccaccctggagtcccaagataccaagctcattccagacagctgtcgacgtattaagcaggcatttcaaggagcagttcagaaggagctacagcatatcgtggggtcgcagcacatccgcgcagaaaaggccatggtcgatgggtcctggctggacttagccaagcggagcaaattagaggctcagccctttgctcatctgaccatcaatgccaccgacatcccctccggttctcataaagtgagtctgagttcttggtatcacgacaggggttgggccaagatctccaacatgacattctccaatgggaaactgattgtgaatcaggatggtttttattacctctacgcgaatatctgtttcaggcaccacgaaacatccggggacctggccacagaatacctgcagcttatggtgtatgtgaccaaaacctctatcaagattccttccagccacactctgatgaaaggcggatcaacaaaatattggagcgggaactcggaattccacttttatagcattaatgtcggcggtttttttaaactccgcagtggagaagaaatttctattgaggtctctaatccatctctgctggatcctgatcaggatgccacctactttggtgcctttaaggtccgcgacatagattag

SEQ ID NO: 226618 - DNA, 735 bp, Artificial Sequence
  derived and/or modified sequence
atggacccaaatcgtattagcgaggacgggacccactgtatctatcggatcctgcgactgcatgaaaacgccgactttcaggacacaaccctggaaagtcaggatactaagctgataccagactcctgtcggcgtatcaagcaggcttttcaaggcgcagtgcagaaggagctgcagcacattgtagggtctcagcacataagggccgagaaggccatggtcgacggttcctggctggatcttgcgaaaaggtctaagctggaagctcagcccttcgcacacctgacgatcaatgcaactgatatcccatccggctctcacaaggtgtcattgtcctcgtggtatcatgatcggggttgggccaaaatcagcaacatgacgttctcaaacgggaagctgatcgtaaaccaggacggcttctactacctgtatgctaatatctgctttagacatcacgagaccagcggagacctggccaccgagtatctccaactcatggtgtatgtgactaagacaagcataaaaatcccatctagtcacaccctcatgaaagggggttcaaccaaatattggagcggtaattctgagtttcacttctactccatcaatgtcggcggtttcttcaagttgaggtctggtgaagagattagcatcgaagtgtccaatccatcacttctggaccctgaccaggatgccacctactttggagccttcaaagtaagggacatcgactag

SEQ ID NO: 226619 - DNA, 1520 bp, Artificial Sequence
  derived and/or modified sequence
ctgaaagcaaatggtgtggccgaagctgcctctctggtggcatagctaagaccaagctgcacgcagtgaaaacacagtttgttttcactgacaacaaggcagaatgtgtaccagggatgtgacgtggggaaccaggaagaggacagtctgaggatcattattaaagggactccatccaagaaggtttccagccagaggcaagctgtagccagaagaaaagaatgagagatcacctgaataatagaacagaaactgctgaaatattgaacacagatctagatcaaatgaaggaacatattcaggatgaagcataaataaaggccaggcgtggtggctcatgcctggaatctcagctctttgggaggccgaggctattctccatctcctgggctccagtgatcctcacgcctcggccacccaaagtgctgggattatagaagtgaaccactgcgcctggcctattgaaggtttttaatcttcagagtttcgactttatcaacaacacttagaagccaccaaagaattgcagatggatcctaatagaatatcagaagatggcactcactgcatttatagaattttgagactccatgaaaatgcagattttcaagacacaactctggagagtcaagatacaaaattaatacctgattcatgtaggagaattaaacaggcctttcaaggagctgtgcaaaaggaattacaacatatcgttggatcacagcacatcagagcagagaaagcgatggtggatggctcatggttagatctggccaagaggagcaagcttgaagctcagccttttgctcatctcactattaatgccaccgacatcccatctggttcccataaagtgagtctgtcctcttggtaccatgatcggggttgggccaagatctccaacatgacttttagcaatggaaaactaatagttaatcaggatggcttttattacctgtatgccaacatttgctttcgacatcatgaaacttcaggagacctagctacagagtatcttcaactaatggtgtacgtcactaaaaccagcatcaaaatcccaagttctcataccctgatgaaaggaggaagcaccaagtattggtcagggaattctgaattccatttttattccataaacgttggtggattttttaagttacggtctggagaggaaatcagcatcgaggtctccaacccctccttactggatccggatcaggatgcaacatactttggggcttttaaagttcgagatatagattgagccccagtttttggagtgttatgtatttcctggatgtttggaaacattttttaaaacaagccaagaaagatgtatataggtgtgtgagactactaagaggcatggccccaacggtacacgactcagtatccatgctcttgaccttgtagagaacacgcgtatttacagccagtgggagatgttagactcatggtgtgttacacaatggtttttaaattttgtaatgaattcctagaattaaaccagattggagcaa

SEQ ID NO: 226620 - DNA, 2135 bp, Artificial Sequence
  derived and/or modified sequence
acagatcacctgaataatagaacagaaactgctgaaatattgaacacagatctagatcaaatgaaggaacatattcaggatgaagcataaataaaggccaggcgtggtggctcatgcctggaatctcagctctttgggaggccgaggctattctccatctcctgggctccagtgatcctcacgcctcggccacccaaagtgctgggattatagaagtgaaccactgcgcctggcctattgaaggtttttaatcttcagagtttcgactttatcaacaacacttagaagccaccaaagaattgcagatggatcctaatagaatatcagaagatggcactcactgcatttatagaattttgagactccatgaaaatgcagattttcaagacacaactctggagagtcaagatacaaaattaatacctgattcatgtaggagaattaaacaggcctttcaaggagctgtgcaaaaggaattacaacatatcgttggatcacagcacatcagagcagagaaagcgatggtggatggctcatggttagatctggccaagaggagcaagcttgaagctcagccttttgctcatctcactattaatgccaccgacatcccatctggttcccataaagtgagtctgtcctcttggtaccatgatcggggttgggccaagatctccaacatgacttttagcaatggaaaactaatagttaatcaggatggcttttattacctgtatgccaacatttgctttcgacatcatgaaacttcaggagacctagctacagagtatcttcaactaatggtgtacgtcactaaaaccagcatcaaaatcccaagttctcataccctgatgaaaggaggaagcaccaagtattggtcagggaattctgaattccatttttattccataaacgttggtggattttttaagttacggtctggagaggaaatcagcatcgaggtctccaacccctccttactggatccggatcaggatgcaacatactttggggcttttaaagttcgagatatagattgagccccagtttttggagtgttatgtatttcctggatgtttggaaacattttttaaaacaagccaagaaagatgtatataggtgtgtgagactactaagaggcatggccccaacggtacacgactcagtatccatgctcttgaccttgtagagaacacgcgtatttacagccagtgggagatgttagactcatggtgtgttacacaatggtttttaaattttgtaatgaattcctagaattaaaccagattggagcaattacggggtgaccttatgagaaactgcatgtgggctatgggaggggttggtccctggtcatgtgccccttcgcagctgaagtggagagggtgtcatctagcgcaattgaaggatcatctgaaggggcaaattcttttgaattgttacatcatgctggaacctgcaaaaaatactttttctaatgaggagagaaaatatatgtatttttatataatatctaaagttatatttcagatgtaatgttttctttgcaaagtattgtaaattatatttgtgctatagtatttgattcaaaatatttaaaaatgtcttgctgttgacatatttaatgttttaaatgtacagacatatttaactggtgcactttgtaaattccctggggaaaacttgcagctaaggaggggaaaaaaatgttgtttcctaatatcaaatgcagtatatttcttcgttctttttaagttaatagattttttcagacttgtcaagcctgtgcaaaaaaattaaaatggatgccttgaataataagcaggatgttggccaccaggtgcctttcaaatttagaaactaattgactttagaaagctgacattgccaaaaaggatacataatgggccactgaaatctgtcaagagtagttatataattgttgaacaggtgtttttccacaagtgccgcaaattgtaccttttttgttttttcaaaatagaaaagttattagtggtttatcagcaaaaaagtccaattttaatttagtaaatgttatcttatactgtacaataaaaacattgcctttgaatgttaattttttggtacaaaaataaatttatatgaaaacctgc

SEQ ID NO: 226621 - protein, 397 aa, Artificial Sequence
  derived and/or modified sequence
LEVRPKESWNHADFVHCEDTESVPGKPSVNADEEVGGPQICRVCGDKATGYHFNVMTCEGCKGFFRRAMKRNARLRCPFRKGACEITRKTRRQCQACRLRKCLESGMKKEMIMSDEAVEERRALIKRKKSERTGTQPLGVQGLTEEQRMMIRELMDAQMKTFDTTFSHFKNFRVSLQLRGEDGSVWNYKPPADSGGKEIFSLLPHMADMSTYMFKGIISFAKVISYFRDLPIEDQISLLKGAAFELCQLRFNTVFNAETGTWECGRLSYCLEDTAGGFQQLLLEPMLKFHYMLKKLQLHEEEYVLMQAISLFSPDRPGVLQHRVVDQLQEQFAITLKSYIECNRPQPAHRFLFLKIMAMLTELRSINAQHTQRLLRIQDIHPFATPLMQELFGITGS

SEQ ID NO: 226622 - DNA, 4335 bp, Artificial Sequence
  derived and/or modified sequence
ttcttaaccctttccagctttcccaccctctttggctttagccatggccttctgatctgtgtttctcaggggacctgcaggccccagatatagccccatgctgtcctcctaccccagagcacactgttcaggctacttccactggtactgaaatccagtatttcacttactctttttctttccaatatcctcatgacattcaatatttcacttactctaggtcctccctgcctaaggcccaagtcaactttctgtccagtgggatttgtaatccaatacctcctagccctagcagaatcccatgtggataatcagaaatgtgactggaaaaaggacagagctctatggctgtgggtcccagtccccactgctggcagtaagtccccagcagtgagctgtgtaagcaccttacattctgcgcttggttgaaaacagcaaggcaagcatccacttgagaaatgtcaacccctaggaaatcccagcctcaagtctttctcatcccttgggaagtgcaaattggatagagaagaaaccaattaaaaacaaaacaaacaaatcatacttagatattctggcttttctcaccagggctggattaaagcatgtacttcaaaataataacaacttaagtcaataaataaatgtaaggaagtccaaatgttcacctgaagacaactgtggtcattttttggcaatcccaggttctcttttctacctgtttgctcaatcgtggtctccctctccctctcttgttggggcccatgcccctgctttactgttgccagaggcttgtacttgtttgccttttaggtaggagcagttacttccactcccctcacctgccataaagcatctttataaacaaagcaagtagaagaaacacatcctggtatccaccacattcggcttttgttgattctgttcacttgggagcacctgctgctagggaataagaaggttgaggctgaagagtgaggactcttcagctcccctctggcaggacccgggagaggaaagagccctcagctggtccatcctccccactcctggtcagccttctgttctgagatcaaagtggtggggtcacattctcgagaactgtgctcagccccctcatctcacaccctttccctctccctgtgtgcctgcccccctcttacataaccatgctggtgattggcaccgtcataaatcaatactttgctcactttcacatcaagtaacactatccagggaggtggtttcaacaaaggaggaagtataaggagatctaggttcaaattaatgttgcccctagtggtaaaggacagagaccctcagactgatgaaatgcactcagaattacttagacaaagcggatatttgccactctcttccccttttcctgtgtttttgtagtgaagagacctgaaagaaaaaagtagggagaacataatgagaacaaatacggtaatctcttcatttgctagttcaagtgctggacttgggacttaggaggggcaatggagccgcttagtgcctacatctgacttggactgaaatataggtgagagacaagattgtctcatatccggggaaatcataacctatgactaggacgggaagaggaagcactgcctttacttcagtgggaatctcggcctcagcctgcaagccaagtgttcacagtgagaaaagcaagagaataagctaatactcctgtcctgaacaaggcagcggctccttggtaaagctactccttgatcgatcctttgcaccggattgttcaaagtggaccccaggggagaagtcggagcaaagaacttaccaccaagcagtccaagaggcccagaagcaaacctggaggtgagacccaaagaaagctggaaccatgctgactttgtacactgtgaggacacagagtctgttcctggaaagcccagtgtcaacgcagatgaggaagtcggaggtccccaaatctgccgtgtatgtggggacaaggccactggctatcacttcaatgtcatgacatgtgaaggatgcaagggctttttcaggagggccatgaaacgcaacgcccggctgaggtgccccttccggaagggcgcctgcgagatcacccggaagacccggcgacagtgccaggcctgccgcctgcgcaagtgcctggagagcggcatgaagaaggagatgatcatgtccgacgaggccgtggaggagaggcgggccttgatcaagcggaagaaaagtgaacggacagggactcagccactgggagtgcaggggctgacagaggagcagcggatgatgatcagggagctgatggacgctcagatgaaaacctttgacactaccttctcccatttcaagaatttccgggtctctctgcagctgcggggggaggatggcagtgtctggaactacaaacccccagccgacagtggcgggaaagagatcttctccctgctgccccacatggctgacatgtcaacctacatgttcaaaggcatcatcagctttgccaaagtcatctcctacttcagggacttgcccatcgaggaccagatctccctgctgaagggggccgctttcgagctgtgtcaactgagattcaacacagtgttcaacgcggagactggaacctgggagtgtggccggctgtcctactgcttggaagacactgcaggtggcttccagcaacttctactggagcccatgctgaaattccactacatgctgaagaagctgcagctgcatgaggaggagtatgtgctgatgcaggccatctccctcttctccccagaccgcccaggtgtgctgcagcaccgcgtggtggaccagctgcaggagcaattcgccattactctgaagtcctacattgaatgcaatcggccccagcctgctcataggttcttgttcctgaagatcatggctatgctcaccgagctccgcagcatcaatgctcagcacacccagcggctgctgcgcatccaggacatacacccctttgctacgcccctcatgcaggagttgttcggcatcacaggtagctgagcggctgcccttgggtgacacctccgagaggcagccagacccagagccctctgagccgccactcccgggccaagacagatggacactgccaagagccgacaatgccctgctggcctgtctccctagggaattcctgctatgacagctggctagcattcctcaggaaggacatgggtgccccccacccccagttcagtctgtagggagtgaagccacagactcttacgtggagagtgcactgacctgtaggtcaggaccatcagagaggcaaggttgccctttccttttaaaaggccctgtggtctggggagaaatccctcagatcccactaaagtgtcaaggtgtggaagggaccaagcgaccaaggatgggccatctggggtctatgcccacatacccacgtttgttcgcttcctgagtcttttcattgctacctctaatagtcctgtctcccacttcccactcgttcccctcctcttccgagctgctttgtgggctccaggcctgtactcatcggcaggcgcatgagtatctgtgggagtcctctagagagatgagaagccaggaggcctgcaccaaatgtcagaagcttggcatgacctcattccggccacatcattctgtgtctctgcatccatttgaacacattattaagcaccgataataggtagcctgctgtggggtatacagcattgactcagatatagatcctgagctcacagagtttatagttaaaaaaacaaacagaaacacaaacaatttggatcaaaaggagaaatgataagtgacaaaagcagcacaaggaatttccctgtgtggatgctgagctgtgatggcgggcactgggtacccaagtgaaggttcccgaggacatgagtctgtaggagcaagggcacaaactgcagctgtgagtgcgtgtgtgtgatttggtgtaggtaggtctgtttgccacttgatggggcctgggtttgttcctggggctggaatgctgggtatgctctgtgacaaggctacgctgacaatcagttaaacacaccggagaagaaccatttacatgcaccttatatttctgtgtacacatctattctcaaagctaaagggtatgaaagtgcctgccttgtttatagccacttgtgagtaaaaatttttttgcattttcacaaattatactttatataaggcattccacacctaagaactagttttgggaaatgtagccctgggtttaatgtcaaatcaaggcaaaaggaattaaataatgtacttttggctaaaaaaaaaaaaaaaaaaaaaaaaaaaaaa

SEQ ID NO: 226623 - DNA, 1194 bp, Artificial Sequence
  derived and/or modified sequence
ttggaggtgcgtcccaaagaaagctggaaccacgccgacttcgtacactgcgaagacacggaaagcgtgcctggaaaaccttcagtgaacgcggacgaggaagtgggtggcccacagatctgccgggtgtgcggtgacaaggccactgggtaccacttcaatgttatgacttgcgagggatgcaaaggatttttccggagggctatgaaaaggaacgctcggttgcggtgtccattcaggaagggagcatgcgaaatcacacggaaaactagaagacagtgtcaggcctgcaggctgcgtaagtgtttggagagtgggatgaagaaagaaatgataatgagtgacgaagccgtcgaggagcggcgcgccctcattaaacgaaagaagtcagagcggaccggcacccagccactaggagtccagggcctcactgaggagcagagaatgatgatccgcgagttgatggacgcccagatgaagacttttgacactacatttagtcactttaaaaatttcagggtgtctctacagctccgaggagaagacggttcagtttggaactataaaccacctgcagacagcggaggaaaggaaatcttctcccttctaccccacatggctgacatgtcaacatatatgttcaaggggataatctcattcgctaaggtaatttcatactttagagatctccctattgaggatcaaataagtctcctgaagggggctgcatttgagctgtgccaattgagattcaataccgtgtttaacgctgagactggaacatgggagtgcggtcgtctgagttattgtctggaggatacagcaggagggtttcagcaactgctgctcgaaccaatgctgaagtttcattatatgctcaagaagttgcaattgcacgaggaagaatacgtgctgatgcaggctatttcactctttagccccgatagacccggggtactacagcatcgggtggtggaccagctgcaagagcagttcgcgatcacacttaagtcctatattgagtgcaatcgaccccaacccgcccatcgatttctttttctgaagattatggccatgctcacagaactccgtagtattaacgcccaacatacgcagcgcctgttgcgcattcaagacatccatccttttgctacccctctgatgcaggagctgttcggaatcactggcagctag

SEQ ID NO: 226624 - DNA, 1194 bp, Artificial Sequence
  derived and/or modified sequence
ctggaggtgcggcccaaggagagctggaaccacgccgactttgtgcactgtgaggacacagagagcgtgcctgggaagcccagcgtgaatgctgatgaggaggtgggcggcccccagatctgccgggtgtgtggggacaaggccaccggctaccacttcaacgtgatgacctgtgagggctgcaagggcttcttccggcgggccatgaagagaaatgcccggctgcgctgccccttcagaaaaggagcctgtgagatcaccaggaagacccggcggcagtgccaggcctgccgcctgaggaagtgcctggagagcggcatgaagaaggagatgatcatgtctgatgaagctgtggaggagcggcgggccctgatcaagaggaagaagtctgagaggacaggcacccagcccctgggcgtgcagggcctgacagaggagcagaggatgatgatccgggagctgatggatgcccagatgaagacctttgacaccaccttcagccacttcaagaacttccgggtgtccctgcagctgcggggagaagatggctctgtgtggaactacaagcccccagctgacagcggcggcaaggagatcttcagcctgctgccccacatggctgacatgagcacctacatgttcaagggcatcatcagctttgccaaggtgatctcctacttccgggacctgcccatcgaggaccagatcagcctgctgaagggggccgcctttgagctgtgccagctgcgcttcaacacagtgttcaatgctgagaccggcacctgggagtgtggccgcctgagctactgcctggaggacacagctgggggcttccagcagctgctgctggagcccatgctgaagttccactacatgctgaagaagctgcagctgcacgaggaggagtatgtgctgatgcaggccatcagcctcttctccccagacaggcctggggtgctgcagcaccgggtggtggaccagctgcaggagcagtttgccatcaccctgaagagctacatcgagtgcaaccggccccagcctgcccaccgcttcctgttcctgaagatcatggccatgctgacagagctgcggagcatcaatgcccagcacacccagaggctgctgcgcatccaggacatccacccctttgccacccccctgatgcaggagctgtttggcatcaccggcagctag

SEQ ID NO: 226625 - DNA, 1194 bp, Artificial Sequence
  derived and/or modified sequence
ctggaggtgcggcccaaggagagctggaaccacgccgacttcgtgcattgtgaggatacagagtcggtccccggcaagcctagcgttaacgccgacgaggaagtcggaggcccgcagatctgtagagtctgtggagacaaagccaccggctaccacttcaatgttatgacttgcgaggggtgcaaaggcttcttcagaagagccatgaaacgcaatgccagactgcgctgcccttttcggaaaggcgcctgtgagattacacgtaagacgcggcggcagtgccaggcctgcagactcagaaaatgtctggagtcaggcatgaaaaaggagatgattatgtcagacgaggcagtcgaagagagacgggccttgattaagcggaaaaagtctgagagaacaggcacccaacctctaggtgtccaaggcctcacggaagaacaacgaatgatgattagggaattgatggatgcccagatgaaaacctttgatactacatttagccacttcaaaaacttcagggtctctctgcagcttcgcggtgaggacggttccgtgtggaattataagcctcccgctgatagcggaggcaaggagatcttttctctgctgcctcatatggcagatatgagcacttatatgttcaagggaataataagcttcgccaaggtcatctcctacttcagggaccttcctatcgaagatcagataagcctgttgaagggtgcagcttttgaactttgccagctgagatttaatactgtgtttaacgccgagacaggcacatgggagtgcggcagacttagctattgcttagaggatactgccggcgggttccagcagttgctcctcgagcccatgctgaaatttcactacatgctgaaaaaactgcagttgcacgaagaggagtacgttttgatgcaggccattagtttattcagtccggatagacccggggtgctgcagcaccgagtagtggaccaactgcaagagcaattcgccatcactctaaagagttatattgagtgcaaccggccccagccggcacatagattcttgtttctgaagattatggcaatgctgaccgagctgcggagcatcaatgcccagcatactcagcgtctgcttaggatccaggatatacatccatttgccactcccctgatgcaggagctattcgggataaccggttcctag

SEQ ID NO: 226626 - DNA, 4306 bp, Artificial Sequence
  derived and/or modified sequence
ttcttaaccctttccagctttcccaccctctttggctttagccatggccttctgatctgtgtttctcaggggacctgcaggccccagatatagccccatgctgtcctcctaccccagagcacactgttcaggctacttccactggtactgaaatccagtatttcacttactctttttctttccaatatcctcatgacattcaatatttcacttactctaggtcctccctgcctaaggcccaagtcaactttctgtccagtgggatttgtaatccaatacctcctagccctagcagaatcccatgtggataatcagaaatgtgactggaaaaaggacagagctctatggctgtgggtcccagtccccactgctggcagtaagtccccagcagtgagctgtgtaagcaccttacattctgcgcttggttgaaaacagcaaggcaagcatccacttgagaaatgtcaacccctaggaaatcccagcctcaagtctttctcatcccttgggaagtgcaaattggatagagaagaaaccaattaaaaacaaaacaaacaaatcatacttagatattctggcttttctcaccagggctggattaaagcatgtacttcaaaataataacaacttaagtcaataaataaatgtaaggaagtccaaatgttcacctgaagacaactgtggtcattttttggcaatcccaggttctcttttctacctgtttgctcaatcgtggtctccctctccctctcttgttggggcccatgcccctgctttactgttgccagaggcttgtacttgtttgccttttaggtaggagcagttacttccactcccctcacctgccataaagcatctttataaacaaagcaagtagaagaaacacatcctggtatccaccacattcggcttttgttgattctgttcacttgggagcacctgctgctagggaataagaaggttgaggctgaagagtgaggactcttcagctcccctctggcaggacccgggagaggaaagagccctcagctggtccatcctccccactcctggtcagccttctgttctgagatcaaagtggtggggtcacattctcgagaactgtgctcagccccctcatctcacaccctttccctctccctgtgtgcctgcccccctcttacataaccatgctggtgattggcaccgtcataaatcaatactttgctcactttcacatcaagtaacactatccagggaggtggtttcaacaaaggaggaagtataaggagatctaggttcaaattaatgttgcccctagtggtaaaggacagagaccctcagactgatgaaatgcactcagaattacttagacaaagcggatatttgccactctcttccccttttcctgtgtttttgtagtgaagagacctgaaagaaaaaagtagggagaacataatgagaacaaatacggtaatctcttcatttgctagttcaagtgctggacttgggacttaggaggggcaatggagccgcttagtgcctacatctgacttggactgaaatataggtgagagacaagattgtctcatatccggggaaatcataacctatgactaggacgggaagaggaagcactgcctttacttcagtgggaatctcggcctcagcctgcaagccaagtgttcacagtgagaaaagcaagagaataagctaatactcctgtcctgaacaaggcagcggctccttggtaaagctactccttgatcgatcctttgcaccggattgttcaaagtggaccccaggggagaagtcggagcaaagaacttaccaccaagcagtccaagaggcccagaagcaaacctggaggtgagacccaaagaaagctggaaccatgctgactttgtacactgtgaggacacagagtctgttcctggaaagcccagtgtcaacgcagatgaggaagtcggaggtccccaaatctgccgtgtatgtggggacaaggccactggctatcacttcaatgtcatgacatgtgaaggatgcaagggctttttcaggagggccatgaaacgcaacgcccggctgaggtgccccttccggaagggcgcctgcgagatcacccggaagacccggcgacagtgccaggcctgccgcctgcgcaagtgcctggagagcggcatgaagaaggagatgatcatgtccgacgaggccgtggaggagaggcgggccttgatcaagcggaagaaaagtgaacggacagggactcagccactgggagtgcaggggctgacagaggagcagcggatgatgatcagggagctgatggacgctcagatgaaaacctttgacactaccttctcccatttcaagaatttccgggtctctctgcagctgcggggggaggatggcagtgtctggaactacaaacccccagccgacagtggcgggaaagagatcttctccctgctgccccacatggctgacatgtcaacctacatgttcaaaggcatcatcagctttgccaaagtcatctcctacttcagggacttgcccatcgaggaccagatctccctgctgaagggggccgctttcgagctgtgtcaactgagattcaacacagtgttcaatgcggagactggaacctgggagtgtggccggctgtcctactgcttggaagacactgcaggtggcttccagcaacttctactggagcccatgctgaaattccactacatgctgaagaagctgcagctgcatgaggaggagtatgtgctgatgcaggccatctccctcttctccccagaccgcccaggtgtgctgcagcaccgcgtggtggaccagctgcaggagcaattcgccattactctgaagtcctacattgaatgcaatcggccccagcctgctcataggttcttgttcctgaagatcatggctatgctcaccgagctccgcagcatcaatgctcagcacacccagcggctgctgcgcatccaggacatacacccctttgctacgcccctcatgcaggagttgttcggcatcacaggtagctgagcggctgcccttgggtgacacctccgagaggcagccagacccagagccctctgagccgccactcccgggccaagacagatggacactgccaagagccgacaatgccctgctggcctgtctccctagggaattcctgctatgacagctggctagcattcctcaggaaggacatgggtgccccccacccccagttcagtctgtagggagtgaagccacagactcttacgtggagagtgcactgacctgtaggtcaggaccatcagagaggcaaggttgccctttccttttaaaaggccctgtggtctggggagaaatccctcagatcccactaaagtgtcaaggtgtggaagggaccaagcgaccaaggatgggccatctggggtctatgcccacatacccacgtttgttcgcttcctgagtcttttcattgctacctctaatagtcctgtctcccacttcccactcgttcccctcctcttccgagctgctttgtgggctccaggcctgtactcatcggcaggcgcatgagtatctgtgggagtcctctagagagatgagaagccaggaggcctgcaccaaatgtcagaagcttggcatgacctcattccggccacatcattctgtgtctctgcatccatttgaacacattattaagcaccgataataggtagcctgctgtggggtatacagcattgactcagatatagatcctgagctcacagagtttatagttaaaaaaacaaacagaaacacaaacgatttggatcaaaaggagaaatgataagtgacaaaagcagcacaaggaatttccctgtgtggatgctgagctgtgatggcgggcactgggtacccaagtgaaggttcccaaggacatgagtctgtaggagcaagggcacaaactgcagctgtgagtgcgtgtgtgtgatttggtgtaggtaggtctgtttgccacttgatggggcctgggtttgttcctggggctggaatgctgggtatgctctgtgacaaggctacgctgacaatcagttaaacacaccggagaagaaccatttacatgcaccttatatttctgtgtacacatctattctcaaagctaaagggtatgaaagtgcctgccttgtttatagccacttgtgagtaaaaatttttttgcattttcacaaattatactttatataaggcattccacacctaagaactagttttgggaaatgtagccctgggtttaatgtcaaatcaaggcaaaaggaattaaataatgtacttttggcta

SEQ ID NO: 226627 - DNA, 1194 bp, Artificial Sequence
  derived and/or modified sequence
ctggaggtgaggcccaaagagtcttggaatcatgctgactttgttcattgtgaggacaccgaatcagttccaggcaaacctagtgtgaatgctgatgaagaagtgggcggtccacagatctgccgtgtttgtggggataaagccacagggtaccactttaacgtcatgacctgtgaagggtgcaaggggttcttccggcgtgctatgaagcgcaacgccaggctccggtgtccattcagaaagggagcctgtgaaattacccggaaaacccgtagacagtgtcaagcatgccgcttgcggaagtgcttagagtctggcatgaagaaggaaatgatcatgtccgacgaagctgtggaggagcgaagggccctgataaaacggaagaaaagcgagcgcacaggcacacaacccctaggcgttcagggcctgactgaggaacagcggatgatgatccgagagctgatggacgctcaaatgaaaactttcgatactaccttcagtcactttaagaacttcagggtgtccctacagctcaggggtgaggatggatccgtgtggaattacaagccccctgccgactctggaggaaaggaaatcttcagtcttcttcctcatatggccgatatgtccacatatatgtttaagggaattatctcttttgctaaagtcattagctactttcgggatctaccaatcgaggaccaaatctccctgttaaaaggcgcagcatttgaattatgccagctgcgatttaacaccgtgttcaatgccgagaccgggacatgggaatgtggaaggctgtcttactgtctggaggatactgcgggtggttttcagcagctcctgcttgaacccatgttaaagtttcattacatgctcaagaaattgcagttacacgaggaagaatatgttcttatgcaggcaatttctctcttttcacctgataggcccggagtgctccagcatcgtgtcgtcgaccaactgcaagagcaatttgccattactctgaagagctacattgaatgcaatcggcctcagcccgctcatcggtttctgtttttgaagattatggcgatgctgacagagctgcggtcaatcaatgctcagcacacacagcgcctgctcagaatccaggacatccacccttttgccactcccctcatgcaggaattattcggaataacgggttcctag

SEQ ID NO: 226628 - DNA, 1194 bp, Artificial Sequence
  derived and/or modified sequence
ctggaggtgagacccaaggagagctggaaccacgccgacttcgtgcactgcgaggacaccgagagcgtgcccggcaagcccagcgtgaacgccgacgaggaggtgggcggcccccagatctgcagagtgtgcggcgacaaggccaccggctaccacttcaacgtgatgacctgcgagggctgcaagggcttcttcagaagagccatgaagagaaacgccagactgagatgccccttcagaaagggcgcctgcgagatcaccagaaagaccagaagacagtgccaggcctgcagactgagaaagtgcctggagagcggcatgaagaaggagatgatcatgagcgacgaggccgtggaggagagaagagccctgatcaagagaaagaagagcgagagaaccggcacccagcccctgggcgtgcagggcctgaccgaggagcagagaatgatgatcagagagctgatggacgcccagatgaagaccttcgacaccaccttcagccacttcaagaacttcagagtgagcctgcagctgagaggcgaggacggcagcgtgtggaactacaagccccccgccgacagcggcggcaaggagatcttcagcctgctgccccacatggccgacatgagcacctacatgttcaagggcatcatcagcttcgccaaggtgatcagctacttcagagacctgcccatcgaggaccagatcagcctgctgaagggcgccgccttcgagctgtgccagctgagattcaacaccgtgttcaacgccgagaccggcacctgggagtgcggcagactgagctactgcctggaggacaccgccggcggcttccagcagctgctgctggagcccatgctgaagttccactacatgctgaagaagctgcagctgcacgaggaggagtacgtgctgatgcaggccatcagcctgttcagccccgacagacccggcgtgctgcagcacagagtggtggaccagctgcaggagcagttcgccatcaccctgaagagctacatcgagtgcaacagaccccagcccgcccacagattcctgttcctgaagatcatggccatgctgaccgagctgagaagcatcaacgcccagcacacccagagactgctgagaatccaggacatccaccccttcgccacccccctgatgcaggagctgttcggcatcaccggcagctag

SEQ ID NO: 226629 - protein, 408 aa, Artificial Sequence
  derived and/or modified sequence
MRRPRGEPGPRAPRPTEGATCAGPGESCFPSDGPLVCALEQERRLRLPPKPPPPLQPLLRGGQGLEAALSCPRFLRYPRQHLISSLAEARPEELTPHVMVLLAQHLARHRLREPQLLEAIAHFLVVQETQLSSKVVQKLVLPFGRLNYLPLEQQFMPCLERILAREAGVAPLATVNILMSLCQLRCLPFRALHFVFSPGFINYISGTPHALIVRRYLSLLDTAVELELPGYRGPRLPRRQQVPIFPQPLITDRARCKYSHKDIVAEGLRQLLGEEKYRQDLTVPPGYCTDFLLCASSSGAVLPVRTQDPFLPYPPRSCPQGQAASSATTRDPAQRVVLVLRERWHFCRDGRVLLGSRALRERHLGLMGYQLLPLPFEELESQRGLPQLKSYLRQKLQALGLRWGPEGG

SEQ ID NO: 226630 - DNA, 1402 bp, Artificial Sequence
  derived and/or modified sequence
gatagctgcttcgggattggcgtccgggcggctatctaggggctgctgggaagatggcggactcggtggctagccgatgaggaggccgcggggggaacccggcccccgggccccgagaccgactgagggagcgacctgcgcagggcccggggagtcatgctttccatctgatggtcccctggtgtgtgccctggaacaggagcgaaggctccgcctccctccgaagccacctccccctttgcagccccttctccgaggtgggcaagggttggaagctgctctaagctgcccccgttttctgcggtatccacggcagcatctgatcagcagcctggcagaggcaaggccagaggaactgactccccacgtgatggtgctcctggcccagcacctggcccggcaccggttgcgggagccccagcttctggaagccattgcccacttcctggtggttcaggaaacgcaactcagcagcaaggtggtacagaagttggtcctgccctttgggcgactgaactacctgcccctggaacagcagtttatgccctgccttgagaggatcctggctcgggaagcaggggtggcacccctggctacagtcaacatcttgatgtcactgtgccaactgcggtgcctgcccttcagagccctgcactttgttttttcccctggcttcatcaactacatcagtggcacccctcatgctctgattgtgcgtcgctacctctccctgctggacacggccgtggagctggagctcccaggataccggggtccccgccttccccgaaggcagcaagtgcccatctttccccagcctctcatcaccgaccgtgcccgctgcaagtacagtcacaaggacatagtagctgaggggttgcgccagctgctgggggaggagaaataccgccaggacctgactgtgcctccaggctactgcacagacttcctgctgtgcgccagcagctctggtgctgtgcttcccgtgaggacccaggaccccttcctgccatacccaccaaggtcctgcccacagggccaggctgcctctagcgccactactcgagaccctgcccagagggtggtgctggtgttgcgggaacgctggcatttctgccgggacggccgggtgctgctgggctcgagggccctgagggagcggcacctaggcctgatgggctaccagctcctgccgctacccttcgaggaactggagtcccagagaggcctgccccagctcaagagctacctgaggcagaagctccaggccctgggcctgcgctgggggcctgaagggggctgaggggttgatgtggggttcaggatggcccccccatggggggtggatgatttgcactttggttccctgtgttttgatttctcattaaagttcctttccttc

SEQ ID NO: 226631 - DNA, 1227 bp, Artificial Sequence
  derived and/or modified sequence
atgcgtcgccctcgtggcgagcctggacctagagcaccaagacccacagaaggtgcaacatgcgcagggccaggagagagttgtttcccaagcgatggccctcttgtttgtgccctggaacaggagcggagactgcggcttccgcccaaacccccacccccgttacagcccctgctcaggggtggccaaggacttgaggcagccttaagttgcccaaggtttctgagatacccccgtcagcacctgatcagtagtctcgccgaagcacggccagaggagcttactccacatgtgatggtgttattggcacaacacctggctagacacaggctgagggagcctcagttgctcgaggcgatcgctcatttcctagtggtgcaggaaacccagttgtcgtcgaaagttgtgcagaagcttgtcctgccgtttgggcgcctgaactacctgccactagagcagcagttcatgccatgcctggaaagaattctcgctcgagaagcgggggtcgcccctcttgctactgtgaacatattgatgagtctgtgccaactgagatgcctgcccttccgagctctccattttgtgttttctccaggttttattaactacatttctggcacacctcatgccctgatcgtacgacgctacttgtccctattggataccgccgtggagctggagctgccaggctaccgaggacccagactaccaagaaggcagcaggtgcccatctttccgcagcccctgatcactgacagagcccgatgcaaatatagccacaaggacattgtggcggagggtcttcgccagctgctgggggaagagaaataccgtcaggatctcacagtcccaccgggatattgcacggacttcctgctttgcgcatcttcatccggtgctgttctgccagtgagaacacaggatccatttctcccttatccgcccagaagttgccctcaagggcaggctgcatcctcagcaacgactcgggaccccgcccaacgggtcgtgctcgtcctgcgggagagatggcatttctgtcgtgacggacgcgtgctcctcgggagccgggccctcagagaaaggcatctggggttgatgggttatcagctcctcccactgccatttgaagagttagagtcccagcgcggcctacctcaactcaagtcatatttgcgccagaaactgcaggctctgggtctgagatggggacccgaaggcggttag

SEQ ID NO: 226632 - DNA, 1227 bp, Artificial Sequence
  derived and/or modified sequence
atgaggcggcccagaggagagcccggcccccgggccccccggcccacagagggcgccacctgtgccggccctggagagagctgcttccccagtgatggccccctggtgtgtgccctggagcaggagcggcggctgcggctgccccccaagcccccaccacccctgcagcccctgctgcggggcggccagggcctggaggccgccctgagctgcccccgcttcctgcgctacccccggcagcacctgatcagcagcctggccgaggcccggcctgaggagctgacccctcatgtgatggtgctgctggcccagcacctggcccggcaccggctgcgggagccccagctgctggaggccatcgcccacttcctggtggtgcaggagacccagctgagcagcaaggtggtgcagaagctggtgctgcccttcggccgcctgaactacctgcccctggagcagcagttcatgccctgcctggagcgcatcctggcccgggaggccggcgtggcccccctggccaccgtgaacatcctgatgagcctgtgccagctgcgctgcctgcccttccgggccctgcactttgtgttcagccctggcttcatcaactacatcagcggcacccctcatgccctgattgtgcggcgctacctgagcctgctggacacagctgtggagctggagctgcccggctaccggggcccccggctgccccggcggcagcaggtgcccatcttcccccagcccctcatcacagaccgggcccgctgcaagtacagccacaaggacatcgtggccgagggcctgcggcagctgctgggggaggagaagtaccggcaggacctgactgtgcccccaggctactgcacagacttcctgctgtgtgccagcagcagcggggctgtgctgcctgtgaggacccaggaccccttcctgccctacccacccaggagctgcccccagggccaggccgccagcagcgccaccacccgggaccctgcccagagggtggtgctggtgctgcgggagcgctggcacttctgcagagatggccgggtgctgctgggcagccgggccctgcgggagcggcacctgggcctgatgggctaccagctgctgcccctgccctttgaggagctggagagccagaggggcctgccccagctgaagagctacctgcggcagaagctgcaggccctgggcctgcgctggggccctgagggcggctag

SEQ ID NO: 226633 - DNA, 1227 bp, Artificial Sequence
  derived and/or modified sequence
atgcggcggccccggggcgagcccggcccccgggccccccggcccaccgaaggtgccacgtgcgccggcccaggagagtcctgctttccaagtgatggcccattggtttgtgctctagagcaggagcgtcgcctgcgacttcctcccaagcccccgccaccactacagcctctgctacggggtggacaggggctggaggccgcactgagttgccctaggtttttacgctatccccggcagcatcttatcagctcccttgcggaagctaggcctgaagagctaacgccgcacgtcatggtgcttttggcacagcacctcgcgagacataggctccgcgaaccgcaactcctagaagccatcgctcatttcctcgtggtgcaggagacacagctctcatcaaaggtcgtgcagaaattggtactacccttcggcagacttaattatcttcctcttgagcagcaatttatgccttgtctagaacgtatcctagcgcgcgaagcgggcgtcgccccgctggcgacagtgaacattttaatgtcgctgtgccagttaaggtgtctgcccttccgagcattacattttgttttttcaccaggttttattaactatatctccgggaccccccacgcgctgatagtgagacgatatctctctctcctcgacaccgcagtggagctggaactcccaggatacaggggacctcggctgccaaggagacaacaggtgcccatcttcccacagcctctgatcacggaccgggctagatgcaaatattcacataaggacattgtggccgagggcctgcgacaacttttgggcgaagaaaaatacagacaggacttgacagttccccctggttactgtactgacttcttgctttgcgcttccagttccggcgccgtgcttcctgtgcgtacacaggacccttttctgccgtacccacccaggtcctgccctcaaggccaggccgcgtctagcgcgaccaccagagaccctgcccagagggtcgtgctggtgctcagagaacgatggcatttctgccgcgacggaagggtactgctgggatctagggcgttgagagagcgacacttgggcttaatgggctatcagctgcttcccctgccctttgaggagttggagtcccagcgcggcctccctcagttaaagagctatctccgacaaaaactgcaggccctcggcctgcggtgggggccggagggagggtag

SEQ ID NO: 226634 - DNA, 1227 bp, Artificial Sequence
  derived and/or modified sequence
atgcgaaggccccgtggagaacctggacccagagccccacgaccaactgaaggcgcaacatgtgcgggacccggtgagtcctgtttcccaagcgatggtcccctggtctgcgccctcgaacaggaacggcgactccgactgccccctaagccccctcccccactgcaacctcttctgaggggaggccaggggcttgaggctgcattgtcctgcccccgatttctgcggtatcccaggcaacatctcatctcatcccttgccgaagcgcgtcctgaagaacttactccacacgtgatggtcctgcttgcccaacacttagcaagacacagactgagagagcctcagctgctggaagccatcgcccactttcttgtggtccaggaaacccaactgagctccaaggtggtccaaaagctcgtccttccctttggtcggctaaactacctgcctcttgagcagcagtttatgccctgcctcgagcgaatcctggctcgcgaggcaggtgtggccccactcgcaactgtgaacatccttatgagtctctgccagttgagatgtcttcctttcagggcgttacactttgtgttctcacccggtttcattaactatataagcggcacgccgcatgctttaatcgtgcgacgctatctgtccctactcgataccgctgttgagctggaactacccggatacagaggtcctagattaccccgacgccagcaggtgcccatcttcccacaacctttgattacagacagagccagatgtaagtactcacacaaggatatcgtggcagaaggcctgaggcagctgttgggagaagagaagtatcggcaggacctgacggtgcctccgggatactgtaccgatttcctcctctgtgcgtcgtccagcggggctgtgctaccagtgaggacccaagatccctttttgccatacccacccaggtcgtgcccccagggccaggcggcaagcagtgccaccaccagggacccagcacagagagtagtgctggtgcttcgggaacggtggcatttttgtagagatgggagggtgcttctgggcagccgtgccctccgcgagcggcatctgggcctgatggggtatcagctgctgcctctgccattcgaagagctcgaaagccagagagggctgccacaactgaaatcctacttgcggcagaagctgcaggctctgggactgaggtgggggccagaaggaggttag

SEQ ID NO: 226635 - DNA, 1227 bp, Artificial Sequence
  derived and/or modified sequence
atgagaagacccagaggcgagcccggccccagagcccccagacccaccgagggcgccacctgcgccggccccggcgagagctgcttccccagcgacggccccctggtgtgcgccctggagcaggagagaagactgagactgccccccaagccccccccccccctgcagcccctgctgagaggcggccagggcctggaggccgccctgagctgccccagattcctgagataccccagacagcacctgatcagcagcctggccgaggccagacccgaggagctgaccccccacgtgatggtgctgctggcccagcacctggccagacacagactgagagagccccagctgctggaggccatcgcccacttcctggtggtgcaggagacccagctgagcagcaaggtggtgcagaagctggtgctgcccttcggcagactgaactacctgcccctggagcagcagttcatgccctgcctggagagaatcctggccagagaggccggcgtggcccccctggccaccgtgaacatcctgatgagcctgtgccagctgagatgcctgcccttcagagccctgcacttcgtgttcagccccggcttcatcaactacatcagcggcaccccccacgccctgatcgtgagaagatacctgagcctgctggacaccgccgtggagctggagctgcccggctacagaggccccagactgcccagaagacagcaggtgcccatcttcccccagcccctgatcaccgacagagccagatgcaagtacagccacaaggacatcgtggccgagggcctgagacagctgctgggcgaggagaagtacagacaggacctgaccgtgccccccggctactgcaccgacttcctgctgtgcgccagcagcagcggcgccgtgctgcccgtgagaacccaggaccccttcctgccctacccccccagaagctgcccccagggccaggccgccagcagcgccaccaccagagaccccgcccagagagtggtgctggtgctgagagagagatggcacttctgcagagacggcagagtgctgctgggcagcagagccctgagagagagacacctgggcctgatgggctaccagctgctgcccctgcccttcgaggagctggagagccagagaggcctgccccagctgaagagctacctgagacagaagctgcaggccctgggcctgagatggggccccgagggcggctag

SEQ ID NO: 226636 - protein, 226 aa, Artificial Sequence
  derived and/or modified sequence
MFIMGLGDPIPEELYEMLSDHSIRSFDDLQRLLHGDPGEEDGAELDLNMTRSHSGGELESLARGRRSLGSLTIAEPAMIAECKTRTEVFEISRRLIDRTNANFLVWPPCVEVQRCSGCCNNRNVQCRPTQVQLRPVQVRKIEIVRKKPIFKKATVTLEDHLACKCETVAAARPVTRSPGGSQEQRAKTPQTRVTIRTVRVRRPPKGKHRKFKHTHDKTALKETLGA

SEQ ID NO: 226637 - protein, 136 aa, Artificial Sequence
  derived and/or modified sequence
MLSDHSIRSFDDLQRLLHGDPGEEDGAELDLNMTRSHSGGELESLARGRRSLGSLTIAEPAMIAECKTRTEVFEISRRLIDRTNANFLVWPPCVEVQRCSGCCNNRNVQCRPTQVQLRPVQVRKIEIVRKKPIFKK

SEQ ID NO: 226638 - protein, 144 aa, Artificial Sequence
  derived and/or modified sequence
MLSDHSIRSFDDLQRLLHGDPGEEDGAELDLNMTRSHSGGELESLARGRRSLGSLTIAEPAMIAECKTRTEVFEISRRLIDRTNANFLVWPPCVEVQRCSGCCNNRNVQCRPTQVQLRPVQVRKIEIVRKKPIFKKATVTLEDH

SEQ ID NO: 226639 - DNA, 681 bp, Artificial Sequence
  derived and/or modified sequence
atgttcatcatgggcctgggcgaccccatccccgaggagctgtacgagatgctgagcgaccacagcatcagaagcttcgacgacctgcagagactgctgcacggcgaccccggcgaggaggacggcgccgagctggacctgaacatgaccagaagccacagcggcggcgagctggagagcctggccagaggcagaagaagcctgggcagcctgaccatcgccgagcccgccatgatcgccgagtgcaagaccagaaccgaggtgttcgagatcagcagaagactgatcgacagaaccaacgccaacttcctggtgtggcccccctgcgtggaggtgcagagatgcagcggctgctgcaacaacagaaacgtgcagtgcagacccacccaggtgcagctgagacccgtgcaggtgagaaagatcgagatcgtgagaaagaagcccatcttcaagaaggccaccgtgaccctggaggaccacctggcctgcaagtgcgagaccgtggccgccgccagacccgtgaccagaagccccggcggcagccaggagcagagagccaagaccccccagaccagagtgaccatcagaaccgtgagagtgagaagaccccccaagggcaagcacagaaagttcaagcacacccacgacaagaccgccctgaaggagaccctgggcgcctag

SEQ ID NO: 226640 - DNA, 411 bp, Artificial Sequence
  derived and/or modified sequence
atgctgagcgaccacagcatcagaagcttcgacgacctgcagagactgctgcacggcgaccccggcgaggaggacggcgccgagctggacctgaacatgaccagaagccacagcggcggcgagctggagagcctggccagaggcagaagaagcctgggcagcctgaccatcgccgagcccgccatgatcgccgagtgcaagaccagaaccgaggtgttcgagatcagcagaagactgatcgacagaaccaacgccaacttcctggtgtggcccccctgcgtggaggtgcagagatgcagcggctgctgcaacaacagaaacgtgcagtgcagacccacccaggtgcagctgagacccgtgcaggtgagaaagatcgagatcgtgagaaagaagcccatcttcaagaagtag

SEQ ID NO: 226641 - DNA, 435 bp, Artificial Sequence
  derived and/or modified sequence
atgctgagcgaccacagcatcagaagcttcgacgacctgcagagactgctgcacggcgaccccggcgaggaggacggcgccgagctggacctgaacatgaccagaagccacagcggcggcgagctggagagcctggccagaggcagaagaagcctgggcagcctgaccatcgccgagcccgccatgatcgccgagtgcaagaccagaaccgaggtgttcgagatcagcagaagactgatcgacagaaccaacgccaacttcctggtgtggcccccctgcgtggaggtgcagagatgcagcggctgctgcaacaacagaaacgtgcagtgcagacccacccaggtgcagctgagacccgtgcaggtgagaaagatcgagatcgtgagaaagaagcccatcttcaagaaggccaccgtgaccctggaggaccactag

SEQ ID NO: 226642 - DNA, 681 bp, Artificial Sequence
  derived and/or modified sequence
atgtttattatgggcctgggggacccaattcccgaggagctttacgagatgctgagcgaccactccatccgaagcttcgacgacctgcagagactgctccatggggacccaggtgaagaggacggagcagagctcgacctgaatatgacacggtcgcatagtggaggggagctcgaatctctggccaggggccgccggagcctgggcagcctcacgattgctgagcccgcaatgatcgctgagtgcaagacacgcacggaagtcttcgagattagtcgtcgcctcattgatcgcacaaatgctaattttctcgtgtggccaccctgtgttgaagtccagagatgttccggttgttgcaacaacagaaatgttcaatgtagacctacccaggttcagctcaggccggtacaggtgaggaagattgaaatcgtgagaaaaaaacctatattcaagaaagctacggtaacgctcgaggaccatctggcatgtaaatgcgaaactgtggccgcagctagaccagtgacacgctctcctggcggcagccaggaacagagagccaagacccctcaaactagagtcacaatccggaccgttagggtacgccgtccccctaaaggcaagcaccgaaaatttaaacatactcacgacaagacagccctgaaggaaacgctcggagcctag

SEQ ID NO: 226643 - DNA, 411 bp, Artificial Sequence
  derived and/or modified sequence
atgctgtcagaccattccattaggtcatttgacgacctgcagcgactgcttcacggtgatcctggagaggaagacggcgctgaacttgacctcaacatgactcgatcccactcgggtggcgagcttgaaagcctggccaggggccggcgcagccttggctcactcactatcgctgaacccgccatgattgccgagtgtaagacgcgcaccgaggtgttcgagatctctcgcagactcatcgaccgcaccaacgccaattttctcgtctggccgccctgtgtcgaggttcagcggtgtagtggctgttgcaacaaccggaacgtccaatgtcgccctactcaggttcagctgaggccggtgcaggtcaggaaaatcgagatcgttaggaagaagccgatcttcaaaaagtag

SEQ ID NO: 226644 - DNA, 435 bp, Artificial Sequence
  derived and/or modified sequence
atgctttccgaccactctattagaagcttcgatgatctgcagcgcctgctgcacggggaccccggcgaagaagatggggccgaactcgatcttaatatgacaagatcccactctggcggagagctggaatcacttgcgaggggacgaagaagtctgggttccctgacaatcgccgagcctgcaatgattgcagagtgtaaaacccggaccgaagtgttcgaaatcagtcgtcgcctgatagacaggaccaatgcaaactttctggtttggccaccatgtgtcgaggtccagcgctgctccggttgctgcaataatagaaatgtacagtgccggccgacacaagtgcagttacgtcccgtgcaggtgcggaagatagagatagttcggaaaaagccaatctttaaaaaggccactgttacccttgaggatcactag

SEQ ID NO: 226645 - DNA, 681 bp, Artificial Sequence
  derived and/or modified sequence
atgttcatcatgggcctgggggaccccatccctgaggagctgtatgagatgctgagtgaccacagcatccgcagctttgatgacctgcagaggctgctgcacggggaccctggagaggaggatggagctgagctggacctgaacatgaccaggagccacagcggcggggagctggagagcctggcccggggcagaagaagcctgggcagcctgaccatcgccgagcccgccatgattgctgagtgcaagaccaggacagaggtgtttgagatcagccggcggctgattgacaggaccaatgccaacttcctggtgtggccaccctgtgtggaggtgcagcgctgcagcggctgctgcaacaacagaaatgtgcagtgccggcccacccaggtgcagctgcggcctgtgcaggtgaggaagattgaaattgtgaggaagaagcccatcttcaagaaggccaccgtgaccctggaggaccacctggcctgcaagtgtgaaacagtggccgccgcccggcctgtgaccaggagccctgggggcagccaggagcagagggccaagaccccccagaccagggtgaccatcagaacagtgcgggtgagaagaccacccaagggcaagcacaggaagttcaagcacacccatgacaagacagccctgaaggagaccctgggcgcctag

SEQ ID NO: 226646 - DNA, 411 bp, Artificial Sequence
  derived and/or modified sequence
atgctgagtgaccacagcatccgcagctttgatgacctgcagaggctgctgcacggggaccctggagaggaggatggagctgagctggacctgaacatgaccaggagccacagcggcggggagctggagagcctggcccggggcagaagaagcctgggcagcctgaccatcgccgagcccgccatgattgctgagtgcaagaccaggacagaggtgtttgagatcagccggcggctgattgacaggaccaatgccaacttcctggtgtggccaccctgtgtggaggtgcagcgctgcagcggctgctgcaacaacagaaatgtgcagtgccggcccacccaggtgcagctgcggcctgtgcaggtgaggaagattgaaattgtgaggaagaagcccatcttcaagaagtag

SEQ ID NO: 226647 - DNA, 435 bp, Artificial Sequence
  derived and/or modified sequence
atgctgagtgaccacagcatccgcagctttgatgacctgcagaggctgctgcacggggaccctggagaggaggatggagctgagctggacctgaacatgaccaggagccacagcggcggggagctggagagcctggcccggggcagaagaagcctgggcagcctgaccatcgccgagcccgccatgattgctgagtgcaagaccaggacagaggtgtttgagatcagccggcggctgattgacaggaccaatgccaacttcctggtgtggccaccctgtgtggaggtgcagcgctgcagcggctgctgcaacaacagaaatgtgcagtgccggcccacccaggtgcagctgcggcctgtgcaggtgaggaagattgaaattgtgaggaagaagcccatcttcaagaaggccaccgtgaccctggaggaccactag

SEQ ID NO: 226648 - DNA, 681 bp, Artificial Sequence
  derived and/or modified sequence
atgttcatcatgggcctgggcgaccccatccccgaggagctgtacgaaatgctgagcgaccactccatccgaagttttgacgatctccagaggttgctgcacggcgatcccggagaggaggacggagccgaactagatctgaacatgactcgttctcatagtggcggcgaactggagtctctcgcccgaggaagacgctctttaggttctctgacaatcgctgagcccgccatgattgccgaatgtaagacacgcacagaagtgttcgaaatatcaaggagactgatcgaccgaaccaacgcaaatttcctggtgtggcctccttgcgtcgaagtgcaacgatgtagcggctgttgcaacaatcgcaatgtgcagtgtcgccccactcaggtgcagctgcgtcctgtgcaggtcaggaaaatcgagatcgttagaaagaaaccgattttcaagaaggccacagtgactcttgaagatcatctcgcctgcaaatgtgagacagtcgctgccgcacgtcccgtaacccgaagcccaggaggcagccaggagcaacgggctaagactccccagacgcgagtgacaatcaggacagtaagggtgaggagaccgccaaaaggaaagcaccggaagtttaaacacacacacgataagaccgcactgaaagaaacactgggtgcatag

SEQ ID NO: 226649 - DNA, 411 bp, Artificial Sequence
  derived and/or modified sequence
atgctgagcgaccacagcatccggagcttcgacgacctgcagcggctgctgcacggggaccccggtgaggaagatggcgcggagctggacctgaacatgacgaggtcccattcggggggagagctggagtctctagcccgcggaagaagaagtttggggtctctgacaatcgcggaacccgccatgatagcagagtgcaagacacgcaccgaggtatttgagatctcccggcgcctgatcgataggaccaacgcaaacttcctggtgtggcccccatgcgtagaagtgcaaagatgctcggggtgctgcaataaccgaaacgttcagtgtaggcccactcaagtgcagctaaggcccgtccaggtacgcaagattgaaattgtgaggaaaaagccgatttttaaaaaatag

SEQ ID NO: 226650 - DNA, 435 bp, Artificial Sequence
  derived and/or modified sequence
atgctgagcgaccacagcatccggagcttcgacgacctgcagcggttgctacatggcgacccaggtgaggaagacggggcagagctggacctgaacatgacacggtcccattccggaggtgagcttgagagcctcgccagagggcgccgttctcttggttctctgacaattgcggagcctgcaatgattgcagagtgcaagacgcgtacagaagtgttcgagatttccaggcgtctgatagatcggacaaatgctaactttttggtctggccaccctgcgtggaagtgcagcgatgttcaggctgttgcaacaaccgaaatgtccaatgccggcctactcaggtgcaactcaggccagtgcaggttcgtaagattgagatcgtcaggaagaaaccaatttttaagaaggccactgtcacgctcgaagaccattag

SEQ ID NO: 226651 - DNA, 681 bp, Artificial Sequence
  derived and/or modified sequence
atgtttatcatgggtctgggtgatccaatcccagaggagttgtacgagatgctgtcggatcattccattcggtcctttgacgatttgcaaagactgctccatggagatcccggagaagaagatggggctgagctggacctaaatatgaccagaagccatagtgggggtgagctggagtcactcgcacgaggcaggagatccctgggatccctcactattgctgagccagcaatgattgcggagtgcaagactagaactgaggtgttcgagatcagccggaggctgatagaccggacaaacgcgaattttctggtgtggccaccttgcgtggaggtgcagcgctgctctgggtgttgtaacaatcgaaatgtgcagtgtagacccactcaggtgcaactcagaccagttcaagttaggaagatcgaaatcgtgagaaaaaagccaatctttaagaaggctacagtaacgttagaggatcaccttgcatgcaagtgcgagacagtcgcagccgcacggcctgtcactcgaagccctggtggctcacaggaacagcgagctaagacaccacagactcgtgttaccatccgaaccgtgcgcgtaaggaggccgcctaagggcaagcatagaaagtttaagcacacccacgataagacagcactgaaagaaacccttggggcatag

SEQ ID NO: 226652 - DNA, 411 bp, Artificial Sequence
  derived and/or modified sequence
atgttgagcgaccacagcatcaggtctttcgacgacctgcagagattgctgcacggcgaccccggtgaggaagatggggctgagctggacctcaatatgactaggagtcatagtgggggtgaacttgagagtctagcccgagggagacggtctctggggagcctgaccatcgctgagcctgccatgattgctgaatgcaagacccgtaccgaggtgttcgaaatatctaggcggctcatcgaccgaactaatgcaaattttctcgtctggccaccatgtgtcgaggtgcaaagatgtagtggctgctgtaataaccgcaatgtgcaatgtcgacctactcaagttcagctccgccctgtgcaggtgcgcaagatagaaatcgtgcgaaagaagccgattttcaaaaagtag

SEQ ID NO: 226653 - DNA, 435 bp, Artificial Sequence
  derived and/or modified sequence
atgctgtcagaccactcaattcgtagctttgatgatctccagaggctgttacacggagaccccggagaggaagatggggctgagctggatctaaacatgacccgaagccactctggaggagaattagaatccttggcccgagggagaaggtcattggggtctttaacaatagctgagcccgcaatgatcgccgaatgcaaaaccaggacagaagtttttgagatatcaaggagattaattgaccgaactaatgcaaactttcttgtttggccgccatgtgtggaggtgcaacgatgttccgggtgctgtaataataggaacgtccagtgccgccctacacaagtgcagctgaggcccgtgcaggtccgtaagatagagatcgtgcgaaaaaagccaattttcaagaaagccaccgtcaccctggaggaccactag

SEQ ID NO: 226654 - DNA, 681 bp, Artificial Sequence
  derived and/or modified sequence
atgtttattatgggattaggtgaccccatacctgaagagttgtacgagatgctgagcgatcatagcattagaagttttgacgacctccagcgactgcttcatggggatccaggtgaggaggatggggcagaattggatttaaatatgactcgatcacactctggaggagagctggagtccctggcccggggacgccggtcccttggctcactcactattgccgagccagcaatgatcgctgagtgcaaaaccaggactgaggttttcgagatctcccggcgactgatagacagaactaacgcaaactttctcgtgtggccgccatgcgtggaggtccaacgatgttccggatgctgcaataataggaacgtgcagtgtcgtccaactcaggttcagcttcgaccggtacaggttcgcaagattgagattgtccgcaaaaagcctatcttcaagaaagcaacagtgactctagaggatcacttagcctgtaaatgcgaaacagtcgccgctgctaggcccgttactcgatctccagggggttcccaggagcaacgggcgaagacaccacagacccgcgtgactattaggactgttagagtaaggcgcccacctaaaggcaaacataggaagttcaaacacacacacgataagactgcactaaaggagacacttggagcctag

SEQ ID NO: 226655 - DNA, 411 bp, Artificial Sequence
  derived and/or modified sequence
atgctttcagatcactctattagatcttttgacgatctccagagactcttgcatggcgatccaggggaagaggatggtgccgagctcgatctgaatatgacaaggagtcacagcggaggagaactggagagtctggctagaggcagacggtcattaggcagcctcactattgctgagccggccatgattgctgagtgtaaaacccggactgaagtcttcgagatctcaaggcgcttaattgaccgcacaaatgccaatttccttgtgtggcccccttgcgtcgaggtgcagaggtgttcaggatgctgtaacaatcgaaacgtgcagtgtaggcccacccaagtccaattacgcccagtccaggtgcgcaaaatcgaaatagtgcgaaagaagcccatctttaagaagtag

SEQ ID NO: 226656 - DNA, 435 bp, Artificial Sequence
  derived and/or modified sequence
atgctttcagatcattctatcaggagtttcgatgacttacaaagattgcttcatggagatcccggagaagaagatggggcagaactggatctgaatatgacccgttcacattcaggtggggagctggaatcgctcgctcgcggaagaagaagtttgggttcactcactatcgccgagccagccatgatcgccgaatgcaagactcgaacggaagtatttgaaatttcacggagacttattgaccgcactaacgccaattttctggtgtggccgccgtgcgtggaggtccagagatgttctggatgttgtaataatagaaatgtgcaatgcaggccgacccaggtccaattgagaccggtacaggtacggaaaatagagatagttaggaagaaacctatatttaaaaaggccaccgtcacgctcgaagaccactag

SEQ ID NO: 226657 - DNA, 681 bp, Artificial Sequence
  derived and/or modified sequence
atgtttatcatgggccttggggatcccattcctgaagaactttacgaaatgctgagcgaccattcaatacgttcattcgatgacctacagagactgttgcacggggacccaggtgaggaggacggggctgaattagacctcaacatgaccagaagtcattccggcggggaactcgagtcattggcacggggtcgaagatcactgggatcccttacgatcgctgagcctgccatgatcgccgaatgtaaaacacgcaccgaggtgttcgagatttcaagacgcctgatcgatcgcacgaacgctaactttctggtgtggcctccctgcgtcgaagtgcagcggtgttccggatgctgcaataaccgcaacgtgcaatgccggccaactcaagtacaattacggcctgtgcaggtgagaaaaatcgaaatagtgagaaagaagcccatctttaaaaaagccacagttactctggaggaccacctggcgtgtaagtgtgaaacagtagccgcagcccgtcccgtcacaaggagccccggtggctcccaggaacaaagagcaaagactcctcagactcgcgttacgattcgcacagtgcgggtacgcagacctcccaaaggtaaacaccgcaagttcaaacacactcacgacaagacagccctcaaagagaccctgggtgcctag

SEQ ID NO: 226658 - DNA, 411 bp, Artificial Sequence
  derived and/or modified sequence
atgctcagcgatcactctattagatctttcgacgatctacagaggctcctacatggcgatccaggcgaagaagatggtgctgaactggaccttaatatgactcgcagccacagcggcggagagttagaatccctggcgcgcggaagacggagtctgggcagcttaaccattgctgagccagccatgatagcagagtgcaagactcgaaccgaggtatttgagatatcccgtcgcctgatcgatcggaccaatgccaattttcttgtgtggcccccttgtgtggaagttcaaagatgcagtggatgctgtaataatagaaacgtgcagtgcagacctacccaggtgcagcttcgccccgtacaagttaggaagatcgagattgtgaggaaaaaaccaatcttcaaaaaatag

SEQ ID NO: 226659 - DNA, 435 bp, Artificial Sequence
  derived and/or modified sequence
atgctttcagatcattctatcaggagtttcgatgacttacaaagattgcttcatggagatcccggagaagaagatggggcagaactggatctgaatatgacccgttcacattcaggtggggagctggaatcgctcgctcgcggaagaagaagtttgggttcactcactatcgccgagccagccatgatcgccgaatgcaagactcgaacggaagtatttgaaatttcacggagacttattgaccgcactaacgccaattttctggtgtggccgccgtgcgtggaggtccagagatgttctggatgctgcaacaaccgaaacgtacaatgccgcccaacacaggtacagctgcgcccagttcaagtaaggaagatcgagattgtgagaaagaagcccatttttaaaaaagcaaccgtcacacttgaggaccactag

SEQ ID NO: 226660 - DNA, 1125 bp, Artificial Sequence
  derived and/or modified sequence
agagagagagagagactgactgagcaggaatggtgagatgtttatcatgggcctcggggaccccattcccgaggagctttatgagatgctgagtgaccactcgatccgctcctttgatgatctccaacgcctgctgcacggagaccccggagaggaagatggggccgagttggacctgaacatgacccgctcccactctggaggcgagctggagagcttggctcgtggaagaaggagcctgggttccctgaccattgctgagccggccatgatcgccgagtgcaagacgcgcaccgaggtgttcgagatctcccggcgcctcatagaccgcaccaacgccaacttcctggtgtggccgccctgtgtggaggtgcagcgctgctccggctgctgcaacaaccgcaacgtgcagtgccgccccacccaggtgcagctgcgacctgtccaggtgagaaagatcgagattgtgcggaagaagccaatctttaagaaggccacggtgacgctggaagaccacctggcatgcaagtgtgagacagtggcagctgcacggcctgtgacccgaagcccggggggttcccaggagcagcgagccaaaacgccccaaactcgggtgaccattcggacggtgcgagtccgccggccccccaagggcaagcaccggaaattcaagcacacgcatgacaagacggcactgaaggagacccttggagcctaggggcatcggcaggagagtgtgtgggcagggttatttaatatggtatttgctgtattgcccccatggggtccttggagtgataatattgtttccctcgtccgtctgtctcgatgcctgattcggacggccaatggtgcttcccccacccctccacgtgtccgtccacccttccatcagcgggtctcctcccagcggcctccggcgtcttgcccagcagctcaagaagaaaaagaaggactgaactccatcgccatcttcttcccttaactccaagaacttgggataagagtgtgagagagactgatggggtcgctctttgggggaaacgggctccttcccctgcacctggcctgggccacacctgagcgctgtggactgtcctgaggagccctgaggacctctcagca

SEQ ID NO: 226661 - DNA, 2396 bp, Artificial Sequence
  derived and/or modified sequence
agagagagagagagactgactgagcaggaatggtgagatgtttatcatgggcctcggggaccccattcccgaggagctttatgagatgctgagtgaccactcgatccgctcctttgatgatctccaacgcctgctgcacggagaccccggagaggaagatggggccgagttggacctgaacatgacccgctcccactctggaggcgagctggagagcttggctcgtggaagaaggagcctgggttccctgaccattgctgagccggccatgatcgccgagtgcaagacgcgcaccgaggtgttcgagatctcccggcgcctcatagaccgcaccaacgccaacttcctggtgtggccgccctgtgtggaggtgcagcgctgctccggctgctgcaacaaccgcaacgtgcagtgccgccccacccaggtgcagctgcgacctgtccaggtgagaaagatcgagattgtgcggaagaagccaatctttaagaaggccacggtgacgctggaagaccacctggcatgcaagtgtgagacagtggcagctgcacggcctgtgacccgaagcccggggggttcccaggagcagcgagccaaaacgccccaaactcgggtgaccattcggacggtgcgagtccgccggccccccaagggcaagcaccggaaattcaagcacacgcatgacaagacggcactgaaggagacccttggagcctaggggcatcggcaggagagtgtgtgggcagggttatttaatatggtatttgctgtattgcccccatggggtccttggagtgataatattgtttccctcgtccgtctgtctcgatgcctgattcggacggccaatggtgcttcccccacccctccacgtgtccgtccacccttccatcagcgggtctcctcccagcggcctccggcgtcttgcccagcagctcaagaagaaaaagaaggactgaactccatcgccatcttcttcccttaactccaagaacttgggataagagtgtgagagagactgatggggtcgctctttgggggaaacgggctccttcccctgcacctggcctgggccacacctgagcgctgtggactgtcctgaggagccctgaggacctctcagcatagcctgcctgatccctgaacccctggccagctctgaggggaggcacctccaggcaggccaggctgcctcggactccatggctaagaccacagacgggcacacagactggagaaaacccctcccacggtgcccaaacaccagtcacctcgtctccctggtgcctctgtgcacagtggcttcttttcgttttcgttttgaagacgtggactcctcttggtgggtgtggccagcacaccaagtggctgggtgccctctcaggtgggttagagatggagtttgctgttgaggtggctgtagatggtgacctgggtatcccctgcctcctgccaccccttcctccccacactccactctgattcacctcttcctctggttcctttcatctctctacctccaccctgcattttcctcttgtcctggcccttcagtctgctccaccaaggggctcttgaaccccttattaaggccccagatgatcccagtcactcctctctagggcagaagactagaggccagggcagcaagggacctgctcatcatattccaacccagccacgactgccatgtaaggttgtgcagggtgtgtactgcacaaggacattgtatgcagggagcactgttcacatcatagataaagctgatttgtatatttattatgacaatttctggcagatgtaggtaaagaggaaaaggatccttttcctaattcacacaaagactccttgtggactggctgtgcccctgatgcagcctgtggcttggagtggccaaataggagggagactgtggtaggggcagggaggcaacactgctgtccacatgacctccatttcccaaagtcctctgctccagcaactgcccttccaggtgggtgtgggacacctgggagaaggtctccaagggagggtgcagccctcttgcccgcacccctccctgcttgcacacttccccatctttgatccttctgagctccacctctggtggctcctcctaggaaaccagctcgtgggctgggaatgggggagagaagggaaaagatccccaagaccccctggggtgggatctgagctcccacctcccttcccacctactgcactttcccccttcccgccttccaaaacctgcttccttcagtttgtaaagtcggtgattatatttttgggggctttccttttattttttaaatgtaaaatttatttatattccgtatttaaagttgtaaaaaaaaataaccacaaaacaaaaccaaatgaaaaaaaaaaaaaaaaaa

SEQ ID NO: 226662 - RNA, 681 nt, Artificial Sequence
  derived and/or modified sequence
auguuuauuaugggauuaggugaccccauaccugaagaguuguacgagaugcugagcgaucauagcauuagaaguuuugacgaccuccagcgacugcuucauggggauccaggugaggaggauggggcagaauuggauuuaaauaugacucgaucacacucuggaggagagcuggagucccuggcccggggacgccggucccuuggcucacucacuauugccgagccagcaaugaucgcugagugcaaaaccaggacugagguuuucgagaucucccggcgacugauagacagaacuaacgcaaacuuucucguguggccgccaugcguggagguccaacgauguuccggaugcugcaauaauaggaacgugcagugucguccaacucagguucagcuucgaccgguacagguucgcaagauugagauuguccgcaaaaagccuaucuucaagaaagcaacagugacucuagaggaucacuuagccuguaaaugcgaaacagucgccgcugcuaggcccguuacucgaucuccaggggguucccaggagcaacgggcgaagacaccacagacccgcgugacuauuaggacuguuagaguaaggcgcccaccuaaaggcaaacauaggaaguucaaacacacacacgauaagacugcacuaaaggagacacuuggagccuag

SEQ ID NO: 226663 - RNA, 411 nt, Artificial Sequence
  derived and/or modified sequence
augcuuucagaucacucuauuagaucuuuugacgaucuccagagacucuugcauggcgauccaggggaagaggauggugccgagcucgaucugaauaugacaaggagucacagcggaggagaacuggagagucuggcuagaggcagacggucauuaggcagccucacuauugcugagccggccaugauugcugaguguaaaacccggacugaagucuucgagaucucaaggcgcuuaauugaccgcacaaaugccaauuuccuuguguggcccccuugcgucgaggugcagagguguucaggaugcuguaacaaucgaaacgugcaguguaggcccacccaaguccaauuacgcccaguccaggugcgcaaaaucgaaauagugcgaaagaagcccaucuuuaagaaguag

SEQ ID NO: 226664 - RNA, 435 nt, Artificial Sequence
  derived and/or modified sequence
augcuuucagaucauucuaucaggaguuucgaugacuuacaaagauugcuucauggagaucccggagaagaagauggggcagaacuggaucugaauaugacccguucacauucagguggggagcuggaaucgcucgcucgcggaagaagaaguuuggguucacucacuaucgccgagccagccaugaucgccgaaugcaagacucgaacggaaguauuugaaauuucacggagacuuauugaccgcacuaacgccaauuuucugguguggccgccgugcguggagguccagagauguucuggauguuguaauaauagaaaugugcaaugcaggccgacccagguccaauugagaccgguacagguacggaaaauagagauaguuaggaagaaaccuauauuuaaaaaggccaccgucacgcucgaagaccacuag

SEQ ID NO: 226665 - RNA, 681 nt, Artificial Sequence
  derived and/or modified sequence
auguuuaucaugggccuuggggaucccauuccugaagaacuuuacgaaaugcugagcgaccauucaauacguucauucgaugaccuacagagacuguugcacggggacccaggugaggaggacggggcugaauuagaccucaacaugaccagaagucauuccggcggggaacucgagucauuggcacggggucgaagaucacugggaucccuuacgaucgcugagccugccaugaucgccgaauguaaaacacgcaccgagguguucgagauuucaagacgccugaucgaucgcacgaacgcuaacuuucugguguggccucccugcgucgaagugcagcgguguuccggaugcugcaauaaccgcaacgugcaaugccggccaacucaaguacaauuacggccugugcaggugagaaaaaucgaaauagugagaaagaagcccaucuuuaaaaaagccacaguuacucuggaggaccaccuggcguguaagugugaaacaguagccgcagcccgucccgucacaaggagccccgguggcucccaggaacaaagagcaaagacuccucagacucgcguuacgauucgcacagugcggguacgcagaccucccaaagguaaacaccgcaaguucaaacacacucacgacaagacagcccucaaagagacccugggugccuag

SEQ ID NO: 226666 - RNA, 411 nt, Artificial Sequence
  derived and/or modified sequence
augcucagcgaucacucuauuagaucuuucgacgaucuacagaggcuccuacauggcgauccaggcgaagaagauggugcugaacuggaccuuaauaugacucgcagccacagcggcggagaguuagaaucccuggcgcgcggaagacggagucugggcagcuuaaccauugcugagccagccaugauagcagagugcaagacucgaaccgagguauuugagauaucccgucgccugaucgaucggaccaaugccaauuuucuuguguggcccccuuguguggaaguucaaagaugcaguggaugcuguaauaauagaaacgugcagugcagaccuacccaggugcagcuucgccccguacaaguuaggaagaucgagauugugaggaaaaaaccaaucuucaaaaaauag

SEQ ID NO: 226667 - RNA, 435 nt, Artificial Sequence
  derived and/or modified sequence
augcuuucagaucauucuaucaggaguuucgaugacuuacaaagauugcuucauggagaucccggagaagaagauggggcagaacuggaucugaauaugacccguucacauucagguggggagcuggaaucgcucgcucgcggaagaagaaguuuggguucacucacuaucgccgagccagccaugaucgccgaaugcaagacucgaacggaaguauuugaaauuucacggagacuuauugaccgcacuaacgccaauuuucugguguggccgccgugcguggagguccagagauguucuggaugcugcaacaaccgaaacguacaaugccgcccaacacagguacagcugcgcccaguucaaguaaggaagaucgagauugugagaaagaagcccauuuuuaaaaaagcaaccgucacacuugaggaccacuag

SEQ ID NO: 226668 - protein, 496 aa, Artificial Sequence [sequence omitted]

SEQ ID NO: 226669 - protein, 502 aa, Artificial Sequence
  derived and/or modified sequence
MQSEIAMDRMKKIKRQLSMTLRGGRGIDKTNGAPEQIGLDESGGGGGSDPGEAPTRAAPGELRSARGPLSSAPEIVHEDLKMGSDGESDQASATSSDEVQSPVRVRMRNHPPRKISTEDINKRLSLPADIRLPEGYLEKLTLNSPIFDKPLSRRLRRVSLSEIGFGKLETYIKLDKLGEGTYATVYKGKSKLTDNLVALKEIRLEHEEGAPCTAIREVSLLKDLKHANIVTLHDIIHTEKSLTLVFEYLDKDLKQYLDDCGNIINMHNVKLFLFQLLRGLAYCHRQKVLHRDLKPQNLLINERGELKLADFGLARAKSIPTKTYSNEVVTLWYRPPDILLGSTDYSTQIDMWGVGCIFYEMATGRPLFPGSTVEEQLHFIFRILGTPTEETWPGILSNEEFKTYNYPKYRAEALLSHAPRLDSDGADLLTKLLQFEGRNRISAEDAMKHPFFLSLGERIHKLPDTTSIFALKEIQLQKEASLRSSSMPDSGRPAFRVVDTEF

SEQ ID NO: 226670 - protein, 189 aa, Artificial Sequence
  derived and/or modified sequence
MDRMKKIKRQLSMTLRGGRGIDKTNGAPEQIGLDESGGGGGSDPGEAPTRAAPGELRSARGPLSSAPEIVHEDLKMGSDGESDQASATSSDEVQSPVRVRMRNHPPRKISTEDINKRLSLPADIRLPEGYLEKLTLNSPIFDKPLSRRLRRVSLSEIGFGKLETYIKLDKLGEGTYATVYKGKSKLTDN

SEQ ID NO: 226671 - protein, 150 aa, Artificial Sequence
  derived and/or modified sequence
MDRMKKIKRQLSMTLRGGRGIDKTNGAPEQIGLDESGGGGGSDPGEAPTRAAPGELRSARGPLSSAPEIVHEDLKMGSDGESDQASATSSDEVQSPVRVRMRNHPPRKISTEDINKRLSLPADIRLPEGYLEKLTLNSPIFDKPLSRRLR

SEQ ID NO: 226672 - protein, 153 aa, Artificial Sequence
  derived and/or modified sequence
MDRMKKIKRQLSMTLRGGRGIDKTNGAPEQIGLDESGGGGGSDPGEAPTRAAPGELRSARGPLSSAPEIVHEDLKMGSDGESDQASATSSDEVQSPVRVRMRNHPPRKISTEDINKRLSLPADIRLPEGYLEKLTLNSPIFDKPLSRRLRRVS

SEQ ID NO: 226673 - protein, 57 aa, Artificial Sequence
  derived and/or modified sequence
MDRMKKIKRQLSMTLRGGRGIDKTNGAPEQIGLDESGGGGGSDPGEAPTRAAPGELR

SEQ ID NO: 226674 - protein, 448 aa, Artificial Sequence
  derived and/or modified sequence
MDRMKKIKRQLSMTLRSAPEIVHEDLKMGSDGESDQASATSSDEVQSPVRVRMRNHPPRKISTEDINKRLSLPADIRLPEGYLEKLTLNSPIFDKPLSRRLRRVSLSEIGFGKLETYIKLDKLGEGTYATVYKGKSKLTDNLVALKEIRLEHEEGAPCTAIREVSLLKDLKHANIVTLHDIIHTEKSLTLVFEYLDKDLKQYLDDCGNIINMHNVKLFLFQLLRGLAYCHRQKVLHRDLKPQNLLINERGELKLADFGLARAKSIPTKTYSNEVVTLWYRPPDILLGSTDYSTQIDMWGVGCIFYEMATGRPLFPGSTVEEQLHFIFRILGTPTEETWPGILSNEEFKTYNYPKYRAEALLSHAPRLDSDGADLLTKLLQFEGRNRISAEDAMKHPFFLSLGERIHKLPDTTSIFALKEIQLQKEASLRSSSMPDSGRPAFRVVDTEF

SEQ ID NO: 226675 - DNA, 1491 bp, Artificial Sequence
  derived and/or modified sequence
atggacagaatgaagaagatcaagagacagctgagcatgaccctgagaggcggcagaggcatcgacaagaccaacggcgcccccgagcagatcggcctggacgagagcggcggcggcggcggcagcgaccccggcgaggcccccaccagagccgcccccggcgagctgagaagcgccagaggccccctgagcagcgcccccgagatcgtgcacgaggacctgaagatgggcagcgacggcgagagcgaccaggccagcgccaccagcagcgacgaggtgcagagccccgtgagagtgagaatgagaaaccacccccccagaaagatcagcaccgaggacatcaacaagagactgagcctgcccgccgacatcagactgcccgagggctacctggagaagctgaccctgaacagccccatcttcgacaagcccctgagcagaagactgagaagagtgagcctgagcgagatcggcttcggcaagctggagacctacatcaagctggacaagctgggcgagggcacctacgccaccgtgtacaagggcaagagcaagctgaccgacaacctggtggccctgaaggagatcagactggagcacgaggagggcgccccctgcaccgccatcagagaggtgagcctgctgaaggacctgaagcacgccaacatcgtgaccctgcacgacatcatccacaccgagaagagcctgaccctggtgttcgagtacctggacaaggacctgaagcagtacctggacgactgcggcaacatcatcaacatgcacaacgtgaagctgttcctgttccagctgctgagaggcctggcctactgccacagacagaaggtgctgcacagagacctgaagccccagaacctgctgatcaacgagagaggcgagctgaagctggccgacttcggcctggccagagccaagagcatccccaccaagacctacagcaacgaggtggtgaccctgtggtacagaccccccgacatcctgctgggcagcaccgactacagcacccagatcgacatgtggggcgtgggctgcatcttctacgagatggccaccggcagacccctgttccccggcagcaccgtggaggagcagctgcacttcatcttcagaatcctgggcacccccaccgaggagacctggcccggcatcctgagcaacgaggagttcaagacctacaactaccccaagtacagagccgaggccctgctgagccacgcccccagactggacagcgacggcgccgacctgctgaccaagctgctgcagttcgagggcagaaacagaatcagcgccgaggacgccatgaagcaccccttcttcctgagcctgggcgagagaatccacaagctgcccgacaccaccagcatcttcgccctgaaggagatccagctgcagaaggaggccagcctgagaagcagcagcatgcccgacagcggcagacccgccttcagagtggtggacaccgagttctag

SEQ ID NO: 226676 - DNA, 1509 bp, Artificial Sequence
  derived and/or modified sequence
atgcagagcgagatcgccatggacagaatgaagaagatcaagagacagctgagcatgaccctgagaggcggcagaggcatcgacaagaccaacggcgcccccgagcagatcggcctggacgagagcggcggcggcggcggcagcgaccccggcgaggcccccaccagagccgcccccggcgagctgagaagcgccagaggccccctgagcagcgcccccgagatcgtgcacgaggacctgaagatgggcagcgacggcgagagcgaccaggccagcgccaccagcagcgacgaggtgcagagccccgtgagagtgagaatgagaaaccacccccccagaaagatcagcaccgaggacatcaacaagagactgagcctgcccgccgacatcagactgcccgagggctacctggagaagctgaccctgaacagccccatcttcgacaagcccctgagcagaagactgagaagagtgagcctgagcgagatcggcttcggcaagctggagacctacatcaagctggacaagctgggcgagggcacctacgccaccgtgtacaagggcaagagcaagctgaccgacaacctggtggccctgaaggagatcagactggagcacgaggagggcgccccctgcaccgccatcagagaggtgagcctgctgaaggacctgaagcacgccaacatcgtgaccctgcacgacatcatccacaccgagaagagcctgaccctggtgttcgagtacctggacaaggacctgaagcagtacctggacgactgcggcaacatcatcaacatgcacaacgtgaagctgttcctgttccagctgctgagaggcctggcctactgccacagacagaaggtgctgcacagagacctgaagccccagaacctgctgatcaacgagagaggcgagctgaagctggccgacttcggcctggccagagccaagagcatccccaccaagacctacagcaacgaggtggtgaccctgtggtacagaccccccgacatcctgctgggcagcaccgactacagcacccagatcgacatgtggggcgtgggctgcatcttctacgagatggccaccggcagacccctgttccccggcagcaccgtggaggagcagctgcacttcatcttcagaatcctgggcacccccaccgaggagacctggcccggcatcctgagcaacgaggagttcaagacctacaactaccccaagtacagagccgaggccctgctgagccacgcccccagactggacagcgacggcgccgacctgctgaccaagctgctgcagttcgagggcagaaacagaatcagcgccgaggacgccatgaagcaccccttcttcctgagcctgggcgagagaatccacaagctgcccgacaccaccagcatcttcgccctgaaggagatccagctgcagaaggaggccagcctgagaagcagcagcatgcccgacagcggcagacccgccttcagagtggtggacaccgagttctag

SEQ ID NO: 226677 - DNA, 1806 bp, Artificial Sequence
  derived and/or modified sequence
atgagaggcgccagaagagccagaagactgggcagatggctgttcggccccggcatcagaagacacagcgccatcagacccctgtgcgccgccagcagaagagagcacagcgacagcagcagaagacagagagtgagaggccacagaccccagagacccagcagctggcccgccgagagagacgccgccagcgccagcgccaccgccgccgccgccgccagcagcagcagcgccggcggcggccccggccccgccaccatggccgaggtggccagagcccccccccccatcgccatggacagaatgaagaagatcaagagacagctgagcatgaccctgagaggcggcagaggcatcgacaagaccaacggcgcccccgagcagatcggcctggacgagagcggcggcggcggcggcagcgaccccggcgaggcccccaccagagccgcccccggcgagctgagaagcgccagaggccccctgagcagcgcccccgagatcgtgcacgaggacctgaagatgggcagcgacggcgagagcgaccaggccagcgccaccagcagcgacgaggtgcagagccccgtgagagtgagaatgagaaaccacccccccagaaagatcagcaccgaggacatcaacaagagactgagcctgcccgccgacatcagactgcccgagggctacctggagaagctgaccctgaacagccccatcttcgacaagcccctgagcagaagactgagaagagtgagcctgagcgagatcggcttcggcaagctggagacctacatcaagctggacaagctgggcgagggcacctacgccaccgtgtacaagggcaagagcaagctgaccgacaacctggtggccctgaaggagatcagactggagcacgaggagggcgccccctgcaccgccatcagagaggtgagcctgctgaaggacctgaagcacgccaacatcgtgaccctgcacgacatcatccacaccgagaagagcctgaccctggtgttcgagtacctggacaaggacctgaagcagtacctggacgactgcggcaacatcatcaacatgcacaacgtgaagctgttcctgttccagctgctgagaggcctggcctactgccacagacagaaggtgctgcacagagacctgaagccccagaacctgctgatcaacgagagaggcgagctgaagctggccgacttcggcctggccagagccaagagcatccccaccaagacctacagcaacgaggtggtgaccctgtggtacagaccccccgacatcctgctgggcagcaccgactacagcacccagatcgacatgtggggcgtgggctgcatcttctacgagatggccaccggcagacccctgttccccggcagcaccgtggaggagcagctgcacttcatcttcagaatcctgggcacccccaccgaggagacctggcccggcatcctgagcaacgaggagttcaagacctacaactaccccaagtacagagccgaggccctgctgagccacgcccccagaagcctgtgcccctgcggcagactggacagcgacggcgccgacctgctgaccaagctgctgcagttcgagggcagaaacagaatcagcgccgaggacgccatgaagcaccccttcttcctgagcctgggcgagagaatccacaagctgcccgacaccaccagcatcttcgccctgaaggagatccagctgcagaaggaggccagcctgagaagcagcagcatgcccgacagcggcagacccgccttcagagtggtggacaccgagttctag

SEQ ID NO: 226678 - DNA, 3144 bp, Artificial Sequence
  derived and/or modified sequence
acccttccgagcgcctgcgtgcgcatgcgcggagcgcggcgcgcgcggcggttgggccgttggctgttcggccctgggatccgccgccactccgcgatcagaccgctctgtgccgcgagccgccgtgagcactcggattcaagccggcgccaacgagtccgggggcatcgcccgcagcggccaagctcatggccggctgagcgggacgccgcctccgcctcagccaccgccgccgccgccgcctcctcctcctcagccggcggcggcccgggcccagcaaccatggctgaagactactgggacgggcgcctgcggcgaacaggaggagaaggaggtcgcgcggcctcatcccgggccgccgccccaggcgccgccgcgccggccccgcggctctgaggttgctcgcgcgcccccgccgatcgccatggatcggatgaagaagatcaaacggcagctgtcaatgacactccgaggtggccgaggcatagacaagaccaatggtgcccctgagcagataggcctggatgagagtggtggtggtggcggcagtgaccctggagaggcccccacacgtgctgctcctggggaacttcgttctgcacggggcccactcagctctgcaccagagattgtgcacgaggacttgaagatggggtctgatggggagagtgaccaggcttcagccacgtcctcggatgaggtgcagtctccagtgagagtgcgtatgcgcaaccatcccccacgcaagatctccactgaggacatcaacaagcgcctatcactaccagctgacatccggctgcctgagggctacctggagaagctgaccctcaatagccccatctttgacaagcccctcagccgccgcctccgtcgtgtcagcctatctgagattggctttgggaaactggagacctacattaagctggacaaactgggcgagggtacctatgccaccgtctacaaaggcaaaagcaagctcacagacaaccttgtggcactcaaggagatcagactggaacatgaagagggggcaccctgcaccgccatccgggaagtgtccctgctcaaggacctcaaacacgccaacatcgttacgctacatgacattatccacacggagaagtccctcacccttgtctttgagtacctggacaaggacctgaagcagtacctggatgactgtgggaacatcatcaacatgcacaacgtgaaactgttcctgttccagctgctccgtggcctggcctactgccaccggcagaaggtgctacaccgagacctcaagccccagaacctgctcatcaacgagaggggagagctcaagctggctgactttggcctggcccgagccaagtcaatcccaacaaagacatactccaatgaggtggtgacactgtggtaccggccccctgacatcctgcttgggtccacggactactccactcagattgacatgtggggtgtgggctgcatcttctatgagatggccacaggccgtcccctctttccgggctccacggtggaggaacagctacacttcatcttccgtatcttaggaaccccaactgaggagacgtggccaggcatcctgtccaacgaggagttcaagacatacaactaccccaagtaccgagccgaggcccttttgagccacgcaccccgacttgatagcgacggggccgacctcctcaccaagctgttgcagtttgagggtcgaaatcggatctccgcagaggatgccatgaaacatccattcttcctcagtctgggggagcggatccacaaacttcctgacactacttccatatttgcactaaaggagattcagctacaaaaggaggccagccttcggtcttcgtcgatgcctgactcaggcaggccagctttccgcgtggtggacaccgagttctaagccacagaccgaggccccagcaggcagcggctggagggatgccacacccctcacagggcagcccccaactacatcttccctgcttactctctgcctacctgcctgagccatgttcacctgcccacttgtcccctgctgcctgcccaaacaccccaccattggcctgtcaacccacccattggcctgtctgctgggtgctaacaaagctctcatcactccttcacttggtctgtctgtctctgtcttggtagttgccggtggacagcatggccgtgccagcctcccacactgaggccaggtctaccccccatcataccagcccccaggaccactaccccacggccagccaggggtccagagctagcccaggctggggatctcgactcagacaagatggtgacaatgccttgagtctgaggcatcctctgcctgctttcctgcctgccccacctgcctcatattgtgtgggcctttttttgtttgtttcattcattgtttttttttttttaattattttaaatgagatttttgttttttttaaatgcaatatctctgtatacagactggctgggccccaccccctgcgtgtggccctcccacagtattttgtgcaatgaagccctgctcccagcctttcagagacagggacacagcccctatttggaaccctgatcatcaccagaccctgggattggctatgggaaagcatgccacagccactcgccttcctacccccgcccgccatccccagttgcagggggatctggggactaccagagactctgggaaatggacaaggtggggggccccactctttctctcctgcagtcccgtagctggggcctccttccttctcagggtctccccagcccagtccccttgctcccatcccactcggtgctgttgggtaggggccctgccaggaactgaccagctcagcgaggagccataatgtgcatatgtgcacaagcagggttgggggaggggggtgtgaggggttgtgcccaggtgttgccccctatctcctggggagggtgaggcagggcagggacagtctccagggtcagtccctggatgggtggttacctccccttcctccaccctaagccctggggccctgaaatggggtgggagggcaggggtgggagccctcctagtgggtttggggggttgggttcctgaatgcaccataatcgctgtatgaaatattaaaaagtctaaagtgaaaa

SEQ ID NO: 226679 - DNA, 3158 bp, Artificial Sequence
  derived and/or modified sequence
ggagggggcagttgggcggggataggccgtcctagctaaggtggtaaaggccaataactcttcaggctgcctctcctcgaaaagtcatcttctcgcgaacctttaaaatgccttcctccccaagcacctcaagggactagaactgagtgcttcatttgtcttttttcctccttgcaaaagtcccgtttgccaccatggggatgtaccaagtgagaccgagtagggggaacgagtggtgattgacgcgccaggttactggccactgctcacctaggcgctagcaaacttctgccaagatcggaactgagtactaaacagcctccacagttctccctggtgccgtctccggcttggcgccgcatcctcctctgggctcgcgatggccgcgtcccctcccgctgcggacgggtcctttggtacatgcagtccgagatcgccatggatcggatgaagaagatcaaacggcagctgtcaatgacactccgaggtggccgaggcatagacaagaccaatggtgcccctgagcagataggcctggatgagagtggtggtggtggcggcagtgaccctggagaggcccccacacgtgctgctcctggggaacttcgttctgcacggggcccactcagctctgcaccagagattgtgcacgaggacttgaagatggggtctgatggggagagtgaccaggcttcagccacgtcctcggatgaggtgcagtctccagtgagagtgcgtatgcgcaaccatcccccacgcaagatctccactgaggacatcaacaagcgcctatcactaccagctgacatccggctgcctgagggctacctggagaagctgaccctcaatagccccatctttgacaagcccctcagccgccgcctccgtcgtgtcagcctatctgagattggctttgggaaactggagacctacattaagctggacaaactgggcgagggtacctatgccaccgtctacaaaggcaaaagcaagctcacagacaaccttgtggcactcaaggagatcagactggaacatgaagagggggcaccctgcaccgccatccgggaagtgtccctgctcaaggacctcaaacacgccaacatcgttacgctacatgacattatccacacggagaagtccctcacccttgtctttgagtacctggacaaggacctgaagcagtacctggatgactgtgggaacatcatcaacatgcacaacgtgaaactgttcctgttccagctgctccgtggcctggcctactgccaccggcagaaggtgctacaccgagacctcaagccccagaacctgctcatcaacgagaggggagagctcaagctggctgactttggcctggcccgagccaagtcaatcccaacaaagacatactccaatgaggtggtgacactgtggtaccggccccctgacatcctgcttgggtccacggactactccactcagattgacatgtggggtgtgggctgcatcttctatgagatggccacaggccgtcccctctttccgggctccacggtggaggaacagctacacttcatcttccgtatcttaggaaccccaactgaggagacgtggccaggcatcctgtccaacgaggagttcaagacatacaactaccccaagtaccgagccgaggcccttttgagccacgcaccccgacttgatagcgacggggccgacctcctcaccaagctgttgcagtttgagggtcgaaatcggatctccgcagaggatgccatgaaacatccattcttcctcagtctgggggagcggatccacaaacttcctgacactacttccatatttgcactaaaggagattcagctacaaaaggaggccagccttcggtcttcgtcgatgcctgactcaggcaggccagctttccgcgtggtggacaccgagttctaagccacagaccgaggccccagcaggcagcggctggagggatgccacacccctcacagggcagcccccaactacatcttccctgcttactctctgcctacctgcctgagccatgttcacctgcccacttgtcccctgctgcctgcccaaacaccccaccattggcctgtcaacccacccattggcctgtctgctgggtgctaacaaagctctcatcactccttcacttggtctgtctgtctctgtcttggtagttgccggtggacagcatggccgtgccagcctcccacactgaggccaggtctaccccccatcataccagcccccaggaccactaccccacggccagccaggggtccagagctagcccaggctggggatctcgactcagacaagatggtgacaatgccttgagtctgaggcatcctctgcctgctttcctgcctgccccacctgcctcatattgtgtgggcctttttttgtttgtttcattcattgtttttttttttttaattattttaaatgagatttttgttttttttaaatgcaatatctctgtatacagactggctgggccccaccccctgcgtgtggccctcccacagtattttgtgcaatgaagccctgctcccagcctttcagagacagggacacagcccctatttggaaccctgatcatcaccagaccctgggattggctatgggaaagcatgccacagccactcgccttcctacccccgcccgccatccccagttgcagggggatctggggactaccagagactctgggaaatggacaaggtggggggccccactctttctctcctgcagtcccgtagctggggcctccttccttctcagggtctccccagcccagtccccttgctcccatcccactcggtgctgttgggtaggggccctgccaggaactgaccagctcagcgaggagccataatgtgcatatgtgcacaagcagggttgggggaggggggtgtgaggggttgtgcccaggtgttgccccctatctcctggggagggtgaggcagggcagggacagtctccagggtcagtccctggatgggtggttacctccccttcctccaccctaagccctggggccctgaaatggggtgggagggcaggggtgggagccctcctagtgggtttggggggttgggttcctgaatgcaccataatcgctgtatgaaatattaaaaagtctaaagtgaaaa

SEQ ID NO: 226680 - DNA, 991 bp, Artificial Sequence
  derived and/or modified sequence
cttccgagcgcctgcgtgcgcatgcgcggagcgcggcgcgcgcggcggttgggccgttggctgttcggccctgggatccgccgccactccgcgatcagaccgctctgtgccgcgagccgccgtgagcactcggattcaagccggcgccaacgagtccgggggcatcgcccgcagcggccaagctcatggccggctgagcgggacgccgcctccgcctcagccaccgccgccgccgccgcctcctcctcctcagccggcggcggcccgggcccagcaaccatggctgaagactactgggacgggcgcctgcggcgaacaggaggagaaggaggtcgcgcggcctcatcccgggccgccgccccaggcgccgccgcgccggccccgcggctctgaggttgctcgcgcgcccccgccgtcactattccaggtcctcaggatatagccgtgacctaaacacagaaatctaccctggcggagctgatcttctagttgtggcggtgaggagatagacagtaaagactaaagaaaccaataaatcgccatggatcggatgaagaagatcaaacggcagctgtcaatgacactccgaggtggccgaggcatagacaagaccaatggtgcccctgagcagataggcctggatgagagtggtggtggtggcggcagtgaccctggagaggcccccacacgtgctgctcctggggaacttcgttctgcacggggcccactcagctctgcaccagagattgtgcacgaggacttgaagatggggtctgatggggagagtgaccaggcttcagccacgtcctcggatgaggtgcagtctccagtgagagtgcgtatgcgcaaccatcccccacgcaagatctccactgaggacatcaacaagcgcctatcactaccagctgacatccggctgcctgagggctacctggagaagctgaccctcaatagccccatctttgacaagcccctcagccgccgcctccgt

SEQ ID NO: 226681 - DNA, 2968 bp, Artificial Sequence
  derived and/or modified sequence
gcggagcgcggcgcgcgcggcggttgggccgttggctgttcggccctgggatccgccgccactccgcgatcagaccgctctgtgccgcgagccgccgtgagcactcggattcaagccggcgccaacgagtccgggggcatcgcccgcagcggccaagctcatggccggctgagcgggacgccgcctccgcctcagccaccgccgccgccgccgcctcctcctcctcagccggcggcggcccgggcccagcaaccatggctgaagactactgggacgggcgcctgcggcgaacaggaggagaaggaggtcgcgcggcctcatcccgggccgccgccccaggcgccgccgcgccggccccgcggctctgaggttgctcgcgcgcccccgccgatcgccatggatcggatgaagaagatcaaacggcagctgtcaatgacactccgctctgcaccagagattgtgcacgaggacttgaagatggggtctgatggggagagtgaccaggcttcagccacgtcctcggatgaggtgcagtctccagtgagagtgcgtatgcgcaaccatcccccacgcaagatctccactgaggacatcaacaagcgcctatcactaccagctgacatccggctgcctgagggctacctggagaagctgaccctcaatagccccatctttgacaagcccctcagccgccgcctccgtcgtgtcagcctatctgagattggctttgggaaactggagacctacattaagctggacaaactgggcgagggtacctatgccaccgtctacaaaggcaaaagcaagctcacagacaaccttgtggcactcaaggagatcagactggaacatgaagagggggcaccctgcaccgccatccgggaagtgtccctgctcaaggacctcaaacacgccaacatcgttacgctacatgacattatccacacggagaagtccctcacccttgtctttgagtacctggacaaggacctgaagcagtacctggatgactgtgggaacatcatcaacatgcacaacgtgaaactgttcctgttccagctgctccgtggcctggcctactgccaccggcagaaggtgctacaccgagacctcaagccccagaacctgctcatcaacgagaggggagagctcaagctggctgactttggcctggcccgagccaagtcaatcccaacaaagacatactccaatgaggtggtgacactgtggtaccggccccctgacatcctgcttgggtccacggactactccactcagattgacatgtggggtgtgggctgcatcttctatgagatggccacaggccgtcccctctttccgggctccacggtggaggaacagctacacttcatcttccgtatcttaggaaccccaactgaggagacgtggccaggcatcctgtccaacgaggagttcaagacatacaactaccccaagtaccgagccgaggcccttttgagccacgcaccccgacttgatagcgacggggccgacctcctcaccaagctgttgcagtttgagggtcgaaatcggatctccgcagaggatgccatgaaacatccattcttcctcagtctgggggagcggatccacaaacttcctgacactacttccatatttgcactaaaggagattcagctacaaaaggaggccagccttcggtcttcgtcgatgcctgactcaggcaggccagctttccgcgtggtggacaccgagttctaagccacagaccgaggccccagcaggcagcggctggagggatgccacacccctcacagggcagcccccaactacatcttccctgcttactctctgcctacctgcctgagccatgttcacctgcccacttgtcccctgctgcctgcccaaacaccccaccattggcctgtcaacccacccattggcctgtctgctgggtgctaacaaagctctcatcactccttcacttggtctgtctgtctctgtcttggtagttgccggtggacagcatggccgtgccagcctcccacactgaggccaggtctaccccccatcataccagcccccaggaccactaccccacggccagccaggggtccagagctagcccaggctggggatctcgactcagacaagatggtgacaatgccttgagtctgaggcatcctctgcctgctttcctgcctgccccacctgcctcatattgtgtgggcctttttttgtttgtttcattcattgtttttttttttttaattattttaaatgagatttttgttttttttaaatgcaatatctctgtatacagactggctgggccccaccccctgcgtgtggccctcccacagtattttgtgcaatgaagccctgctcccagcctttcagagacagggacacagcccctatttggaaccctgatcatcaccagaccctgggattggctatgggaaagcatgccacagccactcgccttcctacccccgcccgccatccccagttgcagggggatctggggactaccagagactctgggaaatggacaaggtggggggccccactctttctctcctgcagtcccgtagctggggcctccttccttctcagggtctccccagcccagtccccttgctcccatcccactcggtgctgttgggtaggggccctgccaggaactgaccagctcagcgaggagccataatgtgcatatgtgcacaagcagggttgggggaggggggtgtgaggggttgtgcccaggtgttgccccctatctcctggggagggtgaggcagggcagggacagtctccagggtcagtccctggatgggtggttacctccccttcctccaccctaagccctggggccctgaaatggggtgggagggcaggggtgggagccctcctagtgggtttggggggttgggttcctgaatgcaccataatcgctgtatgaaatattaaaaagtctaaagtg

SEQ ID NO: 226682 - DNA, 2028 bp, Artificial Sequence
  derived and/or modified sequence
atgcgcggagcgcggcgcgcgcggcggttgggccgttggctgttcggccctgggatccgccgccactccgcgatcagaccgctctgtgccgcgagccgccgtgagcactcggattcaagccggcgccaacgagtccgggggcatcgcccgcagcggccaagctcatggccggctgagcgggacgccgcctccgcctcagccaccgccgccgccgccgcctcctcctcctcagccggcggcggcccgggcccagcaaccatggctgaggttgctcgcgcgcccccgccgatcgccatggatcggatgaagaagatcaaacggcagctgtcaatgacactccgaggtggccgaggcatagacaagaccaatggtgcccctgagcagataggcctggatgagagtggtggtggtggcggcagtgaccctggagaggcccccacacgtgctgctcctggggaacttcgttctgcacggggcccactcagctctgcaccagagattgtgcacgaggacttgaagatggggtctgatggggagagtgaccaggcttcagccacgtcctcggatgaggtgcagtctccagtgagagtgcgtatgcgcaaccatcccccacgcaagatctccactgaggacatcaacaagcgcctatcactaccagctgacatccggctgcctgagggctacctggagaagctgaccctcaatagccccatctttgacaagcccctcagccgccgcctccgtcgtgtcagcctatctgagattggctttgggaaactggagacctacattaagctggacaaactgggcgagggtacctatgccaccgtctacaaaggcaaaagcaagctcacagacaaccttgtggcactcaaggagatcagactggaacatgaagagggggcaccctgcaccgccatccgggaagtgtccctgctcaaggacctcaaacacgccaacatcgttacgctacatgacattatccacacggagaagtccctcacccttgtctttgagtacctggacaaggacctgaagcagtacctggatgactgtgggaacatcatcaacatgcacaacgtgaaactgttcctgttccagctgctccgtggcctggcctactgccaccggcagaaggtgctacaccgagacctcaagccccagaacctgctcatcaacgagaggggagagctcaagctggctgactttggcctggcccgagccaagtcaatcccaacaaagacatactccaatgaggtggtgacactgtggtaccggccccctgacatcctgcttgggtccacggactactccactcagattgacatgtggggtgtgggctgcatcttctatgagatggccacaggccgtcccctctttccgggctccacggtggaggaacagctacacttcatcttccgtatcttaggaaccccaactgaggagacgtggccaggcatcctgtccaacgaggagttcaagacatacaactaccccaagtaccgagccgaggcccttttgagccacgcaccccggtctctttgtccttgtggcagacttgatagcgacggggccgacctcctcaccaagctgttgcagtttgagggtcgaaatcggatctccgcagaggatgccatgaaacatccattcttcctcagtctgggggagcggatccacaaacttcctgacactacttccatatttgcactaaaggagattcagctacaaaaggaggccagccttcggtcttcgtcgatgcctgactcaggcaggccagctttccgcgtggtggacaccgagttctaagccacagaccgaggccccagcaggcagcggctggagggatgccacacccctcacagggcagcccccaactacatcttccctgcttactctctgcctacctgcctgagccatgttcacctgcccacttgtcccctgctgcctgcccaaacaccccaccattggcctgtcaacccacccattggcctgtctgctgggtgctaacaaagctctcatcactccttc

SEQ ID NO: 226683 - DNA, 1491 bp, Artificial Sequence
  derived and/or modified sequence
atggatagaatgaagaagataaaacggcagctgagtatgaccctgagaggcggacgaggaatcgataagaccaatggagctccagagcagattggccttgacgaatcaggagggggagggggttccgaccctggcgaagcgccaacccgagctgctccaggcgagctccgttctgcccgggggcccctctcctctgctcccgaaattgtgcatgaggacttgaagatggggtctgacggcgaatcagaccaggccagcgctacatccagcgacgaagtacagtcccctgtgcgggtgcgaatgaggaatcatccccctcgcaagatcagtaccgaagacataaataagcggctttctctccccgctgacatcaggctcccagaaggctatttagaaaagttgactctcaattcgccaattttcgataagccactgtcgaggcggctgcgaagagtatccctcagcgagattggatttggaaaattggagacatatattaagctcgacaaactaggagagggcacatacgcaactgtctacaaagggaaaagcaaattgaccgataatctcgtggcattgaaagagatcaggcttgagcatgaagagggcgccccctgcactgccatccgagaagtcagtctgctcaaggacttaaagcatgcgaacattgtgacattgcacgacattatccataccgaaaagagcctgacactcgtgtttgaatacctggataaagacctcaagcaatatcttgacgattgtggaaatatcatcaatatgcacaacgtcaagctcttcttattccagttgcttcggggcctcgcctactgccaccggcagaaagtactccacagagacttgaagccacagaatctgttgattaacgagcgcggggagctcaagctggccgacttcggtttagcacgcgccaagtctatccccacgaagacctattcgaatgaggttgtgacactgtggtaccgccctcccgatattctcttgggatcaactgattactcaactcagatcgacatgtggggtgtgggatgtattttctacgagatggccacaggacggcccctgtttcccgggtctaccgtggaggagcagctgcatttcatcttccggattctgggcactcccacggaagaaacctggccaggaattctcagcaacgaagaatttaagacctataactaccctaaatatagagcggaagctctcttgtcccacgctccacggctcgactccgacggggctgatttgctgactaaacttctgcaattcgaagggagaaaccgtatttcagctgaagacgctatgaaacaccctttctttctgtccctcggcgaaaggattcataagctcccagatactacttccatctttgctctgaaagaaatccagctgcaaaaagaagcatctttaaggtccagttctatgccagactcaggccggccagccttcagggttgtcgataccgaattctag

SEQ ID NO: 226684 - DNA, 1509 bp, Artificial Sequence
  derived and/or modified sequence
atgcagtcagaaatcgcaatggatagaatgaagaagatcaagcgacaactctccatgactctgagaggaggccgtggcattgataaaacaaatggggcgccagagcagattggcttggacgagtctgggggcggaggaggcagtgatcccggcgaggcaccaacaagagcagcgcctggagagctcagatctgctagggggccgctatcctccgcacccgagattgtgcacgaggacttaaagatgggctccgacggggagagtgaccaggcctccgccacttcttcggatgaggttcagtccccagtgagagtgagaatgcggaatcacccaccgaggaagatcagtacggaagatatcaataagcggttgtcgcttcccgccgacatccgactgccggagggctacctggaaaagctgactctgaactcccctatctttgataagccactctcgcgccgcttgcgcagagtgagtctcagtgaaatcggtttcgggaaactagagacttatattaaattggacaagctgggagaggggacctatgccacagtgtataaaggtaagagcaagttaaccgacaaccttgtcgccctgaaagagatcaggctggaacatgaggagggagccccttgtaccgcaatccgcgaagtatctctcctgaaagatctcaaacatgccaacattgttacactccacgacattatccatacagaaaagagtctaactctcgtattcgaatatcttgacaaagacctaaaacagtacctggatgactgtggcaacattattaatatgcataacgtaaaactgtttctgtttcagctgctccgcggactggcatactgtcataggcaaaaggttcttcatcgcgaccttaagccccaaaacctgttaattaacgagagaggcgaactgaagctcgccgactttggtctggccagggcaaagtccattccgaccaaaacttacagtaacgaagtcgtcacactttggtacaggccacccgacattcttctcggctctacggactacagtactcagattgacatgtggggagtgggttgcatcttctacgaaatggccactggcaggcccctgttccccggaagtacagtggaagagcagctacatttcatatttcggatcctgggtacccctacagaagaaacgtggccaggcattctgtccaacgaagaattcaaaacttacaactaccctaagtatcgggccgaagcgcttctctcccatgcacccaggcttgacagtgatggtgcagacctgttaacaaagctgttgcagtttgagggccgaaatcgaatctctgccgaagatgcaatgaaacatcccttcttcctatctttgggcgagcggatccacaagttgccagacacgacctccattttcgccctaaaagagattcagttgcaaaaggaggctagcctgaggagttcgtcaatgccagatagtggtagacccgccttccgggttgtcgacacagaattctag

SEQ ID NO: 226685 - DNA, 1491 bp, Artificial Sequence
  derived and/or modified sequence
atggaccgaatgaaaaagatcaaaaggcagctgagtatgactttaaggggcggccggggaatcgataagactaacggtgcccctgagcagattggactggacgagtctgggggcgggggcgggtccgaccccggagaggcacccactagagccgccccaggggaattacgcagcgcgcgtggcccactcagcagtgctcctgaaatcgtgcacgaagatttaaaaatgggctccgacggggagtccgaccaggccagtgctacttccagcgatgaggtgcagtcccctgtacgggtccgtatgcgcaaccacccaccccggaagatcagcaccgaagacattaacaagagattaagtttgccggcggacatccggctgccagagggctacctggagaaactgaccttgaatagccccatttttgataaacctctgtctaggcgcctgcgacgtgtaagcttaagtgagatcggctttggtaaactggagacctacatcaaattagacaaacttggcgaaggcacctacgcaacagtgtacaagggcaagtccaaattgactgacaacttagtggccctcaaagaaatccgactagagcatgaggaaggcgcaccatgcaccgctatccgggaggtctcccttttgaaggacctgaagcatgccaacatagtgacgttacacgatattatccacacagagaagagtttgaccctcgtgtttgaatatctggataaagacctaaaacagtatctagatgactgtgggaacatcatcaatatgcacaacgttaagctgttcctgtttcagctgctgcggggcctggcctactgccatcggcagaaggtgctccatagagacctaaagcctcagaacctcctcatcaacgagagaggagagctaaaactagcagacttcggccttgctagggccaaatctattcctactaagacttactcaaacgaagtggtcaccctgtggtatagacctcccgatatcctcctgggctcaacggactactctactcaaatcgacatgtggggcgtgggatgtatcttctacgagatggcgaccggaagacctttgtttcccggttccaccgtcgaggagcagttgcacttcatctttagaatcctggggacacctacagaggagacttggcctggcattctgagtaacgaagagttcaagacgtacaattacccgaaataccgtgcagaggcccttctctctcacgctcctcgcctggattctgatggagctgatcttctgaccaaacttttacagttcgaaggtagaaaccggattagtgccgaggacgccatgaaacatcctttcttcctctcactgggagaacgaattcacaagctcccagacactacgagcatatttgccctcaaagaaatccaactgcagaaggaagcaagcttgagatctagttcaatgccggactctggcaggcctgccttccgcgttgtggacactgaattctag

SEQ ID NO: 226686 - DNA, 1806 bp, Artificial Sequence
  derived and/or modified sequence
atgagaggggccaggcgcgcacggcgactcggcagatggctgttcggtcccggcatcaggcgccacagcgcaatcaggcctctttgcgcagcttcacgcagggagcattccgactcttcgagaagacagagggtgcgtggtcataggccccagcgcccgagctcgtggccggcggaaagagacgctgcgagtgcatcagctaccgcggccgccgctgcatccagctctagcgctgggggaggacccggcccagcaaccatggccgaggtcgccagagctccgccaccaatcgcgatggatcgcatgaaaaagatcaaaaggcagctttctatgaccttgcggggtggtaggggaatcgataagacgaacggtgctccggagcaaatcgggttagacgaatccggtggcggcggcgggtcagaccccggcgaagctcccacgcgagccgctcccggagagttacgctcagcgcgcggacccttatcgagcgctccagagatcgtgcacgaagacctgaagatgggaagtgatggcgagtctgatcaggccagtgctactagttctgatgaggtgcagagtccggtaagagtcagaatgaggaaccaccccccacggaaaatctcaactgaagacataaacaagcggttatccctcccagctgacattagactccctgaaggctacctggagaagctaacactgaactcaccaatcttcgacaagcctctgtcccgacgccttaggagagtgtcgctgtccgagatcggatttgggaagctggagacttatattaagctggacaagctcggtgagggcacatacgcaactgtctacaagggcaagtctaagctgaccgacaacctggtcgccttaaaagagataaggctggaacacgaggagggagctccttgcaccgctatccgcgaagtctctcttcttaaggaccttaaacacgcaaatatagttaccctccatgatatcatccatacagagaaatcgctaacactcgtgttcgagtacttggacaaggacctcaagcagtacctcgatgactgcggaaatataataaatatgcacaatgtaaaacttttcctgtttcaactccttaggggactggcttactgccatcgccagaaggtcctgcatagagatcttaagccccagaatctcctgatcaacgaacgcggggagcttaaattagccgacttcggcttggccagagctaagagcatccccaccaagacctacagcaatgaggttgttacattgtggtacaggcctcccgacatactgctagggtcaacagattactctactcaaatcgacatgtggggtgtgggttgcatcttttacgagatggctaccgggagacctctgttcccggggagtacagtagaggaacagctgcattttattttccgaattttgggtacaccaacagaggaaacttggccggggatactgtctaatgaagagtttaagacctacaactacccaaaatatcgagctgaagccctgctgtctcacgcccctcggagcctgtgcccatgcggaagactcgactctgatggggctgatctgttgaccaagcttctccagtttgagggccgcaataggatttcagcggaggacgccatgaaacatcccttttttctatcgctcggtgagaggatccataaactgccggatacaacttctatctttgcacttaaggagattcaactccaaaaggaagcatcgctccgatcttccagcatgcccgactccgggagacccgccttcagggtggtggacactgagttctag

SEQ ID NO: 226687 - DNA, 1491 bp, Artificial Sequence
  derived and/or modified sequence
atggacaggatgaagaagatcaagaggcagctgtccatgaccctgcggggcggccggggcatcgacaagaccaatggagcccctgagcagatcggcctggatgagagcggcggcggcggcggcagtgaccccggggaggcccccaccagggctgcccctggagagctgcggagcgcccggggccccctgagcagcgcccctgagatcgtgcatgaggacctgaagatgggcagtgatggagagagtgaccaggccagcgccaccagcagtgatgaggtgcagagccctgtgcgggtgaggatgaggaaccacccccccaggaagatcagcacagaggacatcaacaagaggctgagcctgcctgctgacatccggctgcctgagggctacctggagaagctgaccctgaacagccccatctttgacaagcccctgagccggcggctgcggcgggtgtccctgtctgaaattggatttgggaagctggagacctacatcaagctggacaagctgggggagggcacctacgccaccgtgtacaagggcaagagcaagctgacagacaacctggtggccctgaaggagatccggctggagcacgaggagggcgccccctgcacagccatccgggaggtgtccctgctgaaggacctgaagcacgccaacatcgtgaccctgcatgacatcatccacacagagaagagcctgaccctggtgtttgagtacctggacaaggacctgaagcagtacctggatgactgtggcaacatcatcaacatgcacaacgtgaagctgttcctgttccagctgctgcggggcctggcctactgccaccggcagaaggtgctgcaccgggacctgaagccccagaacctgctgatcaatgaaagaggagagctgaagctggccgactttggcctggcccgggccaagagcatccccaccaagacctacagcaatgaggtggtgaccctgtggtacagacctccagacatcctgctgggcagcacagactacagcacccagattgacatgtggggcgtgggctgcatcttctatgagatggccaccggccggcccctcttccctggcagcacagtggaggagcagctgcacttcatcttccgcatcctgggcacccccacagaggagacctggccaggcatcctgagcaatgaggagttcaagacctacaactaccccaagtacagagctgaggccctgctgagccacgccccccggctggacagtgatggagctgacctgctgaccaagctgctgcagtttgagggcaggaaccgcatctctgcagaagatgccatgaagcaccccttcttcctgagcctgggggagcgcatccacaagctgcctgacaccaccagcatctttgccctgaaggagatccagctgcagaaggaggccagcctgcggagcagctccatgccagacagcggccgcccagccttccgggtggtggacacagagttctag

SEQ ID NO: 226688 - DNA, 1509 bp, Artificial Sequence
  derived and/or modified sequence
atgcagagcgagatcgccatggacaggatgaagaagatcaagaggcagctgtccatgaccctgcggggcggccggggcatcgacaagaccaatggagcccctgagcagatcggcctggatgagagcggcggcggcggcggcagtgaccccggggaggcccccaccagggctgcccctggagagctgcggagcgcccggggccccctgagcagcgcccctgagatcgtgcatgaggacctgaagatgggcagtgatggagagagtgaccaggccagcgccaccagcagtgatgaggtgcagagccctgtgcgggtgaggatgaggaaccacccccccaggaagatcagcacagaggacatcaacaagaggctgagcctgcctgctgacatccggctgcctgagggctacctggagaagctgaccctgaacagccccatctttgacaagcccctgagccggcggctgcggcgggtgtccctgtctgaaattggatttgggaagctggagacctacatcaagctggacaagctgggggagggcacctacgccaccgtgtacaagggcaagagcaagctgacagacaacctggtggccctgaaggagatccggctggagcacgaggagggcgccccctgcacagccatccgggaggtgtccctgctgaaggacctgaagcacgccaacatcgtgaccctgcatgacatcatccacacagagaagagcctgaccctggtgtttgagtacctggacaaggacctgaagcagtacctggatgactgtggcaacatcatcaacatgcacaacgtgaagctgttcctgttccagctgctgcggggcctggcctactgccaccggcagaaggtgctgcaccgggacctgaagccccagaacctgctgatcaatgaaagaggagagctgaagctggccgactttggcctggcccgggccaagagcatccccaccaagacctacagcaatgaggtggtgaccctgtggtacagacctccagacatcctgctgggcagcacagactacagcacccagattgacatgtggggcgtgggctgcatcttctatgagatggccaccggccggcccctcttccctggcagcacagtggaggagcagctgcacttcatcttccgcatcctgggcacccccacagaggagacctggccaggcatcctgagcaatgaggagttcaagacctacaactaccccaagtacagagctgaggccctgctgagccacgccccccggctggacagtgatggagctgacctgctgaccaagctgctgcagtttgagggcaggaaccgcatctctgcagaagatgccatgaagcaccccttcttcctgagcctgggggagcgcatccacaagctgcctgacaccaccagcatctttgccctgaaggagatccagctgcagaaggaggccagcctgcggagcagctccatgccagacagcggccgcccagccttccgggtggtggacacagagttctag

SEQ ID NO: 226689 - DNA, 1806 bp, Artificial Sequence
  derived and/or modified sequence
atgagaggagcccggcgggcccggcggctgggccgctggctgtttggacctggcatccgccgccacagcgccatccggcccctgtgtgccgccagcagaagagagcacagcgacagcagccggcggcagagggtgcggggccaccggccccagaggcccagctcctggccagctgagagagatgctgccagcgccagcgccacagctgctgctgctgccagcagcagcagcgctgggggcggccctggccctgccaccatggccgaggtggcccgggcccccccacccatcgccatggacaggatgaagaagatcaagaggcagctgtccatgaccctgcggggcggccggggcatcgacaagaccaatggagcccctgagcagatcggcctggatgagagcggcggcggcggcggcagtgaccccggggaggcccccaccagggctgcccctggagagctgcggagcgcccggggccccctgagcagcgcccctgagatcgtgcatgaggacctgaagatgggcagtgatggagagagtgaccaggccagcgccaccagcagtgatgaggtgcagagccctgtgcgggtgaggatgaggaaccacccccccaggaagatcagcacagaggacatcaacaagaggctgagcctgcctgctgacatccggctgcctgagggctacctggagaagctgaccctgaacagccccatctttgacaagcccctgagccggcggctgcggcgggtgtccctgtctgaaattggatttgggaagctggagacctacatcaagctggacaagctgggggagggcacctacgccaccgtgtacaagggcaagagcaagctgacagacaacctggtggccctgaaggagatccggctggagcacgaggagggcgccccctgcacagccatccgggaggtgtccctgctgaaggacctgaagcacgccaacatcgtgaccctgcatgacatcatccacacagagaagagcctgaccctggtgtttgagtacctggacaaggacctgaagcagtacctggatgactgtggcaacatcatcaacatgcacaacgtgaagctgttcctgttccagctgctgcggggcctggcctactgccaccggcagaaggtgctgcaccgggacctgaagccccagaacctgctgatcaatgaaagaggagagctgaagctggccgactttggcctggcccgggccaagagcatccccaccaagacctacagcaatgaggtggtgaccctgtggtacagacctccagacatcctgctgggcagcacagactacagcacccagattgacatgtggggcgtgggctgcatcttctatgagatggccaccggccggcccctcttccctggcagcacagtggaggagcagctgcacttcatcttccgcatcctgggcacccccacagaggagacctggccaggcatcctgagcaatgaggagttcaagacctacaactaccccaagtacagagctgaggccctgctgagccacgcccccaggagcctgtgcccctgtggccgcctggacagtgatggagctgacctgctgaccaagctgctgcagtttgagggcaggaaccgcatctctgcagaagatgccatgaagcaccccttcttcctgagcctgggggagcgcatccacaagctgcctgacaccaccagcatctttgccctgaaggagatccagctgcagaaggaggccagcctgcggagcagctccatgccagattctggccggcctgccttccgggtggtggacacagagttctag

SEQ ID NO: 226690 - DNA, 1491 bp, Artificial Sequence
  derived and/or modified sequence
atggaccggatgaagaagatcaagcggcagctgagcatgaccctgcgcggtggccgaggcatagataaaacgaacggcgcccccgagcagattgggctcgacgaatccggaggaggtggaggctcagaccccggagaagctcctacccgggccgcccctggcgagttaagatcggcacgggggccgctgtcatctgcacccgagattgttcatgaagacctgaagatgggctccgacggggagtcggaccaggcatctgcaacgtccagcgacgaggtgcagagcccagtaagggtacgaatgaggaatcaccctccacgcaagatctctacagaggatataaataaaagactcagccttcccgctgacatccgactccctgaggggtatctggagaagctgaccctgaacagcccaatcttcgacaagcctcttagccgtcgcttacgtcgcgtgagtctgagcgagatcggtttcggtaagctggagacatacattaagctcgataagttgggtgaaggtacctacgccaccgtgtacaagggtaaatcaaagttgacagataatctggtggcattgaaggaaattagacttgaacacgaagaaggtgccccctgtaccgctatcagagaggttagtttactgaaagacttaaagcatgcaaacattgtaacgctgcatgacattattcatactgagaagtctcttacgctcgtgtttgaatatctcgataaggacttgaaacagtacctcgatgactgtggtaatataattaatatgcacaatgtcaagctgtttctattccagctgctacgagggctggcctattgccacaggcaaaaggttctccaccgtgacctcaaaccacagaatctgctaatcaatgaacgaggcgagcttaaactggcagacttcggacttgcgagagctaagtctatcccaactaagacttactccaatgaggtcgtcaccctctggtataggcccccggatattctgctaggcagcacagattacagtacccagatcgatatgtggggtgtgggctgtattttttatgaaatggccaccggcagacctttgtttccaggctccactgtagaagaacagttgcatttcatcttccgtatactaggtaccccaaccgaagaaacctggcctggcatcctaagtaacgaggagtttaagacctataattatccgaaataccgggccgaggcccttctatcacacgcacctagacttgactccgatggcgctgacctgttaaccaagctgctgcaattcgaaggtaggaaccggatttccgctgaagacgcaatgaaacacccatttttcttgagtctcggggaacgcattcacaagcttccggatacaacttccatctttgccttgaaggaaattcagctgcagaaagaagcttcactaaggtccagcagtatgccggactctggccggcccgcttttagggtggtggacacagagttttag

SEQ ID NO: 226691 - DNA, 1509 bp, Artificial Sequence
  derived and/or modified sequence
atgcagagcgagatcgccatggaccggatgaagaagatcaagcggcagctttccatgacactgagggggggccgtggaattgataagactaacggcgctcccgagcagatcggactggacgagagtggcggcggaggtggatctgaccccggtgaagcaccaacccgtgcagcgcccggagagcttcggagtgcgagaggccctttatcaagcgccccggagatagtgcacgaggacctgaagatgggctcagacggggagtccgaccaggctagcgctactagcagcgacgaagtccagagtccggtacgggtgagaatgagaaatcacccccctcggaagatctctaccgaggatattaataagagactatctttacctgcggacatccgattgccagagggatacttggaaaagttaacattgaactcccctatctttgataaacccctgtcaagacggctgcgccgcgtctcattgtctgaaatcggatttggtaaactcgaaacctacattaaactcgacaaactgggcgagggtacctacgcgaccgtctacaaggggaagagtaaattaaccgacaacctcgtggctcttaaagaaatacggcttgagcatgaagaaggcgctccctgtacagctatacgtgaagtaagcctgctcaaggacttgaagcacgcgaacatcgtgactctccatgatatcatccacacagagaagagcttgaccttggtttttgaatatcttgataaggacctgaagcagtatttggatgactgtgggaacattatcaacatgcataacgtcaagttgtttctgtttcagctgttacgcgggctcgcgtactgccacaggcagaaggtcttgcaccgcgacctgaagcctcagaacctgttaataaatgaacggggtgaactgaaacttgctgactttgggctggctagagccaagtctatcccaactaaaacatactctaatgaggtggtgacgttgtggtacaggccaccggatatcctccttggtagcacagactatagcacccaaattgatatgtggggagtagggtgcattttttatgaaatggctaccggacgacccctgtttcccggatctactgttgaagagcagctccacttcattttccgcatccttggcactcccacagaagagacctggccaggtattctcagcaacgaagaatttaagacctacaactacccaaagtacagggctgaggcccttttgagccacgcgccccggctggactccgatggcgccgatctgctcactaaactcctgcagttcgagggacggaaccgaatttccgcagaggatgccatgaagcatccatttttcctgagtctgggggagaggattcataagctcccagataccacaagcatttttgccttgaaggaaatccagctgcagaaggaggcctctctccggtcctcttctatgcctgattctggtcggccagcattccgcgttgtggataccgagttctag

SEQ ID NO: 226692 - DNA, 1491 bp, Artificial Sequence
  derived and/or modified sequence
atggaccggatgaagaagatcaagcggcagctgagcatgaccctgcggggagggagaggaatcgataaaactaatggggcccccgaacagatcggccttgacgagtcaggggggggtgggggaagtgatccaggggaagcgcccaccagagcagcaccaggtgagttgcgttctgctaggggcccgctgagcagcgcacccgaaattgttcacgaggatttgaagatgggctccgacggtgaatccgaccaggccagtgcaacctcaagtgacgaggtgcagagtcctgtgcgggttaggatgcgcaatcaccctccccggaagatcagcaccgaggacatcaacaaaagactttcccttcccgccgatatccggctgccggaaggctacctcgaaaagttgactctgaattcgcccattttcgacaagcctttgtctaggcgcctgcggagggttagcctttccgagattggctttggtaagttggagacatatatcaagctggacaaattgggcgaggggacgtatgctactgtctataagggcaaatctaagctgactgataacctggtggcccttaaggaaatcaggctagagcatgaagaaggggccccctgcacagcaatccgcgaagtttcactcttaaaggatctgaagcatgccaatatcgtgacgttacacgatatcattcacacagaaaaatccctgactctcgtattcgagtatctggacaaagacctgaagcagtacctcgatgattgcggtaatatcatcaatatgcataacgtgaagctttttttgtttcagctactgcgaggactggcatattgtcatcgacagaaggtcctgcatcgagatcttaaacctcagaacttgctgatcaatgagagaggcgagcttaaactcgcagacttcggcctagcacgggctaaatccattcccactaaaacatattccaacgaagtggttaccttatggtaccggccgccggatatcctactggggagcacagactattccactcagatagacatgtggggagtggggtgtattttctatgaaatggctaccgggcgcccactctttcctggaagcaccgtggaggagcagttgcactttatcttccgcattcttggcactccaaccgaggaaacctggccaggtattctctcaaatgaagaatttaagacttacaattaccctaaatacagagcagaggcactgctgtctcatgcgcccagattagattccgacggcgccgacctcctgactaagctcttacaatttgaaggcaggaatcggatctccgctgaagacgccatgaagcaccctttttttctctccctcggcgagcgcatacacaaactgcctgatacgacttcaatcttcgcgctgaaggaaattcaactccaaaaggaggcgagcttgcggtcatcctccatgcctgatagcggccgcccggcttttagagtcgtagacacggagttttag

SEQ ID NO: 226693 - DNA, 1806 bp, Artificial Sequence
  derived and/or modified sequence
atgcggggcgcccggcgggcccggcggctgggccggtggctgttcggccctggcatcagacgccactcggccataaggcctctgtgcgcagccagcagacgcgaacacagtgattcaagcaggcggcagagagtacgtggacaccgtccacaacgccccagctcctggccagccgagagggatgccgctagtgcctcagctaccgccgcagccgccgcctcctcatcctcagcggggggcggacccggacccgccactatggctgaggtggctcgggcgcccccaccaattgctatggataggatgaaaaagatcaaacggcagctgtcaatgaccctacgaggtggtcgtgggattgataagacaaatggagcacccgagcaaattggcttagatgagagtggaggcggcggcggcagcgaccccggtgaggcccccacaagggccgctcccggtgagctccgctctgccaggggtccattatctagtgcgccagaaatcgtccacgaagatctcaagatggggtccgacggcgagtcagatcaggcctctgccactagctcagacgaggtgcagtcccctgttagggtaaggatgaggaatcacccgccccgaaagatctcgacagaggatattaataagcgactgagcttgcccgccgacatacgcctccctgaagggtatttggaaaagctgacgttaaattcccctatctttgacaaacctctgtcccgaagactgaggcgcgtgtccctatccgagatcgggttcggtaaattggaaacctatattaagttagacaagctgggtgaaggcacgtatgccacggtgtacaagggcaagtcaaagctcactgataacttggtggccttaaaagagattcgcttggagcacgaggaaggagcaccttgcacagctataagggaggtgtcgctcctaaaagacttaaaacatgccaatattgtgactctgcatgatattatacacaccgaaaaaagtctcacgctcgtctttgagtatctagacaaggatttaaagcagtatctggacgactgcggtaacattatcaacatgcataacgtcaaacttttcctcttccaattgctgagagggctggcgtattgccaccgtcagaaggttttgcaccgcgatctcaaaccacaaaacctcttgattaacgagagaggcgaactgaaactggccgactttgggctcgccagggctaagagtattccaacaaagacatacagcaatgaagtggtaactttgtggtacagaccccccgatatcctgttgggcagtaccgactattctactcagatcgacatgtggggcgtgggttgtatattttatgaaatggcgactggccggcctctgttccccggatccactgtggaagagcagctgcacttcatcttccggattctcggcaccccaaccgaagagacctggcccggcattctgagcaacgaggagttcaagacgtacaattatcccaaatatagggctgaggccttgctcagtcatgccccacgatcgttgtgtccttgtggccggctcgactccgacggagctgacctgctgacaaagctgcttcagttcgagggacgaaacaggatcagtgcggaggatgccatgaagcacccctttttcctctccctgggagaaagaatccacaagctccccgacacgaccagtattttcgctttgaaagagatccagctccagaaagaggcttcactgagatcttcatccatgcctgactcagggaggcctgcctttagagtcgtagacactgagttttag

SEQ ID NO: 226694 - DNA, 1491 bp, Artificial Sequence
  derived and/or modified sequence
atggaccggatgaaaaagataaagaggcagttgagcatgacgctgaggggcggtaggggtattgacaaaacaaacggagctccggaacagattggcttagatgagagtggcggaggcggtggcagcgatccgggagaggctcctacacgcgctgccccaggtgagctcagatccgctcgcggaccactgagttcagcccctgaaattgtgcacgaggatctcaagatgggcagcgatggggagtcagatcaggcatcagcaacgtccagcgatgaagttcagtctcccgtaagggtccgaatgagaaaccatcccccaagaaaaattagcactgaggacataaataagcgtctgagcctaccagctgacattagactccccgaggggtatctggagaagcttaccctcaacagccctatcttcgacaaacccctctcaaggaggcttaggcgagtaagcctgagcgaaatcgggttcggcaagctcgagacctatataaagcttgataaactaggcgaggggacatacgccactgtctataaggggaagtccaaactgacagacaatctagtcgccctcaaagagattcgactagagcatgaagaaggagcgccttgtacagctattagagaagtgtctctcctcaaggatttaaaacatgcaaacatcgtcaccctgcatgatataatccatacggagaaaagcctgaccttagtattcgagtaccttgacaaggatctgaagcagtatttggacgattgtgggaatatcattaatatgcacaatgtgaagctgtttctgtttcagctgctccgaggacttgcctactgtcaccggcagaaagttcttcaccgtgatctgaagccacaaaatctgctaatcaatgagagaggggaactaaaacttgcggatttcgggctggcacgagctaaatctattccgacaaaaacgtatagtaacgaagtcgttacgttgtggtacagaccccctgacattttgctgggcagtacagactacagtactcagatcgacatgtggggagtcgggtgcatcttctacgaaatggctaccggaaggcccctgttcccaggatcaacggtggaggagcagctgcattttatctttcggattctgggtacccccacagaagagacgtggcccggaatcctgagcaatgaagagtttaaaacctacaactatccgaaatacagggccgaagccctgctgtctcacgcacccagacttgacagcgacggtgccgatcttctgacaaagttgctgcagttcgagggcagaaaccgcatctctgccgaagatgcaatgaaacacccatttttcttatcactaggggaacggatacataagctgccagacaccacctctatattcgccctgaaggagatccagctgcagaaggaagcgtcactgagaagctctagtatgccagacagcggtcggcctgcatttagggtcgtagacacagagttctag

SEQ ID NO: 226695 - DNA, 1509 bp, Artificial Sequence
  derived and/or modified sequence
atgcaatctgaaattgccatggaccgtatgaagaagataaagcgccaactgtccatgacactgcgcggaggccgaggaattgacaagacaaacggcgcacctgaacaaataggactggacgagtcaggtggcggaggaggatcagaccctggcgaggcacccactagagcggcaccaggggaattgaggtcagccaggggcccactctccagcgccccagagattgtccacgaggacctaaagatgggtagtgacggagaaagtgaccaggcctccgcaacatcaagtgatgaagtgcaatccccagtgcgggttcgaatgaggaaccacccaccacggaagataagcacagaggatatcaacaagagactatctctccccgctgacatacgtcttcccgagggatatcttgagaagctcaccttaaacagtcctatctttgacaaaccactgtctcgtaggctcagaagggtcagtctctcggaaatcgggtttgggaaactcgagacctatataaagcttgataaactgggagaaggaacttacgctacggtttacaaggggaaaagcaagctcaccgataatctggtggctctaaaagagatccgcctcgagcatgaagagggtgcaccctgtaccgccatcagggaagtgtcattgttgaaggatctaaaacatgccaacatagttacattacatgatatcatacacactgaaaaaagcttgacccttgtgttcgagtatttagataaagacctcaagcagtacctggatgattgtggtaacattataaatatgcacaacgtgaaactcttcttgttccaactgctgcggggattggcctattgtcacaggcagaaggtgctgcaccgcgatcttaagcctcagaacttactcattaacgaacgcggagaattgaaactcgccgatttcggtttagctcgagccaaatctattcccaccaagacttacagcaacgaggtggtgacactgtggtataggccccctgatatcctccttggctcaacggactactccactcagattgacatgtggggcgttgggtgtattttttatgagatggcgaccggaagacctctcttcccaggatccacggtagaggagcaacttcactttatctttagaattcttggcacccccacagaagaaacttggccaggaattctgagcaatgaagagttcaaaacttacaactacccgaagtatcgcgctgaggccctattatctcacgcccctcgtcttgattctgacggagccgatcttctgactaaactgctgcaatttgaggggcgtaaccggatcagtgctgaagatgccatgaagcatccattctttctgtctctgggcgagaggattcataagctgcctgacacaacttctattttcgctctgaaagagatccagttgcagaaagaggcctccctgagatcaagctctatgcctgacagtggcaggccagcatttagagtggtggacacagaattctag

SEQ ID NO: 226696 - DNA, 1491 bp, Artificial Sequence
  derived and/or modified sequence
atggatcgcatgaagaagattaagcgacagctcagcatgacactgcgcggagggagaggcatcgataagactaatggagcacccgagcagatcgggctcgacgaatctgggggaggcggtggctctgaccctggcgaagcccctacacgagccgctcccggtgagctgcgttctgccaggggacccctgtcatcggcacccgagattgtgcatgaagatcttaaaatgggctccgacggggagtccgatcaggcaagcgcaactagcagtgacgaggtccagagtcccgttagagtgagaatgaggaatcacccccctcggaaaatcagcacagaagacatcaataaaagactgtcactgccagccgacatacgcctgcccgagggctatctggagaagctcacactgaacagtcctatattcgataagccgctctcccgtagactgcgcagagtgagcctttcagagataggttttgggaaacttgaaacttatatcaagctggataagctgggcgagggaacttatgctactgtgtacaaaggaaagagtaaactcaccgataacctcgtggccctgaaggagatacgtctagagcatgaggagggtgcaccatgtaccgcgatcagggaggtttctcttctgaaagatctgaaacacgctaacatcgtcacccttcacgacattatccacaccgagaaatcactcacactcgtgttcgagtacctcgataaagatttaaaacagtacttagacgactgtggcaacattattaacatgcataacgtgaaactgtttctgtttcagttgctccggggactcgcctactgtcacagacagaaagtactgcatcgggatctcaagccgcagaatctattaatcaatgagcgaggagaactgaaactggctgatttcggcctggcccgagccaagtcgattcccaccaagacctacagtaatgaggtggttactctttggtaccgaccccctgacatccttttaggctcaacagactatagcacccaaatcgatatgtggggggtcggatgtatattctacgagatggcaactggcagacctctcttccctgggagcactgttgaggaacaactccacttcattttcaggatcctggggactcctacagaggagacgtggcctggaatccttagcaatgaggagttcaaaacctacaattatcctaaatatcgggctgaagcccttttgtcacacgcaccgagactcgattccgacggcgctgacctgttaacaaagctgcttcagttcgaggggagaaatcgaatttcagctgaagacgcgatgaaacaccctttcttcctgtccttgggcgagcggatccataagcttccagatacaacatccatctttgccttgaaagaaatccagctccaaaaggaggccagtctcagatcttcatctatgcctgattcaggacgcccagctttccgggtcgtggatactgagttttag

SEQ ID NO: 226697 - DNA, 1806 bp, Artificial Sequence
  derived and/or modified sequence
atgagaggcgcaagaagagcgagacggctcggccgatggctgttcgggcctgggataaggaggcattctgctatcagaccattatgtgcagctagcagacgtgagcactctgacagcagtcgccgtcagagagtgaggggtcaccgccctcaaagacccagtagttggcccgctgagcgggacgctgcgagcgccagcgcgactgccgcagcagcagcctccagtagctcagcaggcggaggtccaggaccggcaaccatggccgaggtcgcacgagcccctccacccatcgccatggataggatgaagaagataaagcggcagctgagcatgaccttaagggggggtagagggattgataaaacaaatggtgccccagagcagatcggtctggacgagtccgggggaggcggagggtcagatccgggagaagctcccactcgggcagctcccggagagctgcgcagcgcacgcggacctctgtcaagcgcccctgagatcgttcatgaggatttaaaaatgggttcggatggggaatccgatcaagcgtccgccacctctagcgatgaagtgcagagccctgttcgagtccggatgagaaatcacccaccgaggaagatttctacagaggatattaataaacgcctgtccctgccagccgatatccgcctcccggagggatatcttgagaaacttacccttaactccccaatcttcgataaaccactgtctagacgcctccggagagtctctctgagcgaaatcggctttgggaagttggaaacttacatcaaactggacaagctgggtgaagggacctatgctacagtgtataaggggaaaagcaaactgactgataacttagtcgccctcaaggaaattcgcctggaacacgaagaaggcgctccgtgtactgctatcagagaggtcagtctgttgaaagatttgaagcacgccaacatcgtcactctgcacgatatcatccatacggagaagagtctgaccctcgtctttgaatacctcgacaaggatctgaagcaatacttggacgactgtggtaacattattaatatgcacaacgtcaaactgttcttatttcaactgcttaggggcctggcctactgccaccggcagaaggtgctgcatcgggacctgaaaccacaaaatttgctgattaatgaacgtggggaacttaagttggctgatttcggactggctcgcgctaaaagtattccaacaaaaacttacagtaatgaggtagtgacactctggtacaggcccccagacattcttctcggctcgaccgactacagcacccagatagacatgtggggcgttggctgtattttctatgagatggcgacgggacgacccctgtttccagggagcacagtggaggaacagctacatttcatttttagaatcctgggtacaccgaccgaggagacttggcccggtatcctcagcaatgaggaattcaagacctacaactatcccaagtaccgggctgaagccctgctgtcacatgccccaaggtccctgtgtccctgcggccgtctggacagtgatggtgcggatctgcttactaagctgttgcagttcgaaggcaggaatcgcatcagcgcagaggatgccatgaagcacccttttttcctctccctgggcgaaagaattcacaaactgcctgacaccacatcaattttcgccctgaaagaaatccaactgcagaaagaggcaagtttacggtcctcctctatgcctgactcaggtaggcccgcttttcgtgtggttgacactgagttctag

SEQ ID NO: 226698 - DNA, 393 bp, Artificial Sequence
  derived and/or modified sequence
atgaacgacacggttactatcagaaccaggaagttcatgactaatagacttttgcagaggaaacagatggtgatcgacgtccttcaccctggcaaagcaaccgtgcctaaaacggaaatcagggagaaacttgcaaagatgtataagactacccctgacgttatttttgtcttcggctttagaacgcactttggcggcggaaagacgaccggattcggcatgatctacgacagtctcgattacgctaagaaaaacgagcccaaacacaggcttgctagacatggtctgtatgagaagaaaaaaacctccaggaagcaaaggaaggaacggaaaaacagaatgaagaaagtccggggcactgcaaaagcgaatgtgggagccggaaagaaatag

SEQ ID NO: 226699 - DNA, 393 bp, Artificial Sequence
  derived and/or modified sequence
atgaatgacacagtgaccatccgcaccaggaagttcatgaccaaccggctgctgcagaggaagcagatggtgattgatgtgctgcaccctgggaaggccaccgtgcccaagacagagatccgggagaagctggccaagatgtacaagaccaccccagatgtgatctttgtgtttggcttccgcacccactttggaggcggcaagaccaccggcttcggcatgatctatgacagcctggactatgccaagaagaatgagcccaagcaccggctggcccggcacggcctgtatgagaagaagaagaccagcaggaagcagaggaaggagaggaagaacaggatgaagaaggtgcggggcacagccaaggccaacgtgggcgccggcaagaagtag

SEQ ID NO: 226700 - DNA, 393 bp, Artificial Sequence
  derived and/or modified sequence
atgaacgacaccgtgaccatccggacccggaagttcatgaccaaccgcctcctccaacgcaagcagatggtgatcgatgtgcttcaccctgggaaggccaccgtcccaaagaccgagatacgtgagaagctggccaagatgtacaaaacaacaccagacgtgatattcgtctttgggttcagaactcactttggcggcggcaaaaccactggcttcggcatgatatacgactcattggactacgccaaaaagaatgaaccaaagcatcgcttagcgaggcacgggctgtacgaaaaaaaaaagacaagccgcaagcaacgcaaagaaaggaaaaacagaatgaaaaaagtcagggggactgctaaggctaacgtgggggccgggaagaaatag

SEQ ID NO: 226701 - DNA, 393 bp, Artificial Sequence
  derived and/or modified sequence
atgaatgacactgtaacaattcgcacacggaagtttatgactaacagacttctgcagcggaagcaaatggtgatcgatgttcttcacccgggaaaagccaccgtcccaaagacagaaatcagggaaaaactggccaaaatgtataagacaacgccagatgtgatcttcgtgtttggctttcggacacacttcgggggaggcaagacaaccggattcggcatgatatacgactctctggactacgctaagaaaaacgagccgaaacatcgattggcacggcacggcttatacgagaaaaaaaagacctcccggaaacaacgcaaagaaagaaagaacagaatgaagaaggtgcggggaaccgcaaaggcaaatgtgggtgccggaaaaaagtag

SEQ ID NO: 226702 - DNA, 514 bp, Artificial Sequence
  derived and/or modified sequence
ctgaagatagatcgccatcatgaacgacaccgtaactatccgcactagaaagttcatgaccaaccgactacttcagaggaaacaaatggtcattgatgtccttcaccccgggaaggcgacagtgcctaagacagaaattcgggaaaaactagccaaaatgtacaagaccacaccggatgtcatctttgtatttggattcagaactcattttggtggtggcaagacaactggctttggcatgatttatgattccctggattatgcaaagaaaaatgaacccaaacatagacttgcaagacatggcctgtatgagaagaaaaagacctcaagaaagcaacgaaaggaacgcaagaacagaatgaagaaagtcagggggactgcaaaggccaatgttggtgctggcaaaaagtgagctggagattggatcacagccgaaggagtaaaggtgctgcaatgatgttagctgtggccactgtggatttttcgcaagaacattaataaactaaaaacttca

SEQ ID NO: 226703 - DNA, 393 bp, Artificial Sequence
  derived and/or modified sequence
atgaacgacaccgtgaccatcagaaccagaaagttcatgaccaacagactgctgcagagaaagcagatggtgatcgacgtgctgcaccccggcaaggccaccgtgcccaagaccgagatcagagagaagctggccaagatgtacaagaccacccccgacgtgatcttcgtgttcggcttcagaacccacttcggcggcggcaagaccaccggcttcggcatgatctacgacagcctggactacgccaagaagaacgagcccaagcacagactggccagacacggcctgtacgagaagaagaagaccagcagaaagcagagaaaggagagaaagaacagaatgaagaaggtgagaggcaccgccaaggccaacgtgggcgccggcaagaagtag

SEQ ID NO: 226704 - DNA, 591 bp, Artificial Sequence
  derived and/or modified sequence
atgagaaccctggcctgcctgctgctgctgggctgcggctacctggcccacgtgctggccgaggaggccgagatccccagagaggtgatcgagagactggccagaagccagatccacagcatcagagacctgcagagactgctggagatcgacagcgtgggcagcgaggacagcctggacaccagcctgagagcccacggcgtgcacgccaccaagcacgtgcccgagaagagacccctgcccatcagaagaaagagaagcatcgaggaggccgtgcccgccgtgtgcaagaccagaaccgtgatctacgagatccccagaagccaggtggaccccaccagcgccaacttcctgatctggcccccctgcgtggaggtgaagagatgcaccggctgctgcaacaccagcagcgtgaagtgccagcccagcagagtgcaccacagaagcgtgaaggtggccaaggtggagtacgtgagaaagaagcccaagctgaaggaggtgcaggtgagactggaggagcacctggagtgcgcctgcgccaccaccagcctgaaccccgactacagagaggaggacaccgacgtgagatag

SEQ ID NO: 226705 - DNA, 162 bp, Artificial Sequence
  derived and/or modified sequence
atgagaaccctggcctgcctgctgctgctgggctgcggctacctggcccacgtgctggccgaggaggccgagatccccagagaggtgatcgagagactggccagaagccagatccacagcatcagagacctgcagagactgctggagatcgacagcgtgtag

SEQ ID NO: 226706 - DNA, 591 bp, Artificial Sequence
  derived and/or modified sequence
atgagaacgctggcctgtcttctcctgctgggttgtgggtatttagcacatgttcttgcggaggaagcagagattcccagagaagtcatcgagcgcttggcgcggtctcagattcattccattagagacttacaacggttgctggaaatcgactcagtgggcagcgaagactctctggatacaagtcttagggcccacggcgttcatgcaacgaagcatgtcccggaaaagagacctctccctattcggcgcaaacggagcatcgaagaagctgtgcctgctgtgtgcaagacccggaccgtaatctatgaaatcccaagaagccaggttgatcccaccagcgcaaacttcctgatctggccaccatgtgtggaagtgaagcgctgcacaggatgttgtaacacaagcagcgtgaagtgccaaccttcaagggtgcatcaccgcagtgttaaggtggctaaagtggaatatgtgcggaagaagccgaaactgaaagaggttcaggtgcgactagaggagcatctcgagtgcgcctgcgcaacgacgagcctcaatcctgactacagagaggaggacaccgacgtgcggtag

SEQ ID NO: 226707 - DNA, 162 bp, Artificial Sequence
  derived and/or modified sequence
atgagaacgctagcttgtctgctcctgctgggttgcggatacctggcccatgtgctcgcagaggaggccgagataccaagggaggtgattgagcgtctggccagaagccagatccatagcatccgcgacctgcagcgcctccttgaaatcgactccgtgtag

SEQ ID NO: 226708 - DNA, 591 bp, Artificial Sequence
  derived and/or modified sequence
atgaggaccctggcctgcctgctgctgctgggctgcggctacctggcccacgtgctggccgaggaggccgagatcccccgggaggtgattgaaaggctggcccggagccagatccacagcatccgggacctgcagaggctgctggagattgacagcgtgggcagcgaggacagcctggacaccagcctgcgggcccacggcgtgcacgccaccaagcacgtgcctgagaagaggcccctgcccatccggaggaagaggagcattgaggaggccgtgcctgctgtgtgcaagaccaggacagtcatctatgagatccccaggagccaggtggaccccaccagcgccaacttcctgatctggccaccctgtgtggaggtgaagcgctgcaccggctgctgcaacaccagctctgtgaagtgccagcccagccgggtgcaccacaggtctgtgaaggtggccaaggtggagtatgtgaggaagaagcccaagctgaaggaggtgcaggtgcggctggaggagcacctggagtgtgcctgtgccaccaccagcctgaacccagactaccgggaggaggacacagatgtgaggtag

SEQ ID NO: 226709 - DNA, 162 bp, Artificial Sequence
  derived and/or modified sequence
atgaggaccctggcctgcctgctgctgctgggctgcggctacctggcccacgtgctggccgaggaggccgagatcccccgggaggtgattgaaaggctggcccggagccagatccacagcatccgggacctgcagaggctgctggagattgacagcgtgtag

SEQ ID NO: 226710 - DNA, 591 bp, Artificial Sequence
  derived and/or modified sequence
atgcggaccctggcctgcctgctgctgctgggctgcggctacctggcccatgtgctggcagaagaggccgaaattccgcgtgaagtcatagaacggctggcgcggtcccaaattcattccatccgggaccttcagcgactgcttgaaattgattccgtgggcagtgaggactcccttgacacttctttgcgcgcgcacggggtgcacgctaccaagcacgtaccagagaaacggcccctccctattcggcggaaacgcagcatcgaagaggcagtgcccgccgtgtgcaagaccaggacagttatctacgaaataccccgaagccaggtggacccaacatcagcaaacttcctgatctggccaccatgtgttgaggtcaaacgttgcacgggctgttgcaacacgtcctccgtaaaatgtcagccctctcgtgtgcaccatagaagcgtgaaggtcgccaaagttgaatacgtgcgaaaaaaaccgaagctgaaagaagtccaggtcaggctcgaagaacacctggaatgcgcttgcgccactacgtcacttaatcctgattacagagaggaggataccgatgttcggtag

SEQ ID NO: 226711 - DNA, 162 bp, Artificial Sequence
  derived and/or modified sequence
atgcggaccctggcctgcctgctgctgctgggctgcggctacctggcacacgtgttagctgaagaagcagagatccctcgtgaggttatcgagcgcctagccagaagtcagatacattcgatcagggacctgcaacgcctgctcgagatcgattcagtttag

SEQ ID NO: 226712 - DNA, 591 bp, Artificial Sequence
  derived and/or modified sequence
atgcgtactctggcatgtctgttattactgggctgcgggtacctggctcacgtgctggctgaagaggccgagattcctagagaggtaattgagcggctggctagaagccaaatacacagtattcgcgatctgcagaggcttcttgaaatcgactccgtgggctccgaggactcgctggacacctcacttagagcacatggtgtccacgctactaaacatgtgcctgagaaacggccacttcctatccggagaaagcgctcaatagaggaggccgtgccagccgtctgtaaaactaggacggtcatctatgagataccccgatctcaggtggaccccacgagtgccaactttcttatttggcctccttgcgtggaggtcaagcggtgtactgggtgctgtaatacatcatcagtcaagtgccagccgtccagagtccaccataggagcgtgaaggtggccaaggtcgaatacgtccgtaagaagcctaagctgaaagaagtccaggttcgacttgaggaacacctggagtgtgcctgtgcaactacttctctgaaccccgactatcgggaggaggacacagatgttagatag

SEQ ID NO: 226713 - DNA, 162 bp, Artificial Sequence
  derived and/or modified sequence
atgcggaccctcgcctgtctgctcctcctaggatgcggatacctggcacacgtgctggccgaggaagccgaaatcccgcgagaagtgatagaacgactagctagatctcagatccacagcattcgggacctacagcgactcctagaaatagactccgtctag

SEQ ID NO: 226714 - DNA, 591 bp, Artificial Sequence
  derived and/or modified sequence
atgaggactctggcatgtctgttgcttcttggctgtggctacctggcccacgtcctagctgaggaagccgaaatcccccgcgaggtaatagagcgcctggcgcgttcacaaatacactcaattagggaccttcagcggctgctcgagattgacagcgtcgggtctgaggattcccttgatacttcccttagggcccacggggttcatgccaccaagcatgtcccggaaaaaagaccgctacccattcgccgcaagaggtcaatcgaagaagccgtacccgcagtatgtaagacccgtacggtgatttatgaaatcccgagatcccaggtcgatcccaccagcgctaactttctgatatggcccccctgcgttgaagtgaaaaggtgtaccggctgctgtaacactagctctgtcaaatgtcagcccagcagggtgcatcacagaagcgtgaaggtagccaaagtagaatacgttaggaagaagcccaaacttaaggaagttcaagtcagattggaagagcatctggaatgtgcttgtgccaccacatctctcaaccccgactatcgagaagaagacaccgacgtgagatag

SEQ ID NO: 226715 - DNA, 162 bp, Artificial Sequence
  derived and/or modified sequence
atgcgaacactggcttgtcttctgctcctgggctgcggttacctcgcacatgtgttggcagaagaggcagagatccctagggaagtaatcgaacggctcgcccgtagccaaatccactctattcgtgatctgcagcgtttactggaaatagatagtgtatag

SEQ ID NO: 226716 - DNA, 591 bp, Artificial Sequence
  derived and/or modified sequence
atgcgaacactcgcttgtcttttattgcttggatgtggatacctggcccatgtgctcgcagaagaagccgagatcccaagagaggtaattgagagattagcccgcagccaaatccatagtattcgggaccttcagcgccttctggagattgactccgtaggttccgaggactctttggacacttccctccgcgcccatggtgtgcacgccaccaagcacgtcccggaaaaacgaccactccccattcgacgcaagcgatcaatcgaagaggcagttccagccgtttgcaaaactcggacagtgatttatgaaatcccgagatcccaggtcgatcccaccagcgctaactttctgatatggcccccctgcgttgaagtgaaaaggtgtaccggctgctgtaacactagctctgtcaaatgtcagcccagcagggtgcatcacagaagcgtgaaggtagccaaagtagaatacgttaggaagaagcccaaacttaaggaagttcaagtcagattggaagagcatctggaatgtgcttgtgccaccacatctctcaaccccgactatcgagaagaagacaccgacgtgagatag

SEQ ID NO: 226717 - RNA, 591 nt, Artificial Sequence
  derived and/or modified sequence
augaggacucuggcaugucuguugcuucuuggcuguggcuaccuggcccacguccuagcugaggaagccgaaaucccccgcgagguaauagagcgccuggcgcguucacaaauacacucaauuagggaccuucagcggcugcucgagauugacagcgucgggucugaggauucccuugauacuucccuuagggcccacgggguucaugccaccaagcaugucccggaaaaaagaccgcuacccauucgccgcaagaggucaaucgaagaagccguacccgcaguauguaagacccguacggugauuuaugaaaucccgagaucccaggucgaucccaccagcgcuaacuuucugauauggccccccugcguugaagugaaaagguguaccggcugcuguaacacuagcucugucaaaugucagcccagcagggugcaucacagaagcgugaagguagccaaaguagaauacguuaggaagaagcccaaacuuaaggaaguucaagucagauuggaagagcaucuggaaugugcuugugccaccacaucucucaaccccgacuaucgagaagaagacaccgacgugagauag

SEQ ID NO: 226718 - RNA, 162 nt, Artificial Sequence
  derived and/or modified sequence
augcgaacacuggcuugucuucugcuccugggcugcgguuaccucgcacauguguuggcagaagaggcagagaucccuagggaaguaaucgaacggcucgcccguagccaaauccacucuauucgugaucugcagcguuuacuggaaauagauaguguauag

SEQ ID NO: 226719 - RNA, 591 nt, Artificial Sequence
  derived and/or modified sequence
augcgaacacucgcuugucuuuuauugcuuggauguggauaccuggcccaugugcucgcagaagaagccgagaucccaagagagguaauugagagauuagcccgcagccaaauccauaguauucgggaccuucagcgccuucuggagauugacuccguagguuccgaggacucuuuggacacuucccuccgcgcccauggugugcacgccaccaagcacgucccggaaaaacgaccacuccccauucgacgcaagcgaucaaucgaagaggcaguuccagccguuugcaaaacucggacagugauuuaugaaaucccgagaucccaggucgaucccaccagcgcuaacuuucugauauggccccccugcguugaagugaaaagguguaccggcugcuguaacacuagcucugucaaaugucagcccagcagggugcaucacagaagcgugaagguagccaaaguagaauacguuaggaagaagcccaaacuuaaggaaguucaagucagauuggaagagcaucuggaaugugcuugugccaccacaucucucaaccccgacuaucgagaagaagacaccgacgugagauag

SEQ ID NO: 226720 - protein, 5142 aa, Artificial Sequence
  derived and/or modified sequence
MGNEASLEGEGLPEGLAAAAAAGGGASGAGSPSHTAIPAGMEADLSQLSEEERRQIAAVMSRAQGLPKGSVPPAAAESPSMHRKQELDSSHPPKQSGRPPDPGRPAQPGLSKSRTTDTFRSEQKLPGRSPSTISLKESKSRTDLKEEHKSSMMPGFLSEVNALSAVSSVVNKFNPFDLISDSEASQEETTKKQKVVQKEQGKPEGIIKPPLQQQPPKPIPKQQGPGRDPLQQDGTPKSISSQQPEKIKSQPPGTGKPIQGPTQTPQTDHAKLPLQRDASRPQTKQADIVRGESVKPSLPSPSKPPIQQPTPGKPPAQQPGHEKSQPGPAKPPAQPSGLTKPLAQQPGTVKPPVQPPGTTKPPAQPLGPAKPPAQQTGSEKPSSEQPGPKALAQPPGVGKTPAQQPGPAKPPTQQVGTPKPLAQQPGLQSPAKAPGPTKTPVQQPGPGKIPAQQAGPGKTSAQQTGPTKPPSQLPGPAKPPPQQPGPAKPPPQQPGSAKPPSQQPGSTKPPPQQPGPAKPSPQQPGSTKPPSQQPGSAKPSAQQPSPAKPSAQQSTKPVSQTGSGKPLQPPTVSPSAKQPPSQGLPKTICPLCNTTELLLHVPEKANFNTCTECQTTVCSLCGFNPNPHLTEVKEWLCLNCQMKRALGGDLAPVPSSPQPKLKTAPVTTTSAVSKSSPQPQQTSPKKDAAPKQDLSKAPEPKKPPPLVKQPTLHGSPSAKAKQPPEADSLSKPAPPKEPSVPSEQDKAPVADDKPKQPKMVKPTTDLVSSSSATTKPDIPSSKVQSQAEEKTTPPLKTDSAKPSQSFPPTGEKVSPFDSKAIPRPASDSKIISHPGPSSESKGQKQVDPVQKKEEPKKAQTKMSPKPDAKPMPKGSPTPPGPRPTAGQTVPTPQQSPKPQEQSRRFSLNLGSITDAPKSQPTTPQETVTGKLFGFGASIFSQASNLISTAGQPGPHSQSGPGAPMKQAPAPSQPPTSQGPPKSTGQAPPAPAKSIPVKKETKAPAAEKLEPKAEQAPTVKRTETEKKPPPIKDSKSLTAEPQKAVLPTKLEKSPKPESTCPLCKTELNIGSKDPPNFNTCTECKNQVCNLCGFNPTPHLTEIQEWLCLNCQTQRAISGQLGDIRKMPPAPSGPKASPMPVPTESSSQKTAVPPQVKLVKKQEQEVKTEAEKVILEKVKETLSMEKIPPMVTTDQKQEESKLEKDKASALQEKKPLPEEKKLIPEEEKIRSEEKKPLLEEKKPTPEDKKLLPEAKTSAPEEQKHDLLKSQVQIAEEKLEGRVAPKTVQEGKQPQTKMEGLPSGTPQSLPKEDDKTTKTIKEQPQPPCTAKPDQVEPGKEKTEKEDDKSDTSSSQQPKSPQGLSDTGYSSDGISSSLGEIPSLIPTDEKDILKGLKKDSFSQESSPSSPSDLAKLESTVLSILEAQASTLADEKSEKKTQPHEVSPEQPKDQEKTQSLSETLEITISEEEIKESQEERKDTFKKDSQQDIPSSKDHKEKSEFVDDITTRREPYDSVEESSESENSPVPQRKRRTSVGSSSSDEYKQEDSQGSGEEEDFIRKQIIEMSADEDASGSEDDEFIRNQLKEISSSTESQKKEETKGKGKITAGKHRRLTRKSSTSIDEDAGRRHSWHDEDDEAFDESPELKYRETKSQESEELVVTGGGGLRRFKTIELNSTIADKYSAESSQKKTSLYFDEEPELEMESLTDSPEDRSRGEGSSSLHASSFTPGTSPTSVSSLDEDSDSSPSHKKGESKQQRKARHRPHGPLLPTIEDSSEEEELREEEELLKEQEKQREIEQQQRKSSSKKSKKDKDELRAQRRRERPKTPPSNLSPIEDASPTEELRQAAEMEELHRSSCSEYSPSIESDPEGFEISPEKIIEVQKVYKLPTAVSLYSPTDEQSIMQKEGSQKALKSAEEMYEEMMHKTHKYKAFPAANERDEVFEKEPLYGGMLIEDYIYESLVEDTYNGSVDGSLLTRQEEENGFMQQKGREQKIRLSEQIYEDPMQKITDLQKEFYELESLHSVVPQEDIVSSSFIIPESHEIVDLGTMVTSTEEERKLLDADAAYEELMKRQQMQLTPGSSPTQAPIGEDMTESTMDFDRMPDASLTSSVLSGASLTDSTSSATLSIPDVKITQHFSTEEIEDEYVTDYTREIQEIIAHESLILTYSEPSESATSVPPSDTPSLTSSVSSVCTTDSSSPITTLDSITTVYTEPVDMITKFEDSEEISSSTYFPGSIIDYPEEISVSLDRTAPPDGRASADHIVISLSDMASSIIESVVPKPEGPVADTVSTDLLISEKDPVKKAKKETGNGIILEVLEAYRDKKELEAERTKSSLSETVFDHPPSSVIALPMKEQLSTTYFTSGETFGQEKPASQLPSGSPSVSSLPAKPRPFFRSSSLDISAQPPPPPPPPPPPPPPPPPPPPPPLPPPTSPKPTILPKKKLTVASPVTTATPLFDAVTTLETTAVLRSNGLPVTRICTTAPPPVPPKPSSIPSGLVFTHRPEPSKPPIAPKPVIPQLPTTTQKPTDIHPKPTGLSLTSSMTLNLVTSADYKLPSPTSPLSPHSNKSSPRFSKSLTETYVVITLPSEPGTPTDSSASQAITSWPLGSPSKDLVSVEPVFSVVPPVTAVEIPISSEQTFYISGALQTFSATPVTAPSSFQAAPTSVTQFLTTEVSKTEVSATRSTAPSVGLSSISITIPPEPLALDNIHLEKPQYKEDGKLQLVGDVIDLRTVPKVEVKTTDKCIDLSASTMDVKRQITANEVYGKQISAVQPSIINLSVTSSIVTPVSLATETVTFVTCTASASYTTGTESLVGAEHAMTTPLQLTTSKHAEPPYRIPSDQVFPIAREEAPINLSLGTPAHAVTLAITKPVTVPPVGVTNGWTDSTVSQGITDGEVVDLSTTKSHRTVVTMDESTSSVMTKIIEDEKPVDLTAGRRAVCCDVVYKLPFGRSCTAQQPATTLPEDRFGYRDDHYQYDRSGPYGYRGIGGMKPSMSDTNLAEAGHFFYKSKNAFDYSEGTDTAVDLTSGRVTTGEVMDYSSKTTGPYPETRQVISGAGISTPQYSTARMTPPPGPQYCVGSVLRSSNGVVYSSVATPTPSTFAITTQPGSIFSTTVRDLSGIHTADAVTSLPAMHHSQPMPRSYFITTGASETDIAVTGIDISASLQTITMESLTAETIDSVPTLTTASEVFPEVVGDESALLIVPEEDKQQQQLDLERELLELEKIKQQRFAEELEWERQEIQRFREQEKIMVQKKLEELQSMKQHLLFQQEEERQAQFMMRQETLAQQQLQLEQIQQLQQQLHQQLEEQKIRQIYQYNYDPSGTASPQTTTEQAILEGQYAALEGSQFWATEDATTTASAVVAIEIPQSQGWYTVQSDGVTQYIAPPGILSTVSEIPLTDVVVKEEKQPKKRSSGAKVRGQYDDMGENMTDDPRSFKKIVDSGVQTDDEDATDRSYVSRRRRTKKSVDTSVQTDDEDQDEWDMPTRSRRKARVGKYGDSMTEADKTKPLSKVSSIAVQTVAEISVQTEPVGTIRTPSIRARVDAKVEIIKHISAPEKTYKGGSLGCQTEADSDTQSPQYLSATSPPKDKKRPTPLEIGYSSHLRADSTVQLAPSPPKSPKVLYSPISPLSPGKALESAFVPYEKPLPDDISPQKVLHPDMAKVPPASPKTAKMMQRSMSDPKPLSPTADESSRAPFQYTEGYTTKGSQTMTSSGAQKKVKRTLPNPPPEEISTGTQSTFSTMGTVSRRRICRTNTMARAKILQDIDRELDLVERESAKLRKKQAELDEEEKEIDAKLRYLEMGINRRKEALLKEREKRERAYLQGVAEDRDYMSDSEVSSTRPTRIESQHGIERPRTAPQTEFSQFIPPQTQTESQLVPPTSPYTQYQYSSPALPTQAPTSYTQQSHFEQQTLYHQQVSPYQTQPTFQAVATMSFTPQVQPTPTPQPSYQLPSQMMVIQQKPRQTTLYLEPKITSNYEVIRNQPLMIAPVSTDNTFAVSHLGSKYNSLDLRIGLEERSSMASSPISSISADSFYADIDHHTPRNYVLIDDIGEITKGTAALSTAFSLHEKDLSKTDRLLRTTETRRSQEVTDFLAPLQSSSRLHSYVKAEEDPMEDPYELKLLKHQIKQEFRRGTESLDHLAGLSHYYHADTSYRHFPKSEKYSISRLTLEKQAAKQLPAAILYQKQSKHKKSLIDPKMSKFSPIQESRDLEPDYSSYMTSSTSSIGGISSRARLLQDDITFGLRKNITDQQKFMGSSLGTGLGTLGNTIRSALQDEADKPYSSGSRSRPSSRPSSVYGLDLSIKRDSSSSSLRLKAQEAEALDVSFSHASSSARTKPTSLPISQSRGRIPIVAQNSEEESPLSPVGQPMGMARAAAGPLPPISADTRDQFGSSHSLPEVQQHMREESRTRGYDRDIAFIMDDFQHAMSDSEAYHLRREETDWFDKPRESRLENGHGLDRKLPERLVHSRPLSQHQEQIIQMNGKTMHYIFPHARIKITRDSKDHTVSGNGLGIRIVGGKEIPGHSGEIGAYIAKILPGGSAEQTGKLMEGMQVLEWNGIPLTSKTYEEVQSIISQQSGEAEICVRLDLNMLSDSENSQHLELHEPPKAVDKAKSPGVDPKQLAAELQKVSLQQSPLVLSSVVEKGSHVHSGPTSAGSSSVPSPGQPGSPSVSKKKHGSSKPTDGTKVVSHPITGEIQLQINYDLGNLIIHILQARNLVPRDNNGYSDPFVKVYLLPGRGQVMVVQNASAEYKRRTKHVQKSLNPEWNQTVIYKSISMEQLKKKTLEVTVWDYDRFSSNDFLGEVLIDLSSTSHLDNTPRWYPLKEQTESIDHGKSHSSQSSQQSPKPSVIKSRSHGIFPDPSKDMQVPTIEKSHSSPGSSKSSSEGHLRSHGPSRSQSKTSVTQTHLEDAGAAIAAAEAAVQQLRIQPTKPPNHRPAESSVSTGSSGSSFGSGYSVDSEGSSSTAGETNLFPIPRIGKMGQNGQEPVKQPGVGVGLADTEAKTQVMGEIKIALKKEMKTDGEQLIVEILQCRNITYKFKSPDHLPDLYVKIYVMNISTQKKVIKKKTRVCRHDREPSFNETFRFSLSPAGHSLQILLFSNGGKFMKKTLIGEACIWLDKVDLRKRIVNWHKLLVSPTQTH

SEQ ID NO: 226721 - protein, 3635 aa, Artificial Sequence
  derived and/or modified sequence
MGNEASLEGEGLPEGLAAAAAAGGGASGAGSPSHTAIPAGMEADLSQLSEEERRQIAAVMSRAQGLPKGSVPPAAAESPSMHRKQELDSSHPPKQSGRPPDPGRPAQPGLSKSRTTDTFRSEQKLPGRSPSTISLKESKSRTDLKEEHKSSMMPGFLSEVNALSAVSSVVNKFNPFDLISDSEASQEETTKKQKVVQKEQGKPEGIIKPPLQQQPPKPIPKQQGPGRDPLQQDGTPKSISSQQPEKIKSQPPGTGKPIQGPTQTPQTDHAKLPLQRDASRPQTKQADIVRGESVKPSLPSPSKPPIQQPTPGKPPAQQPGHEKSQPGPAKPPAQPSGLTKPLAQQPGTVKPPVQPPGTTKPPAQPLGPAKPPAQQTGSEKPSSEQPGPKALAQPPGVGKTPAQQPGPAKPPTQQVGTPKPLAQQPGLQSPAKAPGPTKTPVQPKPPSQQPGSTKPPPQQPGPAKPSPQQPGSTKPPSQQPGSAKPSAQQPSPAKPSAQQSTKPVSQTGSGKPLQPPTVSPSAKQPPSQGLPKTICPLCNTTELLLHVPEKANFNTCTECQTTVCSLCGFNPNPHLTEVKEWLCLNCQMKRALGGDLAPVPSSPQPKLKTAPVTTTSAVSKSSPQPQQTSPKKDAAPKQDLSKAPEPKKPPPLVKQPTLHGSPSAKAKQPPEADSLSKPAPPKEPSVPSEQDKAPVADDKPKQPKMVKPTTDLVSSSSATTKPDIPSSKVQSQAEEKTTPPLKTDSAKPSQSFPPTGEKVSPFDSKAIPRPASDSKIISHPGPSSESKGQKQVDPVQKKEEPKKAQTKMSPKPDAKPMPKGSPTPPGPRPTAGQTVPTPQQSPKPQEQSRRFSLNLGSITDAPKSQPTTPQETVTGKLFGFGASIFSQASNLISTAGQPGPHSQSGPGAPMKQAPAPSQPPTSQGPPKSTGQAPPAPAKSIPVKKETKAPAAEKLEPKAEQAPTVKRTETEKKPPPIKDSKSLTAEPQKAVLPTKLEKSPKPESTCPLCKTELNIGSKDPPNFNTCTECKNQVCNLCGFNPTPHLTENCQTQRAISGQLGDIRKMPPAPSGPKASPMPVPTESSSQKTAVPPQVKLVKKQEQEVKTEAEKVILEKVKETLSMEKIPPMVTTDQKQEESKLEKDKASALQEKKPLPEEKKLIPEEEKIRSEEKKPLLEEKKPTPEDKKLLPEAKTSAPEEQKHDLLKSQVQIAEEKLEGRVAPKTVQEGKQPQTKMEGLPSGTPQSLPKEDDKTTKTIKEQPQPPCTAKPDQEKEDDKSDTSSSQQPKSPQGLSDTGYSSDGISSSLGEIPSLIPTDEKDILKGLKKDSFSQESSPSSPSDLAKLESTVLSILEAQASTLADEKSEKKTQPHEVSPEQPKDQEKTQSLSETLEITISEEEIKESQEERKDTFKKDSQQDIPSSKDHKEKSEFVDDITTRREPYDSVEESSESENSPVPQRKRRTSVGSSSSDEYKQEDSQGSGEEEDFIRKQIIEMSADEDASGSEDDEFIRNQLKEISSSTESQKKEETKGKGKITAGKHRRLTRKSSTSIDEDAGRRHSWHDEDDEAFDESPELKYRETKSQESEELVVTGGGGLRRFKTIELNSTIADKYSAESSQKKTSLYFDEEPELEMESLTDSPEDRSRGEGSSSLHASSFTPGTSPTSVSSLDEDSDSSPSHKKGESKQQRKARHRPHGPLLPTIEDSSEEEELREEEELLKEQEKQREIEQQQRKSSSKKSKKDKDELRAQRRRERPKTPPSNLSPIEDASPTEELRQAAEMEELHRSSCSEYSPSIESDPEGFEISPEKIIEVQKVYKLPTAVSLYSPTDEQSIMQKEGSQKALKSAEEMYEEMMHKTHKYKAFPAANERDEVFEKEPLYGGMLIEDYIYESLVEDTYNGSVDGSLLTRQEEENGFMQQKGREQKIRLSEQIYEDPMQKITDLQKEFYELESLHSVVPQEDIVSSSFIIPESHEIVDLGTMVTSTEEERKLLDADAAYEELMKRQQMQLTPGSSPTQAPIGEDMTESTMDFDRMPDASLTSSVLSGASLTDSTSSATLSIPDVKITQHFSTEEIEDEYVTDYTREIQEIIAHESLILTYSEPSESATSVPPSDTPSLTSSVSSVCTTDSSSPITTLDSITTVYTEPVDMITKFEDSEEISSSTYFPGSIIDYPEEISVSLDRTAPPDGRASADHIVISLSDMASSIIESVVPKPEGPVADTVSTDLLISEKDPVKKAKKETGNGIILEVLEAYRDKKELEAERTKSSLSETVFDHPPSSVIALPMKEQLSTTYFTSGETFGQEKPASQLPSGSPSVSSLPAKPRPFFRSSSLDISAQPPPPPPPPPPPPPPPPPPPPPPLPPPTSPKPTILPKKKLTVASPVTTATPLFDAVTTLETTAVLRSNGLPVTRICTTAPPPVPPKPSSIPSGLVFTHRPEPSKPPIAPKPVIPQLPTTTQKPTDIHPKPTGLSLTSSMTLNLVTSADYKLPSPTSPLSPHSNKSSPRFSKSLTETYVVITLPSEPGTPTDSSASQAITSWPLGSPSKDLVSVEPVFSVVPPVTAVEIPISSEQTFYISGALQTFSATPVTAPSSFQAAPTSVTQFLTTEVSKTEVSATRSTAPSVGLSSISITIPPEPLALDNIHLEKPQYKEDGKLQLVGDVIDLRTVPKVEVKTTDKCIDLSASTMDVKRQITANEVYGKQISAVQPSIINLSVTSSIVTPVSLATETVTFVTCTASASYTTGTESLVGAEHAMTTPLQLTTSKHAEPPYRIPSDQVFPIAREEAPINLSLGTPAHAVTLAITKPVTVPPVGVTNGWTDSTVSQGITDGEVVDLSTTKSHRTVVTMDESTSSVMTKIIEDEKPVDLTAGRRAVCCDVVYKLPFGRSCTAQQPATTLPEDRFGYRDDHYQYDRSGPYGYRGIGGMKPSMSDTNLAEAGHFFYKSKNAFDYSEGTDTAVDLTSGRVTTGEVMDYSSKTTGPYPETRQVISGAGISTPQYSTARMTPPPGPQYCVGSVLRSSNGVVYSSVATPTPSTFAITTQPGSIFSTTVRDLSGIHTADAVTSLPAMHHSQPMPRSYFITTGASETDIAVTGIDISASLQTITMESLTAETIDSVPTLTTASEVFPEVVGDESALLIVPEEDKQQQQLDLERELLELEKIKQQRFAEELEWERQEIQRFREQEKIMVQKKLEELQSMKQHLLFQQEEERQAQFMMRQETLAQQQLQLEQIQQLQQQLHQQLEEQKIRQIYQYNYDPSGTASPQTTTEQAILEGQYAALEGSQFWATEDATTTASAVVAIEIPQSQGWYTVQSDGVTQYIAPPGILSTVSEIPLTDVVVKEEKQPKKRSSGAKVRGQYDDMGENMTDDPRSFKKIVDSGVQTDDEDATDRSYVSRRRRTKKSVDTSVQTDDEDQDEWDMPTRSRRKARVGKYGDSMTEADKTKPLSKVSSIAVQTVAEISVQTEPVGTIRTPSIRARVDAKVEIIKHISAPEKTYKGGSLGCQTEADSDTQSPQYLSATSPPKDKKRPTPLEIGYSSHLRADSTVQLAPSPPKSPKVLYSPISPLSPGKALESAFVPYEKPLPDDISPQKVLHPDMAKVPPASPKTAKMMQRSMSDPKPLSPTADESSRAPFQYTEGYT

SEQ ID NO: 226722 - DNA, 15429 bp, Artificial Sequence
  derived and/or modified sequence
atggggaatgaagctagcctggaaggggagggcctgccagaaggactagctgcagcagctgctgctggcgggggggcctccggagcaggttccccatcccacacggcaatcccagcaggcatggaggcagatctttcccaattgtctgaagaagagagaaggcagatcgcagccgtgatgagtcgcgctcaaggtctgcctaaaggatcggttccacctgcggccgccgagtctccgtcaatgcacagaaagcaggaactcgactcatctcacccaccaaagcagtcgggccggccacccgatcccggccggccagctcagcctgggctgtccaaaagtaggacaacagataccttccggtccgagcagaagctccccggtcggagcccttctaccattagcctgaaagagtcaaagtcaagaactgatctcaaggaggagcacaagtctagtatgatgccaggcttcctctcagaggtaaatgctctaagtgcagtaagctctgtcgtgaacaaatttaatccatttgatctgatctctgacagtgaagcgagccaggaagaaactactaaaaaacagaaggtagttcagaaggagcagggcaaaccggagggcataattaaaccccccttacagcagcaacccccaaagcccattcctaagcagcagggtcctggcagggacccgctgcagcaagacggcacacctaagtcaatcagttctcagcaaccagagaagattaaatctcaaccgcctggcaccggcaagccaatccaggggccaacacagacccctcagacagaccatgctaagctgcccctgcagagggatgcctcacgtccccaaacaaagcaagccgatattgttcgcggggagagtgttaagcctagcctgccatctccaagcaagccgcccatacagcaacctacccccggtaaaccccctgcgcagcagccgggccatgaaaaatcccagcctggcccggccaagccaccagcacaacccagtggcttaactaaacctctcgcgcaacagccaggaacggtgaagccccccgttcagccacctggcactacaaagccacccgcccagcctctgggaccagctaaacccccagcacagcagaccgggtccgagaagcccagctccgaacagcccggacctaaggctttggcacaacccccaggcgtcggcaagactcccgcccagcagccaggacccgctaagccccccacccagcaagtcggcacacccaagcccctagcccagcagcctggactgcagagtcccgccaaggcccccggcccaaccaagacacccgtgcagcaacccgggcctggcaaaattccagcccagcaagctggcccaggcaaaacatcagctcagcagactgggcctactaagcctccgtcccagcttccaggccctgccaagccgcccccacagcagcctgggcccgcaaagcccccaccccaacagcctgggagtgcaaaaccaccctcccagcagccaggatcaacaaagcctccgccccagcagcccgggccagccaagccctccccccaacaaccaggttcgacaaagccgccaagtcagcaacctggttctgcaaagccaagtgcccaacagccttctccagcaaagccgagtgcgcagcagagcacaaagcctgtgtcccagaccggaagtggcaagccattacaaccccctacagtgtctccatctgcaaaacagcccccttcccagggattgcctaagactatctgcccactatgcaataccacggagttattgcttcacgttcccgagaaggcaaacttcaatacctgcactgagtgtcagaccaccgtctgctcactgtgcggattcaaccctaatccccacctgaccgaggtgaaagaatggctctgtttaaattgtcaaatgaagagagcgctcgggggggacctggcacccgtgccgtccagcccgcagccaaagttgaagacggctcccgtgaccactacctctgccgtcagtaagagctccccccagccccagcagacttcccccaaaaaagacgcggcaccgaagcaggacctgtccaaggcgccagagcccaagaaaccgcccccccttgtcaagcaacccacactccacggttcacctagcgcgaaggccaagcagcctcctgaggccgacagcctatctaagcctgcaccccccaaggagccaagcgtcccttctgagcaagacaaggccccggtggccgatgataagcctaaacagccaaagatggtgaagcctacaacagatttggtgagctcctcttcagctacaactaaacccgacatcccctccagcaaggtccagtcacaagccgaagaaaaaacaacgccccctctaaagaccgacagcgccaaacccagtcaatcgttcccaccaacgggggagaaggtcagcccatttgacagtaaagctatccccagacccgcctccgactccaaaatcatttctcaccctggaccgtcctccgaaagcaaagggcagaagcaggtggatcccgtacaaaaaaaagaggagcctaaaaaagctcaaaccaagatgtctccaaaaccagatgccaaacccatgccaaagggatcccctactccccccgggcctagacccacagcaggccagacggtgcccactcctcaacaatccccaaaaccacaggagcagagcagacggttctctcttaatctcggctcaatcactgatgccccgaaaagccagccgaccacgcctcaggaaacagtgactggcaaactctttggttttggtgctagtatctttagtcaggcgtctaatctgatcagcacggcaggacagcccggaccgcacagccagtcaggtccaggagctccaatgaagcaagcacctgcccccagtcagccacccacgtctcaagggcccccaaaatcaaccgggcaagcaccccctgctccagctaaaagtattcccgtaaagaaagagaccaaggcgcctgctgctgagaaactcgaaccgaaagctgaacaggcccccaccgtaaagagaacagagacagagaagaaaccaccccccattaaggactccaaatccttaaccgctgagccccaaaaggccgtcctgcccacgaaattagaaaagtcccccaaacctgagagcacctgtcctctgtgcaagacagaactcaatatcgggtcaaaagacccccctaattttaatacctgtacggaatgtaaaaaccaggtgtgtaacctttgcggctttaatcccaccccacacctgacagagattcaagagtggctgtgcctgaattgccaaacgcagcgcgcgatctctggtcagcttggggacatacgtaaaatgcccccggctccctccggccccaaagccagccctatgccagtccctacagaatcaagctcacagaagacagcggtccctcctcaggtgaaactggtgaaaaaacaggaacaggaggtcaagactgaagcagaaaaggtgatcttagaaaaggttaaggaaaccctttcaatggagaagattccaccaatggtgactaccgaccagaaacaggaggagagcaaactcgagaaagacaaggcgagtgcccttcaggaaaaaaagccactcccagaggaaaagaaactcatcccagaggaggagaagatacgcagcgaggagaaaaaaccactactggaggagaagaaaccaacacccgaagacaaaaagcttcttcccgaggcgaaaactagcgctcccgaggagcagaaacacgacctcctcaagtcccaggtgcaaatcgcagaagagaagcttgagggtagggttgctccaaagaccgttcaagagggcaagcagccccagaccaagatggagggtttgccttcaggcacccctcaatcgttgccaaaggaagacgacaaaactaccaagactattaaggagcaacctcagcccccttgtacagctaagcctgaccaagtcgaaccggggaaagaaaaaacagagaaagaagatgataaatcagatacatcctctagtcaacagcccaagtctccacaggggctgtccgacacaggatactcgtcagacgggatctcttcgagtctgggcgaaatcccatctctcattcccactgatgaaaaggatattctgaaaggtctgaagaaagattctttttcacaagaaagttccccctccagccccagcgacctagcaaaactcgaaagcacagtgctgagtatactcgaagcacaagcctcgacactggccgacgagaaaagcgaaaagaaaacccagcctcatgaggtgagtccagaacaacctaaagatcaggagaagacccagagtctgagcgagacgctagaaatcacgatatccgaggaggagattaaagaatcacaggaggaaaggaaggacaccttcaagaaagacagccagcaggacatcccgtcgagtaaggatcataaggagaagtcagagttcgtggacgatattactactagacgtgagccttacgattcggtcgaggagtcgagcgaaagtgagaactctcccgtccctcagaggaaacggcggacctcagttggctccagcagctcagacgagtacaagcaggaggactctcagggttctggggaggaggaagacttcatccgaaaacagatcatcgagatgagtgccgacgaagatgcttccgggagcgaggacgatgaattcatccgaaaccaattaaaagaaatttcctccagtactgaaagtcaaaaaaaagaggaaaccaagggcaagggcaaaataacggcaggaaaacaccgtcgcctaacgcgcaagagttccaccagcatcgatgaagatgcaggtcgtaggcactcctggcacgatgaagatgacgaggccttcgacgagagcccagagctaaaatatcgcgagacgaagagtcaggagtctgaagagctcgtggtcacgggcggaggagggttacgcaggttcaaaactattgagttaaatagcactatcgccgataaatatagtgcagaatcatctcagaagaagactagtctgtacttcgatgaggagccggaactagaaatggagagcttgacagattcgccggaggatcgaagccgtggagaaggaagctcttccctgcatgcttcttcctttacacccggaacttcacccacttctgtgagttctctggatgaagattcagactcttcaccgtcccacaagaaaggtgagagtaagcaacagaggaaggcccgccaccgcccccacggacctttgttgcctacgatcgaggatagttctgaggaggaggaactgcgggaagaggaagagctgttgaaggaacaggagaaacaacgagaaatcgagcagcaacaaaggaagtccagctccaaaaagtccaagaaagacaaggacgagctgcgggcgcaacggagacgcgaacgacctaagacgccacccagcaacctctccccaatcgaggacgccagtccgactgaagaactgcgccaggcagccgaaatggaagaacttcatcggagttcatgcagcgagtacagtccttccattgagagcgaccccgagggctttgaaattagtcccgaaaagattatagaagtccagaaggtgtataaattgccaacagctgtgtctctgtattctcccacagacgagcagtcaattatgcagaaagaaggcagtcagaaggccctcaagtcggccgaagaaatgtacgaagagatgatgcataagacgcataagtacaaggccttccctgctgcaaacgagcgtgacgaagtatttgagaaggaaccactgtacggcgggatgctgatcgaggattatatatacgaatcacttgtcgaagatacctacaatgggagtgttgacgggagcttactgactagacaagaggaggagaacggattcatgcagcagaagggccgcgagcaaaagattcgacttagtgagcagatctacgaggacccgatgcaaaagattactgatttacaaaaggagttctatgagctcgagtcactgcactcagtagtgccacaggaagatatcgtgagctcatctttcataatcccagagtcccacgagatcgtagatcttggtactatggtgacttctacggaggaagagcgcaagctgttagatgccgatgcagcatacgaggagctcatgaagcggcagcagatgcagctgacccctggatctagccctacacaggctcctatcggtgaggacatgacagaatctactatggacttcgacaggatgccagatgcaagcttaacctcaagcgttctcagcggcgcttctctgactgatagcactagctccgcaacactatcaatcccagatgtgaaaattacacagcatttcagtacagaggagattgaggacgagtacgtgacagactatacacgcgagatccaagagatcatagctcacgagagcctgattctgacctacagcgagccaagcgagagtgccacatccgtgccgccttcggacactccatcactcacttcctccgtcagtagcgtgtgcacaacagattccagctctccgatcactaccctggactctatcacaacagtgtacaccgagcccgtcgacatgatcaccaaatttgaagacagcgaggagatcagctcctctacatattttccaggaagcatcatcgactatcccgaagaaatatctgtgagcctcgacaggactgccccgcctgacggaagagcttccgctgaccatatcgtcatcagcttatccgatatggcgtcctctatcattgagagcgtggttcccaaacccgaaggaccggtggctgataccgtctctaccgatctgctcatctctgaaaaggatcccgttaaaaaagcaaagaaagaaactgggaacgggattattctcgaagtgctggaggcttatagggataagaaagagttggaggctgagcggacaaaatcatcactttccgaaaccgtttttgaccaccctccgtctagcgtcattgccttgccaatgaaggagcagctgagcaccacctacttcacatcaggcgagacgttcggccaagagaaaccagcgtcacagctgccaagcggttcaccgtctgtcagcagtctcccagcaaagccgagaccgttctttagaagttcctcactggatatctctgcccaacctccgcccccacccccgcctcctccgccccctccccctccaccaccacctcctcccccacctccccttccaccccctacctccccaaagcccaccattctgcctaagaaaaaactaacggtggccagtccagtgaccacagcgactcctctgtttgatgccgtgactacactggaaaccactgctgttttgagatcaaacgggctcccagtaacaaggatttgcacgacagcaccaccacctgtgccccctaaaccatcatccattccctcgggtctagtatttacccaccgccccgaaccctctaaacccccaatcgcccccaagccggtgattccacagctcccaactaccacacaaaaacctacggacatccatcctaagcccactggtctcagtttaacgagcagcatgacccttaacctcgtgactagcgcagattacaagctgccctcaccaacaagtccgctctcaccccacagcaataagtcgagtcctcgctttagcaagtcgctgacggaaacatatgtggtgattaccctcccctctgaacccggcacgcccacggattcatctgcctctcaggcaataacaagctggcctctggggtccccttccaaggatctggtgtcagtagagcccgtcttctctgtggtcccacccgtcaccgcagtagagatacctatatccagcgaacaaacgttttacatctcaggagctctgcagaccttttcagctacacccgttacagcaccaagctcgtttcaggctgcgcccacctctgtcactcagttccttacaactgaggtgagtaagacagaggtcagcgctactaggagcacggcccccagcgtcggcctgtccagtatttcaattaccatccccccagagccccttgctctggacaatattcatctcgaaaagccccagtataaggaggatgggaaactgcagttggtgggcgatgtaatagatctgagaactgttcctaaggtggaagtaaagactaccgacaaatgtatagacctcagtgccagtaccatggatgtaaagcggcaaattactgcaaatgaggtgtacgggaaacagatttcagccgtgcagccatccatcataaacttgtccgtgacatcgtctatagttacaccagtgtctctggctacggagaccgtcacttttgtaacctgcaccgcctctgcttcttacacaacaggtactgagagcctcgtcggggctgaacatgccatgacgacccccctccagttgactacaagtaagcatgcggaacctccctatagaatccccagcgaccaagtatttccaattgcccgtgaagaggctccgatcaatctgtctctagggacccctgctcacgccgtaacccttgccataaccaagcctgtaaccgtgccccccgttggtgttacaaatgggtggaccgactctactgtttcccagggcattaccgatggtgaagtggtggacttatctacaaccaagtctcatcggacagtcgtcaccatggacgagagtaccagctccgtgatgacgaaaattattgaagatgaaaaacccgtggacctgaccgcggggaggcgcgcagtttgttgcgacgttgtatataaattgcccttcggacgcagttgcactgcacagcaacctgccactactctgcccgaagataggttcggatatagggatgatcactatcaatacgatcgctccgggccctatggataccgaggaattggggggatgaagccaagtatgtctgacactaacctggccgaggccggtcatttcttttataagagtaagaacgcattcgactacagtgaaggcacggataccgcagtggatctgacgtctggacgggttacaacgggagaggtgatggattatagctccaagaccacggggccatatccagagacccgccaggtcatcagcggtgcaggaatctcaacaccacaatactcaaccgctcgcatgacacctccgcctggcccccaatactgtgtagggtccgtgctgcggagtagcaacggtgtggtatacagctccgtggctacacccaccccatccacattcgcaatcactacacagcccggcagcatcttctcaaccacagtcagggatctgtccgggattcacaccgccgacgccgtgacaagtctccccgctatgcaccactctcagcctatgccacgatcgtactttatcaccaccggggcaagcgagactgacatcgccgtgactggcatcgatatcagcgcgagccttcagacaatcaccatggagagtcttactgccgagactatcgattcagttcctacactgacgacagcttctgaggtcttccctgaggtcgtcggtgatgagtctgcactcctcattgtgcccgaggaagacaagcagcaacagcaactcgacctagagagagagttacttgagttagaaaagataaaacagcagcgattcgctgaagagctagagtgggaacggcaggaaatccagagatttagagagcaggaaaaaatcatggtccagaagaagctggaggagctccaatccatgaaacagcatttgctgttccagcaagaggaagagagacaggcacagtttatgatgcgccaagagactttggcgcagcagcagctccaactcgagcaaatccaacagctgcagcagcaattacaccagcagctagaggaacagaaaattcgtcagatctatcagtacaactatgacccaagcgggaccgcaagcccacagacaaccactgagcaggcaatcctggaagggcagtatgcggctttggagggaagccaattctgggcaaccgaggatgctactacaaccgccagcgccgtggtagctattgagatcccacaatctcagggatggtacacagttcagtctgacggcgtcacacagtatatagcacccccaggtatcttgtccaccgtttcggaaatcccactcaccgacgtcgttgtgaaagaggaaaagcagcctaaaaagcgcagctcaggcgcaaaggtgagagggcagtacgatgatatgggcgagaacatgacggacgatccccgatccttcaaaaaaatagttgacagtggagtgcagaccgacgacgaggacgccaccgataggagttacgtcagtcgcaggcgacggacaaagaaaagcgtggatactagcgtccagaccgacgacgaagaccaggatgagtgggacatgcctacgcggtcgaggcgaaaagcccgcgtgggcaaatacggggattccatgaccgaagctgataaaacaaagcccctcagcaaggtgtctagcatcgcagttcaaaccgtagctgaaatctctgttcagactgagcccgtgggaaccattcgtacaccttctattcgcgctagagtggatgcgaaagtggaaatcattaagcacattagtgcacctgaaaaaacttacaagggaggaagcctgggatgccaaactgaagccgattcagacactcaaagtccgcagtacctgtctgcaacttccccaccaaaggataagaaacgccctacccccctcgagatcggatactcttcacacctgcgagctgatagcactgtccagctggctccatccccaccaaagagtcctaaagtcctttatagcccgattagccccctgtctcctggaaaagcccttgagtccgcctttgtgccttacgagaagccactccccgacgatatcagcccgcaaaaggtgctgcatcctgatatggcaaaagttcctcccgcctcgccgaaaactgcaaaaatgatgcagcgatcaatgtccgatccgaaaccgctctctccaacggcggacgaatcatccagggcgccgttccagtacaccgaagggtatactactaagggttctcagactatgacttcatcaggagcacagaagaaagtgaagaggacactcccgaatccacctcctgaggagatctctactggaactcagagcacattttccacgatgggcactgtgtcacggagaagaatctgccggacaaacaccatggcgagagctaaaatcctccaggacatcgatcgggaactagacctcgtggaaagagagagcgcgaaactgcgaaaaaagcaggccgaactcgatgaagaagagaaagagatcgatgcaaagctgcgatatttggaaatgggaataaatagacgcaaagaggccctgctgaaagaaagagagaagcgggaacgggcatacctccaaggtgtggctgaagatagggactacatgagcgattcggaggtgtcctccactagacctactcgaattgagtcgcaacacggtatcgagagaccaaggacagctccacaaaccgaattctctcagtttataccacctcaaacacagacggaatctcaactggtgccccctacctccccatatacccagtaccaatacagctctcccgccctgcctacacaggccccaacctcatatactcaacagagccacttcgagcaacagacgctgtatcatcagcaggtgtccccataccagacacagcctacttttcaggcggttgcaacgatgagctttacaccacaagtgcaaccaactcctacgccacagccaagttaccagctgccctcacagatgatggtcatccaacagaagcctcgtcagacaacactgtaccttgagccaaaaattacatctaattacgaagtcataaggaatcagccgctcatgatcgcacctgtgtctacagataatacctttgccgtatcacacctcggatctaagtataacagcctcgatctaagaattggactggaagaacgctcttcgatggccagcagtccgattagtagtatcagcgcagactctttttacgccgacattgaccatcatacgcccaggaactatgttctcatagatgacattggagaaataacaaagggcactgctgccctttctacggctttttctcttcacgaaaaggatctgtctaagaccgaccgactgttgcgcacgactgaaacaaggaggtcccaggaggtgaccgattttctggcccctctacagtcctcttcaaggctgcactcgtatgtaaaggccgaggaggaccccatggaggatccatacgagctaaagttacttaaacaccaaattaagcaggagtttcggagggggacagagtccctcgaccacctagctggcctgtctcactactaccacgccgataccagttaccgacatttcccaaaaagcgagaagtacagcatttcgagactgaccctcgagaagcaggcagctaagcagctgccggctgcgattctgtatcagaagcaatcaaaacacaaaaagtctctgatcgatccaaagatgagcaaatttagcccaatccaggaaagccgggacctggaacccgactactcgtcctacatgacttctagtacatcaagtataggtggcatctcttcccgcgcaagactgttgcaggacgacattacctttggactcagaaaaaacattaccgatcagcagaagttcatgggctctagccttgggaccggcctgggcactctgggtaacaccattcggtcagccctgcaagacgaggccgacaagccctattcatctggatctcgcagtcgcccttcgagtcgcccaagctccgtctacggacttgacctgtctatcaaaagggactcttctagtagtagcctgcggctgaaggcccaggaagctgaagccctggacgtctctttcagccacgcctcgtcatcagccaggacaaagccaacaagcctgccgatcagccaaagtcggggccggatccctattgtagcccagaattccgaagaagagtcccccctgtccccagtcggacagcctatgggcatggccagggccgcagctggacccctcccccctatttcggccgacacgagagatcagttcggtagttcccactctctacccgaggtgcagcaacatatgagggaggagtctcgcactaggggttatgaccgagatatcgcttttatcatggatgatttccagcatgccatgtctgactctgaggcttatcatctgcggcgggaagaaacggattggtttgacaagccgcgggaaagccgcttagaaaatgggcatgggctggatcgcaaactgcccgaaagactcgtccactcccggccactttcacagcatcaggaacagattattcaaatgaacggcaaaactatgcactatatcttccctcatgctaggatcaagatcacgcgcgatagtaaagaccatacagtaagtggcaatggcctggggattagaattgtaggcggcaaggagatccctgggcatagcggtgagatcggcgcttacatcgccaagattctgcctggaggaagcgcagagcagaccgggaagctgatggaaggtatgcaggtccttgaatggaacggaattccactgaccagtaagacatacgaggaggtacagagcattatttcccagcaatcgggcgaagctgaaatatgcgttagactggatctgaatatgcttagtgacagtgagaatagtcaacacctagagctgcacgagccacccaaagccgtggacaaggctaagagtccaggcgtagatccgaagcagctagcagctgaactgcaaaaggtgagccttcagcagagtccactggtgctctcgtctgtggtggagaagggttcccatgtccattctggaccaacttcagctgggagctcctcagtgccctccccgggccaacccggcagccccagcgtgagtaaaaagaagcatggtagctccaagccaacggacgggaccaaagtggttagtcatcctattacgggagaaatacagctacagataaattatgacctgggtaacctgatcatccacattctgcaggcccggaacctggtgccgcgcgacaacaatgggtattcagaccccttcgtaaaggtttatttattgccaggtaggggccaggtgatggtggtgcagaatgcaagtgccgagtacaaaaggcgcacaaagcacgtccaaaagagccttaaccctgagtggaatcaaacagttatatataagagcatctcaatggagcagttgaaaaagaagactttagaggtgactgtctgggactacgatagattctcttccaacgactttttaggagaagtcttgatagacctgagctcgacgtctcatctcgataacacaccgagatggtaccccctgaaagaacagacagaatccattgatcatggtaaatctcactctagtcagtctagccagcagagccctaaaccatccgtcattaagtcccgatcccacggtatttttccagaccccagcaaggatatgcaggttcccactatcgagaaaagccacagctcacccggatcctccaagtccagttctgaagggcatctgcgcagccatggcccaagtcgcagtcagtcaaaaacaagtgttacccaaacacacttagaagatgctggagctgccattgccgccgctgaggctgcagttcagcaactgcggattcaacccacaaagccacctaatcaccgacccgctgaaagcagcgtgtccacgggaagctctggcagtagctttggcagtggctactcggttgactctgagggctcctcctctacagcgggagagactaacctctttcccattcctcgaataggcaaaatgggacagaacggccaggagcctgttaagcagcccggtgtgggcgtcggccttgcggatactgaagctaaaacccaagtgatgggagagataaaaatcgcactgaaaaaggaaatgaagactgacggcgaacagctcatagtggagattttgcagtgtcggaatattacgtacaagtttaaatcccctgatcacctccccgatttatatgtcaaaatctatgtgatgaacatttctacacagaagaaggtgattaagaaaaagacgcgagtatgtaggcacgaccgggaaccaagtttcaatgagacattccggttcagcttgtctcctgccggccattccctccaaatcctcctgtttagcaatgggggtaagtttatgaaaaagactctcattggcgaagcttgcatctggctggacaaggtggatctgcgaaaacgcatcgtgaattggcataaactgctcgtgtcaccgacacagacacactag

SEQ ID NO: 226723 - DNA, 15429 bp, Artificial Sequence
  derived and/or modified sequence
atgggaaatgaggccagcctggagggggagggcctgcctgagggcctggccgctgctgctgctgctgggggcggggccagcggggccggcagccccagccacacagccatcccagctggcatggaggccgacctgagccagctgtctgaggaggagcggcggcagattgctgctgtgatgagccgggcccagggcctgcccaagggctctgtgcccccagctgctgctgagagccccagcatgcacaggaagcaggagctggacagcagccacccccccaagcagagcggccggcccccagaccccggccgcccagcccagcccggcctgagcaagagcaggaccacagacaccttccgctctgagcagaagctgcccggccgcagccccagcaccatcagcctgaaggagagcaagagcaggacagacctgaaggaggagcacaagagctccatgatgcctggcttcctgtctgaggtgaatgccctgtctgctgtgtcctctgtggtgaacaagttcaacccctttgacctgatcagtgacagcgaggccagccaggaggagaccaccaagaagcagaaggtggtgcagaaggagcagggcaagccagagggcatcatcaagccacccctgcagcagcagccccccaagcccatccccaagcagcagggccctggccgggaccccctgcagcaggacggcacccccaagagcatcagcagccagcagcctgagaagatcaagagccagcccccaggcaccgggaagcccatccagggccccacccagaccccccagacagaccacgccaagctgcccctgcagagagatgccagccggccccagaccaagcaggccgacatcgtgcggggggagagcgtgaagcccagcctgcccagccccagcaagccacccatccagcagcccaccccaggcaagcccccagcccagcagcccggccacgagaagagccagcccggccctgccaagcccccagcccagcccagcggcctgaccaagcccctggcccagcagcccggcaccgtgaagccccctgtgcagcccccaggcaccaccaagcccccagcccagcccctgggccctgccaagcccccagcccagcagacaggcagcgagaagcccagcagcgagcagcccggccccaaggccctggcccagcccccaggagtgggcaagaccccagcccagcagcccggccctgccaagccacccacccagcaggtgggcacccccaagcccctggcccagcagcccggcctgcagagccctgccaaggcccctggccccaccaagacccctgtgcagcagcccggccctgggaagatcccagcccagcaggccggccctgggaagaccagcgcccagcagacaggccccaccaagccacccagccagctgcccggccctgccaagcccccaccccagcagcccggccctgccaagcccccaccccagcagcccggcagcgccaagccacccagccagcagcccggcagcaccaagcccccaccccagcagcccggccctgccaagcccagcccccagcagcccggcagcaccaagccacccagccagcagcccggcagcgccaagcccagcgcccagcagcccagccctgccaagcccagcgcccagcagagcaccaagcctgtgtcccagacaggcagcggcaagcccctgcagcccccaacagtgagccccagcgccaagcagccccccagccagggcctgcccaagaccatctgccccctgtgcaacaccacagagctgctgctgcacgtgcctgagaaggccaacttcaacacctgcacagagtgccagaccaccgtgtgcagcctgtgtggcttcaaccccaacccccacctgacagaggtgaaggagtggctgtgcctgaactgccagatgaagagggccctgggcggggacctggcccctgtgcccagcagcccccagcccaagctgaagacagcccctgtgaccaccaccagcgctgtgtccaagagcagcccccagccccagcagaccagccccaagaaggatgctgcccccaagcaggacctgagcaaggcccctgagcccaagaagcccccacccctggtgaagcagcccaccctgcacggcagccccagcgccaaggccaagcagcccccagaggccgacagcctgagcaagccagccccacccaaggagcccagcgtgcccagcgagcaggacaaggcccctgtggctgatgacaagcccaagcagcccaagatggtgaagcccaccacagacctggtgagcagcagcagcgccaccaccaagccagacatccccagcagcaaggtgcagagccaggccgaggagaagaccaccccacccctgaagacagattctgccaagcccagccagagcttccccccaactggagagaaggtgagcccctttgacagcaaggccatccccaggcctgccagtgacagcaagatcatcagccaccctggccccagcagcgagagcaagggccagaagcaggtggaccctgtgcagaagaaggaggagcccaagaaggcccagaccaagatgagccccaagccagatgccaagcccatgcccaagggcagccccaccccacctggcccccggcccacagctggccagacagtgcccaccccccagcagagccccaagccccaggagcagagccgccgcttcagcctgaacctgggcagcatcacagatgcccccaagagccagcccaccaccccccaggagaccgtgacaggcaagctgtttggatttggagccagcatcttcagccaggccagcaacctgatcagcacagctggccagcccggcccccacagccagagcggccctggggcccccatgaagcaggccccagcccccagccagccccccaccagccagggcccccccaagagcacaggccaggcccccccagccccagccaagagcatccctgtgaagaaggagaccaaggccccagctgctgagaagctggagcccaaggccgagcaggcccccaccgtgaagaggacagaaacagagaagaagcccccacccatcaaggacagcaagagcctgacagctgagccccagaaggctgtgctgcccaccaagctggagaagagccccaagccagagagcacctgccccctgtgcaagacagagctgaacatcggcagcaaggacccccccaacttcaacacctgcacagagtgcaagaaccaggtgtgcaacctgtgtggcttcaaccccaccccccacctgacagagatccaggagtggctgtgcctgaactgccagacccagagggccatcagcggccagctgggggacatcaggaagatgcccccagcccccagcggccccaaggccagccccatgcctgtgcccacagagagcagcagccagaagacagctgtgcccccccaggtgaagctggtgaagaagcaggagcaggaggtgaagacagaggccgagaaggtgatcctggagaaggtgaaggagaccctgtccatggagaagatcccccccatggtgaccacagaccagaagcaggaggagagcaagctggagaaggacaaggccagcgccctgcaggagaagaagcccctgcctgaggagaagaagctgatccctgaggaggagaagatccgctctgaggagaagaagcccctgctggaggagaagaagcccaccccagaggacaagaagctgctgcctgaggccaagaccagcgcccctgaggagcagaagcatgacctgctgaagagccaggtgcagattgctgaggagaagctggagggccgggtggcccccaagacagtgcaggagggcaagcagccccagaccaagatggagggcctgcccagcggcaccccccagagcctgcccaaggaggatgacaagaccaccaagaccatcaaggagcagccccagcccccctgcacagccaagccagaccaggtggagcccgggaaggagaagacagagaaggaggatgacaagagtgacaccagcagcagccagcagcccaagagcccccagggcctgagtgacaccggctacagcagtgatggcatcagcagcagcctgggggagatccccagcctcatccccacagatgagaaggacatcctgaagggcctgaagaaggacagcttcagccaggagagcagccccagcagccccagcgacctggccaagctggagagcacagtgctgagcatcctggaggcccaggccagcaccctggctgatgagaagtctgagaagaagacccagccccatgaggtgtccccagagcagcccaaggaccaggagaagacccagagcctgtctgagaccctggagatcaccatcagcgaggaggagatcaaggagagccaggaggagaggaaggacaccttcaagaaggacagccagcaggacatccccagcagcaaggaccacaaggagaagtcagaatttgtggatgacatcaccacccggcgggagccctatgacagcgtggaggagagcagcgagagcgagaacagccctgtgccccagaggaagaggaggacctctgtgggcagcagcagcagtgatgagtacaagcaggaggacagccagggcagcggggaggaggaggacttcatcaggaagcagatcatcgagatgtctgcagatgaagatgccagcggctctgaagatgatgagttcatccggaaccagctgaaggagatcagcagcagcacagagagccagaagaaggaggagaccaagggcaagggcaagatcacagctgggaagcaccggcggctgaccaggaagagcagcaccagcattgatgaagatgctggaagaagacacagctggcatgatgaagatgatgaggcctttgatgagagccctgagctgaagtaccgggagaccaagagccaggagagcgaggagctggtggtgactggaggcggcggcctgcggcgcttcaagaccatcgagctgaacagcaccatcgctgacaagtacagcgctgagagcagccagaagaagaccagcctgtactttgatgaggagcctgagctggagatggagagcctgacagacagcccagaagatagaagcagaggagagggcagcagcagcctgcacgccagcagcttcaccccaggcaccagccccacctctgtgagcagcctggatgaagattctgacagcagccccagccacaagaagggggagagcaagcagcagaggaaggcccggcaccggccccacggccccctgctgcccaccatcgaggacagcagcgaggaggaggagctgcgggaggaggaggagctgctgaaggagcaggagaagcagcgggagattgagcagcagcagaggaagagcagcagcaagaagagcaagaaggacaaggatgagctgcgggcccagaggagaagagagcggcccaagaccccacccagcaacctgagccccattgaagatgccagccccacagaggagctgcggcaggccgctgagatggaggagctgcacaggagcagctgcagcgagtacagccccagcattgaaagtgaccctgagggctttgagatcagccctgagaagatcatcgaggtgcagaaggtgtacaagctgcccacagctgtgtccctgtacagccccacagatgagcagagcatcatgcagaaggagggcagccagaaggccctgaagtctgctgaggagatgtatgaggagatgatgcacaagacccacaagtacaaggccttccctgctgccaatgaaagagatgaggtgtttgagaaggagcccctgtatggaggcatgctgattgaggactacatctatgagagcctggtggaggacacctacaacggctctgtggatggcagcctgctgacccggcaggaggaggagaatggcttcatgcagcagaagggccgggagcagaagatccggctgtctgagcagatctatgaggaccccatgcagaagatcacagacctgcagaaggagttctatgagctggagagcctgcacagcgtggtgccccaggaggacatcgtgagcagcagcttcatcatccctgagagccatgagatcgtggacctgggcaccatggtgaccagcacagaggaggagaggaagctgctggatgctgatgctgcctatgaggagctgatgaagaggcagcagatgcagctgaccccaggcagcagccccacccaggcccccatcggggaggacatgacagagagcaccatggactttgacaggatgccagatgccagcctgaccagctctgtgctgagcggggccagcctgacagacagcaccagcagcgccaccctgagcatcccagatgtgaagatcacccagcacttcagcacagaggagattgaagatgaatatgtgacagactacacccgggagatccaggagatcatcgcccacgagagcctcatcctgacctacagcgagcccagcgagagcgccacctctgtgcccccaagtgacacccccagcctgaccagctctgtgtcctctgtgtgcaccacagacagcagcagccccatcaccaccctggacagcatcaccaccgtgtacacagagcctgtggacatgatcaccaagtttgaagattctgaggagatcagcagcagcacctacttccctggcagcatcatcgactacccagaggagatctctgtgtccctggacagaacagcccccccagatggccgggccagcgctgaccacatcgtcatcagcctgagtgacatggccagcagcatcatcgagagcgtggtgcccaagccagagggccctgtggccgacacagtgtccacagacctgctgatcagcgagaaggaccctgtgaagaaggccaagaaggagactggaaatggcatcatcctggaggtgctggaggcctacagagacaagaaggagctggaggccgagaggaccaagagcagcctgtctgagaccgtgtttgaccacccccccagcagcgtcatcgccctgcccatgaaggagcagctgagcaccacctacttcaccagcggggagaccttcggccaggagaagccagccagccagctgcccagcggcagccccagcgtgagcagcctgcctgccaagccccggcccttcttccgcagcagcagcctggacatcagcgcccagcccccacctcctcctcctcctcctcctcctcctcctcctcctcctcctcctcctcctcctccacccctgcccccacccaccagccccaagcccaccatcctgcccaagaagaagctgactgtggccagccctgtgaccacagccacccccctgtttgatgctgtgaccaccctggagaccacagctgtgctgcggagcaatggcctgcctgtgacccgcatctgcaccacagcccctcctcctgtgccccccaagcccagcagcatccccagcggcctggtgttcacccacaggcctgagcccagcaagccacccatcgcccccaagcctgtgatcccccagctgcccaccaccacccagaagcccacagacatccaccccaagcccaccggcctgagcctgaccagctccatgaccctgaacctggtgaccagcgctgactacaagctgcccagccccaccagccccctgagcccccacagcaacaagagcagcccccgcttcagcaagagcctgacagagacctacgtggtgatcaccctgcccagcgagcccggcacccccacagacagcagcgccagccaggccatcacctcctggcccctgggcagccccagcaaggacctggtgtctgtggagcccgtcttctctgtggtgccccctgtgacagctgtggagatccccatcagcagcgagcagaccttctacatcagcggggccctgcagaccttcagcgccacccctgtgacagcccccagcagcttccaggccgcccccacctctgtgacccagttcctgaccacagaggtgtccaagacagaggtgtctgccaccaggagcacagcccccagcgtgggcctgagcagcatcagcatcaccatccccccagagcccctggccctggacaacatccacctggagaagccccagtacaaggaggatggcaagctgcagctggtgggagatgtgattgacctgaggacagtgcccaaggtggaggtgaagaccacagacaagtgcatcgacctgagcgccagcaccatggatgtgaagaggcagatcacagccaatgaggtgtatggcaagcagatctctgctgtgcagcccagcatcatcaacctgtctgtgaccagcagcatcgtgacccctgtgtccctggccacagagaccgtgacctttgtgacctgcacagccagcgccagctacaccaccggcacagagagcctggtgggcgctgagcacgccatgaccacccccctgcagctgaccaccagcaagcacgccgagcccccctaccgcatccccagcgaccaggtgttccccatcgcccgggaggaggcccccatcaacctgagcctgggcaccccagcccatgctgtgaccctggccatcaccaagcctgtgacagtgccccctgtgggcgtgaccaacggctggacagacagcacagtgtcccagggcatcacagatggagaggtggtggacctgagcaccaccaagagccacaggacagtggtgaccatggatgagagcaccagctctgtgatgaccaagatcattgaagatgagaagcctgtggacctgacagctggccggcgggctgtgtgctgtgatgtggtgtacaagctgcccttcggccgcagctgcacagcccagcagcctgccaccaccctgcctgaggacagatttggctacagagatgaccactaccagtatgacagaagtggcccctacggctaccggggcattggaggcatgaagcccagcatgtctgacaccaacctggccgaggccggccacttcttctacaagagcaagaatgcctttgactacagcgagggcacagacacagctgtggacctgaccagcggccgggtgaccaccggggaggtgatggactacagcagcaagaccaccggcccctacccagagacccggcaggtgatcagcggggccggcatcagcaccccccagtacagcacagccaggatgaccccacctcctggcccccagtactgtgtgggctctgtgctgcggagcagcaatggagtggtgtacagctctgtggccacccccacccccagcacctttgccatcaccacccagcccggcagcatcttcagcaccaccgtgcgggacctgagcggcatccacacagcagatgctgtgaccagcctgcctgccatgcaccacagccagcccatgcccaggagctacttcatcaccactggagccagcgagacagacattgctgtgactggaattgacatcagcgccagcctgcagaccatcaccatggagagcctgacagctgagaccatcgacagcgtgcccaccctgaccacagccagcgaggtgtttcctgaggtggtgggagatgaaagtgccctgctgattgtgcctgaggaggacaagcagcagcagcagctggacctggagcgggagctgctggagctggagaagatcaagcagcagagatttgctgaggagctggagtgggagcggcaggagatccagcgcttccgggagcaggagaagatcatggtgcagaagaagctggaggagctgcagagcatgaagcagcacctgctcttccagcaggaggaggagcggcaggcccagttcatgatgaggcaggagaccctggcccagcagcagctgcagctggagcagatccagcagctgcagcagcagctgcaccagcagctggaggagcagaagatccggcagatctaccagtacaactatgaccccagcggcacagccagcccccagaccaccacagagcaggccatcctggagggccagtatgctgccctggagggcagccagttctgggccacagaagatgccaccaccacagccagcgctgtggtggccatcgagatcccccagagccagggctggtacacagtgcagagtgatggagtgacccagtacatcgcccctcctggcatcctgagcacagtgtctgagatccccctgacagatgtggtggtgaaggaggagaagcagcccaagaagaggagcagcggggccaaggtgcggggccagtatgatgacatgggagagaacatgacagatgaccccaggagcttcaagaagatcgtggacagcggcgtgcagacagatgatgaagatgccacagacaggagctatgtgtccagaagaagaaggaccaagaagtctgtggacacctctgtgcagacagatgatgaggaccaggatgagtgggacatgcccaccaggagcaggaggaaggcccgggtgggcaagtatggagacagcatgacagaggccgacaagaccaagcccctgagcaaggtgagcagcattgctgtgcagacagtggccgagatctctgtgcagacagagcctgtgggcaccatccgcacccccagcatccgggcccgggtggatgccaaggtggagatcatcaagcacatcagcgcccctgagaagacctacaagggcggcagcctgggctgccagacagaagctgacagcgacacccagagcccccagtacctgagcgccaccagcccccccaaggacaagaagaggcccacccccctggagatcggctacagcagccacctgcgggctgacagcacagtgcagctggcccccagcccccccaagagccccaaggtgctgtacagccccatcagccccctgagccctgggaaggccctggagagcgcctttgtgccctatgagaagcccctgcctgatgacatcagcccccagaaggtgctgcacccagacatggccaaggtgcccccagccagccccaagacagccaagatgatgcagaggtccatgtctgaccccaagcccctgagccccacagcagatgagagcagccgggcccccttccagtacacagagggctacaccaccaagggcagccagaccatgaccagcagcggggcccagaagaaggtgaagaggaccctgcccaaccccccacctgaggagatcagcacaggcacccagagcaccttcagcaccatgggcaccgtgtccagaagacgcatctgcaggaccaacaccatggcccgggccaagatcctgcaggacatcgaccgggagctggacctggtggagcgggagagcgccaagctgaggaagaagcaggccgagctggatgaggaggagaaggagattgatgccaagctgcgctacctggagatgggcatcaacagaaggaaggaggccctgctgaaggagcgggagaagcgggagcgggcctacctgcagggcgtggctgaagatcgggactacatgtctgattctgaggtgagcagcacccggcccaccagaattgagagccagcacggcatcgagcggcccaggacagccccccagacagagttcagccagttcatccccccccagacccagacagagagccagctggtgccccccaccagcccctacacccagtaccagtacagcagccctgccctgcccacccaggcccccaccagctacacccagcagagccactttgagcagcagaccctgtaccaccagcaggtgagcccctaccagacccagcccaccttccaggccgtggccaccatgtccttcaccccccaggtgcagcccacccccaccccccagcccagctaccagctgcccagccagatgatggtgatccagcagaagccccggcagaccaccctgtacctggagcccaagatcaccagcaactatgaggtgatccggaaccagcccctgatgattgcccctgtgtccacagacaacacctttgctgtgagccacctgggcagcaagtacaacagcctggacctgagaattggcctggaggagaggagctccatggccagcagccccatcagcagcatctctgctgacagcttctacgccgacatcgaccaccacacccccaggaactacgtgctgattgatgacatcggggagatcaccaagggcacagctgccctgagcacagccttcagcctgcacgagaaggacctgagcaagacagaccggctgctgcggaccacagagacccggcgcagccaggaggtgacagacttcctggcccccctgcagagcagcagccggctgcacagctatgtgaaggccgaggaggaccccatggaggacccctatgagctgaagctgctgaagcaccagatcaagcaggagttcagaagaggaacagagagcctggaccacctggccggcctgagccactactaccacgccgacaccagctaccgccacttccccaagtctgagaagtacagcatcagccggctgaccctggagaagcaggccgccaagcagctgcctgctgccatcctgtaccagaagcagagcaagcacaagaagagcctgattgaccccaagatgagcaagttcagccccatccaggagagccgggacctggagccagactacagcagctacatgaccagcagcaccagcagcattggaggcatcagcagccgggcccggctgctgcaggatgacatcaccttcggcctgaggaagaacatcacagaccagcagaagttcatgggcagcagcctgggcaccggcctgggcaccctgggcaacaccatccgcagcgccctgcaggatgaagctgacaagccctacagcagcggcagccgcagccggcccagcagccggcccagctctgtgtatggcctggacctgagcatcaagagggacagcagcagcagcagcctgcggctgaaggcccaggaggccgaggccctggatgtgtccttcagccacgccagcagcagcgcccggaccaagcccaccagcctgcccatcagccagagccggggccgcatccccatcgtggcccagaacagcgaggaggagagccccctgagccctgtgggccagcccatgggcatggcccgggctgctgctggccccctgccccccatctctgctgacacccgggaccagtttggcagcagccacagcctgcctgaggtgcagcagcacatgagggaggagagcaggacccggggctatgaccgggacatcgccttcatcatggatgacttccagcacgccatgtctgacagcgaggcctaccacctgcggcgggaggagacagactggtttgacaagccccgggagagccggctggagaatggacatggcctggacaggaagctgcctgagcggctggtgcacagccggcccctgagccagcaccaggagcagatcatccagatgaatggcaagaccatgcactacatcttcccccacgcccgcatcaagatcacccgggacagcaaggaccacacagtgtctggaaatggcctgggcatcagaattgtgggcggcaaggagatccctggccacagcggggagatcggggcctacatcgccaagatcctgcccggcggcagcgctgagcagacaggcaagctgatggagggcatgcaggtgctggagtggaatggcatccccctgaccagcaagacctatgaggaggtgcagagcatcatcagccagcagagcggggaggccgagatctgtgtgcggctggacctgaacatgctgagtgacagcgagaacagccagcacctggagctgcacgagccccccaaggctgtggacaaggccaagagccctggggtggaccccaagcagctggccgctgagctgcagaaggtgtccctgcagcagagccccctggtgctgagctctgtggtggagaagggcagccacgtgcacagcggccccaccagcgctggcagcagctctgtgcccagccctggccagcccggcagccccagcgtgtccaagaagaagcacggcagcagcaagcccacagatggcaccaaggtggtgagccaccccatcactggagagatccagctgcagatcaactatgacctgggcaacctgatcatccacatcctgcaggccaggaacctggtgccccgggacaacaacggctacagcgacccctttgtgaaggtgtacctgctgcccggccggggccaggtgatggtggtgcagaatgccagcgctgagtacaagaggaggaccaagcacgtgcagaagagcctgaaccctgagtggaaccagaccgtcatctacaagagcatctccatggagcagctgaagaagaagaccctggaggtgacagtgtgggactatgaccgcttcagcagcaatgacttcctgggggaggtgctgattgacctgagcagcaccagccacctggacaacaccccccgctggtaccccctgaaggagcagacagagagcattgaccacggcaagagccacagcagccagagcagccagcagagccccaagcccagcgtcatcaagagccgcagccacggcatcttcccagaccccagcaaggacatgcaggtgcccaccatcgagaagagccacagcagccctggcagcagcaagagcagcagcgagggccacctgcggagccacggccccagccgcagccagagcaagacctctgtgacccagacccacctggaggatgctggggccgccatcgctgctgctgaggccgctgtgcagcagctgcgcatccagcccaccaagccacccaaccacaggcctgctgagagctctgtgtccacaggcagcagcggcagcagctttggcagcggctacagcgtggacagcgagggcagcagcagcacagctggggagaccaacctcttccccatcccccgcatcggcaagatgggccagaatggccaggagcctgtgaagcagcccggggtgggcgtgggcctggccgacacagaggccaagacccaggtgatgggagagatcaagatcgccctgaagaaggagatgaagacagatggagagcagctgattgtggagatcctgcagtgcaggaacatcacctacaagttcaagagcccagaccacctgcctgacctgtatgtgaagatctacgtgatgaacatcagcacccagaagaaggtgatcaagaagaagaccagggtgtgcagacatgaccgggagcccagcttcaatgagaccttccgcttcagcctgagccctgctggccacagcctgcagatcctgctcttcagcaatggaggcaagttcatgaagaagaccctcatcggggaggcctgcatctggctggacaaggtggacctgaggaagagaattgtgaactggcacaagctgctggtgagccccacccagacccactag

SEQ ID NO: 226724 - DNA, 15429 bp, Artificial Sequence
  derived and/or modified sequence
atgggcaacgaggccagcctggagggcgagggcctgcccgagggcctagctgcagctgccgccgctgggggaggggcatccggtgcaggctccccatcacacaccgctattcccgcaggcatggaagctgacctctcccagttatcggaggaagagcggcgacagatcgccgctgtcatgagcagagcacagggtctgccaaaaggatccgtgccacccgcagcagcggagtcaccatccatgcaccgcaagcaggagttggatagctcccatcccccgaaacaaagcgggcggccacccgatcctggccggccagcgcagcctggcctctcaaagtctagaacaacagacaccttccgttcagagcaaaaattgcccgggcggagcccaagcaccattagtctcaaagagtctaagagccggactgacctgaaagaagagcataaaagctccatgatgcccggctttctttccgaggttaatgccctgagtgcagtgagtagcgtggtgaataagtttaaccctttcgatctgatttcagattcagaggctagccaggaggagacgactaagaaacagaaagtagtacagaaagaacagggtaagcccgaaggtatcattaagccccccctgcagcagcagccacccaagcccatcccaaaacaacaggggcccgggcgagacccactgcagcaggacggaaccccaaagtccatttcttcccagcaacctgaaaagattaagagccagccgcccggcaccggcaaaccaatccaggggcccacccagacacctcagacagaccacgctaagctgcccctgcagcgggatgcctcgcgcccgcagacgaagcaagcagatatcgtaaggggcgaatctgtcaagccctccttacctagtccgagtaagccccctatacagcagccaactccaggaaagccgcctgctcagcaacctggccacgagaagtcccagcccgggccagccaagcccccagctcagcccagtggtctgaccaagcccttggctcagcagcccggcaccgtgaagccgcctgtccagcctcccggtacaaccaagcctccagcccagcccttaggacctgccaagccccccgcccaacaaacgggcagcgaaaagcctagctcggagcagcctggcccgaaagcactcgcacagcccccaggagtcggcaaaacaccagctcagcagcctgggccagcgaagccccccactcaacaagtcggaacacctaagccactggctcagcaaccagggctacagagtcctgctaaagctccaggtcctaccaagactccagtacagcagccagggcccggaaaaatcccggcgcaacaagcaggacccgggaagacgtctgcccagcagacaggcccaacaaagcccccttctcaattgccgggtccagctaaaccacccccacagcagccagggcctgcaaagcctccaccccagcagcccggctctgcgaaaccgccctcccagcaaccaggttctacaaagcccccccctcagcagccaggcccggcaaagccgagtcctcagcagccaggttcgacgaaaccgccatcccagcagcctggctccgctaaaccaagcgcacagcaaccaagccccgccaaaccatcagcccagcagtccacgaagcccgtatcacagaccggttcaggaaagcctctccagccgcccactgtttcgccgagtgccaagcagcccccatcacagggactccctaagactatttgtcccctctgcaacacgaccgagctgctgctgcatgtcccagaaaaggccaatttcaatacctgtactgagtgccagactaccgtatgtagcttgtgtggattcaatcctaacccccatctaacggaagtgaaagagtggctttgtctgaattgtcagatgaagcgggcacttggcggagatctggcccctgtgccaagttcaccccaaccaaagctgaaaacagcgccagtgacgactacctctgccgtctctaagtcaagcccacagccccaacaaacaagtccaaaaaaggacgccgcgccaaaacaggacctgtccaaggcacccgaacctaaaaaaccccccccactcgtgaaacagcccaccctacacggtagccccagcgcgaaggctaaacagccccctgaggcagattcattaagcaagccagcaccgccgaaggaacccagcgtgcctagtgaacaagacaaggcgcctgttgctgacgacaaaccaaaacaacctaaaatggtgaagcccacaaccgatcttgtcagtagctctagcgcaacaaccaagcctgatataccatcctctaaagtgcagtctcaagccgaagagaaaacaaccccacccctgaaaaccgatagcgctaagccctcgcagtcctttccccctaccggcgagaaggtctccccttttgacagcaaggcaattccacggcctgcaagcgattctaagatcattagtcacccagggccaagttcagagagtaaggggcaaaaacaggtcgatcccgtccagaaaaaagaagagccaaaaaaggctcagacaaagatgtcacccaagcctgatgccaagcctatgccaaagggtagccccactccccccggaccccgccctacagccgggcagaccgtgccaacgccccagcagagccctaagccacaggagcagagcaggaggttcagtctgaacctgggatctatcacggatgctcctaagtcacagcctaccactccacaggaaacagtgactgggaaactattcgggttcggcgccagtattttctcgcaagcgtccaatctcatctcaaccgccggccagcccggcccacactcccagagcggtcccggagcaccaatgaagcaggccccagccccctcacagccccccaccagtcaggggccacccaaaagcactggccaggcccctcccgctcctgcaaagtccatccctgtcaagaaggagaccaaggcgccagctgcggaaaagctcgaacccaaagcagaacaggcccccaccgtgaaaagaacagagacagaaaagaagcctccacccatcaaggattctaagtcgctgaccgccgaacctcagaaggcagtgctgcccaccaaactcgaaaaatctccaaaacccgaatcaacctgccctctctgtaagacagaactcaacataggatctaaggatccacctaactttaatacatgcacggaatgtaagaatcaggtctgcaacctgtgcgggtttaacccaacccctcacctaaccgaaatacaggagtggttgtgtttgaattgtcagactcagcgagccatatctggccagctgggggatatccgtaaaatgccacctgccccaagcggacctaaggcttctccaatgcctgtgcctacagaaagcagttcacaaaagaccgctgttcctccccaggtgaagcttgtgaagaaacaggagcaggaggtaaaaacagaagctgaaaaagtgattttggagaaggtcaaggagactttgtccatggaaaaaataccccccatggtgacgacagaccagaagcaggaggaatccaagctggagaaagacaaggccagcgctttgcaagagaagaagcctctcccagaggagaagaaactcatccctgaggaggaaaaaattagaagtgaggaaaaaaaaccccttcttgaggaaaaaaaacccaccccagaggataagaaactacttcctgaggccaaaacttctgctcccgaagaacagaagcatgacttgctgaagagtcaggtgcagatcgctgaagagaaactggagggtcgggttgctcccaagacggtccaggaaggcaaacagccccagacaaagatggagggtttaccttcgggcactccccaatcacttcccaaagaagacgataaaacaactaagacgataaaagagcagccacagcccccctgcacggcaaaacccgaccaggttgagcctggcaaagaaaaaaccgaaaaggaggatgataaatcagacacttcttcgtcccagcagcccaaaagtcctcaaggtcttagtgacacagggtactcctctgacggaatttcttcctcactgggggagatacctagcctgatcccaaccgacgaaaaggacatattaaagggactcaagaaggacagcttttctcaggagagcagcccgtcctccccaagtgacctcgccaagctggagagtacagtgctgtccatattggaggctcaagcttcaacactggctgatgagaaatctgaaaagaagactcagcctcacgaagtatctccagaacagcccaaagaccaggaaaaaacacaatcactgtctgaaacactcgagatcaccattagtgaagaagaaatcaaggagtctcaggaagagagaaaagataccttcaaaaaggatagccagcaggatatcccatcaagcaaagatcacaaggagaaaagcgagtttgttgatgacataaccacccgccgcgaaccttacgatagcgtggaggaaagcagcgagtccgagaatagtcctgttccgcaaaggaaacggcgcacctcagtaggatccagctcctctgatgaatataaacaggaggattcccagggtagcggggaggaggaagacttcatccggaaacaaatcatcgagatgtctgcagatgaggacgccagcggatccgaggacgacgagttcataaggaaccagctcaaagagatcagttcctccacagagagccaaaagaaagaggaaaccaagggcaaggggaagatcacagcagggaaacatcggcgccttaccagaaaatcaagtacatcaatcgatgaggacgccggccggagacatagttggcatgacgaggatgacgaagcattcgacgagtccccggaactgaagtaccgtgaaactaagtcacaggagtccgaggaattggtggtgacaggcggcgggggtttgagaaggttcaaaacaatagagctcaattctaccattgccgacaagtatagtgcggaaagctcccaaaagaaaaccagtttgtactttgatgaagagccagaactcgagatggaaagtctgactgacagccctgaggaccggagtcgcggtgaagggagcagttcactacatgcttcctcattcacgcctgggacatcccccacctccgtgtcatccctggatgaggactcagacagttcaccttcccacaagaagggagaatccaagcagcaacgcaaagcacgacatcgaccccacggccctctgttgcccacaatcgaggattcaagcgaagaggaggaattacgggaggaagaagagttgctgaaggaacaggaaaagcagagggaaatagagcagcagcaacggaagagctctagcaagaaaagcaaaaaagacaaggatgagttacgcgcccagaggagacgggagcggccaaagacaccaccgtccaatctgtcccccattgaagatgcgtcaccaaccgaggaattgcgtcaagctgccgaaatggaggaactgcacagatcaagttgtagcgagtattctccctcaatcgagagtgatcccgaggggttcgagatcagcccagagaaaatcattgaagtacagaaggtgtacaagctccctacagcagtgagcctgtattcaccgactgacgagcagtccatcatgcagaaggaaggctcacagaaagccctcaagtcagccgaggagatgtacgaagaaatgatgcataaaacccacaaatataaagcttttcctgctgcaaacgagagagatgaagtgtttgaaaaagaaccactgtacgggggcatgttaatcgaggactatatctacgagagcctcgtcgaggatacctacaatgggagtgtggacggatctcttctcacccgtcaggaggaggaaaacggctttatgcagcagaagggccgcgagcagaagatcaggctctccgaacaaatctatgaagaccctatgcagaaaatcaccgatctccagaaagagttttacgaactcgaatcactccacagtgtggtgcctcaagaagacatcgttagttcctcctttatcattcccgaatctcacgaaattgtcgatctcggaacgatggtgacctccaccgaagaggagaggaagctgctcgatgcagatgctgcgtatgaggaattaatgaagcggcaacagatgcagttgacaccaggatcctcacctacacaggcccccatcggagaggatatgacagaaagtaccatggattttgatcggatgcccgatgcatcattaacctcttcggtgcttagcggggcctcgctcaccgactccactagcagcgccacattgtctatcccagatgttaagataactcaacatttttccacggaagagatcgaagacgagtatgtcacagactatacacgggaaattcaggaaattatagctcacgagagtttgatcctgacctactccgagccttctgagtcagccacgagtgtgcccccctccgacacaccttcccttacctcatccgtgtcatctgtgtgtacaactgattcatcgtctcccattacaacattagatagcatcactaccgtatatactgaacctgtcgacatgattactaagttcgaggacagtgaggagatatcatccagcacatacttccccggcagcataattgattatcctgaggagatctccgtgtctcttgaccggactgccccgccagacgggagagcaagcgctgatcacatcgtgatctctctctctgatatggcttctagcataatagagagcgtcgtcccaaaaccagaggggcccgtggctgacaccgtgtcgaccgatctattaatttctgagaaagacccggtaaaaaaggctaagaaggagacaggaaacgggattatcctggaagtgttagaggcctatagggataaaaaggagcttgaggcggagcgcacaaaatcctccctgtctgaaactgtttttgaccaccctccaagcagtgtgattgccttgcccatgaaagaacagcttagcaccacttatttcacttccggagagaccttcggccaggagaagcctgcctcccagttgccgtccggcagcccgtcagtctcttctctacctgctaagccgcgcccttttttccgctctagtagcctcgacatatcggcacagcccccacccccaccgcccccaccacccccacctcctccacctcctcctccacctccacccccaccattacctcctcctacttcaccaaagcccacgatcctgcctaaaaaaaaattaacggtggcttcccctgttacgacagcgacgccgttatttgacgctgttactaccttagaaacgaccgccgtactccgcagcaatggcctgccagtgacacggatttgtaccacagcacctccccccgtgccacccaaaccttcgtccattccatccggcttagtgtttacccacagacctgagccatccaagccaccaatcgcaccgaagcctgtgatcccacagctgcctaccactacacagaaacccacagacattcacccgaagccaaccggactgtctctgacgagttccatgacgttgaatctggtgacaagcgcagattacaaactgccgtcacctacctctccactcagcccccatagtaacaaaagcagcccgagattctcaaagtctctgacagagacttacgtggtgattacgctgccctcggaacctggaacaccaacagacagttcagcttcacaggcgatcacctcatggccccttggtagtccctctaaagatctggtgtcagtggaacccgtgttcagtgtggtcccccctgtcacagcagtggaaatccctatttcttcagaacagacattttacatcagtggagcactccagactttctctgctaccccagtcactgctccgtcttccttccaagctgccccaacgtcagttacacaatttctgacgaccgaggtttcgaagaccgaggtgtcagctacaagaagtactgctccttcagtcggactatcttcaatctctatcactatacctccagaacctctcgcgctggataatatccatctcgagaaacctcagtacaaagaagacgggaaactgcaattggtaggcgacgtgatagatttgcgcacagttccgaaggtggaggtcaaaactaccgataagtgtattgatctctccgcatcaaccatggatgtcaagaggcagatcacagctaatgaggtgtatggaaagcagatttcagcggtgcaaccgtcgattattaatctgagcgtcaccagctcaatcgtcacaccggtaagcttagccactgaaaccgtcaccttcgtgacttgcactgcgtctgcatcgtacacaactggcacagagagcctcgtgggggcggaacatgctatgaccactcccttgcagttaaccacaagtaagcatgccgaacccccctaccggatcccctcagaccaggttttcccgatcgcacgggaagaggcccctataaatctctcgctggggacccccgcgcacgccgtgactctggctatcactaagcccgttaccgttccccccgtgggagtgaccaatggctggactgacagcaccgtttcccaggggattaccgacggggaagtggtagacctgtccacgacgaagtcccatagaaccgtagtcacaatggacgagtccacctctagcgtaatgacaaagatcatcgaggacgagaagccagtagatctgacagctgggaggagggccgtttgctgcgacgtcgtctacaagctaccattcggccggtcctgcacagcgcagcagccggctacgacacttccagaggacagattcggctaccgggatgaccattatcagtacgaccgctctgggccatacggctatcgtggcataggggggatgaagccttctatgtcagatacaaacctggccgaggccggtcatttcttttataagagcaagaacgcatttgattactcagaagggacagacacagccgtcgacctgaccagcggccgggtcaccacgggggaggtgatggactactcaagcaaaactacagggccttaccctgaaacgaggcaagtgatctctggggctggaatcagtacccctcagtattccaccgccaggatgacccctcctccaggcccacagtactgtgttggatctgtcctccgctcatcgaacggtgtggtttattcgtctgtcgccacccccacaccttccacattcgctatcacaacacagccagggagcatcttctccaccacagtacgcgacttgtcaggtattcacaccgcggacgccgtgaccagcctccctgccatgcatcacagccagcctatgccacgctcctacttcatcaccactggcgcctcagagactgatatcgcagtcacaggaatagacattagtgcctcactccagaccattaccatggagtccctcacggcggaaaccatcgatagtgttcctactttaacaaccgcttctgaagtgttccctgaggtcgttggcgacgaatctgcgctccttattgtgccagaagaggacaaacagcagcagcagttagatctggagcgggagctgctcgagctcgagaaaatcaagcaacagaggttcgcagaggaactagagtgggaacggcaggagatccaaaggttccgagagcaggagaaaatcatggtccagaaaaagctggaagaactgcagtctatgaagcagcacctactgttccagcaggaagaagagcggcaagctcagttcatgatgaggcaggaaaccctggcccaacagcagttacagctggagcaaatccaacagctacagcagcaactgcatcagcagctcgaagagcagaagattagacagatttatcagtataattacgacccctccggcactgcgtcgcctcagacaaccacagaacaagctattctggagggacagtatgccgcccttgagggttctcaattctgggctactgaggacgcaaccaccaccgcgagcgccgtagtcgctatcgagataccccaatcccaaggctggtacacagttcagtctgatggcgtgacccagtacatagctcccccaggtattctcagtacagtgagtgaaatccccctgactgacgtcgtggttaaggaagaaaagcagccaaagaaacgaagttctggcgctaaggtccgcggacagtacgacgatatgggcgaaaatatgacggacgatcctagatctttcaaaaagatcgttgattcgggagttcagaccgacgacgaggatgccaccgacagaagctatgtttcccggagacgccgcactaagaagtcggtggataccagtgtccaaacggacgatgaggaccaggacgagtgggatatgccaactagatcaagaagaaaggctcgggttggcaaatatggtgacagtatgacagaggccgacaagacaaagcccctgagcaaagtgtcgtcaattgccgtgcagactgtggcggagatttcggtccaaaccgaacctgtgggcactatcaggactccttctattcgagcaagagtggatgcgaaagtcgagatcatcaaacatattagcgcccccgagaaaacatataaagggggcagcctgggctgtcaaacggaagccgactctgatacccagtcgcctcagtacctgtcagcaacttctccgccaaaggacaaaaagcggccaactccccttgaaatcggttattccagccacctgcgtgccgactctacagtccagctcgcaccatctccccccaaatcgcctaaagtgctctattccccaatttcccctctcagcccaggaaaggctctcgagtcagcatttgtcccgtatgagaagcccctgcccgacgacatctcacctcagaaagtgctgcaccccgacatggcaaaggtgccccccgcctcccccaagaccgccaaaatgatgcagcggtctatgtctgacccgaagcctcttagcccaacagctgacgagtcatctagagcaccctttcagtacaccgagggctacaccaccaagggctcccagacgatgactagttctggcgctcagaagaaggttaagcggaccctccccaatcctccaccagaagagatttcgaccggcacgcagagcaccttctctactatgggaacagtttcacggcgccggatctgtcgtactaatactatggccagagcaaaaatcctgcaggacatcgacagagaactcgacctcgtcgagagggaatccgccaagctgcgaaaaaaacaggcagagctggatgaggaggagaaagaaatcgatgcaaagctcagatatctcgaaatgggaatcaatagacgaaaggaggctctgctgaaggaaagagaaaagcgggaacgagcatacctccagggggtggcggaggaccgtgattatatgagtgacagtgaggtgagttctactagacccacacggattgaatcccagcacggtatcgagcggcctcgcaccgcgccccagactgagttctcccagtttattccaccccagacccaaaccgagtcacaactggtcccccctacaagcccgtacactcagtaccagtattcaagcccagctcttccaacccaggctcctacgtcatacacacagcagtcccactttgagcagcagactctgtatcaccagcaggtctctccataccagacccagcccacctttcaggcggtagccaccatgtcctttactcctcaggtccagcccactccaacaccacaacctagttaccaactcccgtcccaaatgatggtcatacagcagaagccaaggcagacaacgctgtacctggagcccaaaataacctccaattacgaagtaatcaggaaccagcctttgatgatagcaccagtctcaacagataacacgtttgctgtttcccacctggggtccaaatataattcccttgatctgaggattggcctcgaagagaggagttcaatggcatcctcacctatatctagtatctccgctgactccttttatgctgacatcgatcaccataccccacgcaattacgttctgatcgacgatatcggggagattaccaagggtactgcagctctgagcaccgcattctcattgcacgaaaaagatttgagcaagacagatcgactcctccgtactacagagacacgtaggtcccaggaggtgacagacttcctggcacccctccaatcgagttcacgcttgcattcttacgtaaaagccgaggaggatcctatggaagatccctacgaactgaagcttcttaagcaccagatcaaacaagaattccggagggggaccgaaagtctggaccatctggccggactttcccactattaccatgcagacacttcgtaccgccactttccgaagtctgaaaagtacagcatctccagactgacgctcgagaagcaggcagccaaacagttaccagcagccattctctaccagaagcagtctaagcataagaaatcgctcatagaccccaagatgagtaagttttctcctatccaggaatccagggatttggagccggactatagctcttatatgaccagctctacctcttctatcgggggcattagctcacgagcaagactgctgcaggacgatattacattcggattacggaaaaacatcaccgaccaacagaagttcatgggatcttcactcggcaccggactgggaactcttggcaatactattagaagcgctttacaagatgaggccgataagccttacagcagcggcagccggtcacggccttcaagcaggccatcttccgtgtacgggctagacctatcaattaagcgcgacagcagctcaagctcccttaggctgaaggcacaggaagctgaagctctagacgtgtctttctcacatgcatcgtcaagcgctcggacaaaacctacctctttgcccatctcccagagcagggggcgaatcccaatcgtggcccaaaactcagaggaggagtcacctctctcacctgtggggcagcccatgggtatggctagagctgcggctggccctctgccgcccatctctgcagacacccgagaccagttcggttctagccatagtctcccagaagtgcagcagcatatgcgagaggaatcccgcacgcgggggtacgaccgggacatcgccttcatcatggatgacttccaacacgctatgtccgattctgaggcctatcatctcaggagagaggagacagattggttcgataagccccgcgagagccgcctggagaacggccacggccttgatcgcaagctcccagaacgtctcgtccatagccggccattgagtcagcatcaagagcagatcattcagatgaacgggaagacgatgcattatatttttcctcatgcccgaataaagataactagggacagcaaagatcacactgtgtcggggaacggacttgggatccggattgtgggcgggaaagagattcctggccactcgggcgagattggcgcttatatcgctaaaatcctgcctggagggtcagcagagcagaccggcaagctgatggaaggaatgcaagtcttagagtggaacggcatacctctcacgagtaagacttatgaggaggtgcagagtattatttcccaacagtctggagaggcagagatctgtgtgaggctggatctgaatatgctatctgatagcgaaaattcacagcacctggagttgcacgaaccacctaaggcagtcgacaaggcaaagtcaccgggcgtggatcccaagcagttggcagccgaactgcaaaaggtaagcttgcagcagagccctctggtgctgagcagtgtcgtcgaaaaggggtcccatgtccatagcggtcccacatcagctgggagcagtagcgtgccctccccaggacagcctggtagtccttccgtcagcaagaagaagcatggatcgtcgaaacccaccgatgggactaaggttgtctcccacccgattaccggagagatacagttgcaaataaactatgacctgggcaatctaataattcacattctgcaggcaagaaacctggttccaagagacaacaatggctactcagatccctttgtgaaagtgtatctcctgccaggcagaggccaagtaatggtggtgcagaacgcaagtgctgagtataagaggagaaccaagcacgttcaaaaaagcctgaatcccgagtggaaccagaccgtcatttacaagagcatatctatggaacagctgaagaagaagacactcgaggtgacagtttgggactatgatcgcttttctagtaacgatttcctcggagaggtgctcatagatctgagttctacaagccatctcgacaacacaccccgctggtaccctcttaaagaacaaactgaatccattgatcacggaaagagccacagttcccagagtagccagcagtccccaaaacccagtgtaattaaatcccggtctcacggcatcttccccgacccaagcaaggatatgcaggtccctaccattgaaaagtctcactcatccccaggctccagcaagagttcatctgagggtcacctcaggtctcacgggcctagcagaagtcagagcaagacatcagtcacccagacccatttggaagacgcgggagccgctatagccgctgctgaagccgccgtacagcagttgagaatacagccgactaagcccccaaaccaccgccccgcagagagctctgtctcaaccggatcaagcggatctagttttggctccggctacagtgtggattctgagggctcttctagcactgccggagagaccaatttgtttcccattcccaggatcggcaagatgggacaaaatggacaggagccagtaaaacagcccggagtcggcgtaggactcgccgatactgaggccaagacacaggtaatgggagaaattaaaatcgcccttaagaaggaaatgaaaactgatggagagcagctcattgtcgaaattctccagtgcagaaatattacatataagttcaaatccccagaccacctgccggatctttatgtaaagatatacgtaatgaacattagtacacaaaagaaagtgattaagaaaaaaacacgggtgtgtagacatgatcgagaaccctcattcaacgaaaccttcaggttctccctctctccagcaggccactcattacagatattgctgttttctaacggtggcaaatttatgaagaagacactcattggtgaagcttgtatctggctggataaagttgatctacgcaaacggattgtgaattggcacaaactgctggtctcgcctacacaaactcactag

SEQ ID NO: 226725 - DNA, 16216 bp, Artificial Sequence
  derived and/or modified sequence
gcggtgcgcggtgggaggggcggacggcgcccggctggcaccgctcagatctgcttctccccggctcggggcgccgaggcggcgtccgggaggtgtcttctgcaaaggttgcctggcgctgtccaacatggaggaggcaccggcagcgggcgttacctgcgagcgggactaacccctgcctggcgttccgggcggcagtgcctggtccagagtccagggactcggctgcctgcacgccccgaggcggaccccggctctgactgctcccctggccgcgggcttctcgactgggacgcggcgcgaggagggagcgcggcggccccgagtctccctgagccatgggcaacgaggcgagcttggaaggggaagggctccccgaagggctggcggcggccgcagcggctggaggaggagctagcggggcggggagcccctctcacaccgcgatcccggccggcatggaggcggatttgagccagctgagcgaagaggagaggagacagatcgccgctgtcatgtcaagggcgcaggggctgcccaagggaagcgtccccccggccgctgcggagtcgccttccatgcacaggaaacaagagttggatagtagtcatcctccaaagcaatcaggaagacccccggaccctgggcgtccagctcaacctggtctcagtaaaagtagaactacagacactttcaggtcagagcagaaattgcctgggaggagtccttccactattagcttgaaagaatcaaagtccagaactgatttaaaggaagagcacaagtctagtatgatgcctggcttcctctcagaggttaacgctttaagtgctgtttcctctgttgtaaataaattcaacccttttgatttgatatcagactctgaggcatcccaggaagaaaccaccaagaaacaaaaagtggttcagaaggagcaaggaaaacctgaaggaatcataaaacctcctttacaacaacagccacccaagccgattcctaagcagcaaggacctggtagggatccgcttcagcaggatggcactcccaaatcaatatcttctcaacaaccagaaaaaattaaatcacaacctccaggtacaggaaagccaattcagggtcctacccagactcctcagacagaccatgcaaaattgccacttcaacgagatgcatccaggcctcagactaaacaggcagacatagtaaggggagaatcagttaaaccctcactgccaagcccatccaaaccacctattcagcaaccaactcctggaaaacctccagcacagcagcctggacatgaaaaatcacagcctgggcctgcaaagcccccagctcagccctcagggctaacaaagccattggctcaacaaccagggacagtgaaacccccagtccagccaccagggacaacaaagcctccagctcagcctcttggtcctgctaagcctccagctcagcagactgggtcagagaagccttcatcggagcagcctgggccaaaggctttagctcagcctcctggagttggaaagactccagctcaacagccagggccagcaaagcctccaacccagcaggtggggacaccaaaacccctagctcaacaacctgggctacagtctccagctaaggcacctgggcctacaaagactccagttcagcagcctgggccaggaaagattccagctcaacaggcaggacccggaaagacttctgcccagcagactggcccaacaaagcctccttcacaactgcctggcccagcaaagcccccacctcaacagcctggcccagcaaagcccccacctcaacagcctggctcagcaaagcccccatctcaacagcctggctcaacaaaacccccacctcaacagcctggcccagcaaagccctcacctcaacagcctggctcaacaaaacccccatctcaacagcctggctcagcaaaaccctcagctcaacagcctagcccagcaaagccctcggctcagcaatctacaaaaccagtaagccaaacaggatctggaaaacctctgcagccaccaacagtgtctccatctgcaaaacagcctccttcacaaggcctccctaaaaccatctgtcctctttgcaataccactgaacttctgttgcatgttccagaaaaggccaattttaacacatgcactgagtgtcaaaccactgtctgtagtctctgtggttttaatcccaatcctcatttaacggaggtaaaagagtggctctgtttgaactgtcaaatgaaaagagctctaggcggggatctggctccagttccgtcatcaccccagcccaaactgaagactgcacctgttaccactacatcagcagtgagcaaatcatccccacagccacagcagacttccccaaagaaggatgctgcaccaaaacaggatctctccaaggcacctgagcctaaaaagccaccaccactagtgaaacaaccaacccttcatggctctccttcagccaaggccaagcagccccctgaggcagattctttgtccaagccagcccctcccaaagaaccttctgtcccatctgagcaggacaaggcccctgttgctgatgataaaccaaagcagcccaagatggtaaagccaaccactgaccttgtatcttcatcatcagcaacaacaaaacctgatattccaagctccaaagtacagtcacaagctgaagagaaaacaacccctcctctaaaaacagactctgccaaaccctcacagagttttccaccaacaggggaaaaagtcagcccatttgattctaaagccatacctcgacctgcatcagattcaaaaattatttcacatcctggtcccagttcagagagcaaaggtcaaaaacaagttgaccccgtacaaaagaaggaagaacccaagaaagcacaaaccaaaatgagtcctaaaccagatgccaagccaatgccaaaagggtcaccaacaccccctggcccacgacctaccgctggccaaactgtccccacacctcaacagtccccaaagcctcaggagcagtcaaggcgtttcagtctgaatctgggaagtattactgatgcccccaaatcacagcctacaactcctcaagagaccgtgactgggaaactctttgggtttggagcatcaatcttcagccaggcatcaaatttaatttccactgcaggccaacctggacctcattcacaaagtggaccaggggccccaatgaaacaagcccctgccccttcacagccacctacttcacaagggccacccaaatccacaggtcaagcaccaccagcacctgcaaaaagtatacctgtgaaaaaggaaacaaaagccccagcagctgaaaaattagagcccaaagctgaacaagctccaacagtaaaaagaacagaaacagaaaaaaagccaccacctattaaggatagcaaatctttaacagctgagcctcaaaaggctgtccttcccacaaaactggagaaatcgcccaaaccagaatcaacctgtcctctctgcaaaactgaactcaacataggttctaaggatcctcctaacttcaatacttgcactgaatgcaagaatcaagtgtgtaatctctgtggatttaaccctacaccacatttgactgagattcaagaatggctttgtttaaattgccaaacccagagagcaatatcaggacagcttggagacatacgcaaaatgccacctgcaccatcaggacccaaagcatctcctatgcctgttcctacagaatcatcatctcagaaaacagcagtgcctccccaagtaaaattagtgaaaaagcaagaacaagaagtaaaaacggaagctgaaaaagtcattctggaaaaagtaaaggaaacactatcaatggaaaaaattcctcctatggtaaccacagatcaaaaacaagaagagagtaaactagagaaagacaaagcttcagctcttcaagaaaaaaagccactccctgaagaaaaaaaactaatccctgaagaagaaaagatacgttctgaagaaaaaaagccactcctagaagaaaaaaagccaacccctgaagacaaaaagctactcccagaggcaaaaacatcagccccagaagaacagaaacatgacttacttaaatctcaagtacaaattgctgaagaaaagcttgaaggcagagtggctccaaagacagtgcaagaagggaaacaaccacagaccaagatggaaggtttaccatctggcacacctcagagtttacctaaagaagatgataagacaaccaaaacaataaaagaacagccacagccaccatgcacagcaaaacctgatcaggtggaacctgggaaagaaaaaacagaaaaggaagatgacaaatcagacacctcaagttctcagcagcctaaaagcccccaaggtctgagcgacacgggatattcttccgatggaatatcaagctcacttggtgaaattccaagtcttattccaactgatgaaaaggatattctcaagggactcaaaaaggactctttttcacaagaaagcagcccttccagcccctcagatttggctaagttagaaagtacagtcctatctattttggaagctcaagcaagtacacttgctgatgaaaagtcagaaaagaaaacacaaccccatgaagtttctcctgaacagcctaaagaccaagagaaaactcagagtttatctgaaaccttggaaattactatttcagaagaggagatcaaagagagtcaagaagaaaggaaagacacttttaaaaaagatagccaacaagatattccttccagcaaggaccataaagagaagtctgagtttgttgatgacataactactagaagagagccttatgattcagttgaagagagtagtgaaagtgaaaactcacctgttccacaaagaaaacgaagaactagtgttggctcatcaagcagtgatgagtataaacaggaagacagccaaggatcaggggaagaggaggacttcattcgaaaacaaatcatagaaatgagtgctgatgaagatgcttcaggttctgaagatgatgagttcatcagaaaccagctcaaagagattagtagcagtactgagagccagaagaaggaagaaacaaagggaaaaggcaaaataacagcagggaaacacagacgactgactcgaaaaagtagcacaagcattgatgaagatgcaggaagacgtcactcatggcatgatgaagacgatgaagcatttgatgaaagtcctgaacttaaatacagagaaactaaaagtcaggaaagtgaagaacttgtagttactggaggaggagggctacgccgatttaaaacaattgagctcaacagtacaatagcagataaatattctgcagagtcatcacagaaaaaaacaagtttgtattttgacgaagagccagaattggaaatggaaagcctgacagactcacctgaagataggtcaaggggagagggatcttcgagtctgcatgcttccagcttcactcctggtacatcccctacatcagtatcatcacttgatgaggacagtgacagtagcccgagtcacaaaaaaggagagagcaaacagcaacgcaaagctcggcacagaccacatggccctcttttgcctactattgaagattcttcagaggaagaagaattgagagaggaagaagaattattaaaggagcaagaaaagcagagggaaatagaacagcaacaaagaaagagttctagtaaaaaatcaaagaaagacaaagatgaacttcgagctcagagaagaagggaaaggccaaagacaccacctagtaatctctctcccattgaagatgcatctccgacagaagagttacgtcaggctgcagaaatggaggagctccatagatcttcttgttctgaatattcacctagcatagagtcagacccagaaggttttgaaataagcccggaaaaaataatagaagtacaaaaagtttataaattgcccacagctgtttcattatactcaccaacagatgagcaatctattatgcagaaagaaggtagccaaaaggcgttaaaaagtgctgaggagatgtatgaagaaatgatgcataaaacacacaaatacaaagcttttccagctgcaaatgaacgagatgaagtgtttgaaaaagagcctttgtatggtgggatgctaatagaggattatatttatgaatctttagtagaagacacgtacaatggatcggtagatggcagtctgctaacaaggcaagaagaagaaaatggatttatgcagcagaaaggaagagagcaaaagataagactttcagaacagatttatgaagatcctatgcagaaaattacagacctccagaaagagttttatgagttagaaagcttacattctgttgtgcctcaggaagatattgtttcaagctcttttatcatcccagaaagccatgagatagtggacctgggtactatggtaacttctacagaagaagaaaggaaactactagatgctgatgctgcctatgaagaacttatgaagaggcaacagatgcaattaacacctggatctagcccaacccaggcccccattggtgaggatatgacagagtccaccatggactttgacagaatgccagatgcctctttgacatcaagtgttctctcaggagcgtctcttacagattcgaccagcagtgcaacactctctatcccagatgttaaaataacccaacatttttcaacagaagaaattgaggatgaatatgtaaccgattatacaagagaaattcaagagataattgcccatgaatcgctgattttgacctactcggagccttcagaaagtgctacatctgtcccaccctctgacacaccttctctcacatcatctgtttcttcggtctgtaccacagatagctcttcacccattactaccctggatagcataaccacagtttatacagagccagtggacatgataactaaatttgaagattctgaggaaatttcttcatcaacttattttccaggcagcattatagactatccagaagaaataagtgtatctttagatcggactgccccaccagatggtagagctagtgctgatcatattgttatttccttatctgatatggcatcttctatcatagaatctgtagtacctaaacctgaagggccagttgctgacactgtttctactgacttacttatatctgaaaaggacccagtgaagaaagccaagaaggaaactgggaatggaatcattctggaagttttggaagcttacagagataaaaaggagttggaggccgaacgaacaaaaagtagcttatccgaaaccgtgtttgatcacccaccttcttctgtaatagcccttccaatgaaagagcagctttcaactacatactttacatctggagagacctttggtcaggaaaaacctgcatctcagttaccatctggcagtccttctgtttcctctcttccagctaaacctcgcccattctttagaagttcttctttggatatatcagctcaacctcctccccctcctccccctccccctcctcctcctcctccaccaccaccccctcctcccccaccacttcctccaccaacttcacctaaaccaactattcttcctaaaaaaaagttaacagttgcatctccagtgactacagctacacctctgtttgatgctgttactactctagagaccacagctgttctgagaagtaatggattacctgttacaagaatatgtactactgcacctcctcctgttcctcctaagccatcttcaattccatctggacttgtatttacccacaggcctgagccaagcaaacctccaatcgcccccaaaccagtgattcctcagcttccaacaactacacaaaaaccaacagatatacaccccaaaccaacaggcctatctttaacttcaagtatgaccttaaatttagtgacttcagcagattataaattgccttcccctacctccccactttccccacactccaacaagtcttcaccaagattttccaaatccctcacagaaacttatgtagttattacattgccatctgaaccagggactccaacagattcttctgctagtcaagcaattaccagttggcccttgggatcaccctccaaagatctggtttctgttgaacctgtgttttctgtagttcctcctgtgacagctgtagaaattccaatttcttcagaacagaccttctacatctctggagctttacagacattttctgctacccctgtcacagcaccctcttcatttcaagcagctcccacatcagttacacagtttctcactactgaagtttccaagactgaggtttcagcaaccagaagtacagctcctagtgttggtctcagcagcatttccataacaattcctccagagcctcttgctctagataacatacatttagagaagcctcagtataaagaagatggaaaattgcaacttgttggtgatgtaattgatttgcgtacagtaccaaaggtagaagttaaaacaactgataaatgtattgatctttctgcttctacaatggatgtgaaaaggcagatcacagcaaatgaagtttatgggaaacaaattagtgctgtccaaccctctattataaatcttagtgtgacatcatcaatagtgactcctgtatctctggccactgagacagtgacctttgtcacatgcacagctagtgcaagttacactacaggcacagaaagcctagtgggtgcagaacatgcaatgacaacaccactccaacttacaacatcaaagcatgctgagcccccatacaggataccaagtgaccaggtctttcctatagctagggaagaagcaccaataaacttatctctaggtactccagcacatgcagtgacattggctattacaaaacctgtcactgtgcctcctgttggtgtcacaaatggatggactgatagcaccgtatcccagggaatcactgatggggaagtagtggatctcagtacaaccaagtctcacagaacagtcgtaacaatggatgagtctacttcaagtgtgatgaccaaaataatagaagatgaaaaacccgttgatttaaccgcagggagaagagctgtgtgctgtgatgtggtttataaattaccatttggaaggagctgcacagcacagcagcctgcaactactcttcctgaggatcgttttggttatagggatgaccactatcagtatgatcgatcagggccatatggttatagagggattgggggaatgaagccttccatgtctgacacaaatttagcagaagctggacattttttctataaaagtaagaatgcttttgattattctgaaggaactgacacagcagtagatctgacttcagggagagttactacaggtgaggtaatggattattcaagcaagactacaggtccatatccagaaacacgacaagtcatttcaggagctgggattagtaccccacagtattccacagcaagaatgacaccaccaccaggaccccagtattgtgtggggagtgttttgaggtcatctaatggtgttgtctattcttcagtagcaactccaacaccctctacatttgctatcaccacacaacctggctccattttcagcaccacagtgagggatttgtctggtattcatacggctgatgcagtgacttcattacctgccatgcaccatagccagccaatgcctagatcatattttataacaacaggtgcatctgaaacggacattgcagtaactggtattgatatcagtgccagtttgcaaactattactatggagtctcttactgctgagacgatagactctgttcccactttaaccacagcatccgaagtgtttcctgaagtggtgggagatgaaagtgctcttttaattgtccctgaagaagataaacaacagcagcagctagacttggagcgtgagctcctggaactggagaaaattaagcaacagcgctttgctgaggaattggagtgggaacgtcaggaaattcaaaggttccgagaacaagaaaagatcatggttcagaaaaagttggaggagctgcagtctatgaagcaacaccttctctttcagcaagaagaagagcggcaagcccagttcatgatgaggcaggagacgttagctcagcaacagttacagcttgagcagatccaacagctgcaacaacagcttcaccagcagctggaggagcaaaagattcggcagatctaccagtataactatgacccttctggaactgcttctccacaaaccactacagagcaggcaattttggaaggtcagtatgctgctctggaaggcagtcaattttgggcaactgaagatgcaaccaccacagcttcagctgttgtggcaattgaaataccacaaagccaaggatggtacaccgttcagtctgatggtgttactcagtacattgccccacctggtatcctgagcactgtttcagaaatacctctaacagatgttgttgtgaaagaggaaaaacaacccaaaaagagaagttctggagctaaagtccgaggacagtatgatgacatgggagaaaatatgacagatgatccccgaagttttaaaaagatagtggacagtggtgtacaaacggatgacgaagatgccacagatcggagctatgtgagtaggagaaggagaactaaaaagagtgtggatacaagcgtccaaactgatgatgaagatcaggatgagtgggatatgcctactagatcaaggaggaaagctcgtgtagggaaatatggtgacagcatgacagaggctgacaagaccaaacccctttccaaagtctccagcatagcagttcaaacggtagcagagatatctgtgcaaactgaaccagttggaaccataagaacaccctccatacgggcacgagtggatgccaaggtagaaataattaaacacatttcagcacctgaaaagacttacaaagggggcagtttaggatgtcaaacagaagcagattcagacacacaaagtcctcaatatctgagtgccacatctccacccaaagacaagaaacgcccaacacctttagagattggttattcatctcacctccgggcagattccacagtacagctggctccttccccacccaaatcccccaaagtcctttactcacccatctcaccactttcaccaggcaaagccttagaatcagcctttgtaccttatgaaaaacccctccctgatgatataagtccacagaaagtactgcatccagatatggctaaagttcccccagcaagtcctaagacagccaagatgatgcagcgttctatgtctgaccccaagcctctgagtccaacagcagacgaaagttccagggctccttttcagtataccgagggctatacgactaaaggttctcaaaccatgacatcctctggagcccagaaaaaagttaaaagaactctgccaaatccacctcctgaggagatttccacaggaactcaatccacattcagcacaatgggcacagtttccaggagaaggatctgcagaaccaacacaatggcacgagccaagattctccaggacatagacagagagcttgatcttgtggaaagggagtctgcaaaacttcgaaagaaacaagcagagcttgatgaagaagaaaaggagattgatgctaagctacgatacctggaaatgggaattaacaggaggaaagaggccctattaaaggagagagaaaagagagaacgagcctacctccagggagtagctgaggatcgtgattacatgtctgacagtgaagtgagtagcacaagaccaacccgaatagaaagtcagcatggcattgagcgaccaagaactgctccccaaactgaattcagccagtttataccaccacaaacccaaacagaatctcaactagttcctccgacaagtccttacacacaataccagtactcttcccctgctcttcctacccaagcacccacctcatacactcaacagtctcattttgagcaacaaactttgtaccatcagcaagtttcaccttatcagactcagccaacattccaagctgtggcaacaatgtccttcacacctcaagttcaacctacaccaaccccacagccttcttatcagttaccttcacagatgatggtgatacaacagaagccacggcaaactacattatatttggagcccaagataacctcaaactatgaagtgattcgcaaccaaccccttatgatagcacctgtttctacggataacacatttgctgtttcccatcttggtagtaagtacaatagtttagacttgagaataggtttggaggaaagaagtagcatggcaagcagtccaatatcaagcatatctgcagattctttctatgcagatattgatcaccatactccacgaaattatgtcctaattgacgacattggagagatcaccaaaggaacagcggcattaagcaccgcatttagccttcatgaaaaggatctgtcaaaaacagaccgtctccttcgaaccactgagacacgccggtctcaagaagtgacagatttcctagcacctttacagtcttcctctagattgcatagttatgtgaaggcggaggaagacccaatggaggatccttacgagttaaagcttctgaaacatcagattaaacaggaatttcgtagagggacagagagcttagatcaccttgctggtctttctcattattaccatgctgatactagctacagacattttccaaaatctgagaagtatagcatcagtagactcacacttgaaaaacaagcagcaaaacaactgccagcagccatactttatcaaaagcagtcaaagcataagaaatcactaattgaccctaaaatgtcaaaattttcacctattcaagaaagtagagaccttgaacctgattattcaagctatatgacttctagcacttcatctattggtggcatttcctccagggcaaggctccttcaagatgacatcacttttggcctcagaaaaaatattacagaccaacaaaaatttatgggatcttctcttggcacaggactgggcacattaggaaataccatacgctcagctctgcaggatgaagcggataagccatacagtagtggcagcaggtccagaccttcctccagaccttcctctgtctatgggcttgatttatcaattaaaagggattcttctagctcttccctaagactgaaagctcaagaggctgaagctctagatgtttcctttagtcatgcatcatcctctgccagaactaagccgaccagtttgccaattagtcaaagtagaggaagaataccaattgtggcccagaattctgaagaagaaagcccactcagtcctgttggccagccaatgggaatggccagggctgcagctggacccctgccaccaatatctgcagacaccagggatcagtttggatcaagccactcattgcctgaagttcagcaacacatgagggaagaatcacggactcgaggctatgaccgtgacatagcattcatcatggatgacttccaacatgccatgtcagacagtgaagcctatcatctgcgtcgtgaggaaacagattggtttgataaacccagggagtctcgtttggaaaatggacatggtctggaccgaaaactgccggaaagattggtccactctagaccactcagtcaacatcaagagcaaattatacagatgaacgggaaaactatgcactacatctttcctcacgcaaggataaaaataacaagagactcaaaggatcacacagtttcaggtaatggattaggaattagaattgtgggtggtaaagaaatcccgggacatagtggagaaattggagcctatattgccaagattcttcctgggggaagtgcggaacagacggggaagcttatggaagggatgcaagtattggaatggaatggaattcccttgacttctaaaacatatgaagaagttcagagtatcattagtcagcaaagtggggaagcagaaatatgtgtaagactggacctcaatatgctatcagattctgaaaattcccagcatctggaacttcatgagccaccaaaagctgtggataaggcgaaatccccaggggttgatcctaagcagttggcagcagaactccagaaggtttcactacagcagtcaccgctggttctgtcatcagttgttgaaaaaggatctcatgttcattcaggtcctacatcagcaggatccagttccgttcccagccctgggcaaccagggtccccctcagtgagcaaaaagaagcacggcagcagcaagcctaccgatggaacaaaggttgtctctcatccaattacaggagaaattcagcttcaaattaactatgatcttggaaatctcataatacatattctccaagcaagaaatcttgttcctcgagacaacaatggttattctgacccttttgtgaaagtgtaccttcttccagggagaggtcaagtcatggttgtccagaatgcaagtgctgagtacaagagaaggactaaacatgtccagaaaagtcttaatcctgagtggaatcaaacagtaatttataaaagtatttccatggaacagctcaagaagaaaacactggaggtgacagtttgggattatgatagattttcatccaacgacttccttggggaggtattgattgatttatctagcacatctcacctcgataacactccaaggtggtatcctctcaaagaacagactgaaagcattgatcatggcaagtctcattccagtcagagcagccagcagtccccaaagccatctgttatcaaaagcagaagccatggtatcttccctgacccatcaaaggacatgcaggttcccaccattgagaaatcccatagtagtcctggtagctcaaaatcatcatcagaaggccatctccgttctcatggaccatctcgcagtcaaagcaaaaccagcgtcactcagacccacctggaagatgcaggggctgccatagctgctgccgaagctgccgtgcaacaactccgcattcaaccaacaaagcctcccaatcaccggcctgcagaaagctctgtgtccaccggctcctcgggcagcagctttggcagtgggtatagcgtggacagtgaaggaagcagcagcactgcaggggagactaatctatttcctattccgaggatagggaagatgggacagaatggacaagagcctgtaaaacagccaggggtaggagtaggactagcagacactgaagctaaaactcaggtaatgggagaaatcaagattgcattgaagaaggaaatgaagacagatggtgaacaactaatagttgaaattctccaatgcagaaatattacatacaaatttaagtctcctgatcatctaccagatttatatgtgaaaatatatgtgatgaatatttctacccaaaaaaaggtgatcaagaaaaaaacaagagtatgcagacatgatcgagagccttcgtttaatgaaacttttcgattcagtctaagtcctgcaggacattctcttcagattttacttttctccaatggagggaagtttatgaaaaagaccttgattggtgaagcctgtatctggcttgacaaagtggatctcagaaaaagaatagtcaactggcacaaacttttggtcagtcctactcaaacgcattgaagaaacatgtcttctcagggtatagaaactgctctaaatagcctcacatcaagactatagttgaatactattgtacaaagctaagttttgagaggcaaacataagagtgggaacaacaagcaaaaacatacttaagaccttgtacatttattgttgtggatcacacaaagatattcaactgaaaaagttcacatactgaaaacaagaagaatggagttctgagaccttgaatttcccatggctgtgaagagaaactgtgaaacaaattttgattacttaagacaataatctttgagtagagttgagctatagcttaagacaggctcaaagattaatgtggttttcatgcagcacaaaggtaattctttatgcaaaggagccttggttgaaaggaaaggactgatgtaacaaatctcagttttcaaaacttcaaaaatcttccttcatcg

SEQ ID NO: 226726 - DNA, 20081 bp, Artificial Sequence
  derived and/or modified sequence
tctgcttctccccggctcggggcgccgaggcggcgtccgggaggtgtcttctgcaaaggttgcctggcgctgtccaacatggaggaggcaccggcagcgggcgttacctgcgagcgggactaacccctgcctggcgttccgggcggcagtgcctggtccagagtccagggactcggctgcctgcacgccccgaggcggaccccggctctgactgctcccctggccgcgggcttctcgactgggacgcggcgcgaggagggagcgcggcggccccgagtctccctgagccatgggcaacgaggcgagcttggaaggggaagggctccccgaagggctggcggcggccgcagcggctggaggaggagctagcggggcggggagcccctctcacaccgcgatcccggccggcatggaggcggatttgagccagctgagcgaagaggagaggagacagatcgccgctgtcatgtcaagggcgcaggggctgcccaagggaagcgtccccccggccgctgcggagtcgccttccatgcacaggaaacaagagttggatagtagtcatcctccaaagcaatcaggaagacccccggaccctgggcgtccagctcaacctggtctcagtaaaagtagaactacagacactttcaggtcagagcagaaattgcctgggaggagtccttccactattagcttgaaagaatcaaagtccagaactgatttaaaggaagagcacaagtctagtatgatgcctggcttcctctcagaggttaacgctttaagtgctgtttcctctgttgtaaataaattcaacccttttgatttgatatcagactctgaggcatcccaggaagaaaccaccaagaaacaaaaagtggttcagaaggagcaaggaaaacctgaaggaatcataaaacctcctttacaacaacagccacccaagccgattcctaagcagcaaggacctggtagggatccgcttcagcaggatggcactcccaaatcaatatcttctcaacaaccagaaaaaattaaatcacaacctccaggtacaggaaagccaattcagggtcctacccagactcctcagacagaccatgcaaaattgccacttcaacgagatgcatccaggcctcagactaaacaggcagacatagtaaggggagaatcagttaaaccctcactgccaagcccatccaaaccacctattcagcaaccaactcctggaaaacctccagcacagcagcctggacatgaaaaatcacagcctgggcctgcaaagcccccagctcagccctcagggctaacaaagccattggctcaacaaccagggacagtgaaacccccagtccagccaccagggacaacaaagcctccagctcagcctcttggtcctgctaagcctccagctcagcagactgggtcagagaagccttcatcggagcagcctgggccaaaggctttagctcagcctcctggagttggaaagactccagctcaacagccagggccagcaaagcctccaacccagcaggtggggacaccaaaacccctagctcaacaacctgggctacagtctccagctaaggcacctgggcctacaaagactccagttcagccaaagcccccatctcaacagcctggctcaacaaaacccccacctcaacagcctggcccagcaaagccctcacctcaacagcctggctcaacaaaacccccatctcaacagcctggctcagcaaaaccctcagctcaacagcctagcccagcaaagccctcggctcagcaatctacaaaaccagtaagccaaacaggatctggaaaacctctgcagccaccaacagtgtctccatctgcaaaacagcctccttcacaaggcctccctaaaaccatctgtcctctttgcaataccactgaacttctgttgcatgttccagaaaaggccaattttaacacatgcactgagtgtcaaaccactgtctgtagtctctgtggttttaatcccaatcctcatttaacggaggtaaaagagtggctctgtttgaactgtcaaatgaaaagagctctaggcggggatctggctccagttccgtcatcaccccagcccaaactgaagactgcacctgttaccactacatcagcagtgagcaaatcatccccacagccacagcagacttccccaaagaaggatgctgcaccaaaacaggatctctccaaggcacctgagcctaaaaagccaccaccactagtgaaacaaccaacccttcatggctctccttcagccaaggccaagcagccccctgaggcagattctttgtccaagccagcccctcccaaagaaccttctgtcccatctgagcaggacaaggcccctgttgctgatgataaaccaaagcagcccaagatggtaaagccaaccactgaccttgtatcttcatcatcagcaacaacaaaacctgatattccaagctccaaagtacagtcacaagctgaagagaaaacaacccctcctctaaaaacagactctgccaaaccctcacagagttttccaccaacaggggaaaaagtcagcccatttgattctaaagccatacctcgacctgcatcagattcaaaaattatttcacatcctggtcccagttcagagagcaaaggtcaaaaacaagttgaccccgtacaaaagaaggaagaacccaagaaagcacaaaccaaaatgagtcctaaaccagatgccaagccaatgccaaaagggtcaccaacaccccctggcccacgacctaccgctggccaaactgtccccacacctcaacagtccccaaagcctcaggagcagtcaaggcgtttcagtctgaatctgggaagtattactgatgcccccaaatcacagcctacaactcctcaagagaccgtgactgggaaactctttgggtttggagcatcaatcttcagccaggcatcaaatttaatttccactgcaggccaacctggacctcattcacaaagtggaccaggggccccaatgaaacaagcccctgccccttcacagccacctacttcacaagggccacccaaatccacaggtcaagcaccaccagcacctgcaaaaagtatacctgtgaaaaaggaaacaaaagccccagcagctgaaaaattagagcccaaagctgaacaagctccaacagtaaaaagaacagaaacagaaaaaaagccaccacctattaaggatagcaaatctttaacagctgagcctcaaaaggctgtccttcccacaaaactggagaaatcgcccaaaccagaatcaacctgtcctctctgcaaaactgaactcaacataggttctaaggatcctcctaacttcaatacttgcactgaatgcaagaatcaagtgtgtaatctctgtggatttaaccctacaccacatttgactgagaattgccaaacccagagagcaatatcaggacagcttggagacatacgcaaaatgccacctgcaccatcaggacccaaagcatctcctatgcctgttcctacagaatcatcatctcagaaaacagcagtgcctccccaagtaaaattagtgaaaaagcaagaacaagaagtaaaaacggaagctgaaaaagtcattctggaaaaagtaaaggaaacactatcaatggaaaaaattcctcctatggtaaccacagatcaaaaacaagaagagagtaaactagagaaagacaaagcttcagctcttcaagaaaaaaagccactccctgaagaaaaaaaactaatccctgaagaagaaaagatacgttctgaagaaaaaaagccactcctagaagaaaaaaagccaacccctgaagacaaaaagctactcccagaggcaaaaacatcagccccagaagaacagaaacatgacttacttaaatctcaagtacaaattgctgaagaaaagcttgaaggcagagtggctccaaagacagtgcaagaagggaaacaaccacagaccaagatggaaggtttaccatctggcacacctcagagtttacctaaagaagatgataagacaaccaaaacaataaaagaacagccacagccaccatgcacagcaaaacctgatcaggaaaaggaagatgacaaatcagacacctcaagttctcagcagcctaaaagcccccaaggtctgagcgacacgggatattcttccgatggaatatcaagctcacttggtgaaattccaagtcttattccaactgatgaaaaggatattctcaagggactcaaaaaggactctttttcacaagaaagcagcccttccagcccctcagatttggctaagttagaaagtacagtcctatctattttggaagctcaagcaagtacacttgctgatgaaaagtcagaaaagaaaacacaaccccatgaagtttctcctgaacagcctaaagaccaagagaaaactcagagtttatctgaaaccttggaaattactatttcagaagaggagatcaaagagagtcaagaagaaaggaaagacacttttaaaaaagatagccaacaagatattccttccagcaaggaccataaagagaagtctgagtttgttgatgacataactactagaagagagccttatgattcagttgaagagagtagtgaaagtgaaaactcacctgttccacaaagaaaacgaagaactagtgttggctcatcaagcagtgatgagtataaacaggaagacagccaaggatcaggggaagaggaggacttcattcgaaaacaaatcatagaaatgagtgctgatgaagatgcttcaggttctgaagatgatgagttcatcagaaaccagctcaaagagattagtagcagtactgagagccagaagaaggaagaaacaaagggaaaaggcaaaataacagcagggaaacacagacgactgactcgaaaaagtagcacaagcattgatgaagatgcaggaagacgtcactcatggcatgatgaagacgatgaagcatttgatgaaagtcctgaacttaaatacagagaaactaaaagtcaggaaagtgaagaacttgtagttactggaggaggagggctacgccgatttaaaacaattgagctcaacagtacaatagcagataaatattctgcagagtcatcacagaaaaaaacaagtttgtattttgacgaagagccagaattggaaatggaaagcctgacagactcacctgaagataggtcaaggggagagggatcttcgagtctgcatgcttccagcttcactcctggtacatcccctacatcagtatcatcacttgatgaggacagtgacagtagcccgagtcacaaaaaaggagagagcaaacagcaacgcaaagctcggcacagaccacatggccctcttttgcctactattgaagattcttcagaggaagaagaattgagagaggaagaagaattattaaaggagcaagaaaagcagagggaaatagaacagcaacaaagaaagagttctagtaaaaaatcaaagaaagacaaagatgaacttcgagctcagagaagaagggaaaggccaaagacaccacctagtaatctctctcccattgaagatgcatctccgacagaagagttacgtcaggctgcagaaatggaggagctccatagatcttcttgttctgaatattcacctagcatagagtcagacccagaaggttttgaaataagcccggaaaaaataatagaagtacaaaaagtttataaattgcccacagctgtttcattatactcaccaacagatgagcaatctattatgcagaaagaaggtagccaaaaggcgttaaaaagtgctgaggagatgtatgaagaaatgatgcataaaacacacaaatacaaagcttttccagctgcaaatgaacgagatgaagtgtttgaaaaagagcctttgtatggtgggatgctaatagaggattatatttatgaatctttagtagaagacacgtacaatggatcggtagatggcagtctgctaacaaggcaagaagaagaaaatggatttatgcagcagaaaggaagagagcaaaagataagactttcagaacagatttatgaagatcctatgcagaaaattacagacctccagaaagagttttatgagttagaaagcttacattctgttgtgcctcaggaagatattgtttcaagctcttttatcatcccagaaagccatgagatagtggacctgggtactatggtaacttctacagaagaagaaaggaaactactagatgctgatgctgcctatgaagaacttatgaagaggcaacagatgcaattaacacctggatctagcccaacccaggcccccattggtgaggatatgacagagtccaccatggactttgacagaatgccagatgcctctttgacatcaagtgttctctcaggagcgtctcttacagattcgaccagcagtgcaacactctctatcccagatgttaaaataacccaacatttttcaacagaagaaattgaggatgaatatgtaaccgattatacaagagaaattcaagagataattgcccatgaatcgctgattttgacctactcggagccttcagaaagtgctacatctgtcccaccctctgacacaccttctctcacatcatctgtttcttcggtctgtaccacagatagctcttcacccattactaccctggatagcataaccacagtttatacagagccagtggacatgataactaaatttgaagattctgaggaaatttcttcatcaacttattttccaggcagcattatagactatccagaagaaataagtgtatctttagatcggactgccccaccagatggtagagctagtgctgatcatattgttatttccttatctgatatggcatcttctatcatagaatctgtagtacctaaacctgaagggccagttgctgacactgtttctactgacttacttatatctgaaaaggacccagtgaagaaagccaagaaggaaactgggaatggaatcattctggaagttttggaagcttacagagataaaaaggagttggaggccgaacgaacaaaaagtagcttatccgaaaccgtgtttgatcacccaccttcttctgtaatagcccttccaatgaaagagcagctttcaactacatactttacatctggagagacctttggtcaggaaaaacctgcatctcagttaccatctggcagtccttctgtttcctctcttccagctaaacctcgcccattctttagaagttcttctttggatatatcagctcaacctcctccccctcctccccctccccctcctcctcctcctccaccaccaccccctcctcccccaccacttcctccaccaacttcacctaaaccaactattcttcctaaaaaaaagttaacagttgcatctccagtgactacagctacacctctgtttgatgctgttactactctagagaccacagctgttctgagaagtaatggattacctgttacaagaatatgtactactgcacctcctcctgttcctcctaagccatcttcaattccatctggacttgtatttacccacaggcctgagccaagcaaacctccaatcgcccccaaaccagtgattcctcagcttccaacaactacacaaaaaccaacagatatacaccccaaaccaacaggcctatctttaacttcaagtatgaccttaaatttagtgacttcagcagattataaattgccttcccctacctccccactttccccacactccaacaagtcttcaccaagattttccaaatccctcacagaaacttatgtagttattacattgccatctgaaccagggactccaacagattcttctgctagtcaagcaattaccagttggcccttgggatcaccctccaaagatctggtttctgttgaacctgtgttttctgtagttcctcctgtgacagctgtagaaattccaatttcttcagaacagaccttctacatctctggagctttacagacattttctgctacccctgtcacagcaccctcttcatttcaagcagctcccacatcagttacacagtttctcactactgaagtttccaagactgaggtttcagcaaccagaagtacagctcctagtgttggtctcagcagcatttccataacaattcctccagagcctcttgctctagataacatacatttagagaagcctcagtataaagaagatggaaaattgcaacttgttggtgatgtaattgatttgcgtacagtaccaaaggtagaagttaaaacaactgataaatgtattgatctttctgcttctacaatggatgtgaaaaggcagatcacagcaaatgaagtttatgggaaacaaattagtgctgtccaaccctctattataaatcttagtgtgacatcatcaatagtgactcctgtatctctggccactgagacagtgacctttgtcacatgcacagctagtgcaagttacactacaggcacagaaagcctagtgggtgcagaacatgcaatgacaacaccactccaacttacaacatcaaagcatgctgagcccccatacaggataccaagtgaccaggtctttcctatagctagggaagaagcaccaataaacttatctctaggtactccagcacatgcagtgacattggctattacaaaacctgtcactgtgcctcctgttggtgtcacaaatggatggactgatagcaccgtatcccagggaatcactgatggggaagtagtggatctcagtacaaccaagtctcacagaacagtcgtaacaatggatgagtctacttcaagtgtgatgaccaaaataatagaagatgaaaaacccgttgatttaaccgcagggagaagagctgtgtgctgtgatgtggtttataaattaccatttggaaggagctgcacagcacagcagcctgcaactactcttcctgaggatcgttttggttatagggatgaccactatcagtatgatcgatcagggccatatggttatagagggattgggggaatgaagccttccatgtctgacacaaatttagcagaagctggacattttttctataaaagtaagaatgcttttgattattctgaaggaactgacacagcagtagatctgacttcagggagagttactacaggtgaggtaatggattattcaagcaagactacaggtccatatccagaaacacgacaagtcatttcaggagctgggattagtaccccacagtattccacagcaagaatgacaccaccaccaggaccccagtattgtgtggggagtgttttgaggtcatctaatggtgttgtctattcttcagtagcaactccaacaccctctacatttgctatcaccacacaacctggctccattttcagcaccacagtgagggatttgtctggtattcatacggctgatgcagtgacttcattacctgccatgcaccatagccagccaatgcctagatcatattttataacaacaggtgcatctgaaacggacattgcagtaactggtattgatatcagtgccagtttgcaaactattactatggagtctcttactgctgagacgatagactctgttcccactttaaccacagcatccgaagtgtttcctgaagtggtgggagatgaaagtgctcttttaattgtccctgaagaagataaacaacagcagcagctagacttggagcgtgagctcctggaactggagaaaattaagcaacagcgctttgctgaggaattggagtgggaacgtcaggaaattcaaaggttccgagaacaagaaaagatcatggttcagaaaaagttggaggagctgcagtctatgaagcaacaccttctctttcagcaagaagaagagcggcaagcccagttcatgatgaggcaggagacgttagctcagcaacagttacagcttgagcagatccaacagctgcaacaacagcttcaccagcagctggaggagcaaaagattcggcagatctaccagtataactatgacccttctggaactgcttctccacaaaccactacagagcaggcaattttggaaggtcagtatgctgctctggaaggcagtcaattttgggcaactgaagatgcaaccaccacagcttcagctgttgtggcaattgaaataccacaaagccaaggatggtacaccgttcagtctgatggtgttactcagtacattgccccacctggtatcctgagcactgtttcagaaatacctctaacagatgttgttgtgaaagaggaaaaacaacccaaaaagagaagttctggagctaaagtccgaggacagtatgatgacatgggagaaaatatgacagatgatccccgaagttttaaaaagatagtggacagtggtgtacaaacggatgacgaagatgccacagatcggagctatgtgagtaggagaaggagaactaaaaagagtgtggatacaagcgtccaaactgatgatgaagatcaggatgagtgggatatgcctactagatcaaggaggaaagctcgtgtagggaaatatggtgacagcatgacagaggctgacaagaccaaacccctttccaaagtctccagcatagcagttcaaacggtagcagagatatctgtgcaaactgaaccagttggaaccataagaacaccctccatacgggcacgagtggatgccaaggtagaaataattaaacacatttcagcacctgaaaagacttacaaagggggcagtttaggatgtcaaacagaagcagattcagacacacaaagtcctcaatatctgagtgccacatctccacccaaagacaagaaacgcccaacacctttagagattggttattcatctcacctccgggcagattccacagtacagctggctccttccccacccaaatcccccaaagtcctttactcacccatctcaccactttcaccaggcaaagccttagaatcagcctttgtaccttatgaaaaacccctccctgatgatataagtccacagaaagtactgcatccagatatggctaaagttcccccagcaagtcctaagacagccaagatgatgcagcgttctatgtctgaccccaagcctctgagtccaacagcagacgaaagttccagggctccttttcagtataccgagggctatacgactaaaggttctcaaaccatgacatcctctggagcccagaaaaaagttaaaagaactctgccaaatccacctcctgaggagatttccacaggaactcaatccacattcagcacaatgggcacagtttccaggagaaggatctgcagaaccaacacaatggcacgagccaagattctccaggacatagacagagagcttgatcttgtggaaagggagtctgcaaaacttcgaaagaaacaagcagagcttgatgaagaagaaaaggagattgatgctaagctacgatacctggaaatgggaattaacaggaggaaagaggccctattaaaggagagagaaaagagagaacgagcctacctccagggagtagctgaggatcgtgattacatgtctgacagtgaagtgagtagcacaagaccaacccgaatagaaagtcagcatggcattgagcgaccaagaactgctccccaaactgaattcagccagtttataccaccacaaacccaaacagaatctcaactagttcctccgacaagtccttacacacaataccagtactcttcccctgctcttcctacccaagcacccacctcatacactcaacagtctcattttgagcaacaaactttgtaccatcagcaagtttcaccttatcagactcagccaacattccaagctgtggcaacaatgtccttcacacctcaagttcaacctacaccaaccccacagccttcttatcagttaccttcacagatgatggtgatacaacagaagccacggcaaactacattatatttggagcccaagataacctcaaactatgaagtgattcgcaaccaaccccttatgatagcacctgtttctacggataacacatttgctgtttcccatcttggtagtaagtacaatagtttagacttgagaataggtttggaggaaagaagtagcatggcaagcagtccaatatcaagcatatctgcagattctttctatgcagatattgatcaccatactccacgaaattatgtcctaattgacgacattggagagatcaccaaaggaacagcggcattaagcaccgcatttagccttcatgaaaaggatctgtcaaaaacagaccgtctccttcgaaccactgagacacgccggtctcaagaagtgacagatttcctagcacctttacagtcttcctctagattgcatagttatgtgaaggcggaggaagacccaatggaggatccttacgagttaaagcttctgaaacatcagattaaacaggaatttcgtagagggacagagagcttagatcaccttgctggtctttctcattattaccatgctgatactagctacagacattttccaaaatctgagaagtatagcatcagtagactcacacttgaaaaacaagcagcaaaacaactgccagcagccatactttatcaaaagcagtcaaagcataagaaatcactaattgaccctaaaatgtcaaaattttcacctattcaagaaagtagagaccttgaacctgattattcaagctatatgacttctagcacttcatctattggtggcatttcctccagggcaaggctccttcaagatgacatcacttttggcctcagaaaaaatattacagaccaacaaaaatttatgggatcttctcttggcacaggactgggcacattaggaaataccatacgctcagctctgcaggatgaagcggataagccatacagtagtggcagcaggtccagaccttcctccagaccttcctctgtctatgggcttgatttatcaattaaaagggattcttctagctcttccctaagactgaaagctcaagaggctgaagctctagatgtttcctttagtcatgcatcatcctctgccagaactaagccgaccagtttgccaattagtcaaagtagaggaagaataccaattgtggcccagaattctgaagaagaaagcccactcagtcctgttggccagccaatgggaatggccagggctgcagctggacccctgccaccaatatctgcagacaccagggatcagtttggatcaagccactcattgcctgaagttcagcaacacatgagggaagaatcacggactcgaggctatgaccgtgacatagcattcatcatggatgacttccaacatgccatgtcagacagtgaagcctatcatctgcgtcgtgaggaaacagattggtttgataaacccagggagtctcgtttggaaaatggacatggtctggaccgaaaactgccggaaagattggtccactctagaccactcagtcaacatcaagagcaaattatacagatgaacgggaaaactatgcactacatctttcctcacgcaaggataaaaataacaagagactcaaaggatcacacagtttcaggtaatggattaggaattagaattgtgggtggtaaagaaatcccgggacatagtggagaaattggagcctatattgccaagattcttcctgggggaagtgcggaacagacggggaagcttatggaagggatgcaagtattggaatggaatggaattcccttgacttctaaaacatatgaagaagttcagagtatcattagtcagcaaagtggggaagcagaaatatgtgtaagactggacctcaatatgctatcagattctgaaaattcccagcatctggaacttcatgagccaccaaaagctgtggataaggcgaaatccccaggggttgatcctaagcagttggcagcagaactccagaaggtttcactacagcagtcaccgctggttctgtcatcagttgttgaaaaaggatctcatgttcattcaggtcctacatcagcaggatccagttccgttcccagccctgggcaaccagggtccccctcagtgagcaaaaagaagcacggcagcagcaagcctaccgatggaacaaaggttgtctctcatccaattacaggagaaattcagcttcaaattaactatgatcttggaaatctcataatacatattctccaagcaagaaatcttgttcctcgagacaacaatggttattctgacccttttgtgaaagtgtaccttcttccagggagaggtcaagtcatggttgtccagaatgcaagtgctgagtacaagagaaggactaaacatgtccagaaaagtcttaatcctgagtggaatcaaacagtaatttataaaagtatttccatggaacagctcaagaagaaaacactggaggtgacagtttgggattatgatagattttcatccaacgacttccttggggaggtattgattgatttatctagcacatctcacctcgataacactccaaggtggtatcctctcaaagaacagactgaaagcattgatcatggcaagtctcattccagtcagagcagccagcagtccccaaagccatctgttatcaaaagcagaagccatggtatcttccctgacccatcaaaggacatgcaggttcccaccattgagaaatcccatagtagtcctggtagctcaaaatcatcatcagaaggccatctccgttctcatggaccatctcgcagtcaaagcaaaaccagcgtcactcagacccacctggaagatgcaggggctgccatagctgctgccgaagctgccgtgcaacaactccgcattcaaccaacaaagcctcccaatcaccggcctgcagaaagctctgtgtccaccggctcctcgggcagcagctttggcagtgggtatagcgtggacagtgaaggaagcagcagcactgcaggggagactaatctatttcctattccgaggatagggaagatgggacagaatggacaagagcctgtaaaacagccaggggtaggagtaggactagcagacactgaagctaaaactcaggtaatgggagaaatcaagattgcattgaagaaggaaatgaagacagatggtgaacaactaatagttgaaattctccaatgcagaaatattacatacaaatttaagtctcctgatcatctaccagatttatatgtgaaaatatatgtgatgaatatttctacccaaaaaaaggtgatcaagaaaaaaacaagagtatgcagacatgatcgagagccttcgtttaatgaaacttttcgattcagtctaagtcctgcaggacattctcttcagattttacttttctccaatggagggaagtttatgaaaaagaccttgattggtgaagcctgtatctggcttgacaaagtggatctcagaaaaagaatagtcaactggcacaaacttttggtcagtcctactcaaacgcattgaagaaacatgtcttctcagggtatagaaactgctctaaatagcctcacatcaagactatagttgaatactattgtacaaagctaagttttgagaggcaaacataagagtgggaacaacaagcaaaaacatacttaagaccttgtacatttattgttgtggatcacacaaagatattcaactgaaaaagttcacatactgaaaacaagaagaatggagttctgagaccttgaatttcccatggctgtgaagagaaactgtgaaacaaattttgattacttaagacaataatctttgagtagagttgagctatagcttaagacaggctcaaagattaatgtggttttcatgcagcacaaaggtaattctttatgcaaaggagccttggttgaaaggaaaggactgatgtaacaaatctcagttttcaaaacttcaaaaatcttccttcatcgtcttctattcagacaacttgctgctttcagattctgacataagatatacctacagtatgtgtccagggctggaagtgaggtggctgtgttcttagggaaaatggaagaggagatgtagaaattgtggctttcaggccatattttaccagttttctctgtgtctaaatgttacaagcatatacaacactgactttggaatccatgtggtaaaagcacatttgtttctgtatcatttgaaacaaggtagagtgaagataatactcagtagaaataaaattgaatttatctagaaataaaactatgactggctaacaaagaagaatgttgccccataaaatattggaattttggttgaaaccatcaaaatcttcataatttaccattaagccaagacatcttcagtctatgtaccaaaggacctagagtaaactgatatgttctaggaagcatgataacttactctttgtgaaactgcaaataaatgtattatcctgcacatttcctttctgttgagcgatgcattgacagagaaagaaaattctttctctggcaaacaaaccatattaatcttgtgacattgattaattaaatggatcctcatttcataatattttatgcttttttccttaatgacttaattcatttactgattgtatcatgaaaacatgacactaaactcgagttctctctagtgctctattttcttactttagtgacagtatcacagtgatcaagttcatcaatgttgggaaaatatgtgaaaagtcaacatttacctgagattaaaatatactttgagctattttaataataatgaataaaacaactaatgtccaagtcttaaaatgaagcaccctcttctctatcagcattattaattaaggaagtaacgtgaagttgtggaaaaaacactcagcagggaataaaagcctgtcttctggtcttagttctaccactgactgtgtcactttgcacatgtcacttacactcactttaccccagttttcttatctataggataaaaacaattatatattcttaaccttccaaatgagatgttgtgatgataaatcaatgatccatgaaagatgaaagcacatttccaaatatagttttatacacagaagtgaggaataattattacatatctttttaattctcaaattttatatgtgaaaaacatcatctaaaccaatggcaaggattgacatggataaaagcagtaaattagccacaaaacttattttttatttaaaatataaactttaacctgactaaaggtgaagaattacatgaaaatgcaaattttgctatcccaaattaaatgaataatgctggtcttaccctagtcctatattccacccaaaagaaataaatcaaattgcttctcagagcattctgagcttaaaacctgctgctttatttaagggtgaagtgttagtggaattagagaaaaccaactctagatattggttggatattgaattttctcatttttaaagaaaaaatgctctaaatttgagaggactgtaaagcactaaaaataagagaatttctaatatatcccaggatatatatatatatatatgacttcagaatacaaattcgatcttccccaaactgagaaagataaccataacttttcttccctctattttttaatccccctccactgacaatacaatgtcatttaccattgacattgctctcaaatgagcatgggagagtggaatcatcaaagacattatattgctagtattttatttttagaaactattagatctgctgatggttgccatggatatttccagcagaagctagcacttgaagaagcctataatcatcactcataattggggaagaaaaggtccaaggagatctccttctgacataaaaaggctctggtatttgcccttaaaagaaaaccctgactcatctctgatcctcttttgcagccactcatatccataggtatgcatgagagtttgtatgaccagttagctttcttcattccagttgcaatttcttttagaataatataaatggagggatcaccaaaacaaagattatctctttggtagctatttaacctgaaagcgtaggagtctttccattatagaagcccctccgttccaaggaactagcgatggggctaggtcaatcagcagagttgacaacagggcttctttttgtgcaccagcattccccttcagagagcataagatcctgccagtgtgccaagtttgcagctgaccaaacttctaggttgtactggaattattctatgcaacactgatccttatatgaatgcgtttcttctgaatgatgttgactacccttcttacaacaaaactgtttcttttttattgcaaatagggctcttggtgttttttacttttttgtacatatcacagtacatggtttttcactctttagtttatttcattttattggaattaacttttttttattctaatactgacagagtttgtaatctctatataatacgtaattactccaattacagcacttttaccttgaagagcatctcagtttttcccacaatttcattgagtcatcagagactgatgttgcttcttggtttcaaatttggtcctaaagaaactttcggctgtagaaacaaaagcacagagtgaattttttacaaaagacagggaatatagaatagtcattacagacacaaataaccctagtagcacgaagttggtgttttctctgtttttacttaagattaagaagatttttggtgactctgaactctttatttatatttcagtttaaaatatcaagactaaggggcatcagttatctttactctttaatattgcccatattttaataaattacactaattaaacgcatattttcagcataccagtggaattaattttgtggatcacacacatttaaatagtcatattgtgggaatattatagctggtaaccagctgatattgattcttattataggaatgactgtaatgatagtggtggtagcagtagtgatattagcggtggtggtgatgtgaagtaaaataaaagtatatattatattgtgcccaatttattagaaattatttgatcaatgcttcatttcattaaaatatcataaagatgtttatagtatttttttactttattatttaaatcataactaacaatatttttaaaaacttattttcattgctacaatgtcaaatattccaaaatcagccaactacagctatatatgtgttatgtgtgacagaagtgatcttccttccctctttttgagcttgacatgaaagtgaaagaagactcaatgaataattatgagctatttatttaataattacttgccttgggtgtaatacagtaatgaatgagtgaaacaaatattctcattgaatatgatacaatgctgttttctgtatgtttcatgttctattattaaaggtatccattaggccaaaattatttaatcaaattctttatctgataggtagattgagagcattttcttaatgcattaccttgtacataagtatacacttggtaaagtagacgaagttgaaatattaatttcatttggcatttagcatgtgaatatgattattgtttgattgtgtctgtatatttgtttggtgacgtgctcaggtgctcccactactgattaatgtgtgtgctaatatcctaaaaacacatatgaggtttaagaaaaaattttcttgtctgaaaacataaacatcttaataaaactgattttgaaataaaaactaaagtacttgaagatatgtcttgtttctaactatatgttgcatgccatgttggtgatttgctaatgtgtttttttgtttgtttgttttacccaaatccctttggaaaatctaatggacaaatgcaaattcttggactaaggactgtataaattgacctgaaaatacatgagagttgcatttaaaaaaaaatgcttgtaaatccgtcttgagttttactctatgtaaaaatatgtcttggttttgtgattgtatacaagatgtatcttgataacttatgtaaactgtgccgtataaaggctgttgcctcagccttactaataaatactgaaaatatcacctttga

SEQ ID NO: 226727 - DNA, 15429 bp, Artificial Sequence
  derived and/or modified sequence
atgggtaacgaagcctcactggaaggcgaggggctcccagaaggcctggcagccgctgcagctgccggtggcggagcctccggcgcaggatccccaagtcacaccgcaatcccagctgggatggaggcagacctgtcgcagctaagtgaagaggagcgcaggcaaatagcagcagttatgagtagagcccaggggctgcccaagggatcagtcccccctgctgctgccgaaagtccctccatgcacagaaaacaggagctcgactcttcccacccgccaaagcagagcggtcgaccaccggatcctggtcgccctgcgcagccaggtttgagcaagtcccgaaccacagataccttccggagcgaacagaagttaccaggacggtcgccaagtacaatatccttgaaggaatcaaaaagccgcacagacctcaaggaggagcacaaaagctctatgatgcctggctttctgtccgaggtgaacgccttatccgcagtgtccagtgtggttaataagtttaacccctttgacctgatatccgattcagaagcgagccaggaggagacaacgaagaagcaaaaagtagtgcagaaggagcagggcaagccagagggaatcatcaaaccacctctccagcagcagccacccaaacccatccccaagcagcagggcccaggtagggatcccctgcagcaggacggcacccccaaatcaatctcaagccagcaaccagaaaagataaagtcacaacctccaggcactggaaaacccattcagggccctactcagacaccgcagacagaccacgcaaagctcccacttcaacgtgatgctagcaggccccaaaccaagcaggctgacatagtaaggggagagtcagtgaagccttccctgccatctccaagtaagcccccaattcagcagcccacacccggtaagccacctgcccaacaacctggccacgaaaaatctcaacctggaccggcaaagccacctgcacagccctccgggctgactaagcccctggcccagcaacctgggactgtgaaacctccagttcagccccctggtactactaaacccccagcccaaccactcggtcctgctaagcctcccgcacagcagacaggttctgagaaacctagctctgagcagcccggacccaaggctctggctcagcccccaggtgtaggaaaaacccccgctcagcaaccaggccctgccaagccccctactcagcaagtcggcactcccaagcccctcgcacagcagcccggactccagagcccggctaaagcccctgggccaacaaagaccccagtccagcagccgggacccggaaaaatcccggcacaacaggcgggtccaggcaaaactagtgcgcaacagacaggtcccaccaagcccccaagtcagcttcctggcccagcaaagccacccccacagcaacccggaccagctaagccccctccacaacagccgggatctgccaagccaccatcgcagcaacctggcagcactaaacctcctcctcagcagccaggaccagccaaaccttcaccacaacagcctggatccacgaagcccccttcgcaacagcccggttctgctaaaccatccgcccagcagccatctcctgccaaaccaagcgctcagcagagtacaaaacctgtcagccaaacggggtccggcaagcctctgcagcccccaaccgtgtctccatctgccaagcagccccctagccagggcctccccaaaacgatttgccctctctgcaatacgacagagctccttttgcacgttcctgagaaggccaactttaacacctgcaccgaatgccagacgacagtatgttcactgtgtggattcaatccgaatccacacctgaccgaggtgaaggaatggctatgcttgaactgccagatgaagcgagccctcgggggagatcttgccccagtgccatcatccccgcagccaaagctgaagactgctcccgtgaccactactagtgccgtgtctaagagctctccacagccccagcaaacatccccaaagaaggacgccgctccgaaacaggacttgtcaaaggccccagaacctaagaaaccacctccgcttgtgaagcaacctacactccacggatccccctcagccaaggctaaacagccccctgaggcggactcgctgtctaaacccgctccccctaaggagcccagcgtcccttctgagcaagataaggcaccagtggcggacgacaagccaaagcagccaaaaatggttaaacccactaccgaccttgtctccagctcctctgccaccacgaaacctgatatccccagctcaaaggtacagtctcaggcagaggagaaaaccacaccgcctctgaagacagactcagccaagccctcccagagctttccaccaacaggggaaaaggtcagcccattcgatagcaaggcaatccctcgtcccgcaagcgattcaaagatcatttcccacccaggccctagctcggaatctaaagggcaaaagcaggttgatccagttcaaaagaaggaagaacccaaaaaggctcagacaaagatgagccccaagcccgacgctaagcccatgccgaagggctcacctacgcctcctggaccacgccctactgccggtcaaaccgttcccactcctcaacagtcaccaaagccacaagagcaaagtcggaggtttagtctgaatctcgggtctatcactgatgctcccaaaagtcagcccaccacaccccaagaaactgtgactggcaagttatttgggttcggggctagcattttctcacaggcctcaaacctcatctcgacagctggacagcctggaccccacagccaaagtggcccaggcgcacctatgaagcaggcccctgcgcctagtcagccacccacgtcccaggggcctcctaagagcactggacaggctccgccagctcctgccaaatctattccagtgaaaaaagagacgaaagcgcctgcagccgaaaaactagagcctaaagccgaacaggctccgacagtgaaacgaaccgagaccgaaaagaagccccctccaatcaaagattccaagagcctcaccgccgagccccagaaggccgtgctgcccaccaagctcgaaaaaagcccaaaacccgaatcaacttgtcccttgtgtaaaacggaattgaacataggctccaaggaccctcccaacttcaatacatgtaccgaatgcaagaaccaggtttgtaacctttgtggatttaatcccacacctcacttgacggagattcaggagtggttgtgtctgaactgtcagactcagcgagccatctctgggcaactaggcgatattcggaaaatgccacctgctccgtcaggcccaaaggcatccccgatgcccgtgcccaccgagtcttcttctcagaagactgccgtgcccccacaagttaagctagtgaagaaacaagaacaggaagtgaaaactgaagctgagaaggttattttggaaaaagtaaaagagacactcagtatggaaaagatccctcctatggttacaactgatcagaagcaggaggagagtaaacttgagaaggataaggcctcagcacttcaagagaaaaagccactgcccgaggagaagaagctaatacctgaggaggaaaagattaggtcagaggaaaagaagcccttgttagaagagaagaagccaacccccgaagataagaaacttttacctgaagccaaaaccagtgccccagaggaacaaaagcacgatttgcttaagtcccaggtacagatcgctgaggagaagctcgaaggtcgggtcgctccaaaaacggtgcaggagggaaagcagcctcagaccaagatggagggtttaccgagcggcacgccacagtctctacctaaggaggatgacaaaacgaccaagacaatcaaagagcaaccccaaccaccatgcaccgccaagcccgaccaagttgagcccggaaaagaaaagactgaaaaagaggacgacaagtcagatacttcctcttcccagcagccaaaatccccccagggtctgagtgatacgggctattctagcgacggcattagttcaagtctaggagaaattccctctttaattcctacagatgagaaggatattctcaaggggttgaagaaggatagcttcagccaggagagcagtccatcctcgccctctgatttggccaagctagagagtaccgtgctcagcatcctggaagctcaggccagtacccttgcagatgagaagtcggagaagaaaacacagccgcacgaagtctcccccgaacagccaaaggaccaggagaaaacacagtccctgagtgagacgctcgagattaccatcagcgaagaagagatcaaagagagccaggaggagcgaaaggacaccttcaagaaagactcacagcaggatataccttcctctaaggatcacaaagagaaaagtgagtttgtggatgacatcacaaccagaagagagccatacgattccgtggaggaaagcagtgagagtgaaaattctccagtgccacagagaaaaaggcgcaccagcgttggctcgtcatcctcggacgagtacaagcaggaggatagccagggttccggcgaggaggaggatttcatccgcaagcagataattgaaatgtccgccgatgaggatgctagcggatctgaggatgacgagttcattaggaaccagttgaaagagatctcttccagcactgaatctcagaagaaggaggaaaccaagggcaaagggaagatcacggccggaaaacaccggagactcaccagaaagtctagcacatccattgacgaggatgctggcagaagacattcatggcacgatgaggacgatgaggccttcgacgagtcccccgaactgaaatatagagaaaccaagagccaagagagcgaggagctggtggtgaccggtgggggtggtctgcgcagatttaaaaccattgagctgaactcaaccatcgctgacaaatactctgccgaaagttcgcaaaaaaagactagtttgtattttgatgaggagccagaactcgaaatggaatcactcacagacagtcccgaggataggtctcgcggtgaggggtcttcgtcactccatgcaagctcattcacacctggcacctcccccactagcgtttcaagtctggatgaggacagtgactcgtcaccatctcataaaaaaggcgagtcgaagcaacagcggaaggcgagacaccgtccccatggtcccctgttgcctaccattgaggacagctctgaagaggaggaacttcgcgaagaggaggagcttctaaaggaacaagagaaacaacgggaaattgagcagcagcagcgaaagtccagcagcaagaaaagcaagaaagacaaggacgagctgagagcccagcgcaggcgggagagacccaaaacaccccctagcaatctgtctccgattgaagatgctagccctacggaagagctgcgacaggccgctgagatggaggagttgcataggtccagctgtagcgaatactccccaagcattgaatctgaccccgaaggcttcgaaatctcaccagagaagattatcgaagttcagaaggtttataaactgccaacagccgtctctctgtattctccgactgatgaacagagcatcatgcaaaaagaggggtcgcagaaagccctgaaatctgcagaggagatgtacgaggaaatgatgcataagacccacaaatacaaggcttttcccgctgccaatgagcgcgacgaagtgttcgagaaagagcctctctacggtgggatgttgattgaagactacatttacgagagtctcgtcgaagacacttacaatgggtccgtcgatggcagccttctgacaagacaggaagaagagaacgggttcatgcagcagaagggtagggaacagaagatccgcctgtccgagcagatctacgaagatcctatgcaaaaaattaccgatcttcaaaaggagttctacgagttagagtcactgcacagcgtggtccctcaggaggacatagtgtccagttcatttataattcccgaatcacatgagatcgtcgacttgggtacaatggtaaccagcacggaagaggagcgcaaacttcttgacgccgatgccgcatacgaggagttgatgaagcggcagcagatgcagctcacgcccggttcgtcccccactcaggcccctatcggtgaagacatgactgagtccactatggatttcgatcggatgccggatgcctccctcacaagctcagtattatcgggtgccagcctgactgactcgactagcagtgccaccctgtccatccccgatgtcaagattacacaacatttctcaacagaagaaattgaggacgagtatgtgactgactacacacgagagatccaggaaatcatcgcgcatgagtccctcatcctcacctattcagaacccagcgaatcagcaacaagcgttccacccagtgataccccttctttgaccagctcagttagcagtgtatgtaccacggactccagctcacctattacaacactggactctatcacgaccgtttacactgagccagtggacatgattactaaattcgaagactctgaggagatcagctcaagcacttacttccctggctccatcattgactatcccgaggagattagcgtgtccctagatcgtaccgcaccacctgatgggagggcctctgccgatcatatcgtgatctctctgtcagacatggcgtcatctataattgaatccgtggtgcctaagcctgagggtccagtcgccgacaccgtgtccacagatctgctgatttctgaaaaggaccctgtgaaaaaggccaaaaaggaaaccggaaatggcataatcttagaagttctggaagcctacagggacaagaaagagctagaggctgagcggacgaaatcaagcctttccgagaccgtgtttgaccatccaccatcctctgtcatcgcactgccaatgaaagagcagctgtcgactacctacttcacctctggcgagacatttggccaggaaaagcccgcaagccagctgccctctggcagcccaagcgtgagttcacttcccgctaagcccaggccatttttccgttctagcagtctcgacattagcgctcagccccctcccccacctcctccacctcctccacccccacccccacctccgcctccaccgcctccgccacttcctccaccaacaagccccaagcccacaatcctgcccaagaagaagctgactgttgccagccccgtaactaccgctacccctctgtttgacgcagttaccacactggagacaaccgcagtgttacgctccaacggcctacccgtcacaagaatatgcacaacagctcctccgcctgtccccccaaaacctagcagcatcccctccggattggtgtttacacatagacctgagccaagcaaacctcccatcgcccctaaaccagtgatcccgcagctgcccaccactacccaaaagcctaccgatattcatcccaagcccacaggcttgtcactaacctccagcatgactctcaacctcgtaacaagcgccgactataaacttccaagccctacatctcctctgtctccacactctaataagtccagcccacgcttctcaaagagcctcaccgaaacttatgtggtgatcaccctgccgtccgaacccggaacaccaacagatagcagtgcttctcaggctatcactagttggccccttggcagtccctcaaaggatctagtatctgtggagccggtgttttcagtagttcccccagtaaccgcagtggagatccccatatcaagcgagcaaaccttctacatctctggagctctccagacatttagcgcgactcctgttacagccccttcgagttttcaggctgctcccacaagtgtgacccaatttctaactaccgaggtgtccaagacggaggtctccgccactcgctcaacggccccttctgtgggcctctcttccatcagtattaccattcctccagaacctttggcactggataatatacatttggaaaagcctcagtacaaggaggacggaaagttgcaactcgtgggggacgttatcgacctgagaacagttcctaaagttgaagtaaaaacaaccgataagtgcattgatttgagcgcctctactatggacgttaagaggcaaattacagccaacgaggtctatgggaaacagatcagtgctgtgcagcccagtattatcaacctgtccgtcactagttcgattgtgactcccgtgagcctggctactgagaccgtcacctttgttacatgtactgctagcgcttcctacaccacgggcaccgagagtctggtgggtgctgagcacgccatgactactcctctccagctgaccacaagtaagcacgcagaacctccatataggatcccctcggatcaagttttccctatcgcaagagaggaagcaccaattaacctgagcttgggtacaccagcccatgctgttacactcgctattaccaagcccgtcaccgtgcccccagtgggcgtaacgaacggatggacagacagtacggtatcccaaggtatcacggacggcgaagtggtcgacctgtctacaactaagtcacataggactgtcgtcaccatggacgaatccactagctccgtgatgacaaagattatcgaggatgagaaaccggtggatctaaccgccggacgcagagccgtgtgttgcgacgtggtgtacaaactgccatttggaagatcttgcactgcccagcaacctgctaccacattaccagaggacaggtttggttatagggatgaccactaccagtatgatagatctggaccctatggctatcggggaattggtggaatgaagccaagcatgagcgatacgaatctcgctgaagccggtcactttttttacaaaagcaaaaatgcatttgactatagcgaagggacagacaccgccgtggacctcacatctgggcgagtgactacgggggaggtcatggactattcttctaagacaacaggcccatatcctgagacgaggcaggtaatttccggggcaggaatctctaccccccagtactcaacagctagaatgaccccaccccctggcccacagtactgtgtaggctctgtcttgcgtagttctaacggagtggtttacagctccgtcgctactccaacacccagtacattcgcaataaccacgcagcccggaagtatcttcagtaccaccgtgagggatttgtcaggaattcatacagcagacgccgttacttccctgccagccatgcaccatagtcagcccatgcctcgttcctactttattaccactggcgcttcagaaaccgacatcgcagtgaccggaatcgatatttctgcatccctgcaaaccatcacaatggagagccttactgctgagactatagactcagtgccaacgttgacaactgccagcgaagtgtttcctgaggtcgtaggtgatgagtcggctctgctgatagtacctgaggaggacaaacaacagcagcaattagatctagagagggaactgctggagctggaaaagataaagcagcagaggtttgctgaggaactcgagtgggaacggcaggaaatacagcgattccgggagcaggaaaaaatcatggtgcagaaaaagctcgaggagcttcagagcatgaagcagcacctgctcttccaacaggaagaggagcgccaagcccagtttatgatgagacaggaaaccctcgcgcagcaacagcttcagcttgagcagatccaacagctgcagcagcagctccaccaacagttggaagaacagaagattcggcaaatttaccagtataattacgaccctagcgggaccgcttccccacaaaccactaccgagcaagcgatcctggaaggtcaatatgccgcactggaaggttcccagttttgggccactgaggacgccaccacaaccgcctccgcagtggtggccatcgaaatcccacaatcacaggggtggtatacggtgcagtccgacggtgtgacacagtacatcgcccctcctggaatcctgagcactgttagcgagataccgttgactgatgtagtggttaaagaagaaaagcagcctaaaaaaaggtcaagcggagctaaggtaaggggacagtacgatgacatgggagaaaatatgaccgatgacccgaggagttttaaaaaaattgtggactctggggtgcagacggatgacgaggacgccaccgaccggtcctacgtctctcgcaggcgcaggacgaagaaatccgtggacacctcggtgcagactgacgatgaagatcaggatgagtgggatatgcccacgagaagtcgtagaaaagcacgcgtgggcaagtatggtgactcaatgacagaagctgacaaaacaaaaccactctcgaaggtgtcttcgattgctgtccaaaccgttgctgagatctccgtccaaacagagcctgtcggaacaattcgcacgcctagtatcagagcacgtgtggacgcaaaagtggaaatcataaaacacatatcagctccggagaagacctacaaaggcggaagtctcggctgccagacagaggccgactcagacacacagtccccacagtacctctctgcaacaagtccaccaaaggacaaaaagcgccctactcctctggagatcggctattctagccacctgcgggctgactcgacggtccagctcgcccctagccccccaaagagtcccaaggtcctgtatagtcctatttcccctctatcgcccggaaaagccttggaatccgccttcgtgccttatgagaagccactgcccgatgatatctctccacagaaagttttgcatccagatatggcaaaggtgccgcctgcctctccaaaaacagccaagatgatgcagcgcagcatgagtgatcccaaaccactcagccccacagccgatgaatccagtcgggctcctttccagtacaccgagggatatacgacgaaggggagtcagacaatgacaagcagtggcgcacaaaagaaggtgaaaaggactctgccaaacccgccaccagaagagatcagcactggcacgcagtcaacgtttagcacaatgggcactgtctcccgacgcagaatttgtcgaactaatacaatggctcgtgctaaaattctgcaagacatcgacagagagctagatcttgtggagcgggaaagtgccaaattgaggaaaaagcaggccgagctggacgaagaggaaaaggagatcgacgccaagttgaggtacctggagatggggatcaacagacgcaaggaggccctgctgaaagaacgcgaaaaacgcgagcgcgcataccttcaaggagtagcggaagatagggattacatgagcgactctgaggtgtcaagtacccgcccaacccgcattgaatcccagcacggcatcgaacgtccccgaacagcacctcagacagagttctcacagttcattcctccccagacccaaaccgaatctcagctggtcccccctacgagtccatacacccagtaccaatacagcagccccgctcttcccacacaggcgcctactagctacacacagcagagccacttcgaacaacagactctctatcaccagcaggtgtctccgtaccagacccaacctacctttcaagctgtggctactatgtcttttacaccacaggtgcaacccaccccgaccccccaaccatcttaccaactcccatcccaaatgatggtgatacagcagaagcctagacagaccaccctctatttggagccaaaaatcacctccaattacgaagtcatccgcaaccaacccctcatgattgcacctgtctcgacagataatacatttgctgtcagtcatctgggtagcaaatataactccttggacctcagaattggacttgaagaacgcagctctatggcctcatcacccatctcatccattagcgctgacagcttttacgcagacatagatcatcacacaccaaggaattatgtgctgatagacgacatcggtgaaatcactaagggcacagcggctttgtcaaccgcgttttcgttgcatgagaaagacttaagcaagaccgataggctgctgaggactacagagactagaagatctcaagaggtaaccgatttccttgcaccgctgcaaagctcatctcgcctgcactcctacgtaaaagccgaggaggatccgatggaggatccgtacgagctcaagctgctcaaacaccagataaaacaggaattccgaagaggaactgagagccttgatcatctggctggactgtctcattattaccacgccgacactagctacagacatttccctaaatctgagaagtacagtatctcccggctgaccctcgagaagcaggctgctaagcaattaccggctgctatcctgtaccagaaacagtcaaaacacaagaagagcctgattgaccctaagatgagcaaatttagcccaatccaggaatctcgtgacttggagccagattattcctcatatatgacaagctctactagcagtatcggtgggatttcaagtcgcgcaagactgttgcaggacgatatcacgttcgggctgagaaaaaacatcactgaccagcagaagtttatgggtagcagcctggggacaggacttggcaccctggggaatacgattaggtcagccctgcaggatgaggcagacaagccatacagttctggttcacggtcccgtccctcctccaggcccagctcagtgtatgggctggatctatcaatcaagcgagactccagctcttcaagcctcaggcttaaggcccaggaagcagaggccttggacgtttccttttcccacgccagctcaagtgcaagaactaaaccaactagcttgcccatctcgcaaagcagaggcagaatccccatcgtggcccagaattctgaagaggaaagcccactgtctccagttggccagcctatgggcatggcacgggcagcagctggcccactgcccccaatctccgctgatacccgcgatcagttcggatctagccattccctgcctgaagtgcagcaacatatgcgggaggagagcagaacgagagggtacgaccgagacattgcctttattatggacgattttcagcatgccatgagtgacagcgaggcatatcatctgagacgagaagaaacggattggttcgataagccacgtgaaagccgcctggaaaacggccacgggctcgaccggaaactgcctgaacgcctggtgcatagcaggcccctgtcgcagcatcaggagcaaatcatccagatgaacggcaagacaatgcactacatctttccacatgcgaggatcaaaatcactcgcgattccaaagatcacacagtatccggcaatgggctgggcataaggattgtgggaggaaaggaaatcccgggtcacagtggcgagatcggcgcatacatcgcgaaaatcctgccaggcggttccgcagaacagacagggaaactgatggagggcatgcaggttttggaatggaacggtatacccctcacctccaaaacttacgaagaggttcaatccatcatctctcagcaaagtggggaggcagaaatttgtgttaggttggacctgaacatgctaagcgactccgaaaattcccagcatctcgaactgcacgagccacccaaagccgtcgataaggcaaaatcccctggtgtagacccaaagcagctggccgctgaactacaaaaggtgagcctgcagcaatcccccctggtgctgtcctcagtggttgaaaagggctcacatgtgcattctggcccaacgagcgcgggatctagctccgtgccatcacctggacagcccggttctccgagcgtcagcaagaagaagcatggctcctccaaacccaccgatggaacaaaggtcgtgtctcaccctatcacaggggagatacagttgcagatcaattacgatttggggaatcttatcatccacatcttacaagctcgcaatttagttccgagggataataacggatatagtgatccctttgtgaaggtatacctgctccctgggaggggacaggtaatggtggtacagaacgcttcagcggagtataagcggaggactaagcacgttcagaaatctcttaatccagaatggaaccagacagtgatctataaatctatctcaatggaacaactcaagaaaaaaactttagaagtcaccgtgtgggattacgatagattttcgagcaacgatttcttaggagaggtgcttatcgacttaagttcaactagccacttggacaacacgccgagatggtacccgctaaaggagcagacagaatccatcgaccacggcaagtcccattcttcccagtcttcccagcagtcccccaaaccatccgtcatcaagagccggtcacacgggatttttccagaccccagcaaagacatgcaggtgcctacaattgagaagtctcattcctcccccggatcatcgaagagttccagcgaaggccatctcaggtcccacggccctagccgatcgcaatccaaaacatccgttactcagacccacctggaagatgccggagccgcaatcgccgcagccgaggctgcagtgcagcagctgcggattcagcccacgaaacccccaaaccaccggcctgcagagtcttccgtctccaccggtagctctggttctagctttggttctggatactcggtcgatagcgaaggctcctcgtcgaccgcaggcgaaaccaacctcttccctataccaagaattggaaagatgggtcaaaatggacaggaaccagtgaaacagccgggagtaggtgttggcctggcagatacagaagccaagacccaggtcatgggagaaattaaaattgcactcaagaaggagatgaaaacagacggggagcaattgatagtggagatactccagtgcaggaacatcacctataaatttaagtcgcccgatcatctacccgatctctacgttaaaatctacgtgatgaatatctccacccagaagaaggtgattaagaaaaaaactcgggtgtgtcggcatgacagggagccctcttttaacgaaacctttaggttttccctctctccggctgggcacagcctgcaaattcttctgttcagcaatggagggaagttcatgaagaagaccctgatcggcgaagcctgcatttggctcgataaggtcgatctgcgaaagcgaattgtcaattggcacaagctgctcgtgtcgccgacccagacccattaa

SEQ ID NO: 226728 - DNA, 15429 bp, Artificial Sequence
  derived and/or modified sequence
atgggcaacgaggccagcctggagggcgagggcctgcccgagggcctggccgccgccgccgccgccggcggcggcgccagcggcgccggcagccccagccacaccgccatccccgccggcatggaggccgacctgagccagctgagcgaggaggagagaagacagatcgccgccgtgatgagcagagcccagggcctgcccaagggcagcgtgccccccgccgccgccgagagccccagcatgcacagaaagcaggagctggacagcagccacccccccaagcagagcggcagaccccccgaccccggcagacccgcccagcccggcctgagcaagagcagaaccaccgacaccttcagaagcgagcagaagctgcccggcagaagccccagcaccatcagcctgaaggagagcaagagcagaaccgacctgaaggaggagcacaagagcagcatgatgcccggcttcctgagcgaggtgaacgccctgagcgccgtgagcagcgtggtgaacaagttcaaccccttcgacctgatcagcgacagcgaggccagccaggaggagaccaccaagaagcagaaggtggtgcagaaggagcagggcaagcccgagggcatcatcaagccccccctgcagcagcagccccccaagcccatccccaagcagcagggccccggcagagaccccctgcagcaggacggcacccccaagagcatcagcagccagcagcccgagaagatcaagagccagccccccggcaccggcaagcccatccagggccccacccagaccccccagaccgaccacgccaagctgcccctgcagagagacgccagcagaccccagaccaagcaggccgacatcgtgagaggcgagagcgtgaagcccagcctgcccagccccagcaagccccccatccagcagcccacccccggcaagccccccgcccagcagcccggccacgagaagagccagcccggccccgccaagccccccgcccagcccagcggcctgaccaagcccctggcccagcagcccggcaccgtgaagccccccgtgcagccccccggcaccaccaagccccccgcccagcccctgggccccgccaagccccccgcccagcagaccggcagcgagaagcccagcagcgagcagcccggccccaaggccctggcccagccccccggcgtgggcaagacccccgcccagcagcccggccccgccaagccccccacccagcaggtgggcacccccaagcccctggcccagcagcccggcctgcagagccccgccaaggcccccggccccaccaagacccccgtgcagcagcccggccccggcaagatccccgcccagcaggccggccccggcaagaccagcgcccagcagaccggccccaccaagccccccagccagctgcccggccccgccaagccccccccccagcagcccggccccgccaagccccccccccagcagcccggcagcgccaagccccccagccagcagcccggcagcaccaagccccccccccagcagcccggccccgccaagcccagcccccagcagcccggcagcaccaagccccccagccagcagcccggcagcgccaagcccagcgcccagcagcccagccccgccaagcccagcgcccagcagagcaccaagcccgtgagccagaccggcagcggcaagcccctgcagccccccaccgtgagccccagcgccaagcagccccccagccagggcctgcccaagaccatctgccccctgtgcaacaccaccgagctgctgctgcacgtgcccgagaaggccaacttcaacacctgcaccgagtgccagaccaccgtgtgcagcctgtgcggcttcaaccccaacccccacctgaccgaggtgaaggagtggctgtgcctgaactgccagatgaagagagccctgggcggcgacctggcccccgtgcccagcagcccccagcccaagctgaagaccgcccccgtgaccaccaccagcgccgtgagcaagagcagcccccagccccagcagaccagccccaagaaggacgccgcccccaagcaggacctgagcaaggcccccgagcccaagaagcccccccccctggtgaagcagcccaccctgcacggcagccccagcgccaaggccaagcagccccccgaggccgacagcctgagcaagcccgccccccccaaggagcccagcgtgcccagcgagcaggacaaggcccccgtggccgacgacaagcccaagcagcccaagatggtgaagcccaccaccgacctggtgagcagcagcagcgccaccaccaagcccgacatccccagcagcaaggtgcagagccaggccgaggagaagaccaccccccccctgaagaccgacagcgccaagcccagccagagcttcccccccaccggcgagaaggtgagccccttcgacagcaaggccatccccagacccgccagcgacagcaagatcatcagccaccccggccccagcagcgagagcaagggccagaagcaggtggaccccgtgcagaagaaggaggagcccaagaaggcccagaccaagatgagccccaagcccgacgccaagcccatgcccaagggcagccccaccccccccggccccagacccaccgccggccagaccgtgcccaccccccagcagagccccaagccccaggagcagagcagaagattcagcctgaacctgggcagcatcaccgacgcccccaagagccagcccaccaccccccaggagaccgtgaccggcaagctgttcggcttcggcgccagcatcttcagccaggccagcaacctgatcagcaccgccggccagcccggcccccacagccagagcggccccggcgcccccatgaagcaggcccccgcccccagccagccccccaccagccagggcccccccaagagcaccggccaggccccccccgcccccgccaagagcatccccgtgaagaaggagaccaaggcccccgccgccgagaagctggagcccaaggccgagcaggcccccaccgtgaagagaaccgagaccgagaagaagcccccccccatcaaggacagcaagagcctgaccgccgagccccagaaggccgtgctgcccaccaagctggagaagagccccaagcccgagagcacctgccccctgtgcaagaccgagctgaacatcggcagcaaggacccccccaacttcaacacctgcaccgagtgcaagaaccaggtgtgcaacctgtgcggcttcaaccccaccccccacctgaccgagatccaggagtggctgtgcctgaactgccagacccagagagccatcagcggccagctgggcgacatcagaaagatgccccccgcccccagcggccccaaggccagccccatgcccgtgcccaccgagagcagcagccagaagaccgccgtgcccccccaggtgaagctggtgaagaagcaggagcaggaggtgaagaccgaggccgagaaggtgatcctggagaaggtgaaggagaccctgagcatggagaagatcccccccatggtgaccaccgaccagaagcaggaggagagcaagctggagaaggacaaggccagcgccctgcaggagaagaagcccctgcccgaggagaagaagctgatccccgaggaggagaagatcagaagcgaggagaagaagcccctgctggaggagaagaagcccacccccgaggacaagaagctgctgcccgaggccaagaccagcgcccccgaggagcagaagcacgacctgctgaagagccaggtgcagatcgccgaggagaagctggagggcagagtggcccccaagaccgtgcaggagggcaagcagccccagaccaagatggagggcctgcccagcggcaccccccagagcctgcccaaggaggacgacaagaccaccaagaccatcaaggagcagccccagcccccctgcaccgccaagcccgaccaggtggagcccggcaaggagaagaccgagaaggaggacgacaagagcgacaccagcagcagccagcagcccaagagcccccagggcctgagcgacaccggctacagcagcgacggcatcagcagcagcctgggcgagatccccagcctgatccccaccgacgagaaggacatcctgaagggcctgaagaaggacagcttcagccaggagagcagccccagcagccccagcgacctggccaagctggagagcaccgtgctgagcatcctggaggcccaggccagcaccctggccgacgagaagagcgagaagaagacccagccccacgaggtgagccccgagcagcccaaggaccaggagaagacccagagcctgagcgagaccctggagatcaccatcagcgaggaggagatcaaggagagccaggaggagagaaaggacaccttcaagaaggacagccagcaggacatccccagcagcaaggaccacaaggagaagagcgagttcgtggacgacatcaccaccagaagagagccctacgacagcgtggaggagagcagcgagagcgagaacagccccgtgccccagagaaagagaagaaccagcgtgggcagcagcagcagcgacgagtacaagcaggaggacagccagggcagcggcgaggaggaggacttcatcagaaagcagatcatcgagatgagcgccgacgaggacgccagcggcagcgaggacgacgagttcatcagaaaccagctgaaggagatcagcagcagcaccgagagccagaagaaggaggagaccaagggcaagggcaagatcaccgccggcaagcacagaagactgaccagaaagagcagcaccagcatcgacgaggacgccggcagaagacacagctggcacgacgaggacgacgaggccttcgacgagagccccgagctgaagtacagagagaccaagagccaggagagcgaggagctggtggtgaccggcggcggcggcctgagaagattcaagaccatcgagctgaacagcaccatcgccgacaagtacagcgccgagagcagccagaagaagaccagcctgtacttcgacgaggagcccgagctggagatggagagcctgaccgacagccccgaggacagaagcagaggcgagggcagcagcagcctgcacgccagcagcttcacccccggcaccagccccaccagcgtgagcagcctggacgaggacagcgacagcagccccagccacaagaagggcgagagcaagcagcagagaaaggccagacacagaccccacggccccctgctgcccaccatcgaggacagcagcgaggaggaggagctgagagaggaggaggagctgctgaaggagcaggagaagcagagagagatcgagcagcagcagagaaagagcagcagcaagaagagcaagaaggacaaggacgagctgagagcccagagaagaagagagagacccaagaccccccccagcaacctgagccccatcgaggacgccagccccaccgaggagctgagacaggccgccgagatggaggagctgcacagaagcagctgcagcgagtacagccccagcatcgagagcgaccccgagggcttcgagatcagccccgagaagatcatcgaggtgcagaaggtgtacaagctgcccaccgccgtgagcctgtacagccccaccgacgagcagagcatcatgcagaaggagggcagccagaaggccctgaagagcgccgaggagatgtacgaggagatgatgcacaagacccacaagtacaaggccttccccgccgccaacgagagagacgaggtgttcgagaaggagcccctgtacggcggcatgctgatcgaggactacatctacgagagcctggtggaggacacctacaacggcagcgtggacggcagcctgctgaccagacaggaggaggagaacggcttcatgcagcagaagggcagagagcagaagatcagactgagcgagcagatctacgaggaccccatgcagaagatcaccgacctgcagaaggagttctacgagctggagagcctgcacagcgtggtgccccaggaggacatcgtgagcagcagcttcatcatccccgagagccacgagatcgtggacctgggcaccatggtgaccagcaccgaggaggagagaaagctgctggacgccgacgccgcctacgaggagctgatgaagagacagcagatgcagctgacccccggcagcagccccacccaggcccccatcggcgaggacatgaccgagagcaccatggacttcgacagaatgcccgacgccagcctgaccagcagcgtgctgagcggcgccagcctgaccgacagcaccagcagcgccaccctgagcatccccgacgtgaagatcacccagcacttcagcaccgaggagatcgaggacgagtacgtgaccgactacaccagagagatccaggagatcatcgcccacgagagcctgatcctgacctacagcgagcccagcgagagcgccaccagcgtgccccccagcgacacccccagcctgaccagcagcgtgagcagcgtgtgcaccaccgacagcagcagccccatcaccaccctggacagcatcaccaccgtgtacaccgagcccgtggacatgatcaccaagttcgaggacagcgaggagatcagcagcagcacctacttccccggcagcatcatcgactaccccgaggagatcagcgtgagcctggacagaaccgccccccccgacggcagagccagcgccgaccacatcgtgatcagcctgagcgacatggccagcagcatcatcgagagcgtggtgcccaagcccgagggccccgtggccgacaccgtgagcaccgacctgctgatcagcgagaaggaccccgtgaagaaggccaagaaggagaccggcaacggcatcatcctggaggtgctggaggcctacagagacaagaaggagctggaggccgagagaaccaagagcagcctgagcgagaccgtgttcgaccacccccccagcagcgtgatcgccctgcccatgaaggagcagctgagcaccacctacttcaccagcggcgagaccttcggccaggagaagcccgccagccagctgcccagcggcagccccagcgtgagcagcctgcccgccaagcccagacccttcttcagaagcagcagcctggacatcagcgcccagccccccccccccccccccccccccccccccccccccccccccccccccccccccccccccccccccctgcccccccccaccagccccaagcccaccatcctgcccaagaagaagctgaccgtggccagccccgtgaccaccgccacccccctgttcgacgccgtgaccaccctggagaccaccgccgtgctgagaagcaacggcctgcccgtgaccagaatctgcaccaccgcccccccccccgtgccccccaagcccagcagcatccccagcggcctggtgttcacccacagacccgagcccagcaagccccccatcgcccccaagcccgtgatcccccagctgcccaccaccacccagaagcccaccgacatccaccccaagcccaccggcctgagcctgaccagcagcatgaccctgaacctggtgaccagcgccgactacaagctgcccagccccaccagccccctgagcccccacagcaacaagagcagccccagattcagcaagagcctgaccgagacctacgtggtgatcaccctgcccagcgagcccggcacccccaccgacagcagcgccagccaggccatcaccagctggcccctgggcagccccagcaaggacctggtgagcgtggagcccgtgttcagcgtggtgccccccgtgaccgccgtggagatccccatcagcagcgagcagaccttctacatcagcggcgccctgcagaccttcagcgccacccccgtgaccgcccccagcagcttccaggccgcccccaccagcgtgacccagttcctgaccaccgaggtgagcaagaccgaggtgagcgccaccagaagcaccgcccccagcgtgggcctgagcagcatcagcatcaccatcccccccgagcccctggccctggacaacatccacctggagaagccccagtacaaggaggacggcaagctgcagctggtgggcgacgtgatcgacctgagaaccgtgcccaaggtggaggtgaagaccaccgacaagtgcatcgacctgagcgccagcaccatggacgtgaagagacagatcaccgccaacgaggtgtacggcaagcagatcagcgccgtgcagcccagcatcatcaacctgagcgtgaccagcagcatcgtgacccccgtgagcctggccaccgagaccgtgaccttcgtgacctgcaccgccagcgccagctacaccaccggcaccgagagcctggtgggcgccgagcacgccatgaccacccccctgcagctgaccaccagcaagcacgccgagcccccctacagaatccccagcgaccaggtgttccccatcgccagagaggaggcccccatcaacctgagcctgggcacccccgcccacgccgtgaccctggccatcaccaagcccgtgaccgtgccccccgtgggcgtgaccaacggctggaccgacagcaccgtgagccagggcatcaccgacggcgaggtggtggacctgagcaccaccaagagccacagaaccgtggtgaccatggacgagagcaccagcagcgtgatgaccaagatcatcgaggacgagaagcccgtggacctgaccgccggcagaagagccgtgtgctgcgacgtggtgtacaagctgcccttcggcagaagctgcaccgcccagcagcccgccaccaccctgcccgaggacagattcggctacagagacgaccactaccagtacgacagaagcggcccctacggctacagaggcatcggcggcatgaagcccagcatgagcgacaccaacctggccgaggccggccacttcttctacaagagcaagaacgccttcgactacagcgagggcaccgacaccgccgtggacctgaccagcggcagagtgaccaccggcgaggtgatggactacagcagcaagaccaccggcccctaccccgagaccagacaggtgatcagcggcgccggcatcagcaccccccagtacagcaccgccagaatgacccccccccccggcccccagtactgcgtgggcagcgtgctgagaagcagcaacggcgtggtgtacagcagcgtggccacccccacccccagcaccttcgccatcaccacccagcccggcagcatcttcagcaccaccgtgagagacctgagcggcatccacaccgccgacgccgtgaccagcctgcccgccatgcaccacagccagcccatgcccagaagctacttcatcaccaccggcgccagcgagaccgacatcgccgtgaccggcatcgacatcagcgccagcctgcagaccatcaccatggagagcctgaccgccgagaccatcgacagcgtgcccaccctgaccaccgccagcgaggtgttccccgaggtggtgggcgacgagagcgccctgctgatcgtgcccgaggaggacaagcagcagcagcagctggacctggagagagagctgctggagctggagaagatcaagcagcagagattcgccgaggagctggagtgggagagacaggagatccagagattcagagagcaggagaagatcatggtgcagaagaagctggaggagctgcagagcatgaagcagcacctgctgttccagcaggaggaggagagacaggcccagttcatgatgagacaggagaccctggcccagcagcagctgcagctggagcagatccagcagctgcagcagcagctgcaccagcagctggaggagcagaagatcagacagatctaccagtacaactacgaccccagcggcaccgccagcccccagaccaccaccgagcaggccatcctggagggccagtacgccgccctggagggcagccagttctgggccaccgaggacgccaccaccaccgccagcgccgtggtggccatcgagatcccccagagccagggctggtacaccgtgcagagcgacggcgtgacccagtacatcgccccccccggcatcctgagcaccgtgagcgagatccccctgaccgacgtggtggtgaaggaggagaagcagcccaagaagagaagcagcggcgccaaggtgagaggccagtacgacgacatgggcgagaacatgaccgacgaccccagaagcttcaagaagatcgtggacagcggcgtgcagaccgacgacgaggacgccaccgacagaagctacgtgagcagaagaagaagaaccaagaagagcgtggacaccagcgtgcagaccgacgacgaggaccaggacgagtgggacatgcccaccagaagcagaagaaaggccagagtgggcaagtacggcgacagcatgaccgaggccgacaagaccaagcccctgagcaaggtgagcagcatcgccgtgcagaccgtggccgagatcagcgtgcagaccgagcccgtgggcaccatcagaacccccagcatcagagccagagtggacgccaaggtggagatcatcaagcacatcagcgcccccgagaagacctacaagggcggcagcctgggctgccagaccgaggccgacagcgacacccagagcccccagtacctgagcgccaccagcccccccaaggacaagaagagacccacccccctggagatcggctacagcagccacctgagagccgacagcaccgtgcagctggcccccagcccccccaagagccccaaggtgctgtacagccccatcagccccctgagccccggcaaggccctggagagcgccttcgtgccctacgagaagcccctgcccgacgacatcagcccccagaaggtgctgcaccccgacatggccaaggtgccccccgccagccccaagaccgccaagatgatgcagagaagcatgagcgaccccaagcccctgagccccaccgccgacgagagcagcagagcccccttccagtacaccgagggctacaccaccaagggcagccagaccatgaccagcagcggcgcccagaagaaggtgaagagaaccctgcccaaccccccccccgaggagatcagcaccggcacccagagcaccttcagcaccatgggcaccgtgagcagaagaagaatctgcagaaccaacaccatggccagagccaagatcctgcaggacatcgacagagagctggacctggtggagagagagagcgccaagctgagaaagaagcaggccgagctggacgaggaggagaaggagatcgacgccaagctgagatacctggagatgggcatcaacagaagaaaggaggccctgctgaaggagagagagaagagagagagagcctacctgcagggcgtggccgaggacagagactacatgagcgacagcgaggtgagcagcaccagacccaccagaatcgagagccagcacggcatcgagagacccagaaccgccccccagaccgagttcagccagttcatccccccccagacccagaccgagagccagctggtgccccccaccagcccctacacccagtaccagtacagcagccccgccctgcccacccaggcccccaccagctacacccagcagagccacttcgagcagcagaccctgtaccaccagcaggtgagcccctaccagacccagcccaccttccaggccgtggccaccatgagcttcaccccccaggtgcagcccacccccaccccccagcccagctaccagctgcccagccagatgatggtgatccagcagaagcccagacagaccaccctgtacctggagcccaagatcaccagcaactacgaggtgatcagaaaccagcccctgatgatcgcccccgtgagcaccgacaacaccttcgccgtgagccacctgggcagcaagtacaacagcctggacctgagaatcggcctggaggagagaagcagcatggccagcagccccatcagcagcatcagcgccgacagcttctacgccgacatcgaccaccacacccccagaaactacgtgctgatcgacgacatcggcgagatcaccaagggcaccgccgccctgagcaccgccttcagcctgcacgagaaggacctgagcaagaccgacagactgctgagaaccaccgagaccagaagaagccaggaggtgaccgacttcctggcccccctgcagagcagcagcagactgcacagctacgtgaaggccgaggaggaccccatggaggacccctacgagctgaagctgctgaagcaccagatcaagcaggagttcagaagaggcaccgagagcctggaccacctggccggcctgagccactactaccacgccgacaccagctacagacacttccccaagagcgagaagtacagcatcagcagactgaccctggagaagcaggccgccaagcagctgcccgccgccatcctgtaccagaagcagagcaagcacaagaagagcctgatcgaccccaagatgagcaagttcagccccatccaggagagcagagacctggagcccgactacagcagctacatgaccagcagcaccagcagcatcggcggcatcagcagcagagccagactgctgcaggacgacatcaccttcggcctgagaaagaacatcaccgaccagcagaagttcatgggcagcagcctgggcaccggcctgggcaccctgggcaacaccatcagaagcgccctgcaggacgaggccgacaagccctacagcagcggcagcagaagcagacccagcagcagacccagcagcgtgtacggcctggacctgagcatcaagagagacagcagcagcagcagcctgagactgaaggcccaggaggccgaggccctggacgtgagcttcagccacgccagcagcagcgccagaaccaagcccaccagcctgcccatcagccagagcagaggcagaatccccatcgtggcccagaacagcgaggaggagagccccctgagccccgtgggccagcccatgggcatggccagagccgccgccggccccctgccccccatcagcgccgacaccagagaccagttcggcagcagccacagcctgcccgaggtgcagcagcacatgagagaggagagcagaaccagaggctacgacagagacatcgccttcatcatggacgacttccagcacgccatgagcgacagcgaggcctaccacctgagaagagaggagaccgactggttcgacaagcccagagagagcagactggagaacggccacggcctggacagaaagctgcccgagagactggtgcacagcagacccctgagccagcaccaggagcagatcatccagatgaacggcaagaccatgcactacatcttcccccacgccagaatcaagatcaccagagacagcaaggaccacaccgtgagcggcaacggcctgggcatcagaatcgtgggcggcaaggagatccccggccacagcggcgagatcggcgcctacatcgccaagatcctgcccggcggcagcgccgagcagaccggcaagctgatggagggcatgcaggtgctggagtggaacggcatccccctgaccagcaagacctacgaggaggtgcagagcatcatcagccagcagagcggcgaggccgagatctgcgtgagactggacctgaacatgctgagcgacagcgagaacagccagcacctggagctgcacgagccccccaaggccgtggacaaggccaagagccccggcgtggaccccaagcagctggccgccgagctgcagaaggtgagcctgcagcagagccccctggtgctgagcagcgtggtggagaagggcagccacgtgcacagcggccccaccagcgccggcagcagcagcgtgcccagccccggccagcccggcagccccagcgtgagcaagaagaagcacggcagcagcaagcccaccgacggcaccaaggtggtgagccaccccatcaccggcgagatccagctgcagatcaactacgacctgggcaacctgatcatccacatcctgcaggccagaaacctggtgcccagagacaacaacggctacagcgaccccttcgtgaaggtgtacctgctgcccggcagaggccaggtgatggtggtgcagaacgccagcgccgagtacaagagaagaaccaagcacgtgcagaagagcctgaaccccgagtggaaccagaccgtgatctacaagagcatcagcatggagcagctgaagaagaagaccctggaggtgaccgtgtgggactacgacagattcagcagcaacgacttcctgggcgaggtgctgatcgacctgagcagcaccagccacctggacaacacccccagatggtaccccctgaaggagcagaccgagagcatcgaccacggcaagagccacagcagccagagcagccagcagagccccaagcccagcgtgatcaagagcagaagccacggcatcttccccgaccccagcaaggacatgcaggtgcccaccatcgagaagagccacagcagccccggcagcagcaagagcagcagcgagggccacctgagaagccacggccccagcagaagccagagcaagaccagcgtgacccagacccacctggaggacgccggcgccgccatcgccgccgccgaggccgccgtgcagcagctgagaatccagcccaccaagccccccaaccacagacccgccgagagcagcgtgagcaccggcagcagcggcagcagcttcggcagcggctacagcgtggacagcgagggcagcagcagcaccgccggcgagaccaacctgttccccatccccagaatcggcaagatgggccagaacggccaggagcccgtgaagcagcccggcgtgggcgtgggcctggccgacaccgaggccaagacccaggtgatgggcgagatcaagatcgccctgaagaaggagatgaagaccgacggcgagcagctgatcgtggagatcctgcagtgcagaaacatcacctacaagttcaagagccccgaccacctgcccgacctgtacgtgaagatctacgtgatgaacatcagcacccagaagaaggtgatcaagaagaagaccagagtgtgcagacacgacagagagcccagcttcaacgagaccttcagattcagcctgagccccgccggccacagcctgcagatcctgctgttcagcaacggcggcaagttcatgaagaagaccctgatcggcgaggcctgcatctggctggacaaggtggacctgagaaagagaatcgtgaactggcacaagctgctggtgagccccacccagacccactag

SEQ ID NO: 226729 - protein, 589 aa, Artificial Sequence
  derived and/or modified sequence
MTGLLKRKFDQLDEDNSSVSSSSSSSGCQSRSCSPSSSVSRAWDSEEEGPWDQMPLPDRDFCGPRSFTPLSILKRARRERPGRVAFDGITVFYFPRCQGFTSVPSRGGCTLGMALRHSACRRFSLAEFAQEQARARHEKLRQRLKEEKLEMLQWKLSAAGVPQAEAGLPPVVDAIDDASVEEDLAVAVAGGRLEEVSFLQPYPARRRRALLRASGVRRIDREEKRELQALRQSREDCGCHCDRICDPETCSCSLAGIKCQMDHTAFPCGCCREGCENPMGRVEFNQARVQTHFIHTLTRLQLEQEAESFRELEAPAQGSPPSPGEEALVPTFPLAKPPMNNELGDNSCSSDMTDSSTASSSASGTSEAPDCPTHPGLPGPGFQPGVDDDSLARILSFSDSDFGGEEEEEEEGSVGNLDNLSCFHPADIFGTSDPGGLASWTHSYSGCSFTSGVLDENANLDASCFLNGGLEGSREGSLPGTSVPPSMDAGRSSSVDLSLSSCDSFELLQALPDYSLGPHYTSQKVSDSLDNIEAPHFPLPGLSPPGDASSCFLESLMGFSEPAAEALDPFIDSQFEDTVPASLMEPVPV

SEQ ID NO: 226730 - protein, 247 aa, Artificial Sequence
  derived and/or modified sequence
RRRCRTRRARGGWTDGCRAERTESRRRGRPRPGRGSRRCPPRASGLQAVCPQTPEHVRHHHDWAVEEEEGSVGNLDNLSCFHPADIFGTSDPGGLASWTHSYSGCSFTSGVLDENANLDASCFLNGGLEGSREGSLPGTSVPPSMDAGRSSSVDLSLSSCDSFELLQALPDYSLGPHYTSQKVSDSLDNIEAPHFPLPGLSPPGDASSCFLESLMGFSEPAAEALDPFIDSQFEDTVPASLMEPVPV

SEQ ID NO: 226731 - DNA, 1770 bp, Artificial Sequence
  derived and/or modified sequence
atgaccggcctgttgaagaggaagtttgaccagttggatgaggataactcatccgtctcgtcaagcagctcaagctctgggtgtcagtcacgaagctgctctccctcatcaagcgtgtcaagggcatgggactccgaggaagaaggaccctgggatcaaatgcctctgccagaccgcgacttttgtggaccgaggtcattcacccccctgtctatcctgaagcgggctagacgggaaagacctggccgagtagcctttgatggcatcacagtattttattttcctaggtgccagggctttacttctgtacctagtagaggtggctgcaccctcggtatggctctcagacattccgcttgtaggcgctttagcctcgccgaatttgcacaagaacaggcacgcgcccgccacgagaaactgcggcagcggttaaaagaggaaaagttggaaatgctgcaatggaagctctctgccgccggagtgccccaggccgaggccggtctgccccctgtcgtggatgccatcgatgatgcatccgtcgaggaggatctggccgtagccgtggccggtggaagactcgaggaagtctctttcctgcagccatacccagcgaggcggaggcgagctctgctgcgcgcttcgggagtccggcggatagatcgcgaagagaaacgggagctacaggctctccgccagagccgtgaagactgcggttgtcattgcgacaggatttgtgacccagaaacatgctcctgttcactcgcaggtatcaaatgtcaaatggaccacactgcattcccctgcggatgctgtcgcgagggttgtgagaacccaatgggccgggttgagtttaatcaagcaagggtgcagacccacttcattcatacacttacgaggctgcagcttgagcaggaggccgagtcttttagggagttagaagcccccgctcagggttcccctccttctcccggggaagaagctctggtgcctacattcccactggctaagcctcctatgaacaacgaactcggcgataatagttgctcaagtgacatgaccgatagctcaaccgcaagctccagtgcctccggtaccagcgaggccccagattgccctacccaccctgggctgccaggacctggattccagccgggcgtcgatgacgacagcctggctcggattctatctttcagcgacagcgatttcgggggcgaggaagaggaggaagaagaagggtccgtggggaatctggataatctgtcgtgcttccatcctgcagatatctttggaacgagcgaccctggggggctcgccagttggactcattcatactcaggctgttcgttcacctctggcgtactcgacgagaacgctaatttggacgcaagttgtttcctcaatggcgggctcgagggtagcagggaaggcagcttgcctgggacgtccgttccaccctccatggatgcaggacgctcgtcttcagtcgacctcagtctatcgtcctgcgatagcttcgaattgctgcaagcccttccagactactcgctgggcccacattatacaagccagaaggttagcgactcactggacaacattgaagcgcctcatttcccgctgccaggtttatcccccccaggagatgccagctcctgctttcttgagtccttgatggggttttctgagcccgctgctgaggccctcgatccttttattgattctcagttcgaggatactgtacctgctagcctaatggagcccgtgccagtttag

SEQ ID NO: 226732 - DNA, 744 bp, Artificial Sequence
  derived and/or modified sequence
cgtcggagatgccggacccggcgagcccggggcggttggactgacggatgccgagccgaaaggacagagagccgacggagagggagaccgcgacccggccgcgggagccgccgctgcccgccccgggcctcaggactccaggccgtgtgtccccaaacaccggaacatgtccgccaccatcacgactgggctgttgaagaggaagaagggagcgtaggcaacttagacaatctgagctgcttccacccagcagatatatttgggactagcgatccagggggactggcatcctggactcactcctatagcgggtgtagtttcacctctggagtcctggacgaaaacgcaaacctggacgcatcttgtttcctcaacggtggcctggaagggagccgcgaaggcagcttaccaggtacctccgtcccgccgagcatggacgcaggaagaagtagctctgtcgatctcagcctgtcttcttgtgactcatttgaactgctgcaagccctacctgactacagtctcggtccacactatacatcacaaaaagtgtctgatagtcttgacaacattgaggctccacatttcccgctccctggcctaagtcctccaggagatgcaagctcctgcttcttagagtccctgatgggtttcagcgaaccagccgctgaggccctggacccttttatcgattcacaatttgaggacactgtgccagcatctctgatggagccggtgcctgtctag

SEQ ID NO: 226733 - DNA, 1770 bp, Artificial Sequence
  derived and/or modified sequence
atgaccggcctgctgaagcggaagttcgaccagctggacgaggacaatagcagtgtctcttcatcatcaagttcctctggctgtcagtcaagatcctgcagccccagtagctccgtgtccagagcctgggactcagaggaagagggaccttgggaccagatgcccctgccagatcgcgatttttgcgggccacgcagctttactccactcagcatacttaaacgcgcaaggagagagcgaccaggccgggtggcttttgatggcatcacggtgttctacttcccacggtgccagggatttacgtctgtgccatcaagaggcggctgcacactaggtatggctttgagacattccgcatgccggcgattctctctcgccgagttcgcccaggaacaggcacgggctcggcatgagaaactgcggcagagactcaaggaagagaagctggagatgctgcagtggaagctgagcgccgcaggtgttccacaagccgaagctggcttaccgccagtggtggacgccattgatgacgcgagcgttgaggaagatcttgccgttgccgtcgcaggtggccggctggaagaagtgagcttccttcagccctatccagcccgaagacgtcgcgcgctcctccgcgccagcggtgtccgccgaattgatagggaagagaagcgggaactgcaggcactgagacagtctcgggaggattgcggatgccattgcgacagaatctgcgatccggagacatgttcctgcagcctggccggcattaaatgtcagatggaccacaccgcattcccctgcgggtgctgtcgcgagggatgtgagaaccccatgggacgagttgaatttaaccaggcccgcgtgcaaacgcacttcatacacactttgacacggttgcagctagaacaagaggccgagagcttcagagagctcgaggcccccgcccaaggatctcctccctcccccggtgaagaggctctggttcccaccttccctctggccaagccccccatgaacaacgaactcggtgacaactcatgttcctcagatatgaccgatagttctactgctagctccagtgctagcgggacatcagaggcaccagattgccccactcaccctggactccccgggccaggtttccagcctggtgtggacgacgactcgttagcacgcattctcagcttctccgattccgacttcggcggcgaggaggaagaagaggaggaagggtctgtcggtaatctggataatctgtcttgcttccacccagccgatatcttcgggaccagcgaccccggtgggcttgcatcctggacccactcatatagcggctgttctttcacatccggtgtgcttgatgaaaatgccaatttggacgcgagttgcttccttaacgggggcttggaggggtctcgagagggaagcctgccaggtactagcgtacctccctcaatggatgccggtcgtagttccagcgtggacctttccctgtccagctgcgattcgttcgaattgttgcaagcacttcccgactattccctgggccctcattacaccagtcagaaggtctcggactctttggacaacatcgaggccccacactttcctctcccaggattatctccccctggcgatgcctcatcctgcttcctggaatcactcatgggcttctctgagccggcagcagaagcattggatccttttattgatagccagtttgaggacactgtgcctgcctcactcatggagcccgtgcccgtttag

SEQ ID NO: 226734 - DNA, 1770 bp, Artificial Sequence
  derived and/or modified sequence
atgacaggcctgctgaagaggaagtttgaccagctggatgaggacaacagctctgtgagcagcagcagcagcagcagcggctgccagagccgcagctgcagccccagcagctctgtgtcccgggcctgggacagcgaggaggagggcccctgggaccagatgcccctgcctgaccgggacttctgtggccccaggagcttcacccccctgagcatcctgaagagggcccggcgggagaggcctggccgggtggcctttgatggcatcaccgtcttctacttcccccgctgccagggcttcacctctgtgcccagcagaggaggctgcaccctgggcatggccctgcggcacagcgcctgccgccgcttcagcctggccgagtttgcccaggagcaggcccgggcccggcatgagaagctgcggcagaggctgaaggaggagaagctggagatgctgcagtggaagctgtctgctgctggggtgccccaggccgaggccggcctgccccctgtggtggatgccattgatgatgcctctgtggaggaggacctggccgtggccgtggccggcggccgcctggaggaggtgtccttcctgcagccctacccagccaggagaagaagagccctgctgcgggccagcggcgtgagaagaattgaccgggaggagaagcgggagctgcaggccctgcggcagagccgggaggactgtggctgccactgtgaccgcatctgtgaccctgagacctgcagctgcagcctggccggcatcaagtgccagatggaccacacagccttcccctgtggctgctgccgggagggctgtgagaaccccatgggccgggtggagttcaaccaggcccgggtgcagacccacttcatccacaccctgacccggctgcagctggagcaggaggccgagagcttccgggagctggaggccccagcccagggcagcccccccagccctggagaggaggccctggtgcccaccttccccctggccaagccacccatgaacaatgagctgggggacaacagctgcagcagtgacatgacagacagcagcacagccagcagcagcgccagcggcaccagcgaggccccagactgccccacccaccctggcctgcccggccctggcttccagcccggggtggatgatgacagcctggcccgcatcctgtccttcagtgacagcgactttggaggagaggaggaggaggaggaggagggctctgtgggcaacctggacaacctgagctgcttccaccctgctgacatcttcggcaccagtgaccccggcggcctggcctcctggacccacagctacagcggctgcagcttcaccagcggcgtgctggatgaaaatgccaacctggatgccagctgcttcctgaatggaggcctggagggcagccgggagggcagcctgcccggcacctctgtgccccccagcatggatgctggccgcagcagctctgtggacctgagcctgagcagctgtgacagctttgagctgctgcaggccctgcctgactacagcctgggcccccactacaccagccagaaggtgtctgacagcctggacaacatcgaggccccccacttccccctgcccggcctgagccccccaggagatgccagcagctgcttcctggagagcctgatgggcttcagcgagcctgctgctgaggccctggaccccttcatcgacagccagtttgaggacacagtgcctgccagcctgatggagcctgtgcctgtgtag

SEQ ID NO: 226735 - DNA, 744 bp, Artificial Sequence
  derived and/or modified sequence
agaagacgctgcaggacccggcgggcccggggcggctggacagatggctgcagagctgagaggacagagagcagaagaagaggccggccccggcccggccggggcagccgccgctgccccccccgggccagcggcctgcaggccgtgtgcccccagaccccagagcacgtgcgccaccaccacgactgggccgtggaggaggaggagggctctgtgggcaacctggacaacctgagctgcttccaccctgctgacatcttcggcaccagtgaccccggcggcctggcctcctggacccacagctacagcggctgcagcttcaccagcggcgtgctggatgaaaatgccaacctggatgccagctgcttcctgaatggaggcctggagggcagccgggagggcagcctgcccggcacctctgtgccccccagcatggatgctggccgcagcagctctgtggacctgagcctgagcagctgtgacagctttgagctgctgcaggccctgcctgactacagcctgggcccccactacaccagccagaaggtgtctgacagcctggacaacatcgaggccccccacttccccctgcccggcctgagccccccaggagatgccagcagctgcttcctggagagcctgatgggcttcagcgagcctgctgctgaggccctggaccccttcatcgacagccagtttgaggacacagtgcctgccagcctgatggagcctgtgcctgtgtag

SEQ ID NO: 226736 - DNA, 1770 bp, Artificial Sequence
  derived and/or modified sequence
atgaccggcctgctgaagcggaagttcgaccagctggacgaggacaatagtagcgtgtcttcttcaagctcatctagcggatgccagtccaggtcttgcagtccttcctctagcgtgagtcgggcctgggatagcgaagaggaaggtccatgggaccaaatgccactgccagaccgggacttctgcgggccacggtcttttaccccactgtctatcctaaagagagcgcgcagggaaagacctggccgggtggcatttgatggaatcaccgttttttatttcccccggtgtcagggattcactagcgtgcccagcaggggcgggtgcacccttggtatggctctgagacattcggcttgccgccggttttctctggccgagtttgcccaggagcaggccagggctcgccatgagaagctgcgtcagagacttaaagaagagaaactggaaatgcttcaatggaagctgagcgctgccggcgtcccccaggctgaggccgggctccccccagtagtggatgctattgacgacgcaagcgtcgaggaggacttagccgtagccgtggccggcggtagactcgaggaggtgagcttcctccagccgtaccccgcacggcgtcgaagggccctgctgcgggcttcaggtgtgaggagaatcgaccgggaggaaaaacgcgaattacaggccctgagacaatcgcgagaagactgcgggtgccattgcgatagaatctgcgatcccgagacttgctcctgcagcctggcaggaattaagtgtcagatggaccatacggccttcccgtgcgggtgctgcagggaaggctgtgagaaccccatgggccgggtggagttcaaccaggccagggtgcagacacactttatacatactctgacccgactgcagttagaacaggaggccgaatccttcagagagctagaggctcccgcccagggatcacctcccagtcctggggaagaagctctcgtgcctaccttccctctagccaagccaccgatgaataacgagcttggcgacaattcgtgttcctcagatatgactgattcttccaccgcctcctcttctgcctctgggacttctgaggcccccgactgccctacccaccccggccttcccggaccagggtttcagcctggggtcgatgacgactctttagcacgcatcttatcattctccgattctgatttcgggggggaggaggaagaagaggaggaggggtctgtgggaaatctggataacctgagttgtttccatcctgccgacattttcggaacctccgatccaggtggtcttgcttcttggacccacagttacagtggctgttccttcacgagcggggtgctggatgagaacgcaaacctcgacgcctcctgctttctgaatggtgggctggagggctcaagggagggttcacttccaggaacctctgtcccccctagtatggatgcggggcggagcagtagcgtggatcttagtctctcaagctgtgactcatttgagctactgcaggccctgcctgactatagtctagggccacactacaccagtcagaaggtcagcgattctctggataacattgaggctcctcactttccgctgcctggattgtcgcctcccggggacgcgagcagttgctttctggagtccttgatgggcttctctgagcccgcggccgaagcactcgatcccttcattgactcccagttcgaagacaccgtgcccgcatccctgatggagccagtgcccgtgtag

SEQ ID NO: 226737 - DNA, 744 bp, Artificial Sequence
  derived and/or modified sequence
cggcggcggtgccggacccggcgggcccggggcggctggaccgacgggtgccgggctgagcggactgaatcccgccggcggggccgtccccgacccgggaggggctcccgccggtgtcctccacgcgcatctgggctgcaagcggtctgtccgcaaactcccgagcatgtccggcaccatcacgattgggccgtggaggaggaggagggcagcgtaggcaatctggataacttaagctgttttcatcctgcagatatctttggcacatcagaccccggcggcctggcctcctggacccactcttattctgggtgtagctttacctccggcgtcctggacgaaaacgctaatttggacgcaagctgtttccttaacggaggtctcgagggctcgcgggaaggtagcctgccagggacatccgtacccccttcaatggacgccggcagatcctcttcagtggacctgagtctgtcaagctgcgacagcttcgagctattgcaagctcttcccgattattccctgggtcctcattatactagtcagaaggtgtctgactctttggacaacatagaagccccccattttcctctgcccggtctgtctcctcctggcgatgcaagttcatgcttcctggagagccttatgggcttttcagagccagctgctgaggccttagatccgttcattgactcgcagtttgaggacaccgtcccagcctctctcatggagccagtgccagtttag

SEQ ID NO: 226738 - DNA, 1770 bp, Artificial Sequence
  derived and/or modified sequence
atgaccggcctgctgaagcggaagttcgaccagctggacgaggacaactcttctgtgtcctcctcatcctcctcatccggatgtcagagccgcagttgctcccctagcagcagcgtctcccgggcctgggattcagaggaagaggggccatgggaccagatgccactgcccgacagggacttctgtggaccacgctcatttacgccactaagcattctgaagagagcacgacgggaacggcccggtcgcgtcgcattcgacggaatcactgtgttttatttcccgcgttgtcaggggttcacatccgtgccctctcggggtggatgcaccctgggcatggctttgcgccattccgcttgtcgccgctttagtctggccgaattcgcccaggaacaggcacgagctaggcatgagaagttgaggcaaaggttgaaggaggagaagctggaaatgctccagtggaaactctccgccgctggggtgcctcaggccgaagccggactgccgcctgtggtcgacgcgattgacgacgcatctgtggaagaagacctcgccgtcgcagtcgccggcggccgcctggaagaagttagctttcttcagccatatcctgcgagaaggcgccgcgctctccttcgcgcatcaggggttagacgaatcgaccgggaagagaaaagagaattgcaggctctcaggcaaagtagggaagactgcggctgccactgtgacagaatctgtgacccggaaacgtgctcttgttctcttgccgggataaagtgccagatggatcatacagcatttccctgcgggtgctgtcgagaagggtgcgagaacccgatgggccgcgtggagttcaatcaagcgagagtccagacccactttattcacaccctcaccaggctgcagctagagcaggaggccgagtccttcagagaacttgaggccccagctcaaggatctccaccaagtcccggggaggaggcgctggtcccaaccttccccttagctaagcctcccatgaacaatgaactgggagacaacagctgcagcagcgatatgaccgactcttcgactgcctccagctcagcttccggtacatccgaggcacctgactgccccactcatccaggcttgcctggccccgggttccaacctggcgtagatgacgattctctcgcacgaatcctctctttctccgactccgattttggaggcgaggaagaagaagaagaagaagggtctgtaggcaacctggataatctctcttgcttccatccggcggacattttcggcacaagcgatccgggtggcctcgcctcttggacgcatagttacagcggctgtagctttacatccggcgtgctggatgagaatgcaaacctggacgcttcctgtttcctcaatggtggacttgaagggtcccgtgaagggagcctacctggtactagcgtgcccccttctatggatgcaggtaggtcgtcctctgtcgacctgtcccttagttcatgtgacagcttcgagctgctccaagccctgccagactacagtcttggtcctcattatacatctcaaaaggtgtccgactcacttgataatatcgaagctccgcattttcccttgcctgggctgtcgccccccggcgacgcctcctcatgctttttagagtcgttgatgggatttagcgaaccagcagcggaagccctcgatccattcatcgactcgcagtttgaagacaccgttcccgcgtcactgatggagcctgtgcctgtctag

SEQ ID NO: 226739 - DNA, 1770 bp, Artificial Sequence
  derived and/or modified sequence
atgacaggcctcttaaagcggaagttcgatcagctcgacgaggataatagcagcgtctcttcttcttcctcgtctagcgggtgtcagtcccgcagctgcagcccaagctcttctgtatcccgcgcatgggattcagaggaagaaggtccttgggaccaaatgccactgcctgaccgcgacttctgcggcccacgttcattcaccccccttagcatcctgaagagggccaggagggaacgccctgggcgtgtcgctttcgatgggattaccgtcttttactttccaaggtgtcagggcttcaccagtgtgccctcccgtggtggatgtactttgggtatggcacttcgacattctgcttgtagaaggttttcactcgcggagtttgcccaggaacaggcccgtgctcggcacgaaaagctgaggcagcgactgaaggaggagaaattagagatgctgcagtggaagctcagcgccgcaggcgtcccacaggcagaagccggtttacctccagtcgttgatgccatagacgatgctagcgttgaggaagaccttgccgtcgctgtggccggaggtcggctcgaagaggtgtcctttctccagccttaccctgctcgtaggcgcagggccctgttacgcgctagcggtgtccgtcgcatagatagggaggagaaaagagaactgcaagctttacggcagtcccgtgaggactgcggatgccactgtgatagaatctgcgaccccgaaacatgtagttgtagtctggccggaatcaaatgtcaaatggatcacacggccttcccgtgtggctgttgtagggagggctgcgaaaaccctatggggagggtagaatttaatcaggcacgggttcaaacacatttcattcacactctgacgcgcttacagctggaacaggaggccgagagtttccgcgaacttgaagccccagcccagggttctcctccctctcccggtgaagaggctctagttccaacctttcctttagctaagcctcctatgaacaacgaactgggcgataacagctgctccagtgacatgacagatagttctacagcctccagctccgccagcggcacatctgaggcacctgattgccctacacaccctggtctccctggtccaggatttcagccgggagtagatgacgactccctggcacgtatcctgtccttttccgacagcgactttggaggagaagaggaggaagaagaggagggctcggttgggaacctggacaacctcagctgctttcatcctgctgatatatttgggacgtcagaccccggaggactggccagctggacacactcatacagtggttgctcttttacatccggggtcttggatgaaaatgcgaacctcgacgcaagctgcttcctgaacggcggtctcgagggatcaagagaagggtctctacccggtacatccgtacccccaagtatggacgccggacgctcttcttctgtcgaccttagcctatcatcctgcgactcttttgagctattacaagccttaccggattactcactggggcctcattacacaagtcagaaagtgtcggacagcctggataacatcgaagcgccacatttccctcttccgggactgtccccccctggcgacgcaagttcatgctttctagagtcactcatggggttctcagaaccagcagctgaagcactcgacccatttatagacagtcaattcgaagacacagtgcccgcaagtctaatggaaccagtgcctgtgtag

SEQ ID NO: 226740 - DNA, 744 bp, Artificial Sequence
  derived and/or modified sequence
agaaggcggtgcaggacacgtcgagctcgtgggggatggaccgatggctgtcgcgcagagcgcaccgagtctaggaggcgcggtagaccgaggccaggccgaggcagccggcgttgcccgccacgcgcttccggcctgcaggctgtttgccctcagacccccgaacacgttagacatcatcacgattgggccgtggaggaagaagagggtagcgtggggaatctagataatctctcctgcttccaccccgcagacatattcggaacttctgaccctggaggcctggcctcatggacccattcatactcgggttgctcatttaccagcggggtcctggatgaaaacgctaacctcgacgctagttgctttctcaatggcggactcgagggcagccgggaagggagcttacctggcacctccgtccctccctccatggatgctggcaggagctcctcggtcgacttgagcttgagctcctgtgactcttttgagttgctgcaggctctcccagactactcacttgggccacactacaccagtcagaaggtctctgattccctggacaacattgaggccccacacttcccactgccgggactgagtccgccaggcgatgcaagttcatgttttttagagtctctgatgggcttctcggagcctgccgctgaagctctcgacccattcatcgattcccaattcgaagacactgtgcccgcatccctcatggagccggtgcccgtatag

SEQ ID NO: 226741 - DNA, 1770 bp, Artificial Sequence
  derived and/or modified sequence
atgactggcttactcaagcgcaaattcgatcagctggatgaagataactcctcagtttcgtcatccagtagcagctccggctgtcagtccagaagctgttcaccaagttcttctgtgtccagggcgtgggactcggaggaagagggtccctgggaccagatgcctctacctgaccgtgacttctgtggacctcgctcctttacccctttatcaattctgaaaagggccagaagggagaggcccggtagggtcgcttttgacggcatcacagtcttctactttcctaggtgccagggattcacatctgtgcccagtagaggaggctgtaccctgggcatggccctgcgtcatagtgcttgtcgccgttttagtctggctgagttcgcacaggaacaagcgcgagctagacacgagaaacttcggcagagactaaaggaagagaagctggaaatgctacagtggaagctctctgctgctggtgtcccacaggccgaggcaggcctgccacctgtggtggatgcaatcgacgatgcatctgtggaagaggatcttgcagtcgctgtcgcaggtggtagactcgaggaggtgtcttttctgcagccttatcccgcacggcgaaggagagcacttctgcgcgcatctggagtccgacgaatagatcgggaggagaagagggagttacaggccctgaggcagagtcgggaggactgcggttgtcactgcgacagaatatgcgatcccgaaacatgttcatgcagcttagctggaatcaaatgtcagatggatcatactgcttttccatgcggctgctgtagggaggggtgcgagaatccaatggggagggttgagttcaaccaggcaagggtgcagactcattttattcacaccttgactagactgcagttagaacaggaggctgagagtttcagagagttagaagccccagcccaggggagcccgccatccccaggcgaggaggcgttagttccgacgttccctcttgcaaagcctcctatgaataatgaactaggggataatagttgcagctcagacatgactgattccagtacagcctccagctctgcttcgggcacctccgaagcccctgactgtcctactcatccaggcttaccaggccctggattccagccaggggtcgacgatgattcattggcccgtatcctatctttttccgattctgatttcggcggagaggaagaggaagaagaggagggatcggtgggtaacctggacaatctctcgtgtttccaccccgcagacatttttggtacatccgatcccggaggcctcgcaagctggactcactcatattctggctgcagttttacctccggggtattagacgagaacgcgaacttggacgcctcttgtttccttaacggaggcctcgaggggtccagagaaggtagtctgcccggtacctctgtccctccttcgatggacgctggtcgctcttccagtgtcgacttgagcctcagttcctgcgatagctttgaactgttacaggcactgccggattattcgcttgggcctcactatacctctcagaaggtgagcgatagtctcgataatatagaagcccctcattttccactgccaggtttgtcacccccaggagacgctagcagctgcttcctggagagcttgatgggatttagcgagcccgctgctgaagctcttgatccattcattgattctcagttcgaggacactgttccagcttctctaatggagcctgtgcctgtatag

SEQ ID NO: 226742 - DNA, 3148 bp, Artificial Sequence
  derived and/or modified sequence
cgccgctgccggacgcgcagagcgaggggcggctggaccgacggctgccgggccgagcgcacagagtcgcggcgcagggggcgtccccggccgggacgcgggtcgcgtcgttgtcctccgcgagcgtccggattgcaggctgtctgtccccagaccccagagcacgtccggcaccaccatgactgggctgttgaagaggaaatttgaccagctggatgaggacaactcctcggtctcctcctcctcctcttcctctgggtgccagtctcgctcctgctccccaagctcttctgtctcccgtgcctgggactcagaggaggaaggcccctgggatcagatgcccctgcctgaccgtgacttctgcggccccagaagtttcacccccctgtctatcctgaagcgggctcgccgggagcgcccaggccgtgtagcctttgatgggatcaccgtcttctacttcccccgctgccagggcttcaccagtgtgcccagccgtggtggctgtactctgggtatggcccttcgccacagtgcttgccgtcgcttctctttggctgagtttgcgcaggagcaagcccgtgcacggcacgagaagctccgccagcgcttgaaagaggagaagttggagatgctgcagtggaagctttcggcagctggggtaccccaggcagaggcagggctgccacctgtggtggatgccattgatgacgcctctgtggaggaggacttggcagtcgctgtggcaggtggccggttggaagaagtgagcttcctacagccctacccagcccggcgacgtcgagctctgctgagggcttcaggtgtgcgaaggatcgatcgggaggagaagcgggagctgcaggcactgcgccaatcccgggaggattgtggctgtcactgcgataggatctgcgaccctgagacctgcagctgcagcctggcaggcatcaagtgccagatggaccacacagcattcccctgtggctgctgcagggagggctgtgagaaccccatgggccgtgtggaatttaatcaggcaagagttcagacccatttcatccacacactcacccgcctgcagttggaacaggaggctgagagctttagggagctggaggcccctgcccagggcagcccacccagccctggtgaggaggccctggtccctactttcccactggccaagccccccatgaacaatgagctgggagacaacagctgcagcagcgacatgactgattcttctacagcatcttcatcagcatcgggcactagtgaggctcctgactgccccacccacccaggcctgcctggccctggcttccagcctggcgttgatgatgacagcctggcacgcatcttgagtttcagtgactctgacttcggtggggaggaggaggaagaggaggaagggagcgtggggaacctggacaacctcagctgcttccatccagctgacatctttggtactagtgaccctggtggcctggccagctggacccacagctattctggctgtagcttcacatcaggcgtcctggatgagaatgccaacctggatgccagctgcttcctaaatggtggccttgaagggtcaagggaaggcagccttcctggcacctcagtgccacccagcatggacgctggccggagtagctcagtggatctcagcttgtcttcttgtgactcctttgagttactccaggctctgccagattatagtctggggcctcactacacatcacagaaggtgtctgacagcctggacaacatcgaggcacctcacttccccctgcctggcctgtctccacctggggatgccagcagttgcttcctggagtccctcatgggcttctccgagccagccgccgaagccctagatccctttattgacagccagtttgaggacactgtcccagcatctctaatggagcctgtgccggtgtgaggaccaggatgtcttttcccagccccaagagacctgttgctgctttcttgtaattatggggctccccagagtctgcgtaacagtctcccactggctggctcacccacaggtgccatgtgcacactcctggttttcaaacaattctctggatttatttatttgttttaacttttctgtgctgaagagaggactggggggagggggcttcccctttcagctgcccggccccccacacccacagcttgctcttctatctccacaacgtgagcctggaagaggagaaaatgtggctcctctggagcttggcagaccacttttcggtctttgcgtgatgttccttagcccaaagacggtgagacagggctgaaatcaggtggcttctgccaccctgagccctagacccatgggtggctaaatccactggactgtgaagactataatttatttccataatttatttggagattgaggaggctttggttgcacttctttggctggtgggtaatgccaggggtggggtgggcacaggccctcaagagccccttttgccttgtagtcctacaccttgccctgcctgggctttggtgcagactaggtgtggatttgagctctgtgatctatgtctgctgcctggctcctagatggctctgtgggcaggtgctggccaaggacatcatctaggcagggggagagcctgggctgaacagctgtgaccaaaactcccttctgccccaccctgccccctccacttcctgccctctgttccatcttcccccttcccaaaggccacagcctttattccaggcccagggatgtaggagggggaaggaggaaacaggaagcccagagagggcaaagggcctacctcggggcgcgaaccatgccccagactattatctcagggctttctgggcactgcacttcagcgtggcccacctgcccatgccctgaggccagttggcgaggggtggctcctgagggtttttataccctttgtttgctaatgtttaattttgcatcataatttctacattgtccctgagtgtcagaactataatttattccatttctctctgtgtctgtgccaagaaacgcaggctctgggcctgccccttgcccaggaggccttgccagcctgtgtgcttgtgggaacaccttgtacctgagcttacaggtaccaataaagaggctttattttta

SEQ ID NO: 226743 - DNA, 777 bp, Artificial Sequence
  derived and/or modified sequence
gggcggggctgggcgcaggcagtctcccgccgccgccgccgctgccggacgcgcagagcgaggggcggctggaccgacggctgccgggccgagcgcacagagtcgcggcgcagggggcgtccccggccgggacgcgggtcgcgtcgttgtcctccgcgagcgtccggattgcaggctgtctgtccccagaccccagagcacgtccggcaccaccatgactgggctgttgaagaggaggaagggagcgtggggaacctggacaacctcagctgcttccatccagctgacatctttggtactagtgaccctggtggcctggccagctggacccacagctattctggctgtagcttcacatcaggcgtcctggatgagaatgccaacctggatgccagctgcttcctaaatggtggccttgaagggtcaagggaaggcagccttcctggcacctcagtgccacccagcatggacgctggccggagtagctcagtggatctcagcttgtcttcttgtgactcctttgagttactccaggctctgccagattatagtctggggcctcactacacatcacagaaggtgtctgacagcctggacaacatcgaggcacctcacttccccctgcctggcctgtctccacctggggatgccagcagttgcttcctggagtccctcatgggcttctccgagccagccgccgaagccctagatccctttattgacagccagtttgaggacactgtcccagcatctctaatggagcctgtgccggtgtga

SEQ ID NO: 226744 - DNA, 2593 bp, Artificial Sequence
  derived and/or modified sequence
gggcaggagagcattccagtcgagaagaccggctgcagtaaaagcgtgagggtggaaacgctcgaggctgtctgtccccagaccccagagcacgtccggcaccaccatgactgggctgttgaagaggaaatttgaccagctggatgaggacaactcctcggtctcctcctcctcctcttcctctgggtgccagtctcgctcctgctccccaagctcttctgtctcccgtgcctgggactcagaggaggaaggcccctgggatcagatgcccctgcctgaccgtgacttctgcggccccagaagtttcacccccctgtctatcctgaagcgggctcgccgggagcgcccaggccgtgtagcctttgatgggatcaccgtcttctacttcccccgctgccagggcttcaccagtgtgcccagccgtggtggctgtactctgggtatggcccttcgccacagtgcttgccgtcgcttctctttggctgagtttgcgcaggagcaagcccgtgcacggcacgagaagctccgccagcgcttgaaagaggagaagttggagatgctgcagtggaagctttcggcagctggggtaccccaggcagaggcagggctgccacctgtggtggatgccattgatgacgcctctgtggaggaggacttggcagtcgctgtggcaggtggccggttggaagaagtgagcttcctacagccctacccagcccggcgacgtcgagctctgctgagggcttcaggtgtgcgaaggatcgatcgggaggagaagcgggagctgcaggcactgcgccaatcccgggaggattgtggctgtcactgcgataggatctgcgaccctgagacctgcagctgcagcctggcaggcatcaagtgccagatggaccacacagcattcccctgtggctgctgcagggagggctgtgagaaccccatgggccgtgtggaatttaatcaggcaagagttcagacccatttcatccacacactcacccgcctgcagttggaacaggaggctgagagctttagggagctggaggcccctgcccagggcagcccacccagccctggtgaggaggccctggtccctactttcccactggccaagccccccatgaacaatgagctgggagacaacagctgcagcagcgacatgactgattcttctacagcatcttcatcagcatcgggcactagtgaggctcctgactgccccacccacccaggcctgcctggccctggcttccagcctggcgttgatgatgacagcctggcacgcatcttgagtttcagtgactctgacttcggtggggaggaggaggaagaggaggaagggagcgtggggaacctggacaacctcagctgcttccatccagctgacatctttggtactagtgaccctggtggcctggccagctggacccacagctattctggctgtagcttcacatcaggcgtcctggatgagaatgccaacctggatgccagctgcttcctaaatggtggccttgaagggtcaagggaaggcagccttcctggcacctcagtgccacccagcatggacgctggccggagtagctcagtggatctcagcttgtcttcttgtgactcctttgagttactccaggctctgccagattatagtctggggcctcactacacatcacagaaggtgtctgacagcctggacaacatcgaggcacctcacttccccctgcctggcctgtctccacctggggatgccagcagttgcttcctggagtccctcatgggcttctccgagccagccgccgaagccctagatccctttattgacagccagtttgaggacactgtcccagcatctctaatggagcctgtgccggtgtgaggaccaggatgtcttttcccagccccaagagacctgttgctgctttcttgtaattatggggctccccagagtctgcgtaacagtctcccactggctggctcacccacaggtgccatgtgcacactcctggttttcaaacaattctctggatttatttatttgttttaacttttctgtgctgaagagaggactggggggagggggcttcccctttcagctgcccggccccccacacccacagcttgctcttctatctccacaacgtgagcctggaagaggagaaaatgtggctcctctggagcttggcagaccacttttcggtctttgcgtgatgttccttagcccaaagacggtgagacagggctgaaatcaggtggcttctgccaccctgagccctagacccatgggtggctaaatccactggactgtgaagactataatttatttccataatttatttggagattgaggaggctttggttgcacttctttggctggtgggtaatgccaggggtggggtgggcacaggccctcaagagccccttttgccttgtagtcctacaccttgccctgcctgggctttggtgcagactaggtgtggatttgagctctgtgatctatgtctgctgcctggctcctagatggctctgtgggcaggtgctggccaaggacatcatctaggcagggggagagcctgggctgaacagctgtgaccaa

SEQ ID NO: 226745 - DNA, 1770 bp, Artificial Sequence
  derived and/or modified sequence
atgaccggcctgctgaagagaaagttcgaccagctggacgaggacaacagcagcgtgagcagcagcagcagcagcagcggctgccagagcagaagctgcagccccagcagcagcgtgagcagagcctgggacagcgaggaggagggcccctgggaccagatgcccctgcccgacagagacttctgcggccccagaagcttcacccccctgagcatcctgaagagagccagaagagagagacccggcagagtggccttcgacggcatcaccgtgttctacttccccagatgccagggcttcaccagcgtgcccagcagaggcggctgcaccctgggcatggccctgagacacagcgcctgcagaagattcagcctggccgagttcgcccaggagcaggccagagccagacacgagaagctgagacagagactgaaggaggagaagctggagatgctgcagtggaagctgagcgccgccggcgtgccccaggccgaggccggcctgccccccgtggtggacgccatcgacgacgccagcgtggaggaggacctggccgtggccgtggccggcggcagactggaggaggtgagcttcctgcagccctaccccgccagaagaagaagagccctgctgagagccagcggcgtgagaagaatcgacagagaggagaagagagagctgcaggccctgagacagagcagagaggactgcggctgccactgcgacagaatctgcgaccccgagacctgcagctgcagcctggccggcatcaagtgccagatggaccacaccgccttcccctgcggctgctgcagagagggctgcgagaaccccatgggcagagtggagttcaaccaggccagagtgcagacccacttcatccacaccctgaccagactgcagctggagcaggaggccgagagcttcagagagctggaggcccccgcccagggcagcccccccagccccggcgaggaggccctggtgcccaccttccccctggccaagccccccatgaacaacgagctgggcgacaacagctgcagcagcgacatgaccgacagcagcaccgccagcagcagcgccagcggcaccagcgaggcccccgactgccccacccaccccggcctgcccggccccggcttccagcccggcgtggacgacgacagcctggccagaatcctgagcttcagcgacagcgacttcggcggcgaggaggaggaggaggaggagggcagcgtgggcaacctggacaacctgagctgcttccaccccgccgacatcttcggcaccagcgaccccggcggcctggccagctggacccacagctacagcggctgcagcttcaccagcggcgtgctggacgagaacgccaacctggacgccagctgcttcctgaacggcggcctggagggcagcagagagggcagcctgcccggcaccagcgtgccccccagcatggacgccggcagaagcagcagcgtggacctgagcctgagcagctgcgacagcttcgagctgctgcaggccctgcccgactacagcctgggcccccactacaccagccagaaggtgagcgacagcctggacaacatcgaggccccccacttccccctgcccggcctgagcccccccggcgacgccagcagctgcttcctggagagcctgatgggcttcagcgagcccgccgccgaggccctggaccccttcatcgacagccagttcgaggacaccgtgcccgccagcctgatggagcccgtgcccgtgtag

SEQ ID NO: 226746 - DNA, 744 bp, Artificial Sequence
  derived and/or modified sequence
agaagaagatgcagaaccagaagagccagaggcggctggaccgacggctgcagagccgagagaaccgagagcagaagaagaggcagacccagacccggcagaggcagcagaagatgcccccccagagccagcggcctgcaggccgtgtgcccccagacccccgagcacgtgagacaccaccacgactgggccgtggaggaggaggagggcagcgtgggcaacctggacaacctgagctgcttccaccccgccgacatcttcggcaccagcgaccccggcggcctggccagctggacccacagctacagcggctgcagcttcaccagcggcgtgctggacgagaacgccaacctggacgccagctgcttcctgaacggcggcctggagggcagcagagagggcagcctgcccggcaccagcgtgccccccagcatggacgccggcagaagcagcagcgtggacctgagcctgagcagctgcgacagcttcgagctgctgcaggccctgcccgactacagcctgggcccccactacaccagccagaaggtgagcgacagcctggacaacatcgaggccccccacttccccctgcccggcctgagcccccccggcgacgccagcagctgcttcctggagagcctgatgggcttcagcgagcccgccgccgaggccctggaccccttcatcgacagccagttcgaggacaccgtgcccgccagcctgatggagcccgtgcccgtgtag

SEQ ID NO: 226747 - protein, 519 aa, Artificial Sequence
  derived and/or modified sequence
MAEERVATRTQFPVSTESQKPRQKKAPEFPILEKQNWLIHLHYIRKDYEACKAVIKEQLQETQGLCEYAIYVQALIFRLEGNIQESLELFQTCAVLSPQSADNLKQVARSLFLLGKHKAAIEVYNEAAKLNQKDWEISHNLGVCYIYLKQFNKAQDQLHNALNLNRHDLTYIMLGKIHLLEGDLDKAIEVYKKAVEFSPENTELLTTLGLLYLQLGIYQKAFEHLGNALTYDPTNYKAILAAGSMMQTHGDFDVALTKYRVVACAVPESPPLWNNIGMCFFGKKKYVAAISCLKRANYLAPFDWKILYNLGLVHLTMQQYASAFHFLSAAINFQPKMGELYMLLAVALTNLEDIENAKRAYAEAVHLDKCNPLVNLNYAVLLYNQGEKKNALAQYQEMEKKVSLLKDNSSLEFDSEMVEMAQKLGAALQVGEALVWTKPVKDPKSKHQTTSTSKPASFQQPLGSNQALGQAMSSAAAYRTLPSGAGGTSQFTKPPSLPLEPEPAVESSPTETSEQIREK

SEQ ID NO: 226748 - protein, 527 aa, Artificial Sequence
  derived and/or modified sequence
MALTVVPSFSVSGVWKRTQFPVSTESQKPRQKKAPEFPILEKQNWLIHLHYIRKDYEACKAVIKEQLQETQGLCEYAIYVQALIFRLEGNIQESLELFQTCAVLSPQSADNLKQVARSLFLLGKHKAAIEVYNEAAKLNQKDWEISHNLGVCYIYLKQFNKAQDQLHNALNLNRHDLTYIMLGKIHLLEGDLDKAIEVYKKAVEFSPENTELLTTLGLLYLQLGIYQKAFEHLGNALTYDPTNYKAILAAGSMMQTHGDFDVALTKYRVVACAVPESPPLWNNIGMCFFGKKKYVAAISCLKRANYLAPFDWKILYNLGLVHLTMQQYASAFHFLSAAINFQPKMGELYMLLAVALTNLEDIENAKRAYAEAVHLDKCNPLVNLNYAVLLYNQGEKKNALAQYQEMEKKVSLLKDNSSLEFDSEMVEMAQKLGAALQVGEALVWTKPVKDPKSKHQTTSTSKPASFQQPLGSNQALGQAMSSAAAYRTLPSGAGGTSQFTKPPSLPLEPEPAVESSPTETSEQIREK

SEQ ID NO: 226749 - protein, 507 aa, Artificial Sequence
  derived and/or modified sequence
MIWNTRNSTYIFTAPEFPILEKQNWLIHLHYIRKDYEACKAVIKEQLQETQGLCEYAIYVQALIFRLEGNIQESLELFQTCAVLSPQSADNLKQVARSLFLLGKHKAAIEVYNEAAKLNQKDWEISHNLGVCYIYLKQFNKAQDQLHNALNLNRHDLTYIMLGKIHLLEGDLDKAIEVYKKAVEFSPENTELLTTLGLLYLQLGIYQKAFEHLGNALTYDPTNYKAILAAGSMMQTHGDFDVALTKYRVVACAVPESPPLWNNIGMCFFGKKKYVAAISCLKRANYLAPFDWKILYNLGLVHLTMQQYASAFHFLSAAINFQPKMGELYMLLAVALTNLEDIENAKRAYAEAVHLDKCNPLVNLNYAVLLYNQGEKKNALAQYQEMEKKVSLLKDNSSLEFDSEMVEMAQKLGAALQVGEALVWTKPVKDPKSKHQTTSTSKPASFQQPLGSNQALGQAMSSAAAYRTLPSGAGGTSQFTKPPSLPLEPEPAVESSPTETSEQIREK

SEQ ID NO: 226750 - DNA, 1560 bp, Artificial Sequence
  derived and/or modified sequence
atggccgaagagagggtagccaccaggacacagttcccggtcagcaccgagtcacagaaacccagacaaaaaaaggcacctgagtttccaatactcgagaaacagaattggctcatacacttgcactacattaggaaagattacgaagcgtgtaaagctgtcataaaggagcagctgcaggagactcaaggactgtgcgagtacgctatttatgtccaagctcttatcttccggctggaagggaacattcaggaatcgctggagctgtttcagacctgtgcagttctgtctccccagtctgcagacaacctgaagcaagtggctcggtctctgtttcttctcggcaagcataaagctgccattgaggtgtacaacgaagctgccaaacttaaccaaaaagattgggaaatatcgcataatctgggcgtctgttacatttatctcaaacagttcaataaggcgcaggaccagttacataatgccttgaacctgaatcgacacgaccttacgtatatcatgttgggcaagatacatctcctggaaggggaccttgataaggcaattgaggtttacaagaaagctgtcgagttttcaccagagaatacagagctcttgaccactttggggctcctctatttacaactgggaatctaccagaaagcctttgaacacctaggtaatgccctgacttacgacccaactaactataaagccattctggccgcaggctcaatgatgcaaacacacggggactttgacgtcgctctcactaagtatagagttgtggcctgtgctgtgccagagagtcctccattatggaacaacattggtatgtgtttcttcgggaagaaaaagtacgttgcagccatttcttgcctaaaacgtgcgaattacctggccccatttgactggaagatactgtacaatttagggctggtacatctcacaatgcagcagtatgcaagcgccttccattttcttagcgcagccattaacttccagcctaaaatgggggagctctacatgctactcgcagtggcgctgactaacctggaggacatagagaacgcgaaacgcgcctatgccgaagcagtccacttagacaagtgtaacccactggtaaacttaaattatgcagtgctgttgtacaaccagggagagaagaagaacgccttggcacaatatcaggagatggaaaagaaggtgtccctgctcaaagataattcctcactggaattcgacagcgaaatggtggaaatggcacagaagcttggcgccgcactgcaagtgggggaagccttagtgtggaccaaacccgttaaggatcctaagtctaaacatcagaccacctccacgtcaaagcccgcctcatttcaacagcccctcggatcaaaccaggctcttggccaagctatgtcttctgccgctgcctatagaactctgccttctggagccgggggtactagtcagtttaccaagccaccctcactcccactggagcctgaacctgccgtggaatcctctcccaccgagacatctgagcaaattagagagaaatag

SEQ ID NO: 226751 - DNA, 1584 bp, Artificial Sequence
  derived and/or modified sequence
atggccctcactgtcgtccccagcttttccgtcagcggcgtttggaagcggacccaattcccggtgtcaacagagagccagaaacccagacagaaaaaggcccccgagttccctatcctggagaaacagaattggctaatccatctgcattatatacgcaaagactacgaggcctgcaaggccgtaatcaaagaacagctgcaggagacccagggcctgtgcgagtacgctatctacgtacaggccctgatttttcgactggaagggaacattcaggagagtctggagctatttcagacatgtgccgtgttgtccccccagtccgccgacaacctgaagcaagtcgccagaagcttatttctgctaggaaaacacaaggcagccattgaagtttacaatgaggcagccaaacttaaccagaaggattgggagatttcacacaacctgggcgtctgttacatttaccttaagcagttcaataaagcccaggatcagctacataatgcgctgaaccttaaccggcacgacttaacttacataatgctgggaaaaatccatctcctcgagggagatctggataaagctattgaggtgtacaaaaaagcggtagagttttctccagagaacactgaactcttgaccactctcggcttactctatttacaactgggtatctaccagaaggcctttgagcacctgggcaatgctctcacttacgatcccactaactataaggccatcttggccgcaggatcgatgatgcagacccacggcgattttgacgtcgccctgacgaaatatagggtggtcgcttgcgcggtgcccgagtcgccccccctgtggaacaatatcggcatgtgtttttttggcaaaaaaaagtatgtggctgctatcagttgcctgaaacgggcaaactacctagcacctttcgattggaagattctgtacaatctgggcctggtccacctgacaatgcaacagtatgcttccgcctttcacttcctctcagccgcaattaacttccagccgaagatgggtgaattgtacatgctcctggccgttgccctgactaatctggaggacatcgagaatgccaaacgggcatatgccgaggcagtgcacctcgataaatgcaaccctctcgtcaatctcaactatgccgtgttgttatacaaccaaggcgaaaagaagaatgccctggcacagtatcaggaaatggaaaagaaggtctctctcttgaaggataactcatcgctggagtttgattccgaaatggttgagatggcccagaaactaggcgcagccctgcaggtgggtgaagccttggtttggaccaagccagtaaaagacccaaagtctaagcatcagaccacatccacatcaaaacccgcatccttccagcagcccctgggtagtaaccaagccctcggccaagctatgagttccgccgctgcataccgcactcttccctccggagctggtggaacctcccagtttactaagcctccctccctgcccttggaaccagagccagctgtggagtcatcccctacggagacttctgagcagatccgggaaaaatag

SEQ ID NO: 226752 - DNA, 1524 bp, Artificial Sequence
  derived and/or modified sequence
atgatttggaatactcggaatagtacttatatttttactgctcccgaatttccaattctagaaaaacagaattggctcatccatttgcactacatccgcaaagattacgaagcatgtaaggccgtaatcaaggaacagctgcaagagactcagggactgtgtgaatacgctatctacgtgcaagccctgatcttccgcttggagggaaacatccaggagagcctggagctgtttcaaacgtgcgccgtgttgagccctcagtcagccgacaatctgaagcaggtggctcggtctctgtttctcctggggaagcataaggctgccatcgaagtgtacaacgaggcagctaagctgaaccaaaaggactgggagattagccacaacctgggcgtgtgttatatttatctcaagcaatttaacaaggcgcaagatcagttgcacaatgcactgaacctgaaccgccacgacttgacctatatcatgctggggaaaatccacttactggagggtgatctggacaaggcaatcgaggtttataaaaaggctgttgagttttctcctgagaataccgaactgctgactaccctgggactgctctacctccaattgggaatctaccagaaagccttcgagcacctgggtaatgctctaacctatgacccaacaaactacaaagcaatccttgccgctggtagtatgatgcagacacacggagacttcgacgtcgccctcaccaaataccgcgtggtggcgtgcgcggttcccgaatccccccctctgtggaacaacatcggcatgtgttttttcgggaagaagaagtatgtggctgccatcagctgcttgaagcgcgccaattatctcgccccattcgattggaaaattttgtataatcttgggctggtccatttgacaatgcagcagtatgcatctgcctttcacttcctgtctgcagccatcaatttccagcccaagatgggagaattgtacatgctgttagctgtagccttaaccaatttggaggatattgagaatgccaaacgcgcttacgcggaagctgtgcatttagacaaatgcaatccgctagtaaacttgaactatgccgtgcttctgtacaatcagggagagaaaaagaatgcactcgctcagtaccaagagatggaaaaaaaagttagcctcctgaaagataatagcagcctggaatttgactctgagatggtggagatggctcagaagctcggtgcagccttgcaggtgggcgaagccctggtctggactaagcctgtcaaagaccctaaaagcaagcaccagaccaccagtacctctaagcctgcttcttttcagcaaccgctcggttcgaatcaggcattaggacaggccatgtccagcgctgccgcctataggaccctcccttctggggccggggggacaagccagtttacaaaacctccgtcccttccgttagaacctgaacctgccgtggagagctcccctaccgaaacatccgagcaaatacgagaaaagtag

SEQ ID NO: 226753 - DNA, 1560 bp, Artificial Sequence
  derived and/or modified sequence
atggccgaggagcgggtggccaccaggacccagtttcctgtgtccacagagagccagaagccccggcagaagaaggcccctgagttccccatcctggagaagcagaactggctgatccacctgcactacatcaggaaggactatgaggcctgcaaggctgtgatcaaggagcagctgcaggagacccagggcctgtgtgaatatgccatctacgtgcaggccctgatcttccggctggagggcaacatccaggagagcctggagctgttccagacctgtgctgtgctgagcccccagagcgctgacaacctgaagcaggtggcccggagcctcttcctgctgggcaagcacaaggccgccatcgaggtgtacaatgaagctgccaagctgaaccagaaggactgggagatcagccacaacctgggcgtgtgctacatctacctgaagcagttcaacaaggcccaggaccagctgcacaatgccctgaacctgaacagacatgacctgacctacatcatgctgggcaagatccacctgctggagggggacctggacaaggccatcgaggtgtacaagaaggctgtggagttcagccctgagaacacagagctgctgaccaccctgggcctgctgtacctgcagctgggcatctaccagaaggcctttgagcacctgggcaatgccctgacctatgaccccaccaactacaaggccatcctggccgccggctccatgatgcagacccatggagactttgatgtggccctgaccaagtacagagtggtggcctgtgctgtgcctgagagcccccccctgtggaacaacatcggcatgtgcttcttcggcaagaagaagtatgtggccgccatcagctgcctgaagagggccaactacctggccccctttgactggaagatcctgtacaacctgggcctggtgcacctgaccatgcagcagtatgccagcgccttccacttcctgtctgctgccatcaacttccagcccaagatgggagagctgtacatgctgctggccgtggccctgaccaacctggaggacattgaaaatgccaagagggcctatgcagaggccgtgcacctggacaagtgcaaccccctggtgaacctgaactatgctgtgctgctgtacaaccagggcgagaagaagaatgccctggcccagtaccaggagatggagaagaaggtgtccctgctgaaggacaacagcagcctggagtttgattctgagatggtggagatggcccagaagctgggcgccgccctgcaggtgggggaggccctggtgtggaccaagcctgtgaaggaccccaagagcaagcaccagaccaccagcaccagcaagccagccagcttccagcagcccctgggcagcaaccaggccctgggccaggccatgagcagcgctgctgcctaccgcaccctgcccagcggggccggcggcaccagccagttcaccaagccacccagcctgcccctggagcctgagcctgctgtggagagcagccccacagagaccagcgagcagatccgggagaagtag

SEQ ID NO: 226754 - DNA, 1584 bp, Artificial Sequence
  derived and/or modified sequence
atggccctgactgtggtgcccagcttctctgtgtctggagtgtggaagaggacccagtttcctgtgtccacagagagccagaagccccggcagaagaaggcccctgagttccccatcctggagaagcagaactggctgatccacctgcactacatcaggaaggactatgaggcctgcaaggctgtgatcaaggagcagctgcaggagacccagggcctgtgtgaatatgccatctacgtgcaggccctgatcttccggctggagggcaacatccaggagagcctggagctgttccagacctgtgctgtgctgagcccccagagcgctgacaacctgaagcaggtggcccggagcctcttcctgctgggcaagcacaaggccgccatcgaggtgtacaatgaagctgccaagctgaaccagaaggactgggagatcagccacaacctgggcgtgtgctacatctacctgaagcagttcaacaaggcccaggaccagctgcacaatgccctgaacctgaacagacatgacctgacctacatcatgctgggcaagatccacctgctggagggggacctggacaaggccatcgaggtgtacaagaaggctgtggagttcagccctgagaacacagagctgctgaccaccctgggcctgctgtacctgcagctgggcatctaccagaaggcctttgagcacctgggcaatgccctgacctatgaccccaccaactacaaggccatcctggccgccggctccatgatgcagacccatggagactttgatgtggccctgaccaagtacagagtggtggcctgtgctgtgcctgagagcccccccctgtggaacaacatcggcatgtgcttcttcggcaagaagaagtatgtggccgccatcagctgcctgaagagggccaactacctggccccctttgactggaagatcctgtacaacctgggcctggtgcacctgaccatgcagcagtatgccagcgccttccacttcctgtctgctgccatcaacttccagcccaagatgggagagctgtacatgctgctggccgtggccctgaccaacctggaggacattgaaaatgccaagagggcctatgcagaggccgtgcacctggacaagtgcaaccccctggtgaacctgaactatgctgtgctgctgtacaaccagggcgagaagaagaatgccctggcccagtaccaggagatggagaagaaggtgtccctgctgaaggacaacagcagcctggagtttgattctgagatggtggagatggcccagaagctgggcgccgccctgcaggtgggggaggccctggtgtggaccaagcctgtgaaggaccccaagagcaagcaccagaccaccagcaccagcaagccagccagcttccagcagcccctgggcagcaaccaggccctgggccaggccatgagcagcgctgctgcctaccgcaccctgcccagcggggccggcggcaccagccagttcaccaagccacccagcctgcccctggagcctgagcctgctgtggagagcagccccacagagaccagcgagcagatccgggagaagtag

SEQ ID NO: 226755 - DNA, 1524 bp, Artificial Sequence
  derived and/or modified sequence
atgatctggaacaccaggaacagcacctacatcttcaccgcccctgagttccccatcctggagaagcagaactggctgatccacctgcactacatcaggaaggactatgaggcctgcaaggctgtgatcaaggagcagctgcaggagacccagggcctgtgtgaatatgccatctacgtgcaggccctgatcttccggctggagggcaacatccaggagagcctggagctgttccagacctgtgctgtgctgagcccccagagcgctgacaacctgaagcaggtggcccggagcctcttcctgctgggcaagcacaaggccgccatcgaggtgtacaatgaagctgccaagctgaaccagaaggactgggagatcagccacaacctgggcgtgtgctacatctacctgaagcagttcaacaaggcccaggaccagctgcacaatgccctgaacctgaacagacatgacctgacctacatcatgctgggcaagatccacctgctggagggggacctggacaaggccatcgaggtgtacaagaaggctgtggagttcagccctgagaacacagagctgctgaccaccctgggcctgctgtacctgcagctgggcatctaccagaaggcctttgagcacctgggcaatgccctgacctatgaccccaccaactacaaggccatcctggccgccggctccatgatgcagacccatggagactttgatgtggccctgaccaagtacagagtggtggcctgtgctgtgcctgagagcccccccctgtggaacaacatcggcatgtgcttcttcggcaagaagaagtatgtggccgccatcagctgcctgaagagggccaactacctggccccctttgactggaagatcctgtacaacctgggcctggtgcacctgaccatgcagcagtatgccagcgccttccacttcctgtctgctgccatcaacttccagcccaagatgggagagctgtacatgctgctggccgtggccctgaccaacctggaggacattgaaaatgccaagagggcctatgcagaggccgtgcacctggacaagtgcaaccccctggtgaacctgaactatgctgtgctgctgtacaaccagggcgagaagaagaatgccctggcccagtaccaggagatggagaagaaggtgtccctgctgaaggacaacagcagcctggagtttgattctgagatggtggagatggcccagaagctgggcgccgccctgcaggtgggggaggccctggtgtggaccaagcctgtgaaggaccccaagagcaagcaccagaccaccagcaccagcaagccagccagcttccagcagcccctgggcagcaaccaggccctgggccaggccatgagcagcgctgctgcctaccgcaccctgcccagcggggccggcggcaccagccagttcaccaagccacccagcctgcccctggagcctgagcctgctgtggagagcagccccacagagaccagcgagcagatccgggagaagtag

SEQ ID NO: 226756 - DNA, 1560 bp, Artificial Sequence
  derived and/or modified sequence
atggccgaggagcgggtggccacccggacccagttccccgtgagcactgagagccaaaagccgaggcagaaaaaggctcctgagtttcccattctggaaaaacaaaattggcttatccatctacactatattaggaaggactacgaggcttgtaaggccgtcataaaggagcagctacaagagacccagggactttgtgaatacgcaatatatgtgcaggccctgatctttcggctagaaggtaacatccaggagtccttggagttatttcaaacctgcgccgtgctcagcccccagtcggcagacaaccttaagcaggtcgcacgatccctgttcctcctcggcaaacacaaggctgccattgaggtctacaacgaggcagccaaactgaatcagaaggactgggagataagtcataaccttggagtctgctatatttacctgaaacagtttaacaaggcgcaggaccaattgcataacgctctcaatctgaaccggcacgatttaacctacatcatgctgggaaaaatccacctgctggaaggcgatctggataaggcaatcgaagtttacaaaaaggccgtggagttctcgcctgagaatacggagctgctcacgactctcggactcttgtatttgcaattaggcatctatcagaaggcttttgaacatctcgggaacgcccttacctacgatccaactaattataaggccatccttgccgccggttcgatgatgcagactcacggcgactttgacgtggccctgacaaagtaccgcgttgtcgcctgtgccgtgcccgagtcgccccccttgtggaataacatcgggatgtgtttctttggtaaaaagaagtatgtggcagcaatctcatgcctgaaacgggctaactacctggcaccattcgactggaagattctttataatttgggcctcgtccacttaaccatgcagcagtacgcctctgccttccacttcctgagcgctgcgattaattttcaacctaagatgggcgagctgtacatgctcttggccgtcgccctgaccaacttagaggacattgagaatgctaagcgcgcttatgcagaagcagtccatttagataagtgtaacccactggttaatctgaattacgctgtgctgctgtacaatcagggggagaagaaaaatgccttggcccagtaccaggaaatggagaagaaagtgagcctgttgaaagataatagttcgctagaattcgatagtgagatggtggaaatggcccagaagctaggagccgcccttcaggttggggaggcactggtttggaccaaacccgtcaaggacccgaagtcaaagcaccagactacatcaactagtaagcctgcgtcgttccagcagcctcttggttcgaaccaagccctgggccaggctatgagctccgcagcagcctataggaccttaccctctggggctggcggaacaagccagttcacaaaaccccccagcctgcccctggagcctgaacctgcggtggagtcatctccgaccgagacctccgaacagattagagagaaatag

SEQ ID NO: 226757 - DNA, 1584 bp, Artificial Sequence
  derived and/or modified sequence
atggccctgaccgtggtgcccagcttcagcgtgagcggcgtgtggaaacgtactcagtttccggtcagtacagaatcacaaaagcctcgacagaagaaagcccctgaatttcccatcctggaaaaacagaattggctgatccacctacactatattaggaaggattacgaagcgtgtaaggcagtgattaaggaacagctgcaagagacacagggcctctgtgaatacgcgatctacgtgcaggctctgatctttcggctcgagggtaatattcaggagagtctggagcttttccagacctgtgccgtcttgtcccctcagtctgctgacaacttaaagcaggtggccagaagtttattcctccttggtaaacataaagctgccattgaggtgtataacgaggctgcgaaactgaaccagaaagactgggagatctctcacaatctgggggtgtgttatatttacctcaaacaatttaacaaagcccaggaccagctccataatgcgcttaaccttaaccggcatgatctgacatacatcatgctggggaaaatccaccttttggaaggcgatctagataaggccatcgaagtgtacaagaaagctgtcgaatttagccctgaaaacacagaactgctcaccactctgggactgttgtatttgcagctgggtatctaccagaaggcatttgagcatctaggaaacgcgctcacctatgaccccacgaattacaaggccatcctcgccgccgggagcatgatgcagacacacggagactttgacgtggctcttacgaaataccgagtggtggcctgcgccgtccccgaatccccgcctctgtggaacaacatcggtatgtgtttcttcggaaagaagaaatatgtggctgccatcagttgtctcaaacgagcgaattacttagcccccttcgactggaagattctgtacaacctgggcctggtgcacctaactatgcagcagtacgcgtctgcctttcacttcctgtctgccgccataaactttcaacccaaaatgggggaattgtacatgctgctagccgtcgcccttaccaatcttgaggacatcgagaacgccaaaagggcatacgctgaggcggtgcacctggacaaatgtaatccattggtcaatctgaactatgccgttcttctgtataatcaaggggagaagaagaacgctttagcccagtaccaggagatggaaaaaaaagtgtcgctgctgaaggataattcctccctggagttcgatagtgaaatggtggaaatggcccaaaagctgggtgccgccctgcaagtgggagaggccctggtctggaccaaaccggtaaaagatccaaagtctaaacaccagactacctctacgagtaagcccgctagtttccagcagccgctgggttcaaatcaagccctgggccaggccatgagctctgccgccgcatataggactttaccgtcgggagccggcggcacctcacagtttacaaagccgcccagcttgcctctggagccagaaccagcagtcgaatcctcgccaacagagacttccgagcaaataagagagaagtag

SEQ ID NO: 226758 - DNA, 1524 bp, Artificial Sequence
  derived and/or modified sequence
atgatctggaacacccggaacagcacctacatcttcaccgcccccgaatttcctattctggaaaaacaaaactggctgatacacctgcactatatccgaaaagactacgaagcttgcaaggccgtgatcaaggagcaacttcaggagacacagggactttgcgaatatgcaatctatgtgcaggccctgatttttcgcctcgagggaaacattcaagagtccttggagctgtttcagacttgcgctgtcctgtcacctcaatccgcagataacctcaaacaagtggcaagaagtttatttctcttgggcaagcacaaggctgctattgaagtttacaatgaggcagcaaagcttaatcagaaggattgggagatttcacataatctgggggtgtgctatatctacctcaaacagtttaacaaggcccaagatcaactacataacgctctgaatttgaataggcatgacctcacatatattatgttagggaaaatccatctgcttgagggtgatcttgacaaagccatagaagtgtataaaaaggctgttgaattcagtcccgagaacactgagctgcttactactctgggactgctttacctgcagctaggaatttaccagaaggcctttgagcacttaggcaacgctctaacctacgacccgacgaattataaagctatcttggccgcaggaagcatgatgcaaacccatggcgattttgacgtggctctcaccaagtatcgcgtagtggcctgtgccgtgcctgagtcccccccattatggaataatatcggcatgtgcttctttggcaagaagaaatacgtggctgctatttcttgtctcaaacgggcgaattatctggccccattcgactggaagatcttgtacaacctggggctcgtgcatctgacaatgcaacaatacgcctctgctttccatttcctaagtgccgctattaatttccagcctaagatgggggaactctatatgctgctcgcagttgccttaaccaacctcgaggatatcgaaaacgccaaaagagcgtacgccgaggccgtgcacttggacaaatgtaatcctctcgtgaacctgaattacgccgtgctgctctacaatcagggagagaagaagaacgctctggctcagtaccaagagatggagaagaaggtgagcctgttgaaggataacagctctctggaattcgacagcgaaatggtagagatggcccagaaactgggggccgccctccaggtgggggaagcgctggtgtggacgaaaccagtgaaagaccctaagtcgaagcaccaaactactagcacaagtaagcccgcttccttccaacagccactggggagtaaccaggccttgggccaggctatgagttccgctgctgcataccgtacactgccatccggagcgggggggacctcacagtttacaaagcctcctagcctgccacttgagcctgagcctgccgtagagagctcgcctaccgaaaccagcgagcagattagggagaaatag

SEQ ID NO: 226759 - DNA, 1560 bp, Artificial Sequence
  derived and/or modified sequence
atggctgaggagcgcgtagcaactagaacccagtttcctgtgtcaactgagagccaaaaacccaggcagaagaaagcccctgagttccccatcttagagaagcagaattggctaattcacctccactatattagaaaagactacgaggcctgcaaagctgtaattaaagagcagctgcaggaaacccaggggttgtgtgagtacgcaatttatgtgcaggctcttatttttaggttagaaggtaatatccaagaatctctggagctctttcagacctgtgcagtgctctctccacagtcggccgacaatcttaaacaggtcgcacggtccttgtttctgctggggaaacacaaggcagcaatcgaggtgtataacgaggcagcaaaattaaaccagaaggattgggaaatatcacacaacctcggcgtctgttatatttatttaaaacagtttaataaagcccaggaccagcttcacaatgccctgaatttgaaccgacacgatctaacttacatcatgcttggcaagattcatctgctggaaggagatctcgataaagctattgaggtctacaagaaggctgtcgagttttcccctgagaacacggaactgctgacaaccctgggactgctttaccttcagctcggtatttaccagaaagcgtttgagcaccttggcaatgccctgacctacgaccccaccaactacaaggccattctggccgcagggtctatgatgcagactcacggcgactttgatgtggcactcacgaagtaccgtgtggtcgcgtgcgccgtaccggagtcacctcctctgtggaataacattggcatgtgctttttcggtaagaagaagtacgtggccgcaatatcctgtcttaaaagagcaaactaccttgcgccatttgactggaaaattctgtacaatttaggcctcgtgcacctcacaatgcagcagtacgcctcagcatttcatttcctgagtgccgcaataaacttccagcccaagatgggcgagctgtacatgttgctggccgtggccttgactaacctagaagacatagaaaatgcaaaaagagcctacgccgaagcagtgcatcttgataagtgcaatccccttgttaacctgaactatgcagtgcttctgtataaccagggagagaagaagaatgccctggcccagtaccaggagatggaaaagaaagtgagtctgctaaaggataattccagcctggagtttgacagtgagatggtggaaatggctcagaagctgggagctgcgctccaggtgggagaggcccttgtttggaccaagcctgtgaaggacccaaaatctaaacaccagacaactagcacttccaaaccagcctctttccagcaaccgctagggagcaaccaggccctcgggcaggccatgtcttcagctgccgcttacagaactctgccaagcggggctggaggaactagtcagttcactaagccaccgtctctcccgctggaaccagagccggcagtggaatcctcaccaaccgagacatctgagcagattcgtgagaagtag

SEQ ID NO: 226760 - DNA, 1584 bp, Artificial Sequence
  derived and/or modified sequence
atggccttgaccgtcgtgccctccttttctgtgtctggcgtctggaaacgcacccagtttccagttagcacagagtctcagaagcccaggcagaagaaagcacccgaattcccaatcctggagaagcagaactggctgatccatctacattacattaggaaagactatgaggcttgcaaagccgttatcaaggaacagcttcaagagacacagggactatgtgagtacgccatctatgtccaggccctgatctttagactcgagggtaatatacaagaaagcctggagttgtttcagacctgtgccgtgctgtcaccacagagtgccgacaatctgaaacaggtggcccgttctctgttccttttgggcaaacacaaggctgctattgaggtctacaacgaggcagccaagctgaaccagaaggattgggagattagtcataatctaggggtgtgttacatctacttgaagcagttcaataaggcacaggatcaactgcataacgcactgaatctgaaccggcatgatctgacttacatcatgctggggaaaatccacctgctggaaggcgacctggacaaggctatagaggtctacaagaaagccgttgagttctcccccgaaaatactgaactcctcaccacacttgggttactatatctgcagctcggaatctaccaaaaagcttttgagcatctgggaaacgccctgacatacgatcctaccaactataaggctattttggccgctggctcgatgatgcagacccacggggatttcgacgtggcgttgacaaagtatcgggtggtcgcttgcgctgtgccagagtccccccctctctggaacaacattggcatgtgctttttcggaaaaaagaagtatgtggctgccataagctgcctgaagcgggcaaactaccttgctcctttcgattggaaaatcctgtacaatttgggcctggtccaccttactatgcaacagtatgcgagcgccttccacttcttgtccgcagctattaatttccaacctaagatgggcgagctctacatgttgctagctgtcgctcttaccaacctggaagacattgagaatgccaagcgggcttatgccgaagcagtccacttggacaagtgtaacccgcttgtgaaccttaattacgctgtgttgctgtacaaccagggagaaaagaagaatgccctggcccagtaccaggagatggagaaaaaagtcagcctcctcaaagacaactcatccctggagtttgacagtgaaatggtcgaaatggctcaaaaactcggagccgctctgcaggtcggcgaggccttggtttggacaaaaccagtgaaggaccctaaatcgaagcatcagactacaagcactagcaaaccagctagttttcagcagccacttggctccaatcaggctctgggccaggccatgagctcagccgctgcctatcgtaccctcccctccggagcagggggtactagtcagtttactaagcctccgagccttcctctggagcccgagcctgctgttgaaagtagccctacagagacgtcggagcagattagagaaaaatag

SEQ ID NO: 226761 - DNA, 1524 bp, Artificial Sequence
  derived and/or modified sequence
atgatatggaacactcggaactctacttacatcttcactgcccctgaattccctattctggaaaagcagaactggctcatccacctgcattacatccgcaaggattacgaggcctgcaaagcggtgataaaagagcagctgcaagagacgcagggcctctgtgaatatgcaatttacgtccaagcactcatttttaggctggaagggaatattcaggagagcctggaactgttccagacatgcgctgttctgtctccccagtcagccgacaacctcaagcaggtggcacgctctctatttttgcttggcaaacataaagctgcaattgaggtctataacgaggctgcaaaactcaatcagaaagattgggaaattagccacaatctgggcgtttgttacatttatctcaagcaattcaataaggcccaggatcaactacataacgccctcaatctgaacagacatgaccttacttatataatgttaggcaaaatacacttgctggagggcgaccttgacaaggcaattgaagtgtacaaaaaggccgtcgagttttctcctgaaaacactgagctcctgacaaccctgggcctgttgtatcttcagttggggatttaccagaaggcatttgaacacctgggcaacgctctgacctacgatccaactaactataaagctatccttgcagccggatctatgatgcagacacacggtgattttgacgtagcgctgacaaagtaccgggttgttgcctgcgccgtgcccgaatcacctcctttgtggaataacatcggaatgtgcttcttcgggaaaaaaaagtatgtggctgcaatttcttgtcttaaacgggctaactacctggccccattcgattggaagatcctgtacaacctgggactggtgcatctcaccatgcaacagtatgcttccgcatttcacttcctctccgcagcaatcaactttcagcctaaaatgggcgaattgtatatgctgctggccgtagctcttacaaatctggaggacatcgagaacgcaaagagagcatacgcggaagccgtgcatctcgacaagtgcaaccctctggtaaacctcaactacgccgtcttgctatataatcagggcgaaaagaagaatgccctcgcccagtaccaggagatggagaaaaaggtgagtctcttgaaggacaattcatctctcgaattcgactcggagatggtggaaatggcacagaaactgggcgctgccctgcaggtgggcgaggctctagtgtggacgaagccggtgaaggacccaaaatctaaacatcagactactagcaccagcaaacctgcgtccttccaacagcccctcggatcaaaccaggccctcggacaagccatgtctagtgccgctgcttaccgaactcttccttcaggtgcaggcggtacatcgcaattcacaaagccgccatcactccctcttgagccagaaccagccgtagagagttctccaaccgagaccagtgaacagatccgggagaaatag

SEQ ID NO: 226762 - DNA, 2490 bp, Artificial Sequence
  derived and/or modified sequence
aaccgccgacttccggccgcgcagcggtgggctgagctaaaatggctgaggagagagtcgcgacgagaactcaatttcctgtatctactgagtctcaaaaaccccggcagaaaaaagctccagagtttcctattttggagaagcagaactggttgattcatcttcattatatccggaaagattatgaagcctgcaaggctgttatcaaagaacagcttcaagagactcagggattgtgtgaatatgctatctatgtccaagcattgatatttcgcctagaaggaaatatccaagaatccctagaactcttccagacatgtgcagttcttagtcctcagagtgctgataacctcaagcaggtggccagatctttatttcttttgggaaaacataaagctgccattgaagtatataatgaagcagctaaactcaaccagaaagattgggagatcagccataacctaggagtttgctacatatacctgaagcagttcaacaaggcacaagaccagttgcacaatgccctgaatcttaataggcacgatctgacttatataatgctggggaagatccacttgctggagggagacttggacaaggccattgaagtctacaagaaagcagtggagttctcaccagaaaatacagagcttcttacaactttaggattactctacttacagctcggcatttaccagaaggcatttgaacatcttggcaatgcactgacttatgaccctaccaactacaaggccatcttggcagcaggcagcatgatgcagacccacggggactttgatgttgccctcaccaaatacagagttgtggcttgtgctgttccagaaagtcctccactctggaataacattggaatgtgtttctttggcaagaagaaatatgtggcggccatcagctgcctgaaacgagccaactacttggcaccctttgattggaagattctgtataatttgggccttgtccatttgaccatgcagcagtatgcatcagcttttcattttctcagtgcggccatcaacttccagccaaagatgggggagctctacatgctcttggcagtggctctgaccaatctggaagatatagaaaatgccaagagagcctacgcagaagcagtccacctggataagtgtaaccctttagtaaacctgaactatgctgtgctgctgtacaaccagggcgagaagaagaacgccctggcccaatatcaggagatggagaagaaagtcagcctactcaaggacaatagctctctggaatttgactctgagatggtggagatggctcagaagttgggagctgctctccaggttggggaggcactggtctggaccaaaccagttaaagatcccaaatcaaagcaccagaccacttcaaccagcaaacctgccagtttccagcagcctctgggctctaatcaagctctaggacaggcaatgtcttcagcagctgcatacaggacgctcccctcaggtgctggaggaacatcccagttcacaaagcccccatctcttcctctggagccagagcctgcggtggaatcaagtccaactgaaacatcagaacaaataagagagaaataagaatagaatgaatgaccccaaaatagggttttcttgggcgaggatgtgctggattaggaaaggtgacatgacacaggcagagcagagtggcacccaccacagaatacagtgtgtgttattacgaggagccagcagttgagcctaaggtccttctacctacctggtattggcatttgaggtcggaaaccctctactgccccataagccaggaaaagtgaaaagagaacacagttcctttaagaactggcagcaaggcttgaggccttatgtatgtagctgagtcagcaaggtacatgatgctgtctgctttcaaaaggacttttctctcctagctgactgactccttccttagttcaaggaacagctgagacagacctctgctgagtagctctgtgatgacaaagccttggtttaactgaggtgatcctcaggttgtgaggtttattagtccccaaggcaaacacaaatattagattaataatccaactttaatagtatacatttaaaagaaaaaaaacaaaagccctggaagttgaggccaagcctgctgagtattgcagctgcatttgcccaaagggaatccagaacaagtccctccctgtattttgttcttgagaggggtcagtctagaagctagatcctatcaggatgaggagcagcagcccagggcttgtctggatcagcaccaacgattttaaagaaaaaaggaagagtttcttagatgagtaattgttattgaagatagtcagtgataaccactgaccagatgctatcaatacactatgtgtcctttttagaataaagattacatatcatcattcctttggggaaaattgttattcaggtataaaaacaagagatcataataaaaacctaaaagaacctatga

SEQ ID NO: 226763 - DNA, 2472 bp, Artificial Sequence
  derived and/or modified sequence
atggctcttaccgtagtgccatctttttctgtctcgggggtttggaagagaactcaatttcctgtatctactgagtctcaaaaaccccggcagaaaaaagctccagagtttcctattttggagaagcagaactggttgattcatcttcattatatccggaaagattatgaagcctgcaaggctgttatcaaagaacagcttcaagagactcagggattgtgtgaatatgctatctatgtccaagcattgatatttcgcctagaaggaaatatccaagaatccctagaactcttccagacatgtgcagttcttagtcctcagagtgctgataacctcaagcaggtggccagatctttatttcttttgggaaaacataaagctgccattgaagtatataatgaagcagctaaactcaaccagaaagattgggagatcagccataacctaggagtttgctacatatacctgaagcagttcaacaaggcacaagaccagttgcacaatgccctgaatcttaataggcacgatctgacttatataatgctggggaagatccacttgctggagggagacttggacaaggccattgaagtctacaagaaagcagtggagttctcaccagaaaatacagagcttcttacaactttaggattactctacttacagctcggcatttaccagaaggcatttgaacatcttggcaatgcactgacttatgaccctaccaactacaaggccatcttggcagcaggcagcatgatgcagacccacggggactttgatgttgccctcaccaaatacagagttgtggcttgtgctgttccagaaagtcctccactctggaataacattggaatgtgtttctttggcaagaagaaatatgtggcggccatcagctgcctgaaacgagccaactacttggcaccctttgattggaagattctgtataatttgggccttgtccatttgaccatgcagcagtatgcatcagcttttcattttctcagtgcggccatcaacttccagccaaagatgggggagctctacatgctcttggcagtggctctgaccaatctggaagatatagaaaatgccaagagagcctacgcagaagcagtccacctggataagtgtaaccctttagtaaacctgaactatgctgtgctgctgtacaaccagggcgagaagaagaacgccctggcccaatatcaggagatggagaagaaagtcagcctactcaaggacaatagctctctggaatttgactctgagatggtggagatggctcagaagttgggagctgctctccaggttggggaggcactggtctggaccaaaccagttaaagatcccaaatcaaagcaccagaccacttcaaccagcaaacctgccagtttccagcagcctctgggctctaatcaagctctaggacaggcaatgtcttcagcagctgcatacaggacgctcccctcaggtgctggaggaacatcccagttcacaaagcccccatctcttcctctggagccagagcctgcggtggaatcaagtccaactgaaacatcagaacaaataagagagaaataagaatagaatgaatgaccccaaaatagggttttcttgggcgaggatgtgctggattaggaaaggtgacatgacacaggcagagcagagtggcacccaccacagaatacagtgtgtgttattacgaggagccagcagttgagcctaaggtccttctacctacctggtattggcatttgaggtcggaaaccctctactgccccataagccaggaaaagtgaaaagagaacacagttcctttaagaactggcagcaaggcttgaggccttatgtatgtagctgagtcagcaaggtacatgatgctgtctgctttcaaaaggacttttctctcctagctgactgactccttccttagttcaaggaacagctgagacagacctctgctgagtagctctgtgatgacaaagccttggtttaactgaggtgatcctcaggttgtgaggtttattagtccccaaggcaaacacaaatattagattaataatccaactttaatagtatacatttaaaagaaaaaaaacaaaagccctggaagttgaggccaagcctgctgagtattgcagctgcatttgcccaaagggaatccagaacaagtccctccctgtattttgttcttgagaggggtcagtctagaagctagatcctatcaggatgaggagcagcagcccagggcttgtctggatcagcaccaacgattttaaagaaaaaaggaagagtttcttagatgagtaattgttattgaagatagtcagtgataaccactgaccagatgctatcaatacactatgtgtcctttttagaataaagattacatatcatcattcctttggggaaaattgttattcaggtataaaaacaagagatcataataaaaacctaaaagaacctatg

SEQ ID NO: 226764 - DNA, 1876 bp, Artificial Sequence
  derived and/or modified sequence
gcagcggtgggctgagctaaaatggctgaggagagagtcgcgacgagaactcaatttcctgtatctactgagtctcaaaaaccccggcagaaaaaagggggagttggagtgagcaatgatttggaataccagaaattcaacttatatatttacagctccagagtttcctattttggagaagcagaactggttgattcatcttcattatatccggaaagattatgaagcctgcaaggctgttatcaaagaacagcttcaagagactcagggattgtgtgaatatgctatctatgtccaagcattgatatttcgcctagaaggaaatatccaagaatccctagaactcttccagacatgtgcagttcttagtcctcagagtgctgataacctcaagcaggtggccagatctttatttcttttgggaaaacataaagctgccattgaagtatataatgaagcagctaaactcaaccagaaagattgggagatcagccataacctaggagtttgctacatatacctgaagcagttcaacaaggcacaagaccagttgcacaatgccctgaatcttaataggcacgatctgacttatataatgctggggaagatccacttgctggagggagacttggacaaggccattgaagtctacaagaaagcagtggagttctcaccagaaaatacagagcttcttacaactttaggattactctacttacagctcggcatttaccagaaggcatttgaacatcttggcaatgcactgacttatgaccctaccaactacaaggccatcttggcagcaggcagcatgatgcagacccacggggactttgatgttgccctcaccaaatacagagttgtggcttgtgctgttccagaaagtcctccactctggaataacattggaatgtgtttctttggcaagaagaaatatgtggcggccatcagctgcctgaaacgagccaactacttggcaccctttgattggaagattctgtataatttgggccttgtccatttgaccatgcagcagtatgcatcagcttttcattttctcagtgcggccatcaacttccagccaaagatgggggagctctacatgctcttggcagtggctctgaccaatctggaagatatagaaaatgccaagagagcctacgcagaagcagtccacctggataagtgtaaccctttagtaaacctgaactatgctgtgctgctgtacaaccagggcgagaagaagaacgccctggcccaatatcaggagatggagaagaaagtcagcctactcaaggacaatagctctctggaatttgactctgagatggtggagatggctcagaagttgggagctgctctccaggttggggaggcactggtctggaccaaaccagttaaagatcccaaatcaaagcaccagaccacttcaaccagcaaacctgccagtttccagcagcctctgggctctaatcaagctctaggacaggcaatgtcttcagcagctgcatacaggacgctcccctcaggtgctggaggaacatcccagttcacaaagcccccatctcttcctctggagccagagcctgcggtggaatcaagtccaactgaaacatcagaacaaataagagagaaataagaatagaatgaatgaccccaaaatagggttttcttgggcgaggatgtgctggattaggaaaggtgacatgacacaggcagagcagagtggcacccaccacagaatacagtgtgtgttattacgaggagccagcagttgagcctaaggtccttctacctacctggtattggcatttgaggtcggaaaccctctactgccccataagccaggaaaagtgaaaagagaacacagttcctt

SEQ ID NO: 226765 - DNA, 1974 bp, Artificial Sequence
  derived and/or modified sequence
aaaccgccgacttccggccgcgcagcggtgggctgagctaaaatggctgaggagagagtcgcgacgctccagagtttcctattttggagaagcagaactggttgattcatcttcattatatccggaaagattatgaagcctgcaaggctgttatcaaagaacagcttcaagagactcagggattgtgtgaatatgctatctatgtccaagcattgatatttcgcctagaaggaaatatccaagaatccctagaactcttccagacatgtgcagttcttagtcctcagagtgctgataacctcaagcaggtggccagatctttatttcttttgggaaaacataaagctgccattgaagtatataatgaagcagctaaactcaaccagaaagattggcctaggagatcagccataacctaggagtttgctacatatacctgaagcagttcaacaaggcacaagaccagttgcacaatgccctgaatcttaataggcacgatctgacttatataatgctggggaagatccacttgctggagggagacttggacaaggccattgaagtctacaagaaagcagtggagttctcaccagaaaatacagagcttcttacaactttaggattactctacttacagctcggcatttaccagaaggcatttgaacatcttggcaatgcactgacttatgaccctaccaactacaaggccatcttggcagcaggcagcatgatgcagacccacggggactttgatgttgccctcaccaaatacagagttgtggcttgtgctgttccagaaagtcctccactctggaataacattggaatgtgtttctttggcaagaagaaatatgtggcggccatcagctgcctgaaacgagccaactacttggcaccctttgattggaagattctgtataatttgggccttgtccatttgaccatgcagcagtatgcatcagcttttcattttctcagtgcggccatcaacttccagccaaagatgggggagctctacatgctcttggcagtggctctgaccaatctggaagatatagaaaatgccaagagagcctacgcagaagcagtccacctggataagtgtaaccctttagtaaacctgaactatgctgtgctgctgtacaaccagggcgagaagaagaacgccctggcccaatatcaggagatggagaagaaagtcagcctactcaaggacaatagctctctggaatttgactctgagatggtggagatggctcagaagttgggagctgctctccaggttggggaggcactggtctggaccaaaccagttaaagatcccaaatcaaagcaccagaccacttcaaccagcaaacctgccagtttccagcagcctctgggctctaatcaagctctaggacaggcaatgtcttcagcagctgcatacaggacgctcccctcaggtgctggaggaacatcccagttcacaaagcccccatctcttcctctggagccagagcctgcggtggaatcaagtccaactgaaacatcagaacaaataagagagaaataagaatagaatgaatgaccccaaaatagggttttcttgggcgaggatgtgctggattaggaaaggtgacatgacacaggcagagcagagtggcacccaccacagaatacagtgtgtgttattacgaggagccagcagttgagcctaaggtccttctacctacctggtattggcatttgaggtcggaaaccctctactgccccataagccaggaaaagtgaaaagagaacacagttcctttaagaactggcagcaaggcttgaggccttatgtatgtagctgagtcagcaaggtacatgatgctgtctgctttcaaaaggacttttctctcctagctgactgactccttccttagttcaaggaacagctgagacagacctctgctgagtagctctgtgatgacaaagccttggtttaactga

SEQ ID NO: 226766 - DNA, 1560 bp, Artificial Sequence
  derived and/or modified sequence
atggccgaggagagagtggccaccagaacccagttccccgtgagcaccgagagccagaagcccagacagaagaaggcccccgagttccccatcctggagaagcagaactggctgatccacctgcactacatcagaaaggactacgaggcctgcaaggccgtgatcaaggagcagctgcaggagacccagggcctgtgcgagtacgccatctacgtgcaggccctgatcttcagactggagggcaacatccaggagagcctggagctgttccagacctgcgccgtgctgagcccccagagcgccgacaacctgaagcaggtggccagaagcctgttcctgctgggcaagcacaaggccgccatcgaggtgtacaacgaggccgccaagctgaaccagaaggactgggagatcagccacaacctgggcgtgtgctacatctacctgaagcagttcaacaaggcccaggaccagctgcacaacgccctgaacctgaacagacacgacctgacctacatcatgctgggcaagatccacctgctggagggcgacctggacaaggccatcgaggtgtacaagaaggccgtggagttcagccccgagaacaccgagctgctgaccaccctgggcctgctgtacctgcagctgggcatctaccagaaggccttcgagcacctgggcaacgccctgacctacgaccccaccaactacaaggccatcctggccgccggcagcatgatgcagacccacggcgacttcgacgtggccctgaccaagtacagagtggtggcctgcgccgtgcccgagagcccccccctgtggaacaacatcggcatgtgcttcttcggcaagaagaagtacgtggccgccatcagctgcctgaagagagccaactacctggcccccttcgactggaagatcctgtacaacctgggcctggtgcacctgaccatgcagcagtacgccagcgccttccacttcctgagcgccgccatcaacttccagcccaagatgggcgagctgtacatgctgctggccgtggccctgaccaacctggaggacatcgagaacgccaagagagcctacgccgaggccgtgcacctggacaagtgcaaccccctggtgaacctgaactacgccgtgctgctgtacaaccagggcgagaagaagaacgccctggcccagtaccaggagatggagaagaaggtgagcctgctgaaggacaacagcagcctggagttcgacagcgagatggtggagatggcccagaagctgggcgccgccctgcaggtgggcgaggccctggtgtggaccaagcccgtgaaggaccccaagagcaagcaccagaccaccagcaccagcaagcccgccagcttccagcagcccctgggcagcaaccaggccctgggccaggccatgagcagcgccgccgcctacagaaccctgcccagcggcgccggcggcaccagccagttcaccaagccccccagcctgcccctggagcccgagcccgccgtggagagcagccccaccgagaccagcgagcagatcagagagaagtag

SEQ ID NO: 226767 - DNA, 1584 bp, Artificial Sequence
  derived and/or modified sequence
atggccctgaccgtggtgcccagcttcagcgtgagcggcgtgtggaagagaacccagttccccgtgagcaccgagagccagaagcccagacagaagaaggcccccgagttccccatcctggagaagcagaactggctgatccacctgcactacatcagaaaggactacgaggcctgcaaggccgtgatcaaggagcagctgcaggagacccagggcctgtgcgagtacgccatctacgtgcaggccctgatcttcagactggagggcaacatccaggagagcctggagctgttccagacctgcgccgtgctgagcccccagagcgccgacaacctgaagcaggtggccagaagcctgttcctgctgggcaagcacaaggccgccatcgaggtgtacaacgaggccgccaagctgaaccagaaggactgggagatcagccacaacctgggcgtgtgctacatctacctgaagcagttcaacaaggcccaggaccagctgcacaacgccctgaacctgaacagacacgacctgacctacatcatgctgggcaagatccacctgctggagggcgacctggacaaggccatcgaggtgtacaagaaggccgtggagttcagccccgagaacaccgagctgctgaccaccctgggcctgctgtacctgcagctgggcatctaccagaaggccttcgagcacctgggcaacgccctgacctacgaccccaccaactacaaggccatcctggccgccggcagcatgatgcagacccacggcgacttcgacgtggccctgaccaagtacagagtggtggcctgcgccgtgcccgagagcccccccctgtggaacaacatcggcatgtgcttcttcggcaagaagaagtacgtggccgccatcagctgcctgaagagagccaactacctggcccccttcgactggaagatcctgtacaacctgggcctggtgcacctgaccatgcagcagtacgccagcgccttccacttcctgagcgccgccatcaacttccagcccaagatgggcgagctgtacatgctgctggccgtggccctgaccaacctggaggacatcgagaacgccaagagagcctacgccgaggccgtgcacctggacaagtgcaaccccctggtgaacctgaactacgccgtgctgctgtacaaccagggcgagaagaagaacgccctggcccagtaccaggagatggagaagaaggtgagcctgctgaaggacaacagcagcctggagttcgacagcgagatggtggagatggcccagaagctgggcgccgccctgcaggtgggcgaggccctggtgtggaccaagcccgtgaaggaccccaagagcaagcaccagaccaccagcaccagcaagcccgccagcttccagcagcccctgggcagcaaccaggccctgggccaggccatgagcagcgccgccgcctacagaaccctgcccagcggcgccggcggcaccagccagttcaccaagccccccagcctgcccctggagcccgagcccgccgtggagagcagccccaccgagaccagcgagcagatcagagagaagtag

SEQ ID NO: 226768 - DNA, 1524 bp, Artificial Sequence
  derived and/or modified sequence
atgatctggaacaccagaaacagcacctacatcttcaccgcccccgagttccccatcctggagaagcagaactggctgatccacctgcactacatcagaaaggactacgaggcctgcaaggccgtgatcaaggagcagctgcaggagacccagggcctgtgcgagtacgccatctacgtgcaggccctgatcttcagactggagggcaacatccaggagagcctggagctgttccagacctgcgccgtgctgagcccccagagcgccgacaacctgaagcaggtggccagaagcctgttcctgctgggcaagcacaaggccgccatcgaggtgtacaacgaggccgccaagctgaaccagaaggactgggagatcagccacaacctgggcgtgtgctacatctacctgaagcagttcaacaaggcccaggaccagctgcacaacgccctgaacctgaacagacacgacctgacctacatcatgctgggcaagatccacctgctggagggcgacctggacaaggccatcgaggtgtacaagaaggccgtggagttcagccccgagaacaccgagctgctgaccaccctgggcctgctgtacctgcagctgggcatctaccagaaggccttcgagcacctgggcaacgccctgacctacgaccccaccaactacaaggccatcctggccgccggcagcatgatgcagacccacggcgacttcgacgtggccctgaccaagtacagagtggtggcctgcgccgtgcccgagagcccccccctgtggaacaacatcggcatgtgcttcttcggcaagaagaagtacgtggccgccatcagctgcctgaagagagccaactacctggcccccttcgactggaagatcctgtacaacctgggcctggtgcacctgaccatgcagcagtacgccagcgccttccacttcctgagcgccgccatcaacttccagcccaagatgggcgagctgtacatgctgctggccgtggccctgaccaacctggaggacatcgagaacgccaagagagcctacgccgaggccgtgcacctggacaagtgcaaccccctggtgaacctgaactacgccgtgctgctgtacaaccagggcgagaagaagaacgccctggcccagtaccaggagatggagaagaaggtgagcctgctgaaggacaacagcagcctggagttcgacagcgagatggtggagatggcccagaagctgggcgccgccctgcaggtgggcgaggccctggtgtggaccaagcccgtgaaggaccccaagagcaagcaccagaccaccagcaccagcaagcccgccagcttccagcagcccctgggcagcaaccaggccctgggccaggccatgagcagcgccgccgcctacagaaccctgcccagcggcgccggcggcaccagccagttcaccaagccccccagcctgcccctggagcccgagcccgccgtggagagcagccccaccgagaccagcgagcagatcagagagaagtag

SEQ ID NO: 226769 - protein, 655 aa, Artificial Sequence
  derived and/or modified sequence
MVTTLGPKMAAEWGGGVGYSGSGPGRSRWRWSGSVWVRSVLLLLGGLRASATSTPVSLGSSPPCRHHVPSDTEVINKVHLKANHVVKRDVDEHLRIKTVYDKSVEELLPEKKNLVKNKLFPQAISYLEKTFQVRRPAGTILLSRQCATNQYLRKENDPHRYCTGECAAHTKCGPVIVPEEHLQQCRVYRGGKWPHGAVGVPDQEGISDADFVLYVGALATERCSHENIISYAAYCQQEANMDRPIAGYANLCPNMISTQPQEFVGMLSTVKHEVIHALGFSAGLFAFYHDKDGNPLTSRFADGLPPFNYSLGLYQWSDKVVRKVERLWDVRDNKIVRHTVYLLVTPRVVEEARKHFDCPVLEGMELENQGGVGTELNHWEKRLLENEAMTGSHTQNRVLSRITLALMEDTGRQMLSPYCDTLRSNPLQLTCRQDQRAVAVCNLQKFPKPLPQEYQYFDELSGIPAEDLPYYGGSVEIADYCPFSQEFSWHLSGEYQRSSDCRILENQPEIFKNYGAEKYGPHSVCLIQKSAFVMEKCERKLSYPDWGSGCYQVSCSPQGLKVWVQDTSYLCSRAGQVLPVSIQMNGWIHDGNLLCPSCWDFCELCPPETDPPATNLTRALPLDLCSCSSSLVVTLWLLLGNLFPLLAGFLLCIWH

SEQ ID NO: 226770 - DNA, 1968 bp, Artificial Sequence
  derived and/or modified sequence
atggtgaccaccctgggccccaagatggccgccgagtggggcggcggcgtgggctacagcggcagcggccccggcagaagcagatggagatggagcggcagcgtgtgggtgagaagcgtgctgctgctgctgggcggcctgagagccagcgccaccagcacccccgtgagcctgggcagcagccccccctgcagacaccacgtgcccagcgacaccgaggtgatcaacaaggtgcacctgaaggccaaccacgtggtgaagagagacgtggacgagcacctgagaatcaagaccgtgtacgacaagagcgtggaggagctgctgcccgagaagaagaacctggtgaagaacaagctgttcccccaggccatcagctacctggagaagaccttccaggtgagaagacccgccggcaccatcctgctgagcagacagtgcgccaccaaccagtacctgagaaaggagaacgacccccacagatactgcaccggcgagtgcgccgcccacaccaagtgcggccccgtgatcgtgcccgaggagcacctgcagcagtgcagagtgtacagaggcggcaagtggccccacggcgccgtgggcgtgcccgaccaggagggcatcagcgacgccgacttcgtgctgtacgtgggcgccctggccaccgagagatgcagccacgagaacatcatcagctacgccgcctactgccagcaggaggccaacatggacagacccatcgccggctacgccaacctgtgccccaacatgatcagcacccagccccaggagttcgtgggcatgctgagcaccgtgaagcacgaggtgatccacgccctgggcttcagcgccggcctgttcgccttctaccacgacaaggacggcaaccccctgaccagcagattcgccgacggcctgccccccttcaactacagcctgggcctgtaccagtggagcgacaaggtggtgagaaaggtggagagactgtgggacgtgagagacaacaagatcgtgagacacaccgtgtacctgctggtgacccccagagtggtggaggaggccagaaagcacttcgactgccccgtgctggagggcatggagctggagaaccagggcggcgtgggcaccgagctgaaccactgggagaagagactgctggagaacgaggccatgaccggcagccacacccagaacagagtgctgagcagaatcaccctggccctgatggaggacaccggcagacagatgctgagcccctactgcgacaccctgagaagcaaccccctgcagctgacctgcagacaggaccagagagccgtggccgtgtgcaacctgcagaagttccccaagcccctgccccaggagtaccagtacttcgacgagctgagcggcatccccgccgaggacctgccctactacggcggcagcgtggagatcgccgactactgccccttcagccaggagttcagctggcacctgagcggcgagtaccagagaagcagcgactgcagaatcctggagaaccagcccgagatcttcaagaactacggcgccgagaagtacggcccccacagcgtgtgcctgatccagaagagcgccttcgtgatggagaagtgcgagagaaagctgagctaccccgactggggcagcggctgctaccaggtgagctgcagcccccagggcctgaaggtgtgggtgcaggacaccagctacctgtgcagcagagccggccaggtgctgcccgtgagcatccagatgaacggctggatccacgacggcaacctgctgtgccccagctgctgggacttctgcgagctgtgcccccccgagaccgacccccccgccaccaacctgaccagagccctgcccctggacctgtgcagctgcagcagcagcctggtggtgaccctgtggctgctgctgggcaacctgttccccctgctggccggcttcctgctgtgcatctggcactag

SEQ ID NO: 226771 - DNA, 7043 bp, Artificial Sequence
  derived and/or modified sequence
gcgcagaggcgtcacgcactccatggtaacgacgctcggcccgaagatggcggccgaatggggcggaggagtgggttactcgggctcaggcccgggccggagccggtggcgctggagcgggtctgtgtgggtccgaagcgttttactcctgttgggcgggctccgggccagcgccacatctactcccgtctccttgggcagttcccctccctgccggcaccacgtcccctctgacactgaggtcataaataaagttcatcttaaggcaaatcatgtggtcaagagagatgttgatgagcatttaagaatcaagactgtctatgataaaagtgttgaagagttgctccctgagaaaaagaatcttgtaaagaacaagcttttcccacaagcgatttcttatttagagaagacttttcaggtccgtcgacctgcgggcactatcttacttagcagacaatgtgcaacaaaccaatacctccggaaggaaaacgatcctcacaggtactgcaccggggagtgtgccgcacacacaaagtgcggccccgttattgttcctgaggaacatctccagcaatgccgggtctaccgtgggggtaagtggcctcatggagcagtgggtgtgccagaccaagaaggcatctcagatgcagactttgttctttacgttggtgctctggccaccgagagatgcagccatgaaaacatcatctcttatgcagcctattgtcagcaggaagcaaacatggacaggccaatagcaggatatgctaacctgtgtccaaatatgatctctacccagcctcaggagtttgttgggatgctgtccacagtgaaacatgaggttattcatgccctgggtttctctgctgggctgtttgcattctaccatgataaagatggaaatcctctcacttcaagatttgcagatggcctcccaccttttaattatagtctgggattatatcaatggagtgataaagtagttcgaaaagtggagagattatgggatgttcgagataataagatagttcgtcacactgtgtatctcctggtaacgcctcgtgttgttgaggaagcacgaaaacattttgattgtccagttctagagggaatggaacttgaaaatcaaggtggtgtgggcactgagctcaaccattgggaaaaaaggttattagagaatgaagcgatgactggttctcacactcagaatcgagtactctctcgaatcactctggcattaatggaggacactgggagacagatgctgagcccttactgtgacacgctcagaagtaacccactgcagctaacttgcagacaggaccagagagcagttgccgtgtgtaatttgcagaagttccctaagcctttaccacaggaataccagtactttgatgaactcagtggaatacctgcagaagatttgccttattatggtggctccgtggaaattgctgactactgccctttcagtcaggaattcagttggcatttaagtggtgaatatcagcgcagctcagattgtagaatattggaaaatcaaccagaaatttttaagaactatggcgctgaaaagtatggacctcattccgtttgtctaattcagaaatcagcattcgttatggagaagtgtgagaggaagctgagttacccagactggggaagcggatgctatcaggtttcttgttctcctcaaggtctgaaagtttgggtccaagatacttcatatttgtgtagtcgggctgggcaggtcctccctgtcagtatccagatgaatggctggattcacgatggaaacctgctctgcccatcatgttgggacttctgtgagctctgtcctccagaaacagatcctccagccactaacctgacccgagctctgccacttgatctttgttcctgttcctcgagcctggtggtcaccctctggcttctgctaggcaatctgtttcctctgctggctggatttcttctgtgtatatggcactaggaatggaaaagtggatcttcaagatattcttttatgttatgttcttgtgaacaaagcacaaagtttgagtgagtgccaacctatgcagatggtagaagtggcattcctggctttggcttggaagaattgacgaccatcagaccttgaagcagaacttcacagcagcctgtcctcatcagcaacccaaccaccttcatcagcaacccaaccaccttcatcagcaacccaaccacctcgtcagcaacccaaccacctcgtcagcaacccaaccacctcgtcagcaacccagccaccttcatcagcaacccaaccacctcatcagcaacccagccaccttcatcagcaacccaaccacctcatcagcaaaccaaccactttcatctgcaacccaaccactttcatcagcaactcaacaccttcatctgcaacccaaccaccttcatcagcaaaccaaccaccttcttcagcaacccaaccacctcatcttggagaaggagaaggaactgcaagccaccaagtcttcatttttcagggtttgtaatcttcccaaagttttcctttgaaaataggataatgggtggaattttcagagtgattacatacctcaacatttttattaacatacaacaatgggaaagttcatcatccatatactgcagtcacttaaacaacagccaattattgcaagattagaattggagatcttgtcctcaaaagtataaattgtcctttgagttatagaaaataatggaattgggatttctacatatcattattatacctattttaaatttaatggcagccaggcatggttccagctacttgggaggctgaggcaggaggatcgcttgagcccaggagttcaaggctgcagtgagctatgattgcaccactgtattccagcctgcacgatagagttagaccctgtatcttaaaaaaaaaaaaattaatggctggtatatagtaaacttaattcactgttcccattgttctaaagaatttttttaaataatgtttcattaaatcttatgatttaaccgtgcttgccctttttgccagctatgtggcagtttacggcagaactgctgtcagtgtgctggtagccctctattcatccctcctcagagcccagcttccagaactgctatcactgtgctggtagccctctgtattcatccctcttcagagctcagcttctggttgtattctccatgagtttaataatgacatgaaaaaatgtggaagccgagagagtaaaatactctgccctgtaaaaacatggaagacatgcaaacagaaaaaaaataattgtattgttttagataatacttaagacaactgtgaaacaacaaaaacacaactattcctttgtgaccgatgaagataaaaagaaattctggtaaagacgggtatgcagttttttaaaatgggttaagaaattgttgcagaagaatttctaacatctgaaaatggttttatgtttaagaaggatggtctgaattgtgtactaatagcaaggtataagtttggtgtagagcctatccagtagcgtccactgtaccacttttaagtaagactcagtccacagaagctggaagattgccttcgctttaaatatcctttaccttctgcatttgacactcctcctgttactacatagattccggtccccagaagcaattttacactggtactagagcttaccagccccatttagtaatttttaatggctagatgaggtttaacaagaatatgaaaagaaaaaagaaaaaatatattcatgaatgataggcgatgcccattctttctctcaagctaatgaagtcctatggcattctaaccacaaccctcggacagactcctcctattcctccatggcattgtaaccacaaccctcggacagactcctcctattcctccatggcattgtaaccacaaccctcggacagactcctcctactcctccatggcattgtaaccacaaccctcggacagactcctcctactcctccatggcattgtaaccacaaccctcggacagactcctcctactcctccatggcattgtaaccacaaccctcggacagactcctcctattcctccatggcattgtaaccacaaccctcggacagactcctcctattcctccatggcattgtaaccacaaccctcggacagactcctcctattcctccatggcattgtaaccacaaccctcggacagactcctattcctccatggcattgtaaccacaaccctcggacagactcctcctattcctccatggcattgtaaccacaaccctcggacagactccttctgttcctcctttcctcgtccttccctgcttttcgtccattcagcatatagctattcagtactccattgaagaaattatgctaagtgagcaaagcaacataattactaagaattaattctgattatttggcactagagccaacagcaaccccagcacagaggaaagtcgcttttttttcaaatgcataaatttaaagtatgtatttgcatgcagttttaaatgggaggtatttgtcattgtgaaaagctgggaatctcaaacatagtcaacttaactaaaaagaagctaatacaggttgagcattcctaatccaaaaatccagaatccaaattgctccaaaatctgaaactttctgaatgctgacctgatactacaagtagaaaattccacatacaagtacttaacacaaactttgtttcatgcacaaactactaaaaatattgtataaaattaccttcaggcagtgtgtgtagttatatatgaaacatgaatttcatgtttagacttgggtccatgcccaagatacctcattaggtatctgtaaatatccgaaatccaaaaaaaagtctgaaatctgaaacacttctggtcccaagcatttcagtaagtgatgctcaacctgcgtaatggtctgcgggccagtgctcattttctgcctatgttgtacatactttaaattgtgtaaattaaaagtcaaagcaaagagtctatttttaaagaaacttacaataatctaaacatatacttcttatgattatgaatcatcctgcaaagctgaatgaagaattttaccaaaaatacaatgaattaatcatatatttgagagtcacagtgataggttcgactatattttgactgttgtgtagtggcaccgtttaggtagtattgtttctgagcatggtgctttttatacttgaaatatatttttgctttattttttattgatataattatatttgcactaatggctttctgaagaaaatattatagatgacattttttgtatatatatttattaagcttgggaacctggtcgcccagtgttttctctggacaaatgtgaaactggataaagtatggataaagtcttgagttcctcagggtaactgtgttgatgtctcccgtcctcttcagtaaggcttgaatatgattttactcatcattgattctgcatagtgtacccagcaagacttagaaggacactgaacctgtcagagattttaagaggcacattttagtcactttgaatatggtagtggtgggcgcggtgactgaagcctgtaatctcagcacttcgggaggccaaggcaagcagatcacgagatcaggagtttgaggttacagtgagctgatcgcaccactgcactgcagcctggatgacagagtgagactttcttgggaaaaaaaaaaatgacagtgaagcagacttttagaatccgagatgtcattgcagaattattggtataaaattcagctgcaaagtgaagaaattgaaatggcccacacgttgatatcctgtggcaggttatacccttcatgttagcaaagacgaagccacgtcgctgtgttaagagggacaggctgggccggctgcagctgtagtggaagtgagggacacagggaaggaatggggagcagcaatttggggacagtagactggagtcactttctgactcaaaaagggtcaagtacttattaaaaactatcttggttttctgttcagacttaggctcattttgatcattttaaggtcccagttgtcaaaaatatcaagtgaatttgtctcaggttttcagaaacaaaatttacaggaaggaagcaaaagccatgtcagtagccttgagctgacagctttaaagaaactggcaaacaggtaggttgtcctcatatagatccttccagtattctgaaaaacatccttttatttcttaaaaccagtaacccttacatttttcctataggatagttatttttgttgagatcaaatagacattctataaatgttataaattatgcttgcagttactcagcctatctaggcttaaggtttatcaatatttgaagttgaaacatcatcttatgaggtttagttttaggaagataaataaatatatcaaagtatttcataaagttgtatcaatgttccttctaacattagaagacttactgactgaggccatctgtgaacgactaggtgatctcagaatccttccagctctaataccctctgactaacactcacccagaattgctgtctgtgctggctgtgatctgcctccaggagcatacgccatcctgcgtgctgtgtccatcacagtgtctgtgctcggtgccttaccactgtccgtgtccttggacgctgactggacagagaggagcctgtctctcagggcacatgagtcgtcgtggcaggaggagacgggcctcagtcacagtgtcacagacccttgtcacagtggacactagtcattcctgccatgtccttgcagcccaggaggactaaaaagattttaatgaagtctgtgttactcattctgaagaaaagaacttacctgagaggagtaatatttttttaatatatattgggtcagggacagggatggagtggttgttttatgtttacatttttaataagtaaaatagaagatttaagaactaatatttatggtattgaactttaagtgtgatatattccttagaaaaacacaactttaataaaaatggaaactaa

SEQ ID NO: 226772 - DNA, 1968 bp, Artificial Sequence
  derived and/or modified sequence
atggtgactaccctcgggcccaaaatggctgctgagtggggggggggcgttggctacagcggctctggcccgggtcgctcaaggtggcggtggagcggctccgtgtgggttcggagtgttttactgttgttgggcggattgagagcttccgctacctctactcccgttagcctggggagctcacctccgtgtcgtcaccatgtgccctccgatacagaagtaattaacaaggtccacctaaaagccaatcatgtggtgaagagggacgtggacgaacacctgaggatcaaaactgtgtacgataagtcagtggaggagctgctccctgagaagaaaaatctggtcaaaaataaattattcccccaggcaatttcatacctggaaaaaaccttccaagtgcgtcggcccgctggcacgatcttactcagtagacagtgtgccaccaatcagtatctcagaaaagagaatgacccacatcgctactgtacaggtgagtgtgctgcccacacaaaatgcggtcccgtgatagttcctgaggagcacttacagcagtgccgggtgtaccgcggcggaaagtggccacatggcgccgtgggagtccccgatcaggaaggtatcagtgatgctgatttcgtgctatacgtcggcgctctggctacagaacgttgctcccacgagaatattataagctatgccgcatactgtcagcaggaggctaacatggatcgccctattgcaggatacgcgaacttgtgtcctaatatgatctcaacacagccacaagagttcgtgggaatgctgtctactgtgaagcatgaagtgattcacgcactcggattcagtgccgggttgttcgccttttatcatgataaagatggcaatcccctgacgtcccggtttgctgatggattaccgccgtttaactatagtctcgggctataccagtggagtgataaggtggtgaggaaagtggagcggctgtgggacgtgcgggataacaaaatagtgcgtcacacggtctacctgctcgtgacaccgcgcgtcgtggaggaagctagaaagcatttcgactgcccagtcctggaaggaatggagctggagaaccaaggaggagtcgggacagagctgaatcattgggaaaaacgcctgctggaaaacgaagcaatgaccgggtctcatacccaaaatagagttttgagccggatcacgctggctctgatggaagacactggtcggcagatgctttcaccgtactgtgatacgttaaggtctaaccctttgcagctcacatgccgccaggaccagagagccgttgcggtgtgcaatcttcaaaaatttcctaaacctcttccacaagaatatcagtacttcgacgagctttccggaattcccgctgaagacctcccatactacggcgggtccgttgaaatcgcggactactgcccgttctctcaagagtttagttggcacctgagtggcgaataccagcggagctctgactgccgcatcctggaaaatcaaccggagatcttcaaaaactacggcgctgaaaagtacgggccccactcagtgtgcctgatccagaaatctgccttcgtaatggaaaagtgcgaacgaaaattgtcttaccctgactgggggtccggctgttatcaggtgagttgttccccacagggcctgaaggtgtgggtacaggacacctcctatctttgcagtagagcaggtcaagtgctgcccgtgagcattcagatgaatggctggatccatgatggaaacctgctttgtccttcctgttgggacttttgcgagctctgtcctccagaaactgaccccccagccacaaacttgactcgcgctcttcccttagacctgtgctcttgttcaagctctctggtggtgactctatggctcctgctcggcaacctttttcccttactcgcaggcttcttgttgtgcatttggcattag

SEQ ID NO: 226773 - DNA, 1968 bp, Artificial Sequence
  derived and/or modified sequence
atggtgaccaccctgggccccaagatggctgctgagtggggcggcggcgtgggctacagcggcagcggccctggccgcagccgctggcgctggagcggctctgtgtgggtgcgctctgtgctgctgctgctgggcggcctgcgggccagcgccaccagcacccctgtgtccctgggcagcagccccccctgccgccaccacgtgcccagcgacacagaggtgatcaacaaggtgcacctgaaggccaaccacgtggtgaagagagatgtggatgagcacctgcgcatcaagacagtgtatgacaagtctgtggaggagctgctgcctgagaagaagaacctggtgaagaacaagctgttcccccaggccatctcctacctggagaagaccttccaggtgcggcggcctgctggcaccatcctgctgagccggcagtgtgccaccaaccagtacctgaggaaagaaaatgacccccaccgctactgcacaggagaatgtgccgcccacaccaagtgtggccctgtgattgtgcctgaggagcacctgcagcagtgccgggtgtaccggggcggcaagtggccccatggagctgtgggcgtgcctgaccaggagggcatcagtgatgctgactttgtgctgtatgtgggcgccctggccacagagcgctgcagccatgagaacatcatctcctatgctgcctactgccagcaggaggccaacatggaccggcccatcgccggctacgccaacctgtgccccaacatgatcagcacccagccccaggagtttgtgggcatgctgagcacagtgaagcatgaggtgatccacgccctgggcttctctgctggcctgtttgccttctaccatgacaaggatggcaaccccctgaccagcagatttgctgatggcctgccccccttcaactacagcctgggcctgtaccagtggagcgacaaggtggtgaggaaggtggagcggctgtgggatgtgcgggacaacaagatcgtgcgccacacagtgtacctgctggtgaccccccgggtggtggaggaggccaggaagcactttgactgccctgtgctggagggcatggagctggagaaccagggcggcgtgggcacagagctgaaccactgggagaagaggctgctggagaatgaggccatgacaggcagccacacccagaacagagtgctgagccgcatcaccctggccctgatggaggacaccggccggcagatgctgagcccctactgtgacaccctgcggagcaaccccctgcagctgacctgccggcaggaccagagagctgtggccgtgtgcaacctgcagaagttccccaagcccctgccccaggagtaccagtactttgatgagctgagcggcatcccagctgaggacctgccctactatggaggctctgtggagattgctgactactgccccttcagccaggagttctcctggcacctgagcggggagtaccagaggagcagtgactgccgcatcctggagaaccagcctgagatcttcaagaactacggggctgagaagtatggcccccacagcgtgtgcctgatccagaagagcgcctttgtgatggagaagtgtgagaggaagctgagctacccagactggggcagcggctgctaccaggtgtcctgcagcccccagggcctgaaggtgtgggtgcaggacaccagctacctgtgcagccgggccggccaggtgctgcctgtgtccatccagatgaatggctggattcatgatggcaacctgctgtgccccagctgctgggacttctgtgagctgtgccccccagagacagatcctccagccaccaacctgacccgggccctgcccctggacctgtgcagctgcagcagcagcctggtggtgaccctgtggctgctgctgggcaacctcttccccctgctggccggcttcctgctgtgcatctggcactag

SEQ ID NO: 226774 - DNA, 1968 bp, Artificial Sequence
  derived and/or modified sequence
atggtgaccaccctgggccccaagatggccgccgagtggggcggcggtgttgggtattccgggtctggacccggccgaagccggtggcgctggagcggaagtgtgtgggtcaggtctgtgttgctcttgctcggcggactaagggcttccgccacttccacacctgtctcccttggaagttctcccccttgccgacatcatgtaccctcggacacagaagtaatcaataaggtgcacctcaaggcaaatcacgttgttaagcgagacgtcgacgaacacctgagaatcaaaaccgtgtacgacaagagtgtggaagaactccttcccgaaaaaaaaaacctggtgaaaaacaagctttttccacaagcaatcagctacttagagaagacgtttcaggttcggagacctgctgggaccatcttacttagtagacagtgtgctacaaatcaatatctccggaaggaaaacgatccacatcgctattgcaccggcgagtgcgcggcccacacgaaatgcggacctgtgatcgtacccgaagaacacctgcagcaatgtagagtgtatagaggaggcaagtggccccatggtgcagtaggagtccccgaccaggaaggcatctccgatgccgattttgttctgtacgtgggggccctggccacagagcggtgcagccacgagaacataatctcctatgctgcctactgccagcaggaagcaaacatggaccggcccatcgccgggtatgccaacctgtgtccaaatatgatcagtacccagccccaagaattcgtcggcatgctctccaccgtgaaacacgaggttattcatgctcttggattttcggctggactttttgccttttatcacgacaaggatggtaacccccttacaagccggtttgccgatggcctccctccatttaactactcacttgggctctatcagtggtctgacaaggttgtgagaaaagttgagagactgtgggatgtgagagacaataaaatcgtgcgacatacagtttatctgttagtgactcccagggtagttgaggaagcgcggaagcactttgactgtcccgtgcttgagggaatggagctggaaaaccagggcggggtcggtaccgagctcaaccattgggagaaaaggctcctcgagaatgaagcgatgacaggctcccacacgcagaacagggttctcagccgaatcactctagcgttgatggaggacacagggagacagatgctgagcccctactgcgacactctgcgctccaatcctcttcagctgacctgcaggcaggaccagcgggctgtggctgtctgcaatttgcagaaatttcccaaaccactgcctcaggagtatcaatactttgatgaactctccggcattcctgcagaggacctgccttactatggcggcagtgttgaaatcgctgattattgccccttttcacaggaattcagttggcatctcagtggcgagtaccaacggtcaagcgactgtcgcatcttggagaaccagccagagatcttcaaaaactatggggccgagaaatatggcccccactccgtctgcctcatccagaaatctgccttcgtcatggagaaatgcgaacggaagctttcttaccccgactgggggtcaggatgctatcaggtctcatgttctccccaaggccttaaagtctgggtgcaggatacatcctatctttgctcaagggcaggccaggttctgcccgtctccatccagatgaacgggtggatccatgacgggaatctgctttgtccctcttgttgggacttttgtgagctttgcccacctgagaccgacccccccgcaacaaacctcacacgagccctgcctctggacctctgttcttgcagttcatccctcgtggtgacgctttggcttttgctcggcaacctctttccactgttggcaggttttttgctgtgcatctggcactag

SEQ ID NO: 226775 - DNA, 1968 bp, Artificial Sequence
  derived and/or modified sequence
atggtgaccactttggggcctaaaatggccgctgaatggggcggaggtgtgggttactcaggctccggccctgggcgaagccggtggcgatggtcagggagcgtatgggttaggtccgtcctcctgcttttggggggacttagggcttcagcaacctccacgcccgtatccctgggatcatccccaccatgtagacaccacgtgcctagcgataccgaggttatcaataaggtgcacttgaaggctaaccacgtggttaagcgggacgtggatgagcacctccggataaagacagtctacgataagtccgttgaggaactactgcccgaaaaaaaaaatttggttaagaataagttatttccccaggccattagctacctcgaaaaaacttttcaggtgaggaggccagccggtaccattcttctcagtagacagtgtgccacaaatcaataccttcggaaagaaaacgacccgcaccggtactgcactggtgaatgtgccgcacacaccaagtgtggacccgtaatagtccccgaggagcacctgcagcagtgtcgggtgtacagggggggaaaatggccccatggcgctgtcggagtgcccgatcaggagggcatcagcgatgccgatttcgtgctctacgtgggcgcactggcaacggagcgctgtagtcacgaaaatatcatttcttatgccgcttattgtcaacaggaggctaatatggatagacctatcgcaggatatgcaaatctctgtccgaatatgatatctactcagccacaagaatttgttggaatgctctccaccgtcaaacatgaggtgatccatgccttgggcttctctgccggtctttttgcattctatcacgacaaggacgggaaccctctgacttcgcggttcgccgacggactgcccccttttaattatagcctaggcctgtatcagtggagtgacaaagtggtaaggaaggtggagcggctctgggatgtccgcgacaacaaaatagtgcggcacacagtatatctgctcgtgactcctagggttgtagaggaagctcgtaaacattttgattgccccgtcctggaaggtatggaactcgagaaccagggcggagtagggaccgagcttaatcactgggagaagcggctgctggagaacgaagcgatgacagggtcacacacccagaaccgagtactgtctaggatcaccctggccttgatggaggatacgggacggcagatgctgagcccctactgcgataccttgaggagtaaccccctccagcttacttgcagacaggaccagagggccgtcgctgtctgtaatctccagaaatttccaaagcctttacctcaggagtatcagtacttcgacgaactgagtggcatccctgcagaagatctgccctactacgggggtagtgtagagatagctgattattgtccgttctcccaggagtttagctggcatttaagtggggagtatcagcgatctagcgattgccggatcctcgaaaaccagccggagattttcaagaattacggcgctgaaaagtacggaccccactccgtttgtctcatccagaagtccgcgttcgtgatggaaaaatgcgaacgcaagttgtcataccccgactggggctccggttgttatcaggttagctgctctcctcaaggtttgaaagtatgggttcaggatacatcatatctgtgcagccgtgccggacaggttctgcctgtgagcattcagatgaacggttggatccatgatgggaacctcctgtgccccagctgttgggacttctgcgagctttgtcctcctgagaccgaccctcccgctaccaatctaaccagagcactgcccctggacctgtgctcctgctctagctcgcttgtggtgactttatggctccttctgggaaatttgtttcctctgctggccggttttctactgtgcatctggcactag

SEQ ID NO: 226776 - DNA, 852 bp, Artificial Sequence
  derived and/or modified sequence
atgcagactgatagtttgtcaccctcccctaatcctgtcagccccgtccccctgaataatcccactagcgctccgcgatatgggactgttattccaaacaggatcttcgttggcgggatcgatttcaagaccaatgaaagcgacctgaggaagttctttagccaatacggatcagtcaaggaggtgaaaattgtcaatgacagggctggtgtttctaaaggttatggcttcgttaccttcgaaacacaagaggacgcacagaagatactccaggaggctgaaaagctgaactataaagataaaaagctgaacatcgggcctgccattcgaaaacagcaggtcggcattccgcggagcagcattatgcccgctgccggcactatgtatctgaccacctccacaggatatccctacacctaccataacggtgtcgcctactttcacactccggaggtcacaagcgtcccccctccatggccaagccgtagtgtctgctcttctccagtgatggtcgctcagcccatttaccagcagcccgcctaccattatcaggccactacgcagtatctccctggccagtggcagtggtcagttcctcaaccctctgctagtagcgcccccttcctgtatttgcagccttctgaggtaatttaccagcctgtggaaattgcgcaggatggtggatgtgtgccacctcccctgtcactgatggagacgagcgtgcctgaaccatattctgatcatggagtccaggctacctaccaccaagtctacgcgcctagcgccatcaccatgccagcaccagtgatgcaaccagaacctataaagactgtttggtcaatacattattag

SEQ ID NO: 226777 - DNA, 852 bp, Artificial Sequence
  derived and/or modified sequence
atgcagaccgactctctgtccccttcccccaatcccgtttcaccagtgccccttaacaaccccacctcagcaccaagatacggcaccgtgatccctaaccgaattttcgtgggcggtatagactttaaaaccaacgagagtgacctgcgaaagtttttttctcagtacggttctgtgaaggaagttaaaatcgttaacgatcgggctggcgtcagcaaagggtatgggtttgtgaccttcgagacacaagaggatgcccagaagatactgcaagaggccgagaagcttaattacaaggataaaaagctgaacataggccccgcaatcagaaagcaacaagtgggtatccctagatcatccataatgcctgcagcaggaactatgtacctcacaacctctacgggttacccatacacctatcacaatggcgtcgcctattttcacacaccagaagtgactagtgtccctccgccctggccatcacggagtgtgtgcagcagtcctgtaatggtcgctcaacctatctatcagcaacccgcgtatcactatcaggctactacacaatacctgcccggccagtggcagtggagcgtgccgcagccctcggcgtcgtcagctcctttcctgtacctgcagccctctgaagtcatttaccagcctgtggagattgcccaagacggcgggtgcgtgccaccaccattgtccctgatggaaacaagcgtgcctgagccgtacagcgatcacggagtgcaggctacttatcatcaagtctatgctccatctgcaattacaatgccagcccctgtgatgcagccagaaccaataaaaacagtttggtcgattcactactag

SEQ ID NO: 226778 - DNA, 852 bp, Artificial Sequence
  derived and/or modified sequence
atgcagacagacagcctgagccccagccccaaccctgtgtcccctgtgcccctgaacaaccccaccagcgcccccaggtatggaacagtcatccccaaccgcatctttgtgggcggcatcgacttcaagaccaatgaaagtgacctgaggaagttcttcagccagtatggctctgtgaaggaggtgaagatcgtgaatgacagagctggggtgtccaagggctacggctttgtgacctttgagacccaggaggatgcccagaagatcctgcaggaggccgagaagctgaactacaaggacaagaagctgaacatcggccctgccatcaggaagcagcaggtgggcatccccaggagcagcatcatgcctgctgctggcaccatgtacctgaccaccagcacaggctacccctacacctaccacaacggggtggcctacttccacaccccagaggtgacctctgtgcccccaccctggcccagccgctctgtgtgcagcagccctgtgatggtggcccagcccatctaccagcagcctgcctaccactaccaggccaccacccagtacctgcccggccagtggcagtggagcgtgccccagcccagcgccagcagcgcccccttcctgtacctgcagcccagcgaggtgatctaccagcctgtggagatcgcccaggacggcggctgtgtgcccccacccctgagcctgatggagacctctgtgcctgagccctacagcgaccacggcgtgcaggccacctaccaccaggtgtatgcccccagcgccatcaccatgcctgcccctgtgatgcagcctgagcccatcaagacagtgtggagcatccactactag

SEQ ID NO: 226779 - DNA, 852 bp, Artificial Sequence
  derived and/or modified sequence
atgcagaccgacagcctgagccccagccccaaccccgtgagccccgtgcccctgaataacccaacatctgcacctaggtacggcactgtgatcccgaatagaatctttgtggggggcatcgactttaaaacaaatgaatctgatttgagaaagtttttttcacaatatggaagtgtgaaagaggtcaagatcgttaacgacagggccggagtttcgaagggttacgggtttgtcacattcgaaacgcaggaggacgcacaaaagatactgcaggaggcagaaaaactgaactacaaggacaaaaaactaaacataggtcccgctattcggaagcagcaagtgggcatccctaggagcagtattatgcccgccgcaggcaccatgtacctgactacatcaactggctatccttatacgtaccataacggcgtcgcttactttcacacacccgaagttacgtcggttccacctccctggcccagccggtccgtgtgcagttctcccgtcatggttgcccagcctatataccagcagcctgcgtaccactatcaggctactacacaatatcttcctgggcagtggcagtggagcgtaccacagccttccgcctcctcagccccgttcctgtacctgcaaccctcagaagttatttatcaaccagtcgagatcgcacaggacggaggttgtgtcccccctcccttgtcccttatggaaactagcgttcccgaaccttattcagaccatggggtccaggcaacctaccaccaagtgtacgctccctctgccattactatgccagcccccgtgatgcaacccgagcctatcaagaccgtctggtcaattcactactag

SEQ ID NO: 226780 - DNA, 852 bp, Artificial Sequence
  derived and/or modified sequence
atgcagaccgacagcctgagccccagccccaaccccgtgagccccgtgccgttaaacaaccccacgtcagcaccccgatacggcactgtgatccctaatcggatttttgtgggcggtattgacttcaagactaacgaatccgacctccgcaagttcttttctcaatatggttccgtgaaagaggttaaaatcgtgaacgacagggccggtgtctcgaagggctacggctttgtgaccttcgagactcaggaagatgcccagaagatcctgcaagaagctgagaagcttaattacaaagacaagaaactgaatattggaccagcaatcagaaaacaacaggtaggtattcccaggtctagtattatgccagcagccggcaccatgtatctgacgacctccaccggatacccatatacctatcataatggggtcgcatacttccatactcctgaggtgacatcagttcctcccccatggcctagtcgctctgtatgctctagtccagtcatggtggcgcagcctatttaccagcagccagcctatcattaccaagctactacccagtacttaccaggacagtggcagtggagcgtgccgcagcccagcgcctcctccgccccttttctgtacctgcagcccagtgaagttatctatcagccagtcgagatcgctcaggatggtgggtgtgtgccaccacctctctccctgatggagacgagcgtcccagagccgtattcagaccacggtgtccaagccacttaccaccaagtctacgctccaagcgcaattaccatgcccgcccccgtgatgcagcccgaacctattaaaacagtgtggagcatccattattag

SEQ ID NO: 226781 - DNA, 852 bp, Artificial Sequence
  derived and/or modified sequence
atgcagaccgattccctgtctcccagcccaaatcctgtttctcccgtgccactgaacaatccaacctctgccccacgatacggcacagttatcccgaatcgcatatttgtggggggtatcgactttaaaacaaacgagtcggacttgagaaaattcttttcccagtacggtagcgttaaggaggttaaaattgtcaacgatagagctggagtgagtaagggttatgggtttgtgactttcgagacgcaggaggacgcccagaaaatcctgcaggaggcagaaaaactaaattataaggacaaaaagctgaacatcggaccagcaattagaaaacagcaggtgggcattccccgaagctcgataatgcccgcagcagggacaatgtacctcactacgagcacaggttacccctacacttatcataatggcgtggcgtacttccatactcctgaggtgacctcagttccaccaccctggccatcacgatcagtatgcagctccccagtaatggttgcgcagcccatttaccaacagcccgcttatcattatcaggcaaccacgcagtacctgcctggccagtggcagtggtcagttccccaaccatccgcgtcaagcgctccattcctttatctccagccctctgaggtgatatatcagcctgtggaaatcgctcaggacggcggttgcgtgcctcctccgctgtctcttatggagacttcagtgccagagccctattcagatcatggcgtccaagccacgtatcaccaggtgtacgcaccttcagcaatcacaatgcccgcacccgtgatgcagcctgagcccattaaaaccgtgtggagcatacattactag

SEQ ID NO: 226782 - DNA, 852 bp, Artificial Sequence
  derived and/or modified sequence
atgcagaccgactccttgtctccttctccgaaccccgtgagccctgtgcctctgaataaccccacatctgccccaaggtacggcactgtgattcctaacaggatttttgtggggggtatagattttaagaccaacgagagcgatctgcgaaagtttttttctcagtacggcagcgtgaaggaggtcaagatagttaatgatcgcgctggagtgagtaaaggctacgggttcgtgacctttgagacgcaggaggatgcacaaaaaattcttcaggaagctgagaaacttaattacaaagacaagaaattgaatatagggccagctatacgcaagcagcaagtggggatccccaggagtagtatcatgcccgcagcaggtactatgtacctgaccacgtcaacaggttacccgtatacctaccacaacggcgtagcttattttcatacacctgaggtgaccagtgtccccccaccgtggcccagcagaagtgtgtgctcctctccggtgatggtggcccagccaatctaccagcagcctgcctaccactaccaagccacaacccagtacctgcccggtcagtggcaatggtcagtgccccaaccttccgcatcaagtgcaccctttctatacctgcagccttctgaggttatctaccaaccagtcgagatcgcacaggacggaggttgcgtccccccaccgctgtcgctgatggagacctcagtgccagaaccgtactcagaccatggagtgcaggccacgtaccatcaggtctatgctcccagtgcgattactatgcccgctccagtcatgcaaccagaaccgatcaaaacagtgtggagcatccattattag

SEQ ID NO: 226783 - DNA, 852 bp, Artificial Sequence
  derived and/or modified sequence
atgcagaccgacagcctgagccccagccccaaccccgtgagccccgtgcccctgaacaaccccaccagcgcccccagatacggcaccgtgatccccaacagaatcttcgtgggcggcatcgacttcaagaccaacgagagcgacctgagaaagttcttcagccagtacggcagcgtgaaggaggtgaagatcgtgaacgacagagccggcgtgagcaagggctacggcttcgtgaccttcgagacccaggaggacgcccagaagatcctgcaggaggccgagaagctgaactacaaggacaagaagctgaacatcggccccgccatcagaaagcagcaggtgggcatccccagaagcagcatcatgcccgccgccggcaccatgtacctgaccaccagcaccggctacccctacacctaccacaacggcgtggcctacttccacacccccgaggtgaccagcgtgccccccccctggcccagcagaagcgtgtgcagcagccccgtgatggtggcccagcccatctaccagcagcccgcctaccactaccaggccaccacccagtacctgcccggccagtggcagtggagcgtgccccagcccagcgccagcagcgcccccttcctgtacctgcagcccagcgaggtgatctaccagcccgtggagatcgcccaggacggcggctgcgtgcccccccccctgagcctgatggagaccagcgtgcccgagccctacagcgaccacggcgtgcaggccacctaccaccaggtgtacgcccccagcgccatcaccatgcccgcccccgtgatgcagcccgagcccatcaagaccgtgtggagcatccactactag

SEQ ID NO: 226784 - protein, 513 aa, Artificial Sequence
  derived and/or modified sequence
MSYHSFQPGSRCGSQSFSSYSAVMPRMVTHYAVSKGPCRPGGGRGLRALGCLGSRSLCNVGFGRPRVASRCGGTLPGFGYRLGATCGPSACITPVTINESLLVPLALEIDPTVQRVKRDEKEQIKCLNNRFASFINKVRFLEQKNKLLETKWNFMQQQRCCQTNIEPIFEGYISALRRQLDCVSGDRVRLESELCSLQAALEGYKKKYEEELSLRPCVENEFVALKKDVDTAFLMKADLETNAEALVQEIDFLKSLYEEEICLLQSQISETSVIVKMDNSRELDVDGIIAEIKAQYDDIASRSKAEAEAWYQCRYEELRVTAGNHCDNLRNRKNEILEMNKLIQRLQQETENVKAQRCKLEGAIAEAEQQGEAALNDAKCKLAGLEEALQKAKQDMACLLKEYQEVMNSKLGLDIEIATYRRLLEGEEHRLCEGIGPVNISVSSSKGAFLYEPCGVSTPVLSTGVLRSNGGCSIVGTGELYVPCEPQGLLSCGSGRKSSMTLGAGGSSPSHKH

SEQ ID NO: 226785 - DNA, 1542 bp, Artificial Sequence
  derived and/or modified sequence
atgtcctaccattcttttcagccgggatcacggtgcggatcccaaagcttctccagctacagtgcagtaatgcctcgaatggtgactcactatgccgtatcaaaggggccatgccgaccaggcggcggtagaggcctcagggcgcttgggtgcttaggctcgcgaagcctatgcaacgtgggctttggccgcccgagagtcgcttccaggtgtggaggcaccttgcccggctttggctatcgcctgggcgccacatgcggcccttcggcttgtattacacccgtaaccatcaacgagtcactattggttcctctcgcactggagattgaccccacggtgcaacgggtgaaaagagatgagaaggaacaaatcaaatgtctaaataatagattcgcatcttttatcaataaggtgcgtttcctggagcaaaaaaacaaactcctggaaactaagtggaacttcatgcagcagcaacgatgttgccagacgaacatcgagccgattttcgaggggtatatctcagctctgaggcggcagctggactgcgtgagtggtgatagggtgaggctggaaagtgaactctgcagtttgcaagctgccctggagggatataaaaaaaaatatgaggaagagctctccctccgcccatgtgtggagaacgaatttgtggctctgaagaaggacgtggatacagccttcctaatgaaagcggatcttgagacaaatgcggaggctttagtccaggagatcgatttcctgaagtcgctgtacgaggaagagatttgcctcctgcagtcacagatcagcgagacttctgtcattgtgaagatggataactcccgcgagctagacgtggatggcattatagcggagattaaagcccaatatgatgacatcgcctcaaggtctaaagccgaggctgaggcctggtaccagtgtcgatacgaagaattgcgcgtgaccgctggcaaccactgtgataatctgcgaaaccgcaaaaacgagattttggagatgaataagctgattcaaagactgcaacaggaaaccgaaaacgtaaaagctcagaggtgcaagcttgaaggcgctatcgccgaagctgaacagcagggagaagcagccctgaacgatgcgaagtgcaaattggctgggctggaggaggctctgcagaaggccaagcaggatatggcatgtctcctgaaggaatatcaggaggtcatgaacagcaaactagggctggacatcgagattgcaacatatagacgcctgcttgagggcgaggagcacagactctgtgaagggattggacctgtgaacatctcagtatctagctcaaaaggggctttcctttatgagccatgcggagtaagcactcccgtgttatcaacaggggtacttaggtctaacggtggttgcagtattgtgggcaccggtgaactgtatgttccatgtgaaccccagggtctgttatcctgcggatcaggaagaaagtccagcatgactcttggcgcaggcggttcgtccccatcccacaagcactag

SEQ ID NO: 226786 - DNA, 1542 bp, Artificial Sequence
  derived and/or modified sequence
atgagctaccacagcttccagcccggcagccgctgtggcagccagagcttcagcagctacagcgctgtgatgcccaggatggtgacccactatgctgtgtccaagggcccctgcaggcctgggggcggccggggcctgcgggccctgggctgcctgggcagccgcagcctgtgcaatgtgggcttcggccggccccgggtggccagccgctgtggcggcaccctgcccggcttcggctaccgcctgggcgccacctgtggccccagcgcctgcatcacccctgtgaccatcaatgaaagcctgctggtgcccctggccctggagattgaccccaccgtgcagagggtgaagagagatgagaaggagcagatcaagtgcctgaacaacagatttgccagcttcatcaacaaggtgcgcttcctggagcagaagaacaagctgctggagaccaagtggaacttcatgcagcagcagcgctgctgccagaccaacatcgagcccatctttgagggctacatcagcgccctgcggcggcagctggactgtgtgtctggggacagagtgcggctggagagcgagctgtgcagcctgcaggccgccctggagggctacaagaagaagtatgaggaggagctgagcctgcggccctgtgtggagaatgaatttgtggccctgaagaaggatgtggacacagccttcctgatgaaggctgacctggagaccaatgctgaggccctggtgcaggagattgacttcctgaagagcctgtatgaggaggagatctgcctgctgcagagccagatcagcgagaccagcgtcatcgtgaagatggacaacagccgggagctggatgtggatggcatcatcgccgagatcaaggcccagtatgatgacatcgccagccgcagcaaggccgaggccgaggcctggtaccagtgccgctatgaggagctgcgggtgacagctggcaaccactgtgacaacctgaggaacaggaagaatgagatcctggagatgaacaagctgatccagaggctgcagcaggagacagaaaatgtgaaggcccagcgctgcaagctggagggcgccatcgccgaggccgagcagcagggcgaggccgccctgaatgatgccaagtgcaagctggccggcctggaggaggccctgcagaaggccaagcaggacatggcctgcctgctgaaggagtaccaggaggtgatgaacagcaagctgggcctggacattgaaattgccacctacagaaggctgctggagggggaggagcaccggctgtgtgagggcatcggccctgtgaacatctctgtgagcagcagcaagggggccttcctgtatgagccctgtggggtgtccacccctgtgctgagcactggagtgctgcggagcaatggaggctgcagcatcgtgggcactggagagctgtatgtgccctgtgagccccagggcctgctgagctgtggcagcggcaggaagagctccatgaccctgggcgctgggggcagcagccccagccacaagcactag

SEQ ID NO: 226787 - DNA, 1542 bp, Artificial Sequence
  derived and/or modified sequence
atgagctaccacagcttccagcccggcagccggtgcggcagccagtccttctcatcctactcggccgttatgccacgaatggtgacccactacgctgtttcaaagggcccctgcagacctggaggtggcaggggcctccgcgctcttggctgtctgggctcgcgatcgctgtgcaatgttggtttcggccgccccagggtggcctcccgttgcggaggaaccttacccggctttggctaccgactcggtgctacctgtggcccttccgcttgcatcacccccgtgacaattaacgaaagcctactcgttccattggcccttgagattgatccaacagtccagagagttaaacgcgatgagaaggagcaaatcaagtgccttaacaataggtttgcctcgttcattaacaaggtgcgcttcttggagcaaaaaaataagctgctggagacgaagtggaacttcatgcagcagcagcgatgctgccaaacaaatatcgagccaatcttcgaggggtacatctcagctctgaggcggcaactggattgcgtttctggcgatagagtccggctcgagagcgagttgtgcagtttgcaggccgccttggaaggatacaaaaagaagtatgaggaagagcttagtcttagaccatgcgttgagaacgaatttgtcgccttgaagaaggatgtcgacactgcatttctgatgaaagcggaccttgagacaaacgcagaggctctagtgcaagaaattgattttttgaaaagcctatatgaggaagaaatctgccttctccagtcgcaaatctctgagacttcggtcatcgtgaaaatggacaatagccgggagctggacgtcgatggtattattgctgaaattaaagcccagtacgacgacattgcctcccgtagcaaggctgaggcagaagcttggtaccagtgtcggtacgaggaacttcgagtgactgctggaaaccattgcgacaatctgaggaatcgaaaaaatgagattcttgagatgaacaagttgattcagcggctgcagcaggaaacagaaaatgtgaaggcacagagatgcaaactggaaggagctattgcagaggctgaacagcagggcgaggcagccctaaatgatgccaaatgcaaactggctggactggaagaggctctgcagaaagctaagcaggatatggcatgtctccttaaagaatatcaagaggtgatgaatagtaagcttggccttgatattgagattgcaacctatagaaggctgctggaaggcgaagaacacaggctgtgcgagggcattggccccgtcaatattagcgtgtcaagcagtaagggcgcctttctgtacgaaccatgtggtgtgtctactcccgtgctctccaccggtgtgcttaggagcaacggagggtgctctatcgtgggtacgggggaactgtacgttccctgtgagccccaggggcttttgagctgtggatcaggcagaaagtcttctatgaccctcggcgccgggggcagttcaccctcccacaaacactag

SEQ ID NO: 226788 - DNA, 1542 bp, Artificial Sequence
  derived and/or modified sequence
atgagctaccactcatttcagccagggagcagatgtggaagtcagtctttttcctcctacagcgctgttatgcctagaatggtaacccactatgctgtgagcaaggggccttgcaggcctggcggtggcaggggactccgcgctcttgggtgcctgggtagtagatctctatgcaacgtggggttcggacgtccccgagtagcttcccggtgcgggggaactctgcccggatttggttatagattgggcgcaacatgtggccctagcgcatgtattacaccagtgacgatcaatgaaagtctcctggtccctcttgcattagagattgatcctaccgtgcaaagggtgaagcgggacgagaaagaacagattaaatgcctcaacaaccgctttgcatctttcattaataaggtgagatttctggagcaaaaaaataagctgctggaaaccaagtggaatttcatgcagcagcagagatgttgtcagactaacatcgaaccaattttcgaaggctatataagtgccttgcggcgtcaactagattgtgttagcggcgatagagttagactcgagtctgaactctgcagccttcaggcagctctggaagggtataagaaaaagtatgaggaggagttaagtctgaggccttgtgtggagaacgagttcgttgcactaaagaaagatgtcgacacagcctttttaatgaaagccgatctcgagaccaacgcagaagcgctggtccaggaaatcgattttctgaagtctctctatgaagaggagatttgtttgctacagagccagatctctgaaacctctgtaattgtgaagatggataactcacgtgagcttgacgtggacggcatcatcgctgaaatcaaggcgcagtatgacgacatagcctcacgcagtaaagccgaggcagaggcctggtatcagtgcagatatgaagagctgagagttactgcagggaatcactgcgataacctgagaaacaggaagaatgaaattctggagatgaataagctgattcaacgacttcagcaggaaaccgagaatgtgaaagctcagaggtgcaaactagagggcgcaattgccgaagccgaacaacagggggaggccgctctgaacgacgcaaaatgtaagctcgcaggactcgaggaggccctgcagaaggctaagcaggatatggcttgtctgctgaaagaataccaggaggtcatgaactcaaagctgggcctggatatagagatcgccacttatagacgacttttagagggggaagaacacaggctgtgtgaggggattggtcccgtgaatattagcgtgtcctctagtaagggagcctttctctacgaaccatgcggtgtgtccacacctgtgctttcaacaggggttttacgcagtaacggcggttgttcaatcgtgggcaccggtgagctgtatgtgccatgtgagcctcagggcctgctgagttgtgggtcagggaggaagtctagcatgacccttggtgcaggtggaagctccccctctcacaaacattag

SEQ ID NO: 226789 - DNA, 2664 bp, Artificial Sequence
  derived and/or modified sequence
gggaagctgagcctgacttgatcatcctgccccggttctttcctccagggccgcatttctctgcctctctctcctgccatgtcgtaccactctttccagccaggctccaggtgtggcagtcagagtttcagctcatactcggctgtcatgccccggatggtcacccactatgcagtgagcaaggggccatgccggcccgggggtggtaggggcctccgagctctgggctgccttggctcacggagcctgtgcaacgtgggctttgggaggccccgggtagcctccaggtgtggaggtaccctgcctggcttcgggtaccgactgggagccacctgtgggccttctgcctgcatcacccctgtcaccatcaatgagagcctgctggtcccactggcactggagatagacccgactgtgcagagggtaaagagggatgagaaggagcagatcaagtgcctcaacaaccgtttcgcatctttcatcaacaaggtccgtttcctggagcagaagaacaagctgctggagaccaagtggaacttcatgcagcagcagaggtgctgccagaccaacatcgagcccatcttcgagggctatatcagcgcccttcggcggcagctggactgtgtgtccggggaccgcgtgaggctagagtcagagctctgcagcctccaggctgcactggagggctacaagaaaaaatacgaagaggagctctccctgcgtccctgtgttgagaatgagtttgttgccttgaagaaggacgtggacacagccttcctgatgaaggctgacctggagaccaacgcagaggcactcgtgcaggagatcgacttcctgaaaagcctgtatgaggaggagatctgcctgctccagtctcagatctctgagacctcggtcattgtgaagatggacaacagccgggagctggacgtggacggcatcatcgctgagatcaaggcgcagtatgacgacatcgccagccgcagcaaagccgaagcagaggcctggtaccagtgccggtatgaggagctgagagtcacagctgggaaccactgtgacaacctccgcaaccgtaagaacgagatcctggaaatgaataaactgatccagcggctgcagcaagaaaccgagaatgtcaaagcccagcgctgcaaacttgagggtgccatagctgaggcagagcagcagggcgaggcggctctcaatgatgccaagtgcaagctggcagggctggaggaggctctgcagaaggccaagcaggacatggcctgcctgctcaaggaatatcaggaggtgatgaactccaagctgggcctggacatcgagatcgccacctacaggcgcctgctggagggtgaagagcacaggctgtgcgaaggcatcgggcccgtgaatatctcagtgagcagctccaaaggcgccttcctgtacgagccatgtggggtcagcacgcctgtcctcagcactggcgtcctcaggagcaatgggggctgcagcatcgtgggcactggtgaactctatgtcccctgcgagccccaggggctactgagctgtgggagcgggcggaaatccagcatgacgctaggagctgggggcagctcccccagccacaagcattagcatgatccgagacatccaggagacagagcccctgccccatggccctggatgtcacactcccaccagggctgaagacaaggatgttccaaaaccccacctccctttattgactccacattcccctccagtgttccctccttgagagctgagctgcccctaggacccctcctttgcctcatgagtcaccttccactcacctgtgtgcagaccctcagctaggcccagatggtggggacagacggcagagaaagagcatgcattgctcttaaccgcagaatggcaataacccccaaaaggtcaaatgggcacaccacagttctgctctgtggatcatcccatggaagtttcctcacaaagtcagctcctctcccaccacaggctcacactgcccttactttaggctctcatgcccctaagaaaagtgaatttcctttaacaccgcctgaaacatgcacactgcaaatatcaaaaggagacacccccaaatcccactctaaattccaaagccaagtgccacgatttcaggatcagtcaggacctgccaatgtcctctcagcacagagaatcaagaggtggcctttgggcagtagatttactttctcaggtatgttgaacccaaactgtgagaataaatctttctcctgagctcacattggcaggtgatgtcaggccaatgcctagaacaaagggcaaagggatatggaatgtttactggacagttggaaaaccaaaaacagataccattttctcaatggaatcagttccccctccacccatccccttctgtacatagccgccccttcctgttccccaaccctttagctccttttgctttgagtctgatatgacagtgatgtggggctgccccagctgacttggaggccctggctcaggagctcatagatggaggaggtgtgggctgactacctcccagaagcccctcatgccaagcctgtcccactggggctccagggcctctgccctgaacatctgggcttctgttcaaaataaacctactctgttcatggattatagcaatcagga

SEQ ID NO: 226790 - DNA, 1542 bp, Artificial Sequence
  derived and/or modified sequence
atgagctaccacagcttccagcccggcagcagatgcggcagccagagcttcagcagctacagcgccgtgatgcccagaatggtgacccactacgccgtgagcaagggcccctgcagacccggcggcggcagaggcctgagagccctgggctgcctgggcagcagaagcctgtgcaacgtgggcttcggcagacccagagtggccagcagatgcggcggcaccctgcccggcttcggctacagactgggcgccacctgcggccccagcgcctgcatcacccccgtgaccatcaacgagagcctgctggtgcccctggccctggagatcgaccccaccgtgcagagagtgaagagagacgagaaggagcagatcaagtgcctgaacaacagattcgccagcttcatcaacaaggtgagattcctggagcagaagaacaagctgctggagaccaagtggaacttcatgcagcagcagagatgctgccagaccaacatcgagcccatcttcgagggctacatcagcgccctgagaagacagctggactgcgtgagcggcgacagagtgagactggagagcgagctgtgcagcctgcaggccgccctggagggctacaagaagaagtacgaggaggagctgagcctgagaccctgcgtggagaacgagttcgtggccctgaagaaggacgtggacaccgccttcctgatgaaggccgacctggagaccaacgccgaggccctggtgcaggagatcgacttcctgaagagcctgtacgaggaggagatctgcctgctgcagagccagatcagcgagaccagcgtgatcgtgaagatggacaacagcagagagctggacgtggacggcatcatcgccgagatcaaggcccagtacgacgacatcgccagcagaagcaaggccgaggccgaggcctggtaccagtgcagatacgaggagctgagagtgaccgccggcaaccactgcgacaacctgagaaacagaaagaacgagatcctggagatgaacaagctgatccagagactgcagcaggagaccgagaacgtgaaggcccagagatgcaagctggagggcgccatcgccgaggccgagcagcagggcgaggccgccctgaacgacgccaagtgcaagctggccggcctggaggaggccctgcagaaggccaagcaggacatggcctgcctgctgaaggagtaccaggaggtgatgaacagcaagctgggcctggacatcgagatcgccacctacagaagactgctggagggcgaggagcacagactgtgcgagggcatcggccccgtgaacatcagcgtgagcagcagcaagggcgccttcctgtacgagccctgcggcgtgagcacccccgtgctgagcaccggcgtgctgagaagcaacggcggctgcagcatcgtgggcaccggcgagctgtacgtgccctgcgagccccagggcctgctgagctgcggcagcggcagaaagagcagcatgaccctgggcgccggcggcagcagccccagccacaagcactag

SEQ ID NO: 226791 - protein, 493 aa, Artificial Sequence
  derived and/or modified sequence
MASGILVNVKEEVTCPICLELLTQPLSLDCGHSFCQACLTANHKKSMLDKGESSCPVCRISYQPENIRPNRHVANIVEKLREVKLSPEGQKVDHCARHGEKLLLFCQEDGKVICWLCERSQEHRGHHTFLTEEVAREYQVKLQAALEMLRQKQQEAEELEADIREEKASWKTQIQYDKTNVLADFEQLRDILDWEESNELQNLEKEEEDILKSLTNSETEMVQQTQSLRELISDLEHRLQGSVMELLQKVSGKILRTENVTLKKPETFPKNQRRVFRAPDLKGMLEVFRELTDVRRYWVDVTVAPNNISCAVISEDKRQVSSPKPQIIYGARGTRYQTFVNFNYCTGILGSQSITSGKHYWEVDVSKKTAWILGVCAGFQPDAMCNIEKNENYQPKYGYWVIGLEEGVKCSAFQDSSFHTPSVPFIVPLSVIICPDRVGVFLDYEACTVSFFNITNHGFLIYKFSHCSFSQPVFPYLNPRKCGVPMTLCSPSS

SEQ ID NO: 226792 - protein, 493 aa, Artificial Sequence
  derived and/or modified sequence
MASGILVNVKEEVTCPICLELLTQPLSLDCGHSFCQACLTANHKKSMLDKGESSCPVCRISYQPENIRPNRHVANIVEKLREVKLSPEGQKVDHCARHGEKLLLFCQEDGKVICWLCERSQEHRGHHTFLTEEVAREYQVKLQAALEMLRQKQQEAEELEADIREEKASWKTQIQYDKTNVLADFEQLRDILDWEESNELQNLEKEEEDILKSLTNSETEMVQQTQSLRELISDLEHRLQGSVMELLQGVDGVIKRTENVTLKKPETFPKNQRRVFRAPDLKGMLEVFRELTDVRRYWVDVTVAPNNISCAVISEDKRQVSSPKPQIIYGARGTRYQTFVNFNYCTGILGSQSITSGKHYWEVDVSKKTAWILGVCAGFQPDAMCNIEKNENYQPKYGYWVIGLEEGVKCSAFQDSSFHTPSVPFIVPLSVIICPDRVGVFLDYEACTVSFFNITNHGFLIYKFSHCSFSQPVFPYLNPRKCGVPMTLCSPSS

SEQ ID NO: 226793 - DNA, 3399 bp, Artificial Sequence
  derived and/or modified sequence
agtttatctttcactttcctgccctgagtgtgagcaagaatttcctgcggttcctctaggaaaattcctttgtgcagatcaggcccgtggattggtgagtgaatcctaaccacgtcttccctggcctgtcttcactcttctccccagaatcaccacttctgcactggtgtctgaaggtgtattgagtgattttgtggagggcagaagtaggaagtctttgggacaaaactgtatttaccttgggatctgtgaacaagaggaacctcagcagccaggacaggcaggagcagtggaatagctactatggcttctggaatcctggttaatgtaaaggaggaggtgacctgccccatctgcctggaactcctgacacaacccctgagcctggactgcggccacagcttctgccaagcatgcctcactgcaaaccacaagaagtccatgctagacaaaggagagagtagctgccctgtgtgccggatcagttaccagcctgagaacatacggcctaatcggcatgtagccaacatagtggagaagctcagggaggtcaagttgagcccagaggggcagaaagttgatcattgtgcacgccatggagagaaacttctactcttctgtcaggaggacgggaaggtcatttgctggctttgtgagcggtctcaggagcaccgtggtcaccacacgttcctcacagaggaggttgcccgggagtaccaagtgaagctccaggcagctctggagatgctgaggcagaagcagcaggaagctgaagagttagaagctgacatcagagaagagaaagcttcctggaagactcaaatacagtatgacaaaaccaacgtcttggcagattttgagcaactgagagacatcctggactgggaggagagcaatgagctgcaaaacctggagaaggaggaggaagacattctgaaaagccttacgaactctgaaactgagatggtgcagcagacccagtccctgagagagctcatctcagatctggagcatcggctgcaggggtcagtgatggagctgcttcagggtgtggatggcgtcataaaaaggacggagaacgtgaccttgaagaagccagaaacttttccaaaaaatcaaaggagagtgtttcgagctcctgatctgaaaggaatgctagaagtgtttagagagctgacagatgtccgacgctactgggttgatgtgacagtggctccaaacaacatttcatgtgctgtcatttctgaagataagagacaagtgagctctccgaaaccacagataatatatggggcacgagggacaagataccagacatttgtgaatttcaattattgtactggcatcctgggctctcaaagtatcacatcagggaaacattactgggaggtagacgtgtccaagaaaactgcttggatcctgggggtatgtgctggcttccaacctgatgcaatgtgtaatattgaaaaaaatgaaaattatcaacctaaatacggctactgggttatagggttagaggaaggagttaaatgtagtgctttccaggatagttccttccatactccttctgttcctttcattgtgcccctctctgtgattatttgtcctgatcgtgttggagttttcctagactatgaggcttgcactgtctcattcttcaatatcacaaaccatggatttctcatctataagttttctcactgttctttttctcagcctgtatttccatatttaaatcctagaaaatgtggagtccccatgactctgtgctcaccaagctcttgaaccttcttacacactcagccccttctgtacagcacctcttgtccaggtgcatctcatacacctgaactcatttgcatcattttaaccatcttttccttgctgtctcccttctttctatttgaacgtccttcactcatcagtaaaatgtaataattgccttgtgccatattgtccccaatattttattgacatttgatagcaatttttttcatcattttccgtactcctaaggaaaactgacctatacctcataaaatgagaccgctatttaggtattacttctgccagatatttatcacccaattgcctctgacactgactaagaagatgaagaaaagcttttcaacagcctttctatatcatcgtgtgataattgttcaccaatgaatgagtccttagccctgtgtcagtttaccctcgatgcccttatttgtgagttaaagagaaaatatcataaatggtatactcttaagtatagaggttttgtatctagaggatctcagttcaactcctgtctctccatataccagcagtgtaactgtgaataacatacttaaatggctgtgcttatttccttttcttttcttttttctttttttttttttttgagatgaagttttgctcttgttccccaggctggagtgcaatggcacgatctcggttcactgcaacctccacctctcagattcaagcaattctcctgcctcagcctcccaagtagctgggattacaggtgcccaccaccacccctggctaaatttgtattttcagtagagacggggtttccccatgttggttaggctcgtctagaacctctgacctcaggtgatccacccgcctcggcctcccaaagtgctgggattacaggcgtgagccacggcgcccagcctgtgcttattttcttaaaataatttttgtattaaaaacttcacattaaataagtgctaatgttttattgcatagtagggtgactagagttaacaataacctattgcatatattttgaaatagctagaagagaggattttgaaagttctcaacacaaagaaatgacacatatttgaggtgatggatatgctaattaccctggttcggttattacgcaatgtatacatgtatcaaaacatcacactgtaccacataaatatgtatatttattatttgtcaattaaaagcaaaataaaacaaaaaaccttcatctaatactttggatcattgtgaaaaaataaattcctgaagtataaagcatctatctaagtgtcttgatctaataagtacttgttctacaaattattgaaaaacataaactctgttaatgtctcatggaacaggttgtgccttcagggaaactaggattggatttactaaattctcattttttagatctcagatactactgtcaaaatgacttcaattctgccttctatatataatacacacatatatttaggattttattgtaattctagtgttgctacatattagtctttatcaaacaaactgaattatgtgggaatcagtttattaattgtaaaaaataattataataaaattagctgatgtagttttttaaaagttaaacgagttttttgaatagcttcactcatttctagc

SEQ ID NO: 226794 - DNA, 1482 bp, Artificial Sequence
  derived and/or modified sequence
atggccagcggcatcctggtgaacgtgaaggaggaggtgacctgccccatctgcctggagctgctgacccagcccctgagcctggactgcggccacagcttctgccaggcctgcctgaccgccaaccacaagaagagcatgctggacaagggcgagagcagctgccccgtgtgcagaatcagctaccagcccgagaacatcagacccaacagacacgtggccaacatcgtggagaagctgagagaggtgaagctgagccccgagggccagaaggtggaccactgcgccagacacggcgagaagctgctgctgttctgccaggaggacggcaaggtgatctgctggctgtgcgagagaagccaggagcacagaggccaccacaccttcctgaccgaggaggtggccagagagtaccaggtgaagctgcaggccgccctggagatgctgagacagaagcagcaggaggccgaggagctggaggccgacatcagagaggagaaggccagctggaagacccagatccagtacgacaagaccaacgtgctggccgacttcgagcagctgagagacatcctggactgggaggagagcaacgagctgcagaacctggagaaggaggaggaggacatcctgaagagcctgaccaacagcgagaccgagatggtgcagcagacccagagcctgagagagctgatcagcgacctggagcacagactgcagggcagcgtgatggagctgctgcagaaggtgagcggcaagatcctgagaaccgagaacgtgaccctgaagaagcccgagaccttccccaagaaccagagaagagtgttcagagcccccgacctgaagggcatgctggaggtgttcagagagctgaccgacgtgagaagatactgggtggacgtgaccgtggcccccaacaacatcagctgcgccgtgatcagcgaggacaagagacaggtgagcagccccaagccccagatcatctacggcgccagaggcaccagataccagaccttcgtgaacttcaactactgcaccggcatcctgggcagccagagcatcaccagcggcaagcactactgggaggtggacgtgagcaagaagaccgcctggatcctgggcgtgtgcgccggcttccagcccgacgccatgtgcaacatcgagaagaacgagaactaccagcccaagtacggctactgggtgatcggcctggaggagggcgtgaagtgcagcgccttccaggacagcagcttccacacccccagcgtgcccttcatcgtgcccctgagcgtgatcatctgccccgacagagtgggcgtgttcctggactacgaggcctgcaccgtgagcttcttcaacatcaccaaccacggcttcctgatctacaagttcagccactgcagcttcagccagcccgtgttcccctacctgaaccccagaaagtgcggcgtgcccatgaccctgtgcagccccagcagctag

SEQ ID NO: 226795 - DNA, 1482 bp, Artificial Sequence
  derived and/or modified sequence
atggccagcggcatcctggtgaacgtgaaggaggaggtgacctgccccatctgcctggagctgctgacccagcccctgagcctggactgcggccacagcttctgccaggcctgcctgaccgccaaccacaagaagagcatgctggacaagggcgagagcagctgccccgtgtgcagaatcagctaccagcccgagaacatcagacccaacagacacgtggccaacatcgtggagaagctgagagaggtgaagctgagccccgagggccagaaggtggaccactgcgccagacacggcgagaagctgctgctgttctgccaggaggacggcaaggtgatctgctggctgtgcgagagaagccaggagcacagaggccaccacaccttcctgaccgaggaggtggccagagagtaccaggtgaagctgcaggccgccctggagatgctgagacagaagcagcaggaggccgaggagctggaggccgacatcagagaggagaaggccagctggaagacccagatccagtacgacaagaccaacgtgctggccgacttcgagcagctgagagacatcctggactgggaggagagcaacgagctgcagaacctggagaaggaggaggaggacatcctgaagagcctgaccaacagcgagaccgagatggtgcagcagacccagagcctgagagagctgatcagcgacctggagcacagactgcagggcagcgtgatggagctgctgcagggcgtggacggcgtgatcaagagaaccgagaacgtgaccctgaagaagcccgagaccttccccaagaaccagagaagagtgttcagagcccccgacctgaagggcatgctggaggtgttcagagagctgaccgacgtgagaagatactgggtggacgtgaccgtggcccccaacaacatcagctgcgccgtgatcagcgaggacaagagacaggtgagcagccccaagccccagatcatctacggcgccagaggcaccagataccagaccttcgtgaacttcaactactgcaccggcatcctgggcagccagagcatcaccagcggcaagcactactgggaggtggacgtgagcaagaagaccgcctggatcctgggcgtgtgcgccggcttccagcccgacgccatgtgcaacatcgagaagaacgagaactaccagcccaagtacggctactgggtgatcggcctggaggagggcgtgaagtgcagcgccttccaggacagcagcttccacacccccagcgtgcccttcatcgtgcccctgagcgtgatcatctgccccgacagagtgggcgtgttcctggactacgaggcctgcaccgtgagcttcttcaacatcaccaaccacggcttcctgatctacaagttcagccactgcagcttcagccagcccgtgttcccctacctgaaccccagaaagtgcggcgtgcccatgaccctgtgcagccccagcagctag

SEQ ID NO: 226796 - DNA, 1482 bp, Artificial Sequence
  derived and/or modified sequence
atggccagtggtatactcgtgaatgtgaaggaagaggttacctgccccatttgcttagagctcctcacacagccactgagccttgactgtggtcactccttctgtcaggcatgtttgaccgcgaatcataaaaagagcatgcttgacaaaggtgaaagctcttgcccagtgtgcagaatctcataccagcccgaaaacattcgacccaaccgccacgttgctaacatagtggagaaactccgtgaagtgaagttgtccccagagggccagaaagtcgatcactgtgcacgacacggtgagaaactgctcctattctgtcaggaggatggcaaggtgatttgttggctctgcgaacgcagccaggaacaccgcggacaccacacattcttgacagaagaagtggcccgagagtaccaggtgaaactgcaggccgcactggaaatgctacgtcaaaagcagcaggaagctgaggaactcgaggcagacatccgcgaggaaaaggcttcttggaaaactcagatacagtacgataagactaacgtactggcagattttgagcagctgcgggacattctggattgggaggaatccaatgagctacaaaatttagagaaagaagaggaagacattctcaagtcattgacaaattcagaaactgagatggttcagcagacacagtctctaagagagcttattagtgatcttgagcatagacttcaaggttctgtaatggagttgctccaaaaggttagcgggaaaattctccggaccgaaaatgtgaccctcaaaaaaccagagaccttccctaaaaatcaaaggcgcgtgttccgcgccccagatcttaaagggatgcttgaggtgtttcgcgagctgactgatgttcggcgatattgggtggacgttactgtggcccccaacaatatcagttgtgctgtaattagcgaagataagagacaagtatcatctcctaaacctcaaattatatatggggctagaggaacacgctaccagacctttgtgaattttaattactgtactggaatactcggcagccaaagcattacaagcggcaagcactactgggaggttgatgtgagcaagaaaacagcatggatactcggggtttgcgctggttttcagcctgacgctatgtgcaatatcgagaagaacgagaattaccaaccgaaatatggatactgggtgatcggcctggaagagggtgtcaagtgtagcgctttccaggattcctccttccacactccgagtgtcccctttattgttcccttatcggtcatcatatgccccgatcgtgtgggcgtgtttctggactacgaggcttgcacagtatccttttttaatattacgaaccatggctttctcatctataagttctctcattgctcattctcacaacccgtcttcccctatctgaacccccggaagtgcggagtccccatgacactttgtagcccttccagttag

SEQ ID NO: 226797 - DNA, 1482 bp, Artificial Sequence
  derived and/or modified sequence
atggcctcaggaatcctggttaatgttaaagaagaggtgacctgccctatctgcctggaacttctaactcaaccactcagtctggattgcggccactccttctgtcaggcatgtcttacggcaaatcataagaagagcatgttggacaagggagaaagctcctgtcccgtatgcagaattagctatcaaccagagaacatccgccccaacaggcacgtggctaacatcgtcgagaagctccgcgaagtaaagctttccccggagggtcaaaaggtcgatcactgtgctaggcatggcgaaaagctgttattgttttgtcaagaagacggcaaagtgatatgttggttgtgtgagcgatcacaagaacaccgcgggcaccacacattcctaactgaggaagtggctcgcgaatatcaggtaaagctccaggctgcactggagatgctccggcagaaacaacaggaagctgaagagctggaggcggatatcagagaagagaaagcctcctggaaaactcaaatccagtacgataagaccaatgtcctggccgactttgagcaacttagagatatactggattgggaggagagcaacgagttgcagaacctggagaaggaggaggaagacattctgaagtccctgactaacagcgaaaccgagatggtgcagcaaactcagtctcttagagagctcatctctgacctggaacaccgactacaggggagcgtgatggaactgctgcaaggggtggacggcgtcataaaacgtaccgagaacgtgacactgaagaagccagaaactttcccaaagaaccaacgacgtgtgtttcgtgcccccgatctgaaaggaatgctggaggtgttccgagaactcaccgatgtccgccgatattgggttgatgttactgtggcccccaacaacattagttgcgccgtgatttcggaggataagcgtcaggtgtcttcacctaagcctcaaataatctatggagcaagaggcacaaggtaccaaacttttgtcaacttcaattactgtaccgggatcctgggctcacagagcataacctctggcaaacattattgggaggtcgatgttagcaagaagacagcgtggattttgggcgtgtgcgctggatttcaacctgacgccatgtgcaatattgagaaaaatgaaaactatcagcccaagtatggctattgggtaatcggcctggaggaaggggtcaaatgctctgctttccaggattcaagttttcatactccctcagtaccttttatcgttccattatccgtgatcatttgccccgatcgggttggtgtgtttctcgattacgaagcctgtaccgtttccttctttaacatcactaaccacggattcttgatctataagtttagccactgttcattcagccagccagtgtttccatacctgaatccaaggaaatgtggggtccccatgacattgtgctccccatcgtcttag

SEQ ID NO: 226798 - DNA, 1482 bp, Artificial Sequence
  derived and/or modified sequence
atggccagcggcatcctggtgaatgtgaaggaggaggtgacctgccccatctgcctggagctgctgacccagcccctgagcctggactgtggccacagcttctgccaggcctgcctgacagccaaccacaagaagtccatgctggacaagggggagagcagctgccctgtgtgccgcatctcctaccagcctgagaacatccggcccaacagacatgtggccaacatcgtggagaagctgcgggaggtgaagctgagccctgagggccagaaggtggaccactgtgcccggcacggggagaagctgctgctcttctgccaggaggatggcaaggtgatctgctggctgtgtgagaggagccaggagcaccggggccaccacaccttcctgacagaggaggtggcccgggagtaccaggtgaagctgcaggccgccctggagatgctgcggcagaagcagcaggaggccgaggagctggaggccgacatccgggaggagaaggcctcctggaagacccagatccagtatgacaagaccaacgtgctggccgactttgagcagctgcgggacatcctggactgggaggagagcaatgagctgcagaacctggagaaggaggaggaggacatcctgaagagcctgaccaacagcgagacagagatggtgcagcagacccagagcctgcgggagctgatcagtgacctggagcaccggctgcagggctctgtgatggagctgctgcagaaggtgtctgggaagatcctgaggacagaaaatgtgaccctgaagaagccagagaccttccccaagaaccagaggagggtcttccgggccccagacctgaagggcatgctggaggtgttccgggagctgacagatgtgcggcgctactgggtggatgtgacagtggcccccaacaacatcagctgtgctgtgatcagcgaggacaagaggcaggtgagcagccccaagccccagatcatctatggagcccggggcacccgctaccagacctttgtgaacttcaactactgcaccggcatcctgggcagccagagcatcaccagcggcaagcactactgggaggtggatgtgtccaagaagacagcctggatcctgggcgtgtgtgccggcttccagccagatgccatgtgcaacatcgagaagaatgaaaactaccagcccaagtatggctactgggtgattggcctggaggagggcgtgaagtgcagcgccttccaggacagcagcttccacacccccagcgtgcccttcatcgtgcccctgagcgtcatcatctgcccagacagagtgggcgtcttcctggactatgaggcctgcaccgtgtccttcttcaacatcaccaaccacggcttcctgatctacaagttcagccactgcagcttcagccagcccgtcttcccctacctgaaccccaggaaatgtggggtgcccatgaccctgtgcagccccagcagctag

SEQ ID NO: 226799 - DNA, 1482 bp, Artificial Sequence
  derived and/or modified sequence
atggccagcggcatcctggtgaatgtgaaggaggaggtgacctgccccatctgcctggagctgctgacccagcccctgagcctggactgtggccacagcttctgccaggcctgcctgacagccaaccacaagaagtccatgctggacaagggggagagcagctgccctgtgtgccgcatctcctaccagcctgagaacatccggcccaacagacatgtggccaacatcgtggagaagctgcgggaggtgaagctgagccctgagggccagaaggtggaccactgtgcccggcacggggagaagctgctgctcttctgccaggaggatggcaaggtgatctgctggctgtgtgagaggagccaggagcaccggggccaccacaccttcctgacagaggaggtggcccgggagtaccaggtgaagctgcaggccgccctggagatgctgcggcagaagcagcaggaggccgaggagctggaggccgacatccgggaggagaaggcctcctggaagacccagatccagtatgacaagaccaacgtgctggccgactttgagcagctgcgggacatcctggactgggaggagagcaatgagctgcagaacctggagaaggaggaggaggacatcctgaagagcctgaccaacagcgagacagagatggtgcagcagacccagagcctgcgggagctgatcagtgacctggagcaccggctgcagggctctgtgatggagctgctgcagggcgtggatggagtcatcaagaggacagaaaatgtgaccctgaagaagccagagaccttccccaagaaccagaggagggtcttccgggccccagacctgaagggcatgctggaggtgttccgggagctgacagatgtgcggcgctactgggtggatgtgacagtggcccccaacaacatcagctgtgctgtgatcagcgaggacaagaggcaggtgagcagccccaagccccagatcatctatggagcccggggcacccgctaccagacctttgtgaacttcaactactgcaccggcatcctgggcagccagagcatcaccagcggcaagcactactgggaggtggatgtgtccaagaagacagcctggatcctgggcgtgtgtgccggcttccagccagatgccatgtgcaacatcgagaagaatgaaaactaccagcccaagtatggctactgggtgattggcctggaggagggcgtgaagtgcagcgccttccaggacagcagcttccacacccccagcgtgcccttcatcgtgcccctgagcgtcatcatctgcccagacagagtgggcgtcttcctggactatgaggcctgcaccgtgtccttcttcaacatcaccaaccacggcttcctgatctacaagttcagccactgcagcttcagccagcccgtcttcccctacctgaaccccaggaaatgtggggtgcccatgaccctgtgcagccccagcagctag

SEQ ID NO: 226800 - DNA, 1482 bp, Artificial Sequence
  derived and/or modified sequence
atggccagcggcatcctggtgaacgtgaaggaggaggtgacctgccctatctgcctcgaactgctgacgcagcctttgagcctagactgcggccactccttctgccaggcgtgtctgactgccaatcataaaaaaagcatgctcgacaaaggcgagtcatcctgccccgtttgtcgcatttcctaccaaccggagaatatacgccccaatagacatgtggcgaacatcgtcgaaaagctcagggaggtgaagctgtctcctgaaggacagaaggtcgaccactgcgctaggcacggggagaagctcttgctcttctgtcaggaggacggtaaggtgatttgctggctatgcgagagatcacaagaacaccgcggccatcacaccttcctgacagaggaagttgctcgcgaataccaagttaagttacaggccgctttggagatgttgagacagaaacagcaggaagccgaagaattggaggcagacattcgcgaagagaaggcctcctggaagacacagatccagtacgataagactaatgtcctggctgattttgaacagttgagagacatcctcgactgggaggagtcgaatgaattacaaaacctggagaaggaggaagaggacatactcaagagtctgacaaatagtgagaccgagatggtccagcagacccaatcgcttcgggaactgatttcagatctcgagcatagactccagggatctgtcatggagctgctccagaaggtatccggcaaaatcctccggactgagaatgttactctaaagaaaccagaaacttttccgaaaaaccaacgcagagtcttccgagcccccgacctgaaagggatgcttgaggtcttccgtgagctgacagatgtcaggcgttactgggttgacgttacggtcgccccgaataacatcagctgtgcggtgattagtgaagacaagcggcaagtgtcatctcctaaacctcaaattatatacggcgcccgaggcacccgttaccagacatttgtaaactttaattattgcacaggcattctcggaagccagagtatcactagcggcaagcactattgggaggtggatgtaagcaaaaaaaccgcctggattctgggcgtttgcgccggtttccagcccgacgctatgtgtaacattgaaaagaacgaaaactaccagcctaaatacggctactgggttattggacttgaagaaggagttaagtgctccgcattccaagactcaagcttccacaccccctcagtcccctttattgtccccctatccgtaattatatgtcccgatcgagtcggcgtgttcctggattacgaggcctgcactgtgtcattttttaacatcacgaaccatggctttcttatttacaaattctcccactgtagtttctctcagcccgtattcccgtatcttaatccacgcaaatgcggtgtacctatgactttatgtagcccaagctcttag

SEQ ID NO: 226801 - DNA, 1482 bp, Artificial Sequence
  derived and/or modified sequence
atggccagcggcatcctggtgaacgtgaaggaggaggtgacctgccccatttgtctcgaactattgacacaacctctttctctagactgcggacacagtttttgccaagcctgcttaactgcaaatcacaagaaatccatgttggataagggcgaatcctcttgtcccgtgtgtagaatttcttatcaaccagagaacattaggcccaatcggcatgttgccaacatcgtggagaagctgagggaggttaagctgtctcccgagggccagaaagtcgaccactgtgctcgtcacggcgagaaactgctcctgttttgccaagaggatggcaaggtgatttgttggctgtgcgagaggtcccaagagcaccgagggcatcatacattcctgaccgaggaagttgccagggagtatcaagttaaactgcaggccgcgttggaaatgcttaggcagaaacagcaggaagctgaggaactggaggccgatatccgagaggagaaggcttcatggaaaacccaaattcagtatgacaagactaacgtgctggccgattttgagcagttaagggacatcctcgactgggaggagagtaatgaattgcaaaacctggaaaaagaagaagaggatatattgaaatctctgactaactctgaaaccgaaatggttcagcagacacagtcactcagggagcttattagtgatttggagcaccgactccaggggtccgttatggagctgttacagggcgtggatggcgtcattaaaaggacggaaaacgtgactctgaaaaagcccgagacgtttcccaaaaaccagagaagggtattccgcgccccagatcttaaaggcatgctggaggtttttagggaactgacagacgttagaagatattgggtggacgttacggtggctcccaataatatctcctgtgcagttatcagtgaagataagagacaggtcagcagcccgaagccgcagattatctatggcgcaagaggcactagatatcaaacctttgttaattttaattattgtaccgggattttaggatcacagagcatcacaagtggtaagcattactgggaagtggatgtgtcgaagaagaccgcgtggatcctgggcgtctgcgcggggtttcagcctgacgccatgtgcaacatcgagaaaaatgagaattatcagcctaagtacgggtactgggtgatcggcttggaagaaggagttaagtgctccgccttccaggattcatcttttcatacccccagcgtcccattcattgtacctctgagcgtgattatttgtcccgacagggtcggtgttttcttagactacgaagcgtgtaccgtctctttctttaacatcaccaaccatgggttccttatatacaagttctcacactgcagtttttcccagcccgtgtttccatacctcaacccccgaaaatgtggagtcccaatgaccctgtgctccccctcctcatag

SEQ ID NO: 226802 - DNA, 1482 bp, Artificial Sequence
  derived and/or modified sequence
atggcctctggcatcctggttaatgtaaaagaagaggtgacctgcccaatttgcctggagctcctgacacagccactatccctggattgtggacatagtttctgccaggcttgcttaaccgccaatcataagaaatcaatgctggacaaaggcgaaagttcctgccctgtgtgccgcatcagctatcagcctgagaatataaggcccaaccggcatgtcgccaacatcgtggaaaagctgagggaagtgaagcttagtcctgagggacaaaaggtggatcactgtgcaaggcacggcgaaaaattgctgctgttctgccaagaagatggcaaggtgatctgttggctatgcgagcgaagtcaagagcaccgcggacaccacaccttcctgactgaggaagtcgcacgagaataccaagtcaagttgcaggcagccctcgaaatgctacggcaaaaacagcaggaggcggaagagctagaggctgacatccgcgaggagaaagcttcgtggaagacccaaattcagtatgataaaactaatgtactggccgatttcgaacagctgagggatattctcgactgggaagagtctaatgagctgcagaaccttgaaaaggaggaagaggatatactgaaatcgctgacaaattccgaaaccgagatggtgcagcagacacagtccctgagggagcttattagcgacttggaacaccgtctgcaaggcagcgtcatggagttgctacagaaagtgtcaggaaagatacttaggactgaaaacgtgacactcaaaaaacctgaaacgtttcccaaaaaccagcgcagggtgtttcgagcacccgacttaaaagggatgctggaagttttccgggaacttacggacgtcagaaggtattgggtagacgtgactgtcgcacccaataacatctcgtgtgcagtaatttcagaagacaagcggcaagtcagttctcccaaaccacagatcatctatggtgccagaggtactcggtaccagacatttgttaatttcaactactgcaccggaatcctcggatctcaatccatcacgagcggtaaacactattgggaggttgatgtttctaaaaagacagcatggattctcggtgtgtgcgcgggtttccagccggatgccatgtgcaacatcgaaaaaaatgaaaactaccagcctaaatatggctactgggtgattggccttgaggagggcgtaaagtgctctgccttccaggatagttccttccacacccccagcgttccgtttatcgttcctctctccgtgatcatatgtcccgaccgcgtgggggttttcctggattatgaggcatgtaccgtgtccttctttaacatcaccaatcacgggtttttgatatacaagttcagtcactgctccttctcccagcccgtgttcccatacctgaaccccaggaaatgcggagtgccaatgaccttatgctctcccagttcgtag

SEQ ID NO: 226803 - DNA, 1482 bp, Artificial Sequence
  derived and/or modified sequence
atggccagcggcattttggtcaacgtgaaggaggaggtgacctgcccaatctgcctggagttgttaacgcagcccctgagccttgactgcggccacagtttttgtcaggcttgcctgactgccaatcataaaaaatccatgctggacaaaggcgaatcgtcctgtccagtgtgcagaattagttaccagccagagaatatccgtcctaacagacacgttgcaaacatcgtggagaaactgcgggaagtgaaactgtcccccgaaggacagaaggtcgatcactgtgcaagacacggcgagaagctgctcctgttctgccaagaggatgggaaagtgatctgttggctgtgcgagcggtcccaggaacaccgcggtcaccacacattcttgaccgaggaggtcgcacgggaatatcaggtaaagttacaggctgcccttgaaatgctcagacagaaacaacaagaggcagaggaacttgaggccgatatccgcgaggaaaaggccagttggaaaactcagattcagtatgacaagactaacgtcctggccgatttcgaacagttgcgggatattttagattgggaggagtctaatgaacttcaaaatttagagaaggaggaggaggatatcctaaaaagcctgaccaactctgagaccgagatggtacagcaaacacagagcctgcgcgaactaattagtgacctcgaacatagactccaagggagtgtgatggagctgctgcagggcgtcgatggcgtgattaaacgcacggagaacgtcaccctaaagaaacccgagactttcccaaagaatcagaggagagtcttcagagctcctgaccttaaaggaatgctggaggtgttccgcgaattgacagatgtcaggaggtactgggtggatgtcacagtggcccctaataacattagttgtgcagtcatttccgaagataagagacaggtttcaagcccaaagcctcagatcatatacggtgcgagggggacgcggtaccaaactttcgttaactttaattattgcacaggcatcctggggtcacagtccataacctctgggaagcattactgggaagttgacgtttctaaaaaaacagcgtggatactgggcgtatgcgcgggattccagcctgacgccatgtgtaatatagaaaagaacgagaactaccagccgaaatacggctactgggtaattggcctggaggaaggcgtgaaatgtagcgccttccaggatagtagcttccacactcctagcgtgccattcatcgtcccattgtctgtaattatctgcccggaccgcgtgggtgtcttcctcgattatgaggcatgcacagtgtcattttttaacatcactaatcatggatttctgatttacaaattcagccattgtagcttcagccagccagtgttcccttacctgaatcctcggaaatgtggagtccccatgaccctgtgttccccatcatcatag

SEQ ID NO: 226804 - DNA, 3399 bp, Artificial Sequence
  derived and/or modified sequence
agtttatctttcactttcctgccctgagtgtgagcaagaatttcctgcggttcctctaggaaaattcctttgtgcagatcaggcccgtggattggtgagtgaatcctaaccacgtcttccctggcctgtcttcactcttctccccagaatcaccacttctgcactggtgtctgaaggtgtattgagtgattttgtggagggcagaagtaggaagtctttgggacaaaactgtatttaccttgggatctgtgaacaagaggaacctcagcagccaggacaggcaggagcagtggaatagctactatggcttctggaatcctggttaatgtaaaggaggaggtgacctgccccatctgcctggaactcctgacacaacccctgagcctggactgcggccacagcttctgccaagcatgcctcactgcaaaccacaagaagtccatgctagacaaaggagagagtagctgccctgtgtgccggatcagttaccagcctgagaacatacggcctaatcggcatgtagccaacatagtggagaagctcagggaggtcaagttgagcccagaggggcagaaagttgatcattgtgcacgccatggagagaaacttctactcttctgtcaggaggacgggaaggtcatttgctggctttgtgagcggtctcaggagcaccgtggtcaccacacgttcctcacagaggaggttgcccgggagtaccaagtgaagctccaggcagctctggagatgctgaggcagaagcagcaggaagctgaagagttagaagctgacatcagagaagagaaagcttcctggaagactcaaatacagtatgacaaaaccaacgtcttggcagattttgagcaactgagagacatcctggactgggaggagagcaatgagctgcaaaacctggagaaggaggaggaagacattctgaaaagccttacgaactctgaaactgagatggtgcagcagacccagtccctgagagagctcatctcagatctggagcatcggctgcaggggtcagtgatggagctgcttcagaaagtaagtgggaagattcttaggacggagaacgtgaccttgaagaagccagaaacttttccaaaaaatcaaaggagagtgtttcgagctcctgatctgaaaggaatgctagaagtgtttagagagctgacagatgtccgacgctactgggttgatgtgacagtggctccaaacaacatttcatgtgctgtcatttctgaagataagagacaagtgagctctccgaaaccacagataatatatggggcacgagggacaagataccagacatttgtgaatttcaattattgtactggcatcctgggctctcaaagtatcacatcagggaaacattactgggaggtagacgtgtccaagaaaactgcttggatcctgggggtatgtgctggcttccaacctgatgcaatgtgtaatattgaaaaaaatgaaaattatcaacctaaatacggctactgggttatagggttagaggaaggagttaaatgtagtgctttccaggatagttccttccatactccttctgttcctttcattgtgcccctctctgtgattatttgtcctgatcgtgttggagttttcctagactatgaggcttgcactgtctcattcttcaatatcacaaaccatggatttctcatctataagttttctcactgttctttttctcagcctgtatttccatatttaaatcctagaaaatgtggagtccccatgactctgtgctcaccaagctcttgaaccttcttacacactcagccccttctgtacagcacctcttgtccaggtgcatctcatacacctgaactcatttgcatcattttaaccatcttttccttgctgtctcccttctttctatttgaacgtccttcactcatcagtaaaatgtaataattgccttgtgccatattgtccccaatattttattgacatttgatagcaatttttttcatcattttccgtactcctaaggaaaactgacctatacctcataaaatgagaccgctatttaggtattacttctgccagatatttatcacccaattgcctctgacactgactaagaagatgaagaaaagcttttcaacagcctttctatatcatcgtgtgataattgttcaccaatgaatgagtccttagccctgtgtcagtttaccctcgatgcccttatttgtgagttaaagagaaaatatcataaatggtatactcttaagtatagaggttttgtatctagaggatctcagttcaactcctgtctctccatataccagcagtgtaactgtgaataacatacttaaatggctgtgcttatttccttttcttttcttttttctttttttttttttttgagatgaagttttgctcttgttccccaggctggagtgcaatggcacgatctcggttcactgcaacctccacctctcagattcaagcaattctcctgcctcagcctcccaagtagctgggattacaggtgcccaccaccacccctggctaaatttgtattttcagtagagacggggtttccccatgttggttaggctcgtctagaacctctgacctcaggtgatccacccgcctcggcctcccaaagtgctgggattacaggcgtgagccacggcgcccagcctgtgcttattttcttaaaataatttttgtattaaaaacttcacattaaataagtgctaatgttttattgcatagtagggtgactagagttaacaataacctattgcatatattttgaaatagctagaagagaggattttgaaagttctcaacacaaagaaatgacacatatttgaggtgatggatatgctaattaccctggttcggttattacgcaatgtatacatgtatcaaaacatcacactgtaccacataaatatgtatatttattatttgtcaattaaaagcaaaataaaacaaaaaaccttcatctaatactttggatcattgtgaaaaaataaattcctgaagtataaagcatctatctaagtgtcttgatctaataagtacttgttctacaaattattgaaaaacataaactctgttaatgtctcatggaacaggttgtgccttcagggaaactaggattggatttactaaattctcattttttagatctcagatactactgtcaaaatgacttcaattctgccttctatatataatacacacatatatttaggattttattgtaattctagtgttgctacatattagtctttatcaaacaaactgaattatgtgggaatcagtttattaattgtaaaaaataattataataaaattagctgatgtagttttttaaaagttaaacgagttttttgaatagcttcactcatttctagc

SEQ ID NO: 226805 - DNA, 2991 bp, Artificial Sequence
  derived and/or modified sequence
gcggttcctctaggaaaattcctttgtgcagatcaggcccgtggattggtgagtgaatcctaaccacgtcttccctggcctgtcttcactcttctccccagaatcaccacttctgcactggtgtctgaaggtgtattgagtgattttgtggagggcagaagtaggaagtctttgggacaaaactgtatttaccttgggatctgtgaacaagaggaacctcagcagccaggacaggcaggagcagtggaatagctactatggcttctggaatcctggttaatgtaaaggaggaggtgacctgccccatctgcctggaactcctgacacaacccctgagcctggactgcggccacagcttctgccaagcatgcctcactgcaaaccacaagaagtccatgctagacaaaggagagagtagctgccctgtgtgccggatcagttaccagcctgagaacatacggcctaatcggcatgtagccaacatagtggagaagctcagggaggtcaagttgagcccagaggggcagaaagttgatcattgtgcacgccatggagagaaacttctactcttctgtcaggaggacgggaaggtcatttgctggctttgtgagcggtctcaggagcaccgtggtcaccacacgttcctcacagaggaggttgcccgggagtaccaagtgaagctccaggcagctctggagatgctgaggcagaagcagcaggaagctgaagagttagaagctgacatcagagaagagaaagcttcctggaagactcaaatacagtatgacaaaaccaacgtcttggcagattttgagcaactgagagacatcctggactgggaggagagcaatgagctgcaaaacctggagaaggaggaggaagacattctgaaaagccttacgaactctgaaactgagatggtgcagcagacccagtccctgagagagctcatctcagatctggagcatcggctgcaggggtcagtgatggagctgcttcagggtgtggatggcgtcataaaaaggacggagaacgtgaccttgaagaagccagaaacttttccaaaaaatcaaaggagagtgtttcgagctcctgatctgaaaggaatgctagaagtgtttagagagctgacagatgtccgacgctactgggttgatgtgacagtggctccaaacaacatttcatgtgctgtcatttctgaagataagagacaagtgagctctccgaaaccacagataatatatggggcacgagggacaagataccagacatttgtgaatttcaattattgtactggcatcctgggctctcaaagtatcacatcagggaaacattactgggaggtagacgtgtccaagaaaactgcttggatcctgggggtatgtgctggcttccaacctgatgcaatgtgtaatattgaaaaaaatgaaaattatcaacctaaatacggctactgggttatagggttagaggaaggagttaaatgtagtgctttccaggatagttccttccatactccttctgttcctttcattgtgcccctctctgtgattatttgtcctgatcgtgttggagttttcctagactatgaggcttgcactgtctcattcttcaatatcacaaaccatggatttctcatctataagttttctcactgttctttttctcagcctgtatttccatatttaaatcctagaaaatgtggagtccccatgactctgtgctcaccaagctcttgaaccttcttacacactcagccccttctgtacagcacctcttgtccaggtgcatctcatacacctgaactcatttgcatcattttaaccatcttttccttgctgtctcccttctttctatttgaacgtccttcactcatcagtaaaatgtaataattgccttgtgccatattgtccccaatattttattgacatttgatagcaatttttttcatcattttccgtactcctaaggaaaactgacctatacctcataaaatgagaccgctatttaggtattacttctgccagatatttatcacccaattgcctctgacactgactaagaagatgaagaaaagcttttcaacagcctttctatatcatcgtgtgataattgttcaccaatgaatgagtccttagccctgtgtcagtttaccctcgatgcccttatttgtgagttaaagagaaaatatcataaatggtatactcttaagtatagaggttttgtatctagaggatctcagttcaactcctgtctctccatataccagcagtgtaactgtgaataacatacttaaatggctgtgcttatttccttttcttttcttttttctttttttttttttttgagatgaagttttgctcttgttccccaggctggagtgcaatggcacgatctcggttcactgcaacctccacctctcagattcaagcaattctcctgcctcagcctcccaagtagctgggattacaggtgcccaccaccacccctggctaaatttgtattttcagtagagacggggtttccccatgttggttaggctcgtctagaacctctgacctcaggtgatccacccgcctcggcctcccaaagtgctgggattacaggcgtgagccacggcgcccagcctgtgcttattttcttaaaataatttttgtattaaaaacttcacattaaataagtgctaatgttttattgcatagtagggtgactagagttaacaataacctattgcatatattttgaaatagctagaagagaggattttgaaagttctcaacacaaagaaatgacacatatttgaggtgatggatatgctaattaccctggttcggttattacgcaatgtatacatgtatcaaaacatcacactgtaccacataaatatgtatatttattatttgtcaattaaaagcaaaataaaacaaaaaaccttcatctaatactttggatcattgtgaaaaaataaattcctgaagtataaagcatcta

SEQ ID NO: 226806 - protein, 159 aa, Artificial Sequence
  derived and/or modified sequence
MFPFALLYVLSVSFRKIFILQLVGLVLTYDFTNCDFEKIKAAYLSTISKDLITYMSGTKSTEFNNTVSCSNRPHCLTEIQSLTFNPTAGCASLAKEMFAMKTKAALAIWCPGYSETQINATQAMKKRRKRKVTTNKCLEQVSQLQGLWRRFNRPLLKQQ

SEQ ID NO: 226807 - protein, 63 aa, Artificial Sequence
  derived and/or modified sequence
MFAMKTKAALAIWCPGYSETQINATQAMKKRRKRKVTTNKCLEQVSQLQGLWRRFNRPLLKQQ

SEQ ID NO: 226808 - DNA, 480 bp, Artificial Sequence
  derived and/or modified sequence
atgttccccttcgccctgctgtacgtgctgagcgtgagcttcagaaagatcttcatcctgcagctggtgggcctggtgctgacctacgacttcaccaactgcgacttcgagaagatcaaggccgcctacctgagcaccatcagcaaggacctgatcacctacatgagcggcaccaagagcaccgagttcaacaacaccgtgagctgcagcaacagaccccactgcctgaccgagatccagagcctgaccttcaaccccaccgccggctgcgccagcctggccaaggagatgttcgccatgaagaccaaggccgccctggccatctggtgccccggctacagcgagacccagatcaacgccacccaggccatgaagaagagaagaaagagaaaggtgaccaccaacaagtgcctggagcaggtgagccagctgcagggcctgtggagaagattcaacagacccctgctgaagcagcagtag

SEQ ID NO: 226809 - DNA, 480 bp, Artificial Sequence
  derived and/or modified sequence
atgttcccttttgcgttgctttatgttctttcagtgtcgttccgcaaaatatttattctacagttagtgggactggtgctgacctatgattttactaattgcgattttgagaaaattaaagccgcctacctaagtacgatttccaaagacctgataacttatatgtccggcacaaagtccactgaatttaataacactgtcagttgctccaaccggcctcactgtttaacagaaatccagagtttaacgtttaaccctactgccggatgtgcgtctctggccaaggaaatgttcgcgatgaagaccaaagccgcactcgctatatggtgccctggatactccgagacgcaaatcaatgcaacacaggccatgaaaaagcgacgcaagaggaaagtgactaccaacaaatgcctcgagcaggtgagccagcttcagggcctgtggcgccggtttaatcggcccctactgaagcaacagtag

SEQ ID NO: 226810 - DNA, 480 bp, Artificial Sequence
  derived and/or modified sequence
atgttcccctttgccctgctgtatgtgctgtctgtgtccttcaggaagatcttcatcctgcagctggtgggcctggtgctgacctatgacttcaccaactgtgactttgagaagatcaaggccgcctacctgagcaccatcagcaaggacctgatcacctacatgagcggcaccaagagcacagagttcaacaacacagtgtcctgcagcaaccggccccactgcctgacagagatccagagcctgaccttcaaccccacagctggctgtgccagcctggccaaggagatgtttgccatgaagaccaaggccgccctggccatctggtgccccggctacagcgagacccagatcaatgccacccaggccatgaagaagaggaggaagaggaaggtgaccaccaacaagtgcctggagcaggtgtcccagctgcagggcctgtggaggcgcttcaaccggcccctgctgaagcagcagtag

SEQ ID NO: 226811 - DNA, 480 bp, Artificial Sequence
  derived and/or modified sequence
atgttccccttcgccctgctgtacgtgctgagcgtgagcttccggaagatcttcattttgcagctagttggacttgtcctgacttacgactttacaaactgcgatttcgaaaagatcaaggctgcctacctgtccaccatttctaaagatttgattacttacatgagcggcactaagtctaccgaattcaataacactgtgtcctgttccaacagaccccactgcctgacagagattcagagcttaacttttaatcctacagccgggtgcgcttccctagctaaagagatgtttgcaatgaaaaccaaggccgctctggccatttggtgccccggttatagtgaaacccaaattaacgctacccaagcgatgaagaaacgtcgcaaaaggaaggtgaccaccaacaagtgtctcgagcaggtgagccagctgcagggactctggaggcgatttaacaggccactcctcaaacagcagtag

SEQ ID NO: 226812 - DNA, 480 bp, Artificial Sequence
  derived and/or modified sequence
atgttcccttttgctcttctttacgtgctgtccgtctcttttagaaagatcttcatcttgcaacttgtgggactggtgctgacttacgactttaccaattgtgattttgagaagattaaagctgcctacttatcgacaattagtaaagatcttattacgtacatgtccggcaccaaatccacagagttcaataatacagtatcatgtagcaacaggcctcactgtcttacagagatccagagtctcaccttcaaccctaccgcagggtgcgcgagcttagccaaagagatgttcgcgatgaagacgaaggctgcactggccatctggtgccccggatacagcgagactcagatcaacgccactcaggctatgaaaaagcggagaaaacgcaaggtgactaccaataaatgcctggaacaggtctcccagttgcagggcctctggcgaaggttcaaccgaccgctcctcaaacagcagtag

SEQ ID NO: 226813 - DNA, 736 bp, Artificial Sequence
  derived and/or modified sequence
gcagccagaaagctctggagcatcagggagactccaacttaaggcaacagcatgggtgaataagggcttcctgtggactggcaatgagaggcaaaacctggtgcttgagcactggcccctaaggcaggccttacagatctcttacactcgtggtgggaagagtttagtgtgaaactggggtggaattgggtgtccacgtatgttcccttttgccttactatatgttctgtcagtttctttcaggaaaatcttcatcttacaacttgtagggctggtgttaacttacgacttcactaactgtgactttgagaagattaaagcagcctatctcagtactatttctaaagacctgattacatatatgagtgggaccaaaagtaccgagttcaacaacaccgtctcttgtagcaatcggccacattgccttactgaaatccagagcctaaccttcaatcccaccgccggctgcgcgtcgctcgccaaagaaatgttcgccatgaaaactaaggctgccttagctatctggtgcccaggctattcggaaactcagataaatgctactcaggcaatgaagaagaggagaaaaaggaaagtcacaaccaataaatgtctggaacaagtgtcacaattacaaggattgtggcgtcgcttcaatcgacctttactgaaacaacagtaaaccatctttattatggtcatatttcacagcaccaaaataaatcatctttattaagta

SEQ ID NO: 226814 - DNA, 2411 bp, Artificial Sequence
  derived and/or modified sequence
accctcgccacgcccctgctcccccgcggttggttcttccttgctctactcaaccctgacctcttctctctgactctcgacttgtgttccccgctcctccctgaccttcctcccctcccctttcactcaattctcaccaactctttctctctctggtgttttctccttttctcgtaaactttgccgcctatgagcagccacattgccttactgaaatccagagcctaaccttcaatcccaccgccggctgcgcgtcgctcgccaaagaaatgttcgccatgaaaactaaggctgccttagctatctggtgcccaggctattcggaaactcagataaatgctactcaggcaatgaagaagaggagaaaaaggaaagtcacaaccaataaatgtctggaacaagtgtcacaattacaaggattgtggcgtcgcttcaatcgacctttactgaaacaacagtaaaccatctttattatggtcatatttcacagcaccaaaataaatcatctttattaagtagatgaaacattaactctaactgtgacaaagaagaccacaaatagttatcttttaattacagaagagtttcttaacttacttttgtaagtttttattgtgtaagtttataatgcaggggaagtactactcctcaaatgttgagggaagcttccataacattgatgactggcttcatggcagtaattctcggctgtagttgcataagcattgctcaagaggaaaatccaaaagtgcagcaggagaactcttttccctgaaaaaggaaaaatattgaactcaatgatagcacctaaacttacatttaaaagacagacattccttctacatgtaatgacacttcttgtgttaaactaaaaatttacaagagaagaaagtgaaagcaaatggggtttcacaaatagttgtaaatatagtgaagcaatttgaaataattttcaagcaaagtattgtgaaagtattctaagccaagttttaaatattatctaacagacaagagtggtatatacaagtagatcctgagaagtacctttgttacagctactataaatatacatataaattatagaatctactttaatttattttgtgaacacttttgaaaatgtacatgttcctttgtaattgacactatatatttcttaataaaataattctcaaatttgtttcttatgaatcatctctcaaatctagttagacaatttgcacacatacttttctaagggacattatcttccttcaggtttttacctccactcatccttagagcccactgactgctcccctttatacctgttggccctgcctataggagagaatatttggagataggcagcttcaggatgcattgcaatcatccttttcttaaattatgtcactagtcttttattttttcccctcttgaactttcctcacacctggaagaaacaaagtaggaaaaagtgaacaggggatgtcaaatcgattcttgaattcccgctgcaagctagagccgcaggcaccctctcactcaatttccactcagaaccctataaacaccagtgggaagggcaacccactgcacgtgggaatgcactgatttttcctaggagtagacatgttcctctaattactccctgagggttagttggggctaaaccatgacagaagtggggaagttcaatgtccttaaatccatcttacttgccaacaggtaagaggaagcttacattacatgtccagtccacatttaaagagcacttactgtggaacaagccttcagccaaacaatggggatagaaaagtaggtaagactcagcctttgtccagagaagctcagggtatagctgaataggcagtttcttttgtcctgaggaaaatcaggacatgcctgctttctaaaaatcttcctctgaagacctgacccaagctcttaaatgctattgtaagagaaatttctttgtctattaactccattttagtagggattcactgactagattttactgaactatgaaaataaatacacataatttttcacaaaattttgggcccaattcccctaaaagaattgaggattagggagaaaggagacaactcaaagtcatcccattaagtgcagtttctttgaatcttctgctttatctttaaaaatttgtataatttatatattttattctatgtgttccatagatatcttaatgtaaaattagtcatttaaattacactgtcaattaaaagtaatgggcaagagattgcatcatactaatttagtaagaacgttcccaaatgttgtaacaatgtggatcatacatctctggttttttaaatgtattgaggctttcttggtggactagtatagtatacggtcagttatgtcaatgtttcatggtcaataaaaaggaagttgcaaattgt

SEQ ID NO: 226815 - protein, 165 aa, Artificial Sequence
  derived and/or modified sequence
MEMFQGLLLLLLLSMGGTWASKEPLRPRCRPINATLAVEKEGCPVCITVNTTICAGYCPTMTRVLQGVLPALPQVVCNYRDVRFESIRLPGCPRGVNPVVSYAVALSCQCALCRRSTTDCGGPKDHPLTCDDPRFQDSSSSKAPPPSLPSPSRLPGPSDTPILPQ

SEQ ID NO: 226816 - protein, 163 aa, Artificial Sequence [sequence omitted]

SEQ ID NO: 226817 - protein, 155 aa, Artificial Sequence
  derived and/or modified sequence
MFQRLLLLLLLSMGGTWASKEPLRPRCRPINATLAVEKEGCPVCITVNTTICAGYCPTMTRVLQGVLPALPQVVCNYRDVRFESIRLPGCPRGVNPVVSYAVALSCQCALCRRSTTDCGGPKDHPLTCDDPRFQDSSSSKAPPPSLPSPSRLPGP

SEQ ID NO: 226818 - protein, 168 aa, Artificial Sequence
  derived and/or modified sequence
APRMEMFQGLLLLLLLSMGGTWASKEPLRPRCRPINATLAVEKEGCPVCITVNTTICAGYCPTMTRVLQGVLPALPQVVCNYRDVRFESIRLPGCPRGVNPVVSYAVALSCQCALCRRSTTDCGGPKDHPLTCDDPRFQDSSSSKAPPPSLPSPSRLPGPSDTPILPQ

SEQ ID NO: 226819 - protein, 33 aa, Artificial Sequence
  derived and/or modified sequence
DPRFQDSSSSKAPPPSLPSPSRLPGPSDTPILQ

SEQ ID NO: 226820 - DNA, 498 bp, Artificial Sequence
  derived and/or modified sequence
atggagatgtttcagggcctgcttctacttctgctgctgagcatgggcggaacgtgggcttctaaggagcccctaagaccacgctgtagacccataaatgctaccctcgccgtagaaaaagagggctgtccagtctgtatcactgttaacacaacgatttgcgcaggatactgtccaactatgacgcgcgtgttgcaaggcgtactcccagcgcttcctcaagtagtctgcaactacagggatgtgagatttgagagtatccgcttacccggatgccccagaggtgtaaacccagtggtctcatatgcagtggccctgtcctgccagtgcgcactgtgccggagatccacgaccgactgtggcggtccgaaggaccatccactcacttgcgacgatcctcggtttcaggacagcagctccagtaaagccccacccccaagcttgccatctccatcgagactgcccggaccaagcgacacgcctatcctcccacagtag

SEQ ID NO: 226821 - DNA, 492 bp, Artificial Sequence
  derived and/or modified sequence
atgttccaaggcctgctgctgttgctcctgctctctatgggcggaacgtgggctagcaaagaaccactgagacccaggtgccgccctattaacgcaacactggcagtagaaaaggagggttgcccagtgtgtatcactgtgaacaccacaatttgtgcagggtattgtcctaccatgactcgcgtgctgcaaggcgtgcttcctgccctcccacaggtggtttgtaattatagagatgtgagattcgagtcaatacgactgccaggttgcccgcgaggcgtgaaccccgtcgtatcttacgcagtcgcactatcctgtcagtgcgccctgtgccgcagatcgactacggactgcggaggacctaaggaccaccctctgacctgcgatgaccctagattccaagattccagctccagcaaagcaccgcctccttcactgccctcgccaagcagattgcctggcccttccgatacgccaatactgcctcaatag

SEQ ID NO: 226822 - DNA, 468 bp, Artificial Sequence
  derived and/or modified sequence
atgttccagcgattgctgctgctacttctcctgtcaatgggaggaacgtgggccagcaaggagccccttcgcccaagatgtaggcccattaacgcgacattggctgtggaaaaagagggttgcccggtttgtattactgtgaatacaacaatatgtgccggttactgtccaacaatgacccgagttctccagggcgtactcccggctctgccacaggtggtttgcaattatagggacgtcaggtttgaatccatacgcctacctggatgtcctaggggcgtgaatccagtggtctcctacgctgtcgcattgtcatgccagtgcgccctgtgccgacgctcaacgacggattgcgggggaccaaaagatcaccccttgacttgtgacgacccgagattccaagactctagctcatcaaaggcacctccgccaagcctcccaagcccctctcgactgcccggtccctag

SEQ ID NO: 226823 - DNA, 507 bp, Artificial Sequence
  derived and/or modified sequence
gccccacggatggagatgtttcagggcctgctccttttgctgctcctgagcatgggcggaacgtgggctagcaaggagcctctgcgcccaaggtgccgccctatcaatgcaactcttgccgtagagaaggaggggtgcccagtctgcataactgtcaatactactatttgtgcaggatactgccccacaatgacccgcgtcctgcagggagtgctgccagctttgccacaggtggtgtgtaattacagggatgttcggtttgaatcgatccgtttacccggttgtccccgaggcgttaatcccgtggtatcttacgctgtcgcactgtcttgtcaatgtgccctctgccggagaagcacaactgactgcggaggtcccaaagaccacccgctcacctgtgatgacccaaggttccaggatagttctagttctaaagccccaccaccatccttgccaagcccctccaggctccccggaccttccgacacccctatacttccccagtag

SEQ ID NO: 226824 - DNA, 498 bp, Artificial Sequence
  derived and/or modified sequence
atggagatgttccagggtctgctgctgctcctgcttctcagcatgggtggtacctgggcttctaaagagccactcaggccacggtgtaggcctattaacgcgactttggccgtggagaaagaaggttgtccagtgtgtatcactgtgaacaccaccatctgcgccggatattgtcccaccatgacgcgggttctgcagggggtcctacctgctctgccacaggtcgtttgcaactacagggacgtgcggtttgaatccataaggcttcctggctgtccgcgtggtgtgaacccagtcgtcagttacgctgtcgccctgtcatgccagtgtgccctgtgccggaggagcaccacggattgcggtggccctaaggatcatccccttacctgtgacgatcctcggtttcaggattcctcaagctccaaggccccaccgccaagcctgcctagcccatctcggctcccagggccatctgacactcccattctgcctcagtag

SEQ ID NO: 226825 - DNA, 498 bp, Artificial Sequence
  derived and/or modified sequence
atggaaatgttccaaggattgcttctgctcttactgctcagtatgggtggcacttgggcttcaaaagaacctcttagacctaggtgcagaccgataaatgctacactggccgtcgaaaaggaaggatgtcctgtgtgtattaccgtaaacacaacaatttgcgccggctattgcccaaccatgacccgggtcctccagggtgttctgcccgctctgcctcaggtcgtttgcaactatagagacgtgcggttcgagtctattagattgcctggctgtccccggggagtgaatcccgtcgtaagttatgccgtcgcactatcttgccaatgcgccctgtgcagaagatcgaccacagactgtggtggtccaaaggatcacccactgacatgcgacgatcctagattccaagatagctcctcatccaaagccccaccccctagtctgcctagtccatcccgactccccggccctagcgacacacctatcttaccacaatag

SEQ ID NO: 226826 - DNA, 492 bp, Artificial Sequence
  derived and/or modified sequence
atgttccaaggccttctcctgttactcctgctctcaatgggcggcacgtgggcaagcaaggaacctcttaggcctagatgtaggcctatcaacgcgactcttgctgtcgaaaaggaaggctgccctgtttgcatcactgtgaacaccaccatttgtgcaggctactgcccgaccatgacacgggtacttcaaggggtgttacctgctcttccacaggttgtatgtaactaccgggacgtccgcttcgagagtatcaggctacccggatgtcctaggggcgtgaacccagttgtcagctatgctgtggcacttagctgccagtgtgcactgtgccgaaggtcaactacagactgcggcggacctaaagaccacccactaacatgtgatgatccaaggttccaggattcttcgagctctaaagcccctcctccatctctaccgagcccttcccgcctgccaggtccgagcgatacacccattctgccccagtag

SEQ ID NO: 226827 - DNA, 468 bp, Artificial Sequence
  derived and/or modified sequence
atgtttcagagattgctcctcctgctcctactgtccatgggcggaacctgggcctccaaagagccacttagacctcgctgtcgaccaatcaatgctacattggcagtcgagaaggaaggttgtcccgtgtgtattaccgttaacacgaccatttgcgcagggtactgcccaactatgactcgggtccttcagggcgtcctgcccgccctcccacaggtggtgtgcaactaccgagacgtacgatttgagagcatacgcttgccgggctgcccccgcggagttaatccagttgtttcatatgctgtcgccctttcctgccagtgcgcgctgtgccggaggtctacaaccgactgtggcggacccaaggaccacccactcacctgtgacgaccccagatttcaagattcctcttcttctaaagcacctcctccctccttgcctagcccgagcaggctaccagggccttag

SEQ ID NO: 226828 - DNA, 507 bp, Artificial Sequence
  derived and/or modified sequence
gcaccccgcatggaaatgtttcagggtctcctgctcctgctgctgcttagcatgggaggcacgtgggcttcaaaagaaccccttcgtccgagatgccgaccaatcaacgccacgctcgccgtagaaaaagaaggttgccctgtttgtattaccgtgaataccactatttgcgccggttactgtcccaccatgactcgggttcttcagggggttctgccagctctaccccaggtggtttgtaattaccgtgacgtccgtttcgaatccattcggctcccaggatgtcctagaggagtgaacccggtcgtgtcctacgcagttgcactgtcctgtcaatgtgccctatgtcgaaggtctacaacggattgtgggggccctaaagaccatccattgacatgcgatgatccaagattccaggacagctctagctccaaggcccctccccccagtttgcccagcccttccaggctgccgggtccatccgacacccctatccttcctcagtag

SEQ ID NO: 226829 - DNA, 498 bp, Artificial Sequence
  derived and/or modified sequence
atggaaatgtttcaaggcctgttactgctgctgttactatcgatgggtggtacttgggcatcaaaagagcccctgcgccctagatgccgtccaattaacgctactctggccgtcgaaaaagagggctgtcctgtatgtatcaccgtgaataccacaatctgcgccggatactgtcccaccatgacgcgagtcctgcagggcgttttacctgctttaccacaagtggtgtgcaactatcgagatgtacggtttgaaagcataagactccccggatgcccaagaggcgttaatcctgttgtaagctatgccgttgcactctcttgccaatgcgcattgtgtcgcaggtccactacagattgtggtggcccaaaagatcacccgttgacctgcgatgaccccagatttcaggacagctcgtcaagcaaagcccctccaccttccctgccctcaccctcgagactgcctggtccatccgacaccccaatcctgcctcaatag

SEQ ID NO: 226830 - DNA, 498 bp, Artificial Sequence
  derived and/or modified sequence
atggaaatgttccagggactgctattactgctgctgctctccatgggaggaacatgggcgtcaaaggaacctctccgacctcgctgccggccgatcaatgcaacacttgccgtcgagaaagagggttgcccggtctgcatcaccgtcaacactacaatctgcgccggctactgtccgaccatgacacgggtcctgcaaggtgtcctgcccgcccttccacaggtcgtgtgcaactaccgcgacgtgcgattcgaatctatcaggcttccgggatgcccaagaggcgttaatccagttgtgtcctacgccgtggctctttcttgtcagtgtgccctgtgccggagaagcacaaccgattgcggaggccccaaggaccaccctctgacctgcgatgatccacgattccaggactctagctcttctaaagccccgccaccaagcctgccatccccatcaaggctgccaggaccatccgatactcccatcttaccacaatag

SEQ ID NO: 226831 - DNA, 886 bp, Artificial Sequence
  derived and/or modified sequence
gcttcagtccagcacctttctcgggtcacggcctcctcctggctcccaggaccccaccataggcagaggcaggccttcctacaccctactccctgtgcctccaggctcgactagtccctagcactcgacgactgagtctctgaggtcacttcaccgtggtctccgcctcacccttggcgctggaccagtgagaggagagggctggggcgctccgctgagccactcctgcgcccccctggccttgtctacctcttgccccccgaagggttagtgtcgagctcactccagcatcctacaacctcctggtggccttgccgcccccacaaccccgaggtttaaagccaggtacacgaggcaggggacacaccaaggatggagatgttccaggggctgctgctgttgctgctgctgagcatgggcgggacatgggcatccaaggagccgcttcggccacggtgccgccccatcaatgccaccctggctgtggagaaggagggctgccccgtgtgcatcaccgtcaacaccaccatctgtgccggctactgccccaccatgacccgcgtgctgcagggggtcctgccggccctgcctcaggtggtgtgcaactaccgcgatgtgcgcttcgagtccatccggctccctggctgcccgcgcggcgtgaaccccgtggtctcctacgccgtggctctcagctgtcaatgtgcactctgccgccgcagcaccactgactgcgggggtcccaaggaccaccccttgacctgtgatgacccccgcttccaggactcctcttcctcaaaggcccctccccccagccttccaagtccatcccgactcccggggccctcggacaccccgatcctcccacaataaaggcttctcaatccgc

SEQ ID NO: 226832 - DNA, 492 bp, Artificial Sequence
  derived and/or modified sequence
atgtttcagggtctgcttctcctccttctcctttctatggggggaacctgggcatcaaaggagcctttaagaccaagatgtcgtcctattaatgccacacttgcggttgaaaaggagggatgccccgtgtgcataacggtaaatacaacaatttgcgccggctactgtcctaccatgacccgtgttctgcagggcgtgttgcctgcccttcctcaggtcgtgtgcaattatagggatgtacggtttgagagcatccgtcttcctggctgtcccagaggtgtaaacccggtggtgagttatgccgtcgcactttcctgccaatgcgccctatgccggcgatctaccaccgattgcggcggccccaaagatcacccacttacctgcgatgaccctagatttcaagattcttcctcctccaaggctcccccaccatctctgccttcaccatccaggctccctggaccaagcgacactccaatcctgcctcagtag

SEQ ID NO: 226833 - DNA, 468 bp, Artificial Sequence
  derived and/or modified sequence
atgttccaacgcctgttactgttgctgcttctgagtatgggaggaacatgggctagtaaggagcccttgagacctcgatgcagacccataaacgcaaccttagcagttgagaaagaaggctgccccgtgtgcataactgtaaacacaacgatttgtgccggctactgtcccacaatgactcgggtcctgcagggtgtgctccccgctttgccccaagttgtgtgcaattaccgcgacgtgcgctttgaaagtattcggctgcctggctgccctcgcggtgtcaacccagttgtatcgtatgccgtcgccctttcttgccagtgtgccctgtgcagacgctctactaccgattgtggcggacccaaagaccatccactgacctgcgacgaccccagattccaagactcttcttccagtaaagctccaccgccatcactgcctagtccttctaggctcccaggaccttag

SEQ ID NO: 226834 - DNA, 507 bp, Artificial Sequence
  derived and/or modified sequence
gcaccccgcatggaaatgtttcagggtctcctgctcctgctgctgcttagcatgggaggcacgtgggcttcaaaagaaccccttcgtccgagatgccgaccaatcaacgccacgctcgccgtagaaaaagaaggttgccctgtttgtattaccgtgaataccactatttgcgccggttactgtcccaccatgactcgggttcttcagggggttctgccagctctaccccaggtggtttgtaattaccgtgacgtccgtttcgaatccattcggctcccaggatgtcctagaggagtgaaccccgtcgtgagttacgctgtcgcgcttagttgtcagtgcgctctgtgtaggagatctacaaccgattgtgggggccctaaagaccatcccttgacatgtgacgacccccggttccaggattcatctagctccaaagcccctcccccctctctcccgagtccgtcccgtctccccggtcctagcgacacaccaatcctcccccagtag

SEQ ID NO: 226835 - DNA, 498 bp, Artificial Sequence
  derived and/or modified sequence
atggaaatgtttcaaggcctgttactgctgctgttactatcgatgggtggtacttgggcatcaaaagagcccctgcgccctagatgccgtccaattaacgctactctggccgtcgaaaaagagggctgtcctgtatgtatcaccgtgaataccacaatctgcgccggatactgtcccaccatgacgcgagtcctgcagggcgttttacctgctttaccacaagtggtgtgcaactatcgagatgtacggtttgaaagcataagactccccggatgcccaagaggcgttaatcctgttgtatcttatgcagtggctttaagttgccagtgtgctctttgtcgccgatccacaactgactgcggcggaccaaaagatcatcctctcacctgcgatgacccacggttccaggacagttcctcatctaaagcccctcccccaagtttaccctcgccaagccgactcccaggcccatccgacacgccgatccttccccagtag

SEQ ID NO: 226836 - DNA, 498 bp, Artificial Sequence
  derived and/or modified sequence
atggagatgttccagggcctgctgctgctgctgctgctgagcatgggcggcacctgggccagcaaggagcccctgagacccagatgcagacccatcaacgccaccctggccgtggagaaggagggctgccccgtgtgcatcaccgtgaacaccaccatctgcgccggctactgccccaccatgaccagagtgctgcagggcgtgctgcccgccctgccccaggtggtgtgcaactacagagacgtgagattcgagagcatcagactgcccggctgccccagaggcgtgaaccccgtggtgagctacgccgtggccctgagctgccagtgcgccctgtgcagaagaagcaccaccgactgcggcggccccaaggaccaccccctgacctgcgacgaccccagattccaggacagcagcagcagcaaggcccccccccccagcctgcccagccccagcagactgcccggccccagcgacacccccatcctgccccagtag

SEQ ID NO: 226837 - DNA, 614 bp, Artificial Sequence
  derived and/or modified sequence
gtccaacacccctcactccctgtctcactcccccacggagactcaatttactttccatgtccacattcccagtgcttgcggaagatatcccgctaagagagagacatgtcaaagaggctgctgctgttgctgctgctgagcatgggcgggacatgggcatccaaggagccgcttcggccacggtgccgccccatcaatgccaccctggctgtggagaaggagggctgccccgtgtgcatcaccgtcaacaccaccatctgtgccggctactgccccaccatgacccgcgtgctgcagggggtcctgccggccctgcctcaggtggtgtgcaactaccgcgatgtgcgcttcgagtccatccggctccctggctgcccgcgcggcgtgaaccccgtggtctcctacgccgtggctctcagctgtcaatgtgcactctgccgccgcagcaccactgactgcgggggtcccaaggaccaccccttgacctgtgatgacccccgcttccaggactcctcttcctcaaaggcccctccccccagccttccaagtccatcccgtctcccggggccctaggacaccccgatcctcccacaataaaggcttctcaatccgca

SEQ ID NO: 226838 - DNA, 917 bp, Artificial Sequence
  derived and/or modified sequence
tgcaggaaagcctcaagtagaggagggttgaggcttcaatccagcactttgctcgggtcacggcctcctcctggctcccaggaccccaccataggcagaggcaggccttcctacaccctactccctgtgcctccaggctcgactagtccctagcactcgacgactgagtctctgagatcacttcaccgtggtctccgcctcacccttggcgctggaccagtgagaggagagggctggggcgctccgctgagccactcctgcgcccccctggccttgtctacctcttgccccccgaagggttagtgtcgagctcaccccagcatcctacaacctcctggtggccttgccgcccccacaaccccgaggtataaagccaggtacacgaggcaggggacgcaccaaggatggagatgttccaggggctgctgctgttgctgctgctgagcatgggcgggacatgggcatccaaggagccgcttcggccacggtgccgccccatcaatgccaccctggctgtggagaaggagggctgccccgtgtgcatcaccgtcaacaccaccatctgtgccggctactgccccaccatgacccgcgtgctgcagggggtcctgccggccctgcctcaggtggtgtgcaactaccgcgatgtgcgcttcgagtccatccggctccctggctgcccgcgcggcgtgaaccccgtggtctcctacgccgtggctctcagctgtcaatgtgcactctgccgccgcagcaccactgactgcgggggtcccaaggaccaccccttgacctgtgatgacccccgcttccaggactcctcttcctcaaaggcccctccccccagccttccaagtccatcccgactcccggggccctcggacaccccgatcctcccacaataaaggcttctcaatccg

SEQ ID NO: 226839 - DNA, 492 bp, Artificial Sequence
  derived and/or modified sequence
atgttccagggcctgctgctgctgctgctgctgagcatgggcggcacctgggccagcaaggagcccctgagacccagatgcagacccatcaacgccaccctggccgtggagaaggagggctgccccgtgtgcatcaccgtgaacaccaccatctgcgccggctactgccccaccatgaccagagtgctgcagggcgtgctgcccgccctgccccaggtggtgtgcaactacagagacgtgagattcgagagcatcagactgcccggctgccccagaggcgtgaaccccgtggtgagctacgccgtggccctgagctgccagtgcgccctgtgcagaagaagcaccaccgactgcggcggccccaaggaccaccccctgacctgcgacgaccccagattccaggacagcagcagcagcaaggcccccccccccagcctgcccagccccagcagactgcccggccccagcgacacccccatcctgccccagtag

SEQ ID NO: 226840 - DNA, 468 bp, Artificial Sequence
  derived and/or modified sequence
atgttccagagactgctgctgctgctgctgctgagcatgggcggcacctgggccagcaaggagcccctgagacccagatgcagacccatcaacgccaccctggccgtggagaaggagggctgccccgtgtgcatcaccgtgaacaccaccatctgcgccggctactgccccaccatgaccagagtgctgcagggcgtgctgcccgccctgccccaggtggtgtgcaactacagagacgtgagattcgagagcatcagactgcccggctgccccagaggcgtgaaccccgtggtgagctacgccgtggccctgagctgccagtgcgccctgtgcagaagaagcaccaccgactgcggcggccccaaggaccaccccctgacctgcgacgaccccagattccaggacagcagcagcagcaaggcccccccccccagcctgcccagccccagcagactgcccggcccctag

SEQ ID NO: 226841 - DNA, 507 bp, Artificial Sequence
  derived and/or modified sequence
gcccccagaatggagatgttccagggcctgctgctgctgctgctgctgagcatgggcggcacctgggccagcaaggagcccctgagacccagatgcagacccatcaacgccaccctggccgtggagaaggagggctgccccgtgtgcatcaccgtgaacaccaccatctgcgccggctactgccccaccatgaccagagtgctgcagggcgtgctgcccgccctgccccaggtggtgtgcaactacagagacgtgagattcgagagcatcagactgcccggctgccccagaggcgtgaaccccgtggtgagctacgccgtggccctgagctgccagtgcgccctgtgcagaagaagcaccaccgactgcggcggccccaaggaccaccccctgacctgcgacgaccccagattccaggacagcagcagcagcaaggcccccccccccagcctgcccagccccagcagactgcccggccccagcgacacccccatcctgccccagtag

SEQ ID NO: 226842 - DNA, 498 bp, Artificial Sequence
  derived and/or modified sequence
atggagatgttccagggtctgcttctgctcttactgttatcgatgggtgggacttgggcctctaaagagcctctccgccctaggtgtcggcccattaacgccaccctggctgttgagaaagaaggatgcccagtgtgtattactgtgaatactaccatctgtgcgggttactgtcctacaatgaccagggttttgcagggtgttctgccagccctgccccaggtggtgtgcaactacagggatgtgcgatttgagtccattaggctccctggctgtcctcggggcgttaacccagtcgtgagctatgctgtggccctgtcctgtcagtgcgctctttgtaggaggtctaccaccgattgtggcggccctaaagaccaccctctaacttgtgatgatcctaggtttcaggactcaagtagttcaaaagctcctcctccctctctaccatctccaagcaggttgcctgggcctagtgatacgcccatccttccccagtag

SEQ ID NO: 226843 - DNA, 492 bp, Artificial Sequence
  derived and/or modified sequence
atgtttcaaggtctgttactgctcctgctgctcagtatgggaggaacatgggcatctaaagaacctcttcggcccagatgccgtcctatcaatgccacactggcagtcgagaaggaagggtgccccgtgtgtataaccgtaaacactactatttgcgctggatactgcccgacgatgacacgggttttgcagggagtattaccggctctcccccaggtcgtgtgtaactatagagacgtccgattcgaatccatccgcttacccggatgcccacggggcgtcaatcccgtggtctcttacgccgtggcgctgtcttgccagtgcgccttgtgcaggcgttcaaccactgactgcggtggcccaaaagatcaccctctaacctgcgacgacccccgttttcaggactcttccagctccaaggccccgccaccatcactcccaagcccctcacgcttaccgggcccgtccgacacccccatcctgcctcagtag

SEQ ID NO: 226844 - DNA, 468 bp, Artificial Sequence
  derived and/or modified sequence
atgtttcagcgcctcctgctgctgctgttgctatccatggggggcacttgggcctcgaaagagcctcttagaccaaggtgtcggcctatcaacgccaccttggctgtggagaaagagggctgcccagtctgtataaccgtgaatactaccatctgtgcgggctattgccctactatgacacgtgtattgcagggtgttttgcctgcacttccccaggtagtgtgtaattacagggatgtaagattcgagtctataagactgccaggatgcccaagaggcgtcaaccccgtggtgagttacgcagtagccctaagctgccaatgtgcgctgtgccgaagaagcacaactgactgcggcgggccaaaggaccatcccctgacttgcgatgatcctcgcttccaggacagcagcagcagtaaggccccgcccccttctctgccatctccgtcacgactccccggaccttag

SEQ ID NO: 226845 - DNA, 917 bp, Artificial Sequence
  derived and/or modified sequence
tgcaggaaagcctcaagtagaggagggttgaggcttcagtccagcacctttctcgggtcacggcctcctcctggctcccaggaccccaccataggcagaggcaggccttcctacaccctactccctgtgcctccaggctcgactagtccctagcactcgacgactgagtctctgaggtcacttcaccgtggtctccgcctcacccttggcgctggaccagtgagaggagagggctggggcgctccgctgagccactcctgcgcccccctggccttgtctacctcttgccccccgaagggttagtgtcgagctcactccagcatcctacaacctcctggtggccttgccgcccccacaaccccgaggtttaaagccaggtacacgaggcaggggacacaccaaggatggagatgttccaggggctgctgctgttgctgctgctgagcatgggcgggacatgggcatccaaggagccgcttcggccacggtgccgccccatcaatgccaccctggctgtggagaaggagggctgccccgtgtgcatcaccgtcaacaccaccatctgtgccggctactgccccaccatgacccgcgtgctgcagggggtcctgccggccctgcctcaggtggtgtgcaactaccgcgatgtgcgcttcgagtccatccggctccctggctgcccgcgcggcgtgaaccccgtggtctcctacgccgtggctctcagctgtcaatgtgcactctgccgccgcagcaccactgactgcgggggtcccaaggaccaccccttgacctgtgatgacccccgcttccaggactcctcttcctcaaaggcccctccccccagccttccaagtccatcccgactcccggggccctcggacaccccgatcctcccacaataaaggcttctcaatccg

SEQ ID NO: 226846 - DNA, 507 bp, Artificial Sequence
  derived and/or modified sequence
gcgcctagaatggaaatgttccaggggctgcttctgctgctgctcctgtccatgggaggtacttgggcctccaaggaacccctgcgtccgcgctgtcgccccatcaacgccaccctcgcagtggaaaaggaggggtgtcctgtgtgcattaccgtgaacactacaatttgcgccggatactgccctactatgaccagagtgctgcagggcgtgcttcccgctctgccacaagtggtctgcaattacagggatgttcgcttcgaatcgataaggctccccgggtgcccacggggagtgaacccagtcgtcagttatgctgtggcgttgtcatgtcagtgcgcactatgtagaagatctacgactgattgtggcggtcctaaggatcaccctctaacctgtgacgacccaagattccaggactcgtccagcagcaaggctcctcctcccagtctaccctccccgtccaggctgcccggcccctccgatactcctattctgccccagtag

SEQ ID NO: 226847 - DNA, 498 bp, Artificial Sequence
  derived and/or modified sequence
atggagatgttccagggtctcttgcttctcttattgctgagcatggggggcacctgggcatcaaaagaaccactgagaccaagatgccgccctattaatgctactctggcggtggaaaaagaggggtgcccagtgtgcattactgtcaataccaccatctgtgccgggtattgtccaaccatgacccgcgtgctgcagggagtgctgcctgccctcccccaggtggtttgtaattacagggacgttagattcgagagcattcgcttgcccgggtgcccacggggcgtcaatcccgtggtatcctacgccgtagcactgtcctgtcaatgtgcattatgcaggcggtctacaactgattgtgggggccctaaagatcaccccctaacatgcgatgaccctaggttccaggattcatcaagcagtaaagcccctcctccttcactgcctagcccctccagactcccagggccttccgatacacctatcctgccacaatag

SEQ ID NO: 226848 - DNA, 498 bp, Artificial Sequence
  derived and/or modified sequence
atggagatgttccagggcctgctgctgctgctgctgctgtccatgggcggcacctgggccagcaaggagcccctgcggccccgctgccggcccatcaatgccaccctggccgtggagaaggagggctgccctgtgtgcatcaccgtgaacaccaccatctgtgccggctactgccccaccatgaccagggtgctgcagggcgtgctgcctgccctgccccaggtggtgtgcaactacagagatgtgcgctttgagagcatccggctgcccggctgcccccggggcgtgaaccctgtggtgtcctatgctgtggccctgagctgccagtgtgccctgtgccgccgcagcaccacagactgtggcggccccaaggaccaccccctgacctgtgatgacccccgcttccaggacagcagcagcagcaaggcccccccacccagcctgcccagccccagccggctgcccggccccagcgacacccccatcctgccccagtag

SEQ ID NO: 226849 - DNA, 492 bp, Artificial Sequence
  derived and/or modified sequence
atgttccagggcctgctgctgctgctgctgctgtccatgggcggcacctgggccagcaaggagcccctgcggccccgctgccggcccatcaatgccaccctggccgtggagaaggagggctgccctgtgtgcatcaccgtgaacaccaccatctgtgccggctactgccccaccatgaccagggtgctgcagggcgtgctgcctgccctgccccaggtggtgtgcaactacagagatgtgcgctttgagagcatccggctgcccggctgcccccggggcgtgaaccctgtggtgtcctatgctgtggccctgagctgccagtgtgccctgtgccgccgcagcaccacagactgtggcggccccaaggaccaccccctgacctgtgatgacccccgcttccaggacagcagcagcagcaaggcccccccacccagcctgcccagccccagccggctgcccggccccagcgacacccccatcctgccccagtag

SEQ ID NO: 226850 - DNA, 468 bp, Artificial Sequence
  derived and/or modified sequence
atgttccagaggctgctgctgctgctgctgctgtccatgggcggcacctgggccagcaaggagcccctgcggccccgctgccggcccatcaatgccaccctggccgtggagaaggagggctgccctgtgtgcatcaccgtgaacaccaccatctgtgccggctactgccccaccatgaccagggtgctgcagggcgtgctgcctgccctgccccaggtggtgtgcaactacagagatgtgcgctttgagagcatccggctgcccggctgcccccggggcgtgaaccctgtggtgtcctatgctgtggccctgagctgccagtgtgccctgtgccgccgcagcaccacagactgtggcggccccaaggaccaccccctgacctgtgatgacccccgcttccaggacagcagcagcagcaaggcccccccacccagcctgcccagccccagccggctgcccggcccctag

SEQ ID NO: 226851 - DNA, 507 bp, Artificial Sequence
  derived and/or modified sequence
gcccccaggatggagatgttccagggcctgctgctgctgctgctgctgtccatgggcggcacctgggccagcaaggagcccctgcggccccgctgccggcccatcaatgccaccctggccgtggagaaggagggctgccctgtgtgcatcaccgtgaacaccaccatctgtgccggctactgccccaccatgaccagggtgctgcagggcgtgctgcctgccctgccccaggtggtgtgcaactacagagatgtgcgctttgagagcatccggctgcccggctgcccccggggcgtgaaccctgtggtgtcctatgctgtggccctgagctgccagtgtgccctgtgcagaagaagcaccacagactgtggcggccccaaggaccaccccctgacctgtgatgacccccgcttccaggacagcagcagcagcaaggcccccccacccagcctgcccagccccagccggctgcccggccccagcgacacccccatcctgccccagtag

SEQ ID NO: 226852 - DNA, 498 bp, Artificial Sequence
  derived and/or modified sequence
atggagatgttccagggcctgctgctgctgctgctgctgagcatgggaggcacatgggcatccaaggagcccctcaggcctcggtgccggcctatcaacgccaccctagccgtcgaaaaggaagggtgtccagtatgcattaccgtgaatactactatctgcgccggatactgccctaccatgactagggtgctgcaaggagtcctcccagccctgcctcaagtggtctgcaactacagggacgtcagattcgaaagtatcaggctacctggctgcccccggggcgtcaatccagtggtgtcatatgctgtagctctgagttgtcagtgcgcgttgtgtagacgctccaccacggactgcgggggcccaaaagatcatccactgacttgtgacgacccccgattccaagacagctcaagctcaaaggctccccctcctagtctcccttctccgtcccggctgccaggtccttcagatactcctatattaccccaatag

SEQ ID NO: 226853 - DNA, 492 bp, Artificial Sequence
  derived and/or modified sequence
atgttccagggcctgctgctgctgctgctgctgagcatgggcggcacttgggctagcaaggagcctctccgccctagatgcaggcccattaacgccactcttgctgtggaaaaagagggatgtcccgtatgcattacggtgaatacgaccatctgcgccggatactgtcctacgatgacaagagttctgcagggggtgctgccagccctcccccaggttgtgtgcaactatcgagacgtgcgcttcgaatccataaggcttcccggctgcccccgcggcgttaatccagtcgtcagctatgctgtcgctctgtcctgtcagtgtgcactgtgtcggcggagcaccactgattgtggaggcccaaaggaccacccactgacttgtgatgacccacgatttcaggatagcagctctagcaaagccccccccccatctcttccaagccccagccgactacctggccctagcgatacaccaattttacctcagtag

SEQ ID NO: 226854 - DNA, 468 bp, Artificial Sequence
  derived and/or modified sequence
atgttccagcggctgctgctgctgctgctgctgagcatgggcggcacatgggcctctaaggagcccctgcgcccgcggtgtagaccgatcaatgctacgctcgcggttgaaaaagagggctgtccagtgtgcatcacagtcaataccactatctgtgccggctattgccccacaatgacccgggttctgcaaggggtactccctgccctcccccaggtcgtgtgtaattacagagacgtgcgctttgagagcattaggctgccagggtgtcctcgaggcgttaatcccgtcgtttcctacgccgttgcactatcctgtcagtgtgccctatgccgcaggtctactacggattgtggcggtcctaaggaccaccctctgacatgtgatgacccacgtttccaggactccagcagttccaaggctccacccccctctctgccctcacccagccgattgcccgggccatag

SEQ ID NO: 226855 - DNA, 507 bp, Artificial Sequence
  derived and/or modified sequence
gccccccggatggagatgttccagggcctgctgctgctgctgctgctctctatggggggcacttgggcaagcaaggagccactccggccgagatgtaggcccatcaacgccactctggctgtggagaaggaagggtgcccagtgtgcatcactgttaatactactatctgtgcgggctactgccccacgatgactcgcgtgttacagggagtactgcctgcactgccccaggttgtctgcaattatcgagatgtccgcttcgagagcattaggctgccaggctgcccgagaggtgttaacccggtcgtatcctacgcagtggccttaagctgtcagtgcgcgctctgccggcggagcacaaccgattgtgggggcccaaaggaccaccctctgacatgcgacgacccaagatttcaggacagttcgtcatcaaaagcgcctccaccgtccttgccgtccccttccagacttccagggccctctgatactcctatactgcctcagtag

SEQ ID NO: 226856 - DNA, 520 bp, Artificial Sequence
  derived and/or modified sequence
cacaccaaggatggagatgttccagaggctgctgctgttgctgctgctgagcatgggcgggacatgggcatccaaggagccgcttcggccacggtgccgccccatcaatgccaccctggctgtggagaaggagggctgccccgtgtgcatcaccgtcaacaccaccatctgtgccggctactgccccaccatgacccgcgtgctgcagggggtcctgccggccctgcctcaggtggtgtgcaactaccgcgatgtgcgcttcgagtccatccggctccctggctgcccgcgcggcgtgaaccccgtggtctcctacgccgtggctctcagctgtcaatgtgcactctgccgccgcagcaccactgactgcgggggtcccaaggaccaccccttgacctgtgatgacccccgcttccaggactcctcttcctcaaaggcccctccccccagccttccaagtccatcccgtctcccggggccctaggacaccccgatcctcccacaataaaggcttctcaat

SEQ ID NO: 226857 - DNA, 498 bp, Artificial Sequence
  derived and/or modified sequence
atggagatgttccagggcctgctgctgctgctgctgctgagcatggggggcacatgggccagcaaagagcccctccgccctagatgcaggcccataaatgccactcttgcggttgaaaaggagggttgccccgtatgcattactgtgaatactacgatttgcgctgggtactgtcccaccatgacccgagtgttacagggtgtcctgcccgccctgccgcaggtcgtgtgtaactacagggacgtccgcttcgaaagcattcggttaccaggatgccctcggggcgtcaatcctgtagtctcatatgccgtggcactgagctgccagtgcgctctttgcagacggtccacaacagattgcggtgggcctaaagatcaccctctaacatgcgatgatccacggttccaagattccagcagcagcaaggcgccacctccaagcctcccctccccatcgaggctgcccggcccctcggatactccaatcctcccacagtag

SEQ ID NO: 226858 - DNA, 498 bp, Artificial Sequence
  derived and/or modified sequence
atggaaatgtttcagggcctcctgttgttactgttactcagcatgggtggcacttgggcctctaaggagcccctgcggccgaggtgccggcctatcaatgctaccctggcagttgagaaggagggctgccctgtctgcatcaccgttaataccaccatctgcgccgggtattgcccaaccatgaccagagttttgcagggcgtcttgccagcgctcccacaggtggtctgcaactaccgggacgtacgcttcgaatccatcaggctgcccggctgtccccggggtgttaacccagttgtgtcatacgccgtggcactttcttgtcagtgcgctctttgcaggaggtcaactaccgattgtgggggaccaaaagatcaccctttgacttgtgacgatcccagattccaggactcttcctccagtaaagctcctccaccttctttgccttctccttctcggctacctgggccttcggatacgcccattctaccccagtag

SEQ ID NO: 226859 - DNA, 507 bp, Artificial Sequence
  derived and/or modified sequence
gctccgcggatggagatgttccaaggactgctgctgttgctcctcctgagtatgggcggtacctgggcatcgaaagagccccttcgacccaggtgccggcctattaatgccactttggcagtagagaaggagggatgtccggtgtgcattacagtgaacaccacaatctgcgcagggtactgtcccacaatgacccgggtgctccagggcgttttgcccgcactgccccaggtggtatgcaattacagggatgtcaggtttgagtcaattcgactcccaggatgtccccgtggcgtgaatcctgttgtttcctatgcagtcgccctttcctgtcaatgcgccctgtgtcggagaagcacaacagactgtggtggacccaaggatcacccgttaacatgcgacgatccgaggtttcaggactcatcttcgtccaaggcgcctcccccatccctcccgtctccctcaaggctgccaggtccttcggacacccctatactgccacagtag

SEQ ID NO: 226860 - DNA, 498 bp, Artificial Sequence
  derived and/or modified sequence
atggagatgttccagggcctgctgctgctgctgctgctgagcatgggtggtacctgggcgtccaaagaaccgctgcggccacggtgcaggcccatcaacgcaaccctcgctgtcgaaaaagaggggtgtccggtctgtatcaccgtgaatacaacaatctgtgccggctactgccctaccatgactagggttctccaaggcgtgctcccggccctccctcaggtagtgtgtaattatcgggacgttagattcgaaagtattaggctgcccggctgcccccggggcgtgaacccagtcgtctcttacgctgtagccctctcctgtcagtgcgcgttgtgccggcggagcactacagattgcggcggccctaaggatcacccgctgacatgcgacgacccccggtttcaagacagttctagctcaaaggctccccccccctctttgccctccccttccaggctgccaggaccaagcgatacaccaatccttccacagtag

SEQ ID NO: 226861 - DNA, 507 bp, Artificial Sequence
  derived and/or modified sequence
gccccccggatggagatgttccagggcctgctgctgctgctgctgttaagcatgggagggacctgggcctctaaggagcctttgaggcctaggtgcaggccaataaacgccacgctggccgtagaaaaagagggatgcccggtttgcatcacagtgaacacgactatctgcgccggatactgccccactatgaccagggtcctgcaaggggttcttcctgctctcccacaagtcgtgtgtaattaccgtgatgttcggttcgagagcatccgattgcccggttgccctcgtggtgtgaaccccgtagtgtcttatgcagtggctctgagttgccagtgtgcgctgtgccgccgaagtaccacggactgcggcggtcctaaagatcaccccttgacttgtgatgatcccaggttccaggacagcagttcgtccaaagccccaccgccgagcctaccctccccgagtcgcttgcctggaccaagtgataccccaattctgcctcaatag

SEQ ID NO: 226862 - DNA, 498 bp, Artificial Sequence
  derived and/or modified sequence
atggaaatgtttcaaggcctcttgttgctgcttctcctgtccatggggggtacatgggcaagcaaagagccattgcgcccacggtgccggcctatcaacgctaccctggctgtggagaaagaaggctgtccggtctgtatcacggtgaatactacaatctgcgctggttattgtcctacaatgaccagggtgctccagggagtgttgcctgccctcccccaagtggtgtgcaattatcgggatgtgagattcgaatccattcgattgcccggatgccccaggggagtgaaccctgtcgtatcctatgcagtcgccctgtcctgtcagtgtgcactctgtagacgaagcactactgactgtggcggacctaaagaccatccactgacctgtgacgaccccaggtttcaggattctagttcttctaaggcaccaccaccctctctcccgagtccaagtaggctgcctgggccttctgacactcctattctcccccagtag

SEQ ID NO: 226863 - DNA, 507 bp, Artificial Sequence
  derived and/or modified sequence
gctcctcggatggagatgtttcagggtttacttctccttcttctgttatcaatgggtgggacctgggctagtaaggaaccactgcggccaaggtgccggcctattaacgccactctggcagtggagaaggagggctgtccagtctgcatcactgtgaacaccactatctgcgcagggtactgtcctacaatgacccgcgtgctgcagggagttttacctgccctgccacaagtggtgtgcaattacagggacgttcgctttgagtccataagactccccggatgtcccaggggagttaacccagttgtgagttatgctgttgccctctcatgtcagtgcgctctctgcaggaggagcaccactgactgtggcggtcccaaagaccaccccctgacatgtgatgaccccaggttccaggatagctcgtcgagtaaggcacccccaccgtcactgccgagcccctcgcggctccccggtccatccgacaccccaatcttaccgcagtag

SEQ ID NO: 226864 - DNA, 917 bp, Artificial Sequence
  derived and/or modified sequence
tgcaggaaagcctcaagtagaggagggttgaggcttcagtccagcacctttctcgggtcacggcctcctcctggctcccaggaccccaccataggcagaggcaggccttcctacaccctactccctgtgcctccagcctcgactagtccctagcactcgacgactgagtctctgaggtcacttcaccgtggtctccgcctcacccttggcgctggaccagtgagaggagagggctggggcgctccgctgagccactcctgcgcccccctggccttgtctacctcttgccccccgaggggttagtgtcgagctcaccccagcatcctatcacctcctggtggccttgccgcccccacaaccccgaggtataaagccaggtacacgaggcaggggacgcaccaaggatggagatgttccaggggctgctgctgttgctgctgctgagcatgggcgggacatgggcatccaaggagccgcttcggccacggtgccgccccatcaatgccaccctggctgtggagaaggagggctgccccgtgtgcatcaccgtcaacaccaccatctgtgccggctactgccccaccatgacccgcgtgctgcagggggtcctgccggccctgcctcaggtggtgtgcaactaccgcgatgtgcgcttcgagtccatccggctccctggctgcccgcgcggcgtgaaccccgtggtctcctacgccgtggctctcagctgtcaatgtgcactctgccgccgcagcaccactgactgcgggggtcccaaggaccaccccttgacctgtgatgacccccgcttccaggactcctcttcctcaaaggcccctccccccagccttccaagcccatcccgactcccggggccctcggacaccccgatcctcccacaataaaggcttctcaatccg

SEQ ID NO: 226865 - RNA, 498 nt, Artificial Sequence
  derived and/or modified sequence
auggaaauguuccaaggauugcuucugcucuuacugcucaguauggguggcacuugggcuucaaaagaaccucuuagaccuaggugcagaccgauaaaugcuacacuggccgucgaaaaggaaggauguccuguguguauuaccguaaacacaacaauuugcgccggcuauugcccaaccaugacccggguccuccaggguguucugcccgcucugccucaggucguuugcaacuauagagacgugcgguucgagucuauuagauugccuggcuguccccggggagugaaucccgucguaaguuaugccgucgcacuaucuugccaaugcgcccugugcagaagaucgaccacagacuguggugguccaaaggaucacccacugacaugcgacgauccuagauuccaagauagcuccucauccaaagccccacccccuagucugccuaguccaucccgacuccccggcccuagcgacacaccuaucuuaccacaauag

SEQ ID NO: 226866 - RNA, 492 nt, Artificial Sequence
  derived and/or modified sequence
auguuccaaggccuucuccuguuacuccugcucucaaugggcggcacgugggcaagcaaggaaccucuuaggccuagauguaggccuaucaacgcgacucuugcugucgaaaaggaaggcugcccuguuugcaucacugugaacaccaccauuugugcaggcuacugcccgaccaugacacggguacuucaagggguguuaccugcucuuccacagguuguauguaacuaccgggacguccgcuucgagaguaucaggcuacccggauguccuaggggcgugaacccaguugucagcuaugcuguggcacuuagcugccagugugcacugugccgaaggucaacuacagacugcggcggaccuaaagaccacccacuaacaugugaugauccaagguuccaggauucuucgagcucuaaagccccuccuccaucucuaccgagcccuucccgccugccagguccgagcgauacacccauucugccccaguag

SEQ ID NO: 226867 - RNA, 468 nt, Artificial Sequence
  derived and/or modified sequence
auguuucagagauugcuccuccugcuccuacuguccaugggcggaaccugggccuccaaagagccacuuagaccucgcugucgaccaaucaaugcuacauuggcagucgagaaggaagguugucccguguguauuaccguuaacacgaccauuugcgcaggguacugcccaacuaugacucggguccuucagggcguccugcccgcccucccacagguggugugcaacuaccgagacguacgauuugagagcauacgcuugccgggcugcccccgcggaguuaauccaguuguuucauaugcugucgcccuuuccugccagugcgcgcugugccggaggucuacaaccgacuguggcggacccaaggaccacccacucaccugugacgaccccagauuucaagauuccucuucuucuaaagcaccuccucccuccuugccuagcccgagcaggcuaccagggccuuag

SEQ ID NO: 226868 - RNA, 507 nt, Artificial Sequence
  derived and/or modified sequence
gcaccccgcauggaaauguuucagggucuccugcuccugcugcugcuuagcaugggaggcacgugggcuucaaaagaaccccuucguccgagaugccgaccaaucaacgccacgcucgccguagaaaaagaagguugcccuguuuguauuaccgugaauaccacuauuugcgccgguuacugucccaccaugacucggguucuucaggggguucugccagcucuaccccaggugguuuguaauuaccgugacguccguuucgaauccauucggcucccaggauguccuagaggagugaacccggucguguccuacgcaguugcacuguccugucaaugugcccuaugucgaaggucuacaacggauugugggggcccuaaagaccauccauugacaugcgaugauccaagauuccaggacagcucuagcuccaaggccccuccccccaguuugcccagcccuuccaggcugccggguccauccgacaccccuauccuuccucaguag

SEQ ID NO: 226869 - RNA, 498 nt, Artificial Sequence
  derived and/or modified sequence
auggaaauguuucaaggccuguuacugcugcuguuacuaucgaugggugguacuugggcaucaaaagagccccugcgcccuagaugccguccaauuaacgcuacucuggccgucgaaaaagagggcuguccuguauguaucaccgugaauaccacaaucugcgccggauacugucccaccaugacgcgaguccugcagggcguuuuaccugcuuuaccacaaguggugugcaacuaucgagauguacgguuugaaagcauaagacuccccggaugcccaagaggcguuaauccuguuguaagcuaugccguugcacucucuugccaaugcgcauugugucgcagguccacuacagauugugguggcccaaaagaucacccguugaccugcgaugaccccagauuucaggacagcucgucaagcaaagccccuccaccuucccugcccucacccucgagacugccugguccauccgacaccccaauccugccucaauag

SEQ ID NO: 226870 - RNA, 498 nt, Artificial Sequence
  derived and/or modified sequence
auggaaauguuccagggacugcuauuacugcugcugcucuccaugggaggaacaugggcgucaaaggaaccucuccgaccucgcugccggccgaucaaugcaacacuugccgucgagaaagaggguugcccggucugcaucaccgucaacacuacaaucugcgccggcuacuguccgaccaugacacggguccugcaagguguccugcccgcccuuccacaggucgugugcaacuaccgcgacgugcgauucgaaucuaucaggcuuccgggaugcccaagaggcguuaauccaguuguguccuacgccguggcucuuucuugucagugugcccugugccggagaagcacaaccgauugcggaggccccaaggaccacccucugaccugcgaugauccacgauuccaggacucuagcucuucuaaagccccgccaccaagccugccauccccaucaaggcugccaggaccauccgauacucccaucuuaccacaauag

SEQ ID NO: 226871 - RNA, 492 nt, Artificial Sequence
  derived and/or modified sequence
auguuucagggucugcuucuccuccuucuccuuucuauggggggaaccugggcaucaaaggagccuuuaagaccaagaugucguccuauuaaugccacacuugcgguugaaaaggagggaugccccgugugcauaacgguaaauacaacaauuugcgccggcuacuguccuaccaugacccguguucugcagggcguguugccugcccuuccucaggucgugugcaauuauagggauguacgguuugagagcauccgucuuccuggcugucccagagguguaaacccgguggugaguuaugccgucgcacuuuccugccaaugcgcccuaugccggcgaucuaccaccgauugcggcggccccaaagaucacccacuuaccugcgaugacccuagauuucaagauucuuccuccuccaaggcucccccaccaucucugccuucaccauccaggcucccuggaccaagcgacacuccaauccugccucaguag

SEQ ID NO: 226872 - RNA, 468 nt, Artificial Sequence
  derived and/or modified sequence
auguuccaacgccuguuacuguugcugcuucugaguaugggaggaacaugggcuaguaaggagcccuugagaccucgaugcagacccauaaacgcaaccuuagcaguugagaaagaaggcugccccgugugcauaacuguaaacacaacgauuugugccggcuacugucccacaaugacucggguccugcagggugugcuccccgcuuugccccaaguugugugcaauuaccgcgacgugcgcuuugaaaguauucggcugccuggcugcccucgcggugucaacccaguuguaucguaugccgucgcccuuucuugccagugugcccugugcagacgcucuacuaccgauuguggcggacccaaagaccauccacugaccugcgacgaccccagauuccaagacucuucuuccaguaaagcuccaccgccaucacugccuaguccuucuaggcucccaggaccuuag

SEQ ID NO: 226873 - RNA, 507 nt, Artificial Sequence
  derived and/or modified sequence
gcaccccgcauggaaauguuucagggucuccugcuccugcugcugcuuagcaugggaggcacgugggcuucaaaagaaccccuucguccgagaugccgaccaaucaacgccacgcucgccguagaaaaagaagguugcccuguuuguauuaccgugaauaccacuauuugcgccgguuacugucccaccaugacucggguucuucaggggguucugccagcucuaccccaggugguuuguaauuaccgugacguccguuucgaauccauucggcucccaggauguccuagaggagugaaccccgucgugaguuacgcugucgcgcuuaguugucagugcgcucuguguaggagaucuacaaccgauugugggggcccuaaagaccaucccuugacaugugacgacccccgguuccaggauucaucuagcuccaaagccccuccccccucucucccgaguccgucccgucuccccgguccuagcgacacaccaauccucccccaguag

SEQ ID NO: 226874 - RNA, 498 nt, Artificial Sequence
  derived and/or modified sequence
auggaaauguuucaaggccuguuacugcugcuguuacuaucgaugggugguacuugggcaucaaaagagccccugcgcccuagaugccguccaauuaacgcuacucuggccgucgaaaaagagggcuguccuguauguaucaccgugaauaccacaaucugcgccggauacugucccaccaugacgcgaguccugcagggcguuuuaccugcuuuaccacaaguggugugcaacuaucgagauguacgguuugaaagcauaagacuccccggaugcccaagaggcguuaauccuguuguaucuuaugcaguggcuuuaaguugccagugugcucuuugucgccgauccacaacugacugcggcggaccaaaagaucauccucucaccugcgaugacccacgguuccaggacaguuccucaucuaaagccccucccccaaguuuacccucgccaagccgacucccaggcccauccgacacgccgauccuuccccaguag

SEQ ID NO: 226875 - protein, 550 aa, Artificial Sequence
  derived and/or modified sequence
MQDRLHILEDLNMLYIRQMALSLEDTELQRKLDHEIRMREGACKLLAACSQREQALEATKSLLVCNSRILSYMGELQRRKEAQVLGKTSRRPSDSGPPAERSPCRGRVCISDLRIPLMWKDTEYFKNKGDLHRWAVFLLLQLGEHIQDTEMILVDRTLTDISFQSNVLFAEAGPDFELRLELYGACVEEEGALTGGPKRLATKLSSSLGRSSGRRVRASLDSAGGSGSSPILLPTPVVGGPRYHLLAHTTLTLAAVQDGFRTHDLTLASHEENPAWLPLYGSVCCRLAAQPLCMTQPTASGTLRVQQAGEMQNWAQVHGVLKGTNLFCYRQPEDADTGEEPLLTIAVNKETRVRAGELDQALGRPFTLSISNQYGDDEVTHTLQTESREALQSWMEALWQLFFDMSQWKQCCDEIMKIETPAPRKPPQALAKQGSLYHEMAIEPLDDIAAVTDILTQREGARLETPPPWLAMFTDQPALPNPCSPASVAPAPDWTHPLPWGRPRTFSLDAVPPDHSPRARSVAPLPPQRSPRTRGLCSKGQPRTWLQSPV

SEQ ID NO: 226876 - DNA, 1653 bp, Artificial Sequence
  derived and/or modified sequence
atgcaggaccgtctgcacatcctggaagatctcaacatgctatacatccgccaaatggccctctctttggaagatactgagcttcagaggaagctagatcacgaaatacggatgagggagggagcttgtaagctgctggctgcctgttctcaacgggagcaggccttggaggctacaaaaagtctgctagtctgcaatagtagaatcctctcgtatatgggagagttgcagcgacgaaaggaagcccaggttcttgggaagaccagtcgtagaccttctgattcaggtcccccagcggagaggtccccgtgccgggggagggtgtgcattagcgacctgaggattccccttatgtggaaagacactgagtattttaagaacaaaggtgacctgcaccggtgggccgtattcttgctcctacagttgggcgagcacatacaagacaccgaaatgatcctggtcgatcgcactttgaccgacatttcatttcagagcaacgtcctgtttgcagaggccgggcccgactttgaattacgactggagctttacggggcatgcgtcgaggaggagggcgccttaaccgggggacccaagagactggctacgaaactgtccagcagtctcggcaggagctcaggaagaagggtgcgggcttcacttgatagtgccggggggtcaggcagctctcccatccttctccccacgcccgtggtgggcggcccacgatatcatttgctggcccacaccacactgacgctggccgcagttcaggacggattcagaacacacgacctgactctcgcctcccacgaggagaaccccgcttggctgcctttatatggttctgtgtgctgccggctcgccgcccagccactgtgcatgacccaacccacagcctccggcaccctacgtgttcagcaagctggagagatgcagaactgggcccaggtccatggcgtgctgaagggaacaaatctgttttgctaccgccagcctgaagatgcagatacaggcgaagaacctctgctgacgattgccgtgaataaggaaaccagggtgcgcgctggggagctagaccaggcactaggaaggccattcaccctgagcatcagcaatcagtatggggacgatgaggtgacacacacactacaaacagaatctagagaagctctccagagttggatggaagctctgtggcagttgttcttcgatatgtctcagtggaagcagtgctgcgacgaaatcatgaagatagagacccctgctccaagaaaacccccacaggctctagcaaaacagggttcattataccacgaaatggctattgagccattagacgatatcgccgccgtgaccgacatcctcactcaaagggaaggtgctagacttgaaacccctcctccctggctcgcaatgttcacagatcagcctgccctccccaatccctgttcgcccgcttccgtggccccggcacccgattggacccacccattaccttggggacggccaagaacttttagtctggatgcggtgccacctgaccattctccaagagcgaggagcgtggcacccctacccccccaacgcagcccaaggacgcgcggcctgtgttcaaagggtcagccgcgcacgtggctccagagccccgtttag

SEQ ID NO: 226877 - DNA, 1653 bp, Artificial Sequence
  derived and/or modified sequence
atgcaggaccggctgcacatcctggaggacctgaacatgctgtacatccggcagatggccctgagcctggaggacacagagctgcagaggaagctggaccacgagatccgcatgagggagggcgcctgcaagctgctggccgcctgcagccagcgggagcaggccctggaggccaccaagagcctgctggtgtgcaacagccgcatcctgagctacatgggagagctgcagaggaggaaggaggcccaggtgctgggcaagaccagccggcggcccagcgacagcggccccccagctgagaggagcccctgccggggccgggtgtgcatcagtgacctgcgcatccccctgatgtggaaggacacagagtacttcaagaacaagggggacctgcaccgctgggccgtgttcctgctgctgcagctgggggagcacatccaggacacagagatgatcctggtggacaggaccctgacagacatctccttccagagcaatgtgctgtttgctgaggccggccctgactttgagctgcggctggagctgtatggagcctgtgtggaggaggagggcgccctgaccggcggccccaagaggctggccaccaagctgagcagcagcctgggccgcagcagcggccggcgggtgcgggccagcctggacagcgctgggggcagcggcagcagccccatcctgctgcccacccctgtggtgggcggcccccgctaccacctgctggcccacaccaccctgaccctggccgctgtgcaggacggcttccgcacccatgacctgaccctggccagccatgaggagaacccagcctggctgcccctgtatggctctgtgtgctgccgcctggccgcccagcccctgtgcatgacccagcccacagccagcggcaccctgcgggtgcagcaggccggggagatgcagaactgggcccaggtgcacggcgtgctgaagggcaccaacctcttctgctaccggcagccagaagatgctgacacaggagaggagcccctgctgaccatcgctgtgaacaaggagaccagggtgcgggccggggagctggaccaggccctgggccggcccttcaccctgagcatcagcaaccagtatggagatgatgaggtgacccacaccctgcagacagagagccgggaggccctgcagagctggatggaggccctgtggcagctgttctttgacatgagccagtggaagcagtgctgtgatgagatcatgaagattgagaccccagcccccaggaagccaccccaggccctggccaagcagggcagcctgtaccacgagatggccatcgagcccctggatgacattgctgctgtgacagacatcctgacccagcgggagggcgcccggctggagaccccaccaccctggctggccatgttcacagaccagcctgccctgcccaacccctgcagccctgcctctgtggccccagccccagactggacccaccccctgccctggggccggcccaggaccttcagcctggatgctgtgcccccagaccacagcccccgggcccggtctgtggcccccctgcccccccagaggagccccaggacccggggcctgtgcagcaagggccagcccaggacctggctgcagagccctgtgtag

SEQ ID NO: 226878 - DNA, 1653 bp, Artificial Sequence
  derived and/or modified sequence
atgcaggaccggctgcacatcctggaggacctgaacatgctgtacatcaggcaaatggcgctatcacttgaagataccgagctccaacggaagctggaccacgaaatccgcatgcgcgaaggcgcgtgcaagcttctcgcagcatgctcacagcgagaacaggcattggaggcaaccaaatctcttctggtgtgcaactcgcgcatactgagctacatgggagaattacagagacgaaaggaagctcaggtgctgggaaaaaccagcaggcgaccctctgacagtggccctcctgcggaaagatcaccttgccgcgggcgcgtatgtatatctgatctcaggatcccactcatgtggaaagatacagagtattttaaaaacaagggagacctgcataggtgggctgtgttcctgttgttgcagctaggggaacatatccaagacacagaaatgatcctcgttgaccgaaccctgaccgacattagctttcagtcgaacgtactattcgccgaagcgggccccgactttgagctacggcttgaactgtacggtgcatgcgtcgaggaggaaggagctctgactggtggacctaaacgactggccaccaagctgagttccagcctaggaaggagctcaggtcgaagagtgagggcctctctggacagcgctgggggctctggatcatcccccatacttttacccacgcctgtcgtgggtgggccaaggtaccatctacttgcccacacaaccctcacccttgctgccgtgcaggacggcttcagaactcacgacctgacgctggcctcccatgaagaaaacccagcttggctgcccttgtatggttctgtctgctgcagactggccgcacagcctctgtgcatgacccagcccacagcctcaggcacactgcgggttcaacaggccggagagatgcagaactgggcacaggtccatggggtcctgaaaggaaccaacctgttctgctataggcagccagaggatgctgatactggagaagaaccactcttgacgattgcggtcaacaaagagacaagggtgagggcaggcgaactggatcaggcacttgggcgtcctttcaccctgagtatcagcaatcagtacggagacgacgaggtaacccacaccctgcaaaccgaatcgcgcgaggcacttcagtcctggatggaagctctctggcagctattttttgatatgtcacagtggaagcagtgctgcgatgaaattatgaagattgagaccccagccccccgcaaacctccccaggcactggccaagcaagggtctttgtaccacgaaatggctattgagcctctggatgacatcgcagctgtgaccgatattcttacccagcgggaaggggcaagactcgagacccctcctccctggctggccatgttcaccgatcagcctgctctcccgaatccttgttctcccgcttctgttgctccagcgccagactggacacatccactcccttggggccgccctcggacctttagtctggatgctgtgccccccgatcattctcctcgcgcccgttctgtcgccccactccctccacaaaggtcccccagaactcggggtctgtgttctaaaggccagccccgaacatggctgcagtctcccgtctag

SEQ ID NO: 226879 - DNA, 1653 bp, Artificial Sequence
  derived and/or modified sequence
atgcaggacaggttgcacattcttgaggacttgaacatgttgtatattcggcagatggctctgtccttagaagatacagagcttcagcgtaaactggaccacgagatcaggatgagagagggcgcatgcaagctcctggctgcctgttcacaacgggagcaagcactcgaggcaacgaaatctctacttgtgtgcaactctcgcattctgtcttacatgggggaactgcagcgtcgtaaggaggcccaggtccttggcaaaacatctcgtagaccatcagactccggtccgccagctgagcggagtccatgcagaggtcgtgtctgcatctccgacttacgcatccccctgatgtggaaagacaccgaatacttcaaaaataagggagaccttcacaggtgggccgtgttcctgctcctgcagcttggggagcacatccaagacacagagatgatcctggttgaccgaacacttaccgacatcagctttcagtccaacgtgctgttcgctgaagccggtcctgatttcgaactcagactggagctttatggcgcttgcgtcgaggaggagggcgctctaactggaggcccaaagaggctcgctacgaagctgagctcttcgctggggagaagcagtggcaggcgcgtcagagcaagcctggatagcgctggaggcagcggctcctctccgatcttgttgcccacgcctgttgtcggcggacctaggtaccatctgctcgcacatactactctcacccttgccgcagtccaagacggattccgtacacatgacctgaccctcgcaagccacgaagaaaaccccgcttggctcccgctgtatgggagcgtctgttgtaggttggcagctcaaccactgtgtatgactcaacctacagcatccgggaccctgcgagtacaacaggccggtgaaatgcagaattgggcacaggtgcacggcgtcctgaaggggacgaacctgttctgctaccggcaaccggaggatgctgacaccggggaggagcctctcctcacaatagccgtaaacaaagagacacgcgttagagcaggagagttggatcaggctctgggccgtccctttaccctatcgatctcgaaccagtatggagatgacgaagtgacacacaccctgcaaacagaaagtcgggaggcattgcagagctggatggaggctctgtggcagctcttttttgacatgtcccaatggaagcagtgttgcgatgagatcatgaaaattgagacacccgctccgcgaaaacccccacaggcgctggccaaacagggctctttgtatcatgagatggccatcgaacctctggatgatattgccgctgtgacagatattctgacccagagagaaggagctcgtcttgagacccctcctccttggcttgcaatgttcacagatcagccggctcttcctaacccttgctcacctgcatcggtggctcctgcacccgattggacccaccccttgccatggggcagaccgaggaccttcagccttgacgctgtcccacctgaccacagccctagagccaggtcagtggctccgcttccaccccaacggagcccccgaacgcggggactttgcagcaaggggcaaccacgtacctggctacagtctccagtgtag

SEQ ID NO: 226880 - DNA, 2646 bp, Artificial Sequence
  derived and/or modified sequence
gggacagctcggaggagctggggcggagccgcagggcctggcggccgccgagtgaagtgtgactccgtgggcctggcgtggaggcgggggcgctaggctgcagctggctcggaatcggggctggtttcctgtctggaagggaaggggcctgcagaagggagcggggacagcagcagacaggcacacccctgccttcctctctccctctcctcccttctctggaaaagcgagctgggagaacagctgccaccaaagcgagactggacactctgtgcctagagccccctctgcagctggcctttcctcctgggaccccacttatcctcacttcgctttctttttcttccctgcctggctcccggcagggccccggagcagcagtgggcgaggaaaatttgtcacagcagccagaggggtttaacaggagtgcagagggataagggcagcttctgccctctgcccaagagctggccacctctttaaagactgagggaacagtgggaggaggaactgtgggacagtgtggtacctatctgtcccccctctggaggggttgacaagggaaagggcaccggggggcacagagatgcaggacagattgcacatcctggaggacctgaatatgctctacattcggcagatggcactcagcctggaggacacggagttgcagaggaagctagaccatgagatccggatgagggaaggggcctgtaagctgctggcagcctgctcccagcgagagcaggctctggaggccaccaagagcctgctagtgtgcaacagccgcatcctcagctacatgggcgagctgcagcggcgcaaggaggcgcaggtgctggggaagacaagccggcggccttctgacagtggcccgcccgctgagcgctccccctgccgcggccgggtctgcatctctgacctccggattccactcatgtggaaggacacagaatatttcaagaacaaaggtgacttgcaccgctgggctgtgttcctgctgctgcagctgggggaacacatccaggacacagagatgatcctagtggacaggaccctcacagacatctcctttcagagcaatgtgctcttcgctgaggcggggccagactttgaactgcggttagagctgtatggggcctgtgtggaagaagagggggccctgactggcggccccaagaggcttgccaccaaactcagcagctccctgggccgctcctcagggaggcgtgtccgggcatcgctggacagtgctgggggttcagggagcagtcccatcttgctccccaccccagttgttggtggtcctcgttaccacctcttggctcacaccacactcaccctggcagcagtgcaagatggattccgcacacatgacctcacccttgccagtcatgaggagaaccctgcctggctgcccctttatggtagcgtgtgttgccgtctggcagctcagcctctctgcatgactcagcccactgcaagtggtaccctcagggtgcagcaagctggggagatgcagaactgggcacaagtgcatggagttctgaaaggcacaaacctcttctgttaccggcaacctgaggatgcagacactggggaagagccgctgcttactattgctgtcaacaaggagactcgagtccgggcaggggagctggaccaggctctaggacggcccttcaccctaagcatcagtaaccagtatggggatgatgaggtgacacacacccttcagacagaaagtcgggaagcactgcagagctggatggaggctctgtggcagcttttctttgacatgagccaatggaagcagtgctgtgatgaaatcatgaaaattgaaactcctgctccccggaaaccaccccaagcactggcaaagcaggggtccttgtaccatgagatggctattgagccgctggatgacatcgcagcggtgacagacatcctgacccagcgggagggcgcaaggctggagacacccccaccctggctggcaatgtttacagaccagcctgccctgcctaacccctgctcgcctgcctcagtggccccagccccagactggacccaccccctgccctgggggagaccccgaaccttttccctggatgctgtccccccagaccactcccctagggctcgctcggttgcccccctcccacctcagcgatccccacggaccagaggcctctgcagcaaaggccaacctcgcacttggctccagtcaccagtgtgagagagaaaggtgctggcataggatctgcccagaagagaaaatgacccatgcgcagttgggctctggatacggcgctgtctatagcaagttggccagtctggcctcctgttcctctgctggacctggggtaggctgcaggggtgggcagaagcccctcttaaattgtggttgccatggtaccgagggactcattcctggggctcgctgggacctccctaaacccttcctggaagaaaactggaaccaactctgccctacctccctgcactaaccagctttgaggatggcactgaagaacccttggagcaaacatacctcccttgtgactcccacatcaaccattaaagttatttaacagcagccttcacctggctcctgaggacagggtgcctctctctgcctggtct

SEQ ID NO: 226881 - DNA, 1653 bp, Artificial Sequence
  derived and/or modified sequence
atgcaggacagactgcacatcctggaggacctgaacatgctgtacatcagacagatggccctgagcctggaggacaccgagctgcagagaaagctggaccacgagatcagaatgagagagggcgcctgcaagctgctggccgcctgcagccagagagagcaggccctggaggccaccaagagcctgctggtgtgcaacagcagaatcctgagctacatgggcgagctgcagagaagaaaggaggcccaggtgctgggcaagaccagcagaagacccagcgacagcggcccccccgccgagagaagcccctgcagaggcagagtgtgcatcagcgacctgagaatccccctgatgtggaaggacaccgagtacttcaagaacaagggcgacctgcacagatgggccgtgttcctgctgctgcagctgggcgagcacatccaggacaccgagatgatcctggtggacagaaccctgaccgacatcagcttccagagcaacgtgctgttcgccgaggccggccccgacttcgagctgagactggagctgtacggcgcctgcgtggaggaggagggcgccctgaccggcggccccaagagactggccaccaagctgagcagcagcctgggcagaagcagcggcagaagagtgagagccagcctggacagcgccggcggcagcggcagcagccccatcctgctgcccacccccgtggtgggcggccccagataccacctgctggcccacaccaccctgaccctggccgccgtgcaggacggcttcagaacccacgacctgaccctggccagccacgaggagaaccccgcctggctgcccctgtacggcagcgtgtgctgcagactggccgcccagcccctgtgcatgacccagcccaccgccagcggcaccctgagagtgcagcaggccggcgagatgcagaactgggcccaggtgcacggcgtgctgaagggcaccaacctgttctgctacagacagcccgaggacgccgacaccggcgaggagcccctgctgaccatcgccgtgaacaaggagaccagagtgagagccggcgagctggaccaggccctgggcagacccttcaccctgagcatcagcaaccagtacggcgacgacgaggtgacccacaccctgcagaccgagagcagagaggccctgcagagctggatggaggccctgtggcagctgttcttcgacatgagccagtggaagcagtgctgcgacgagatcatgaagatcgagacccccgcccccagaaagcccccccaggccctggccaagcagggcagcctgtaccacgagatggccatcgagcccctggacgacatcgccgccgtgaccgacatcctgacccagagagagggcgccagactggagaccccccccccctggctggccatgttcaccgaccagcccgccctgcccaacccctgcagccccgccagcgtggcccccgcccccgactggacccaccccctgccctggggcagacccagaaccttcagcctggacgccgtgccccccgaccacagccccagagccagaagcgtggcccccctgcccccccagagaagccccagaaccagaggcctgtgcagcaagggccagcccagaacctggctgcagagccccgtgtag

SEQ ID NO: 226882 - protein, 511 aa, Artificial Sequence
  derived and/or modified sequence
MKAIIHLTLLALLSVNTATNQGNSADAVTTTETATSGPTVAAADTTETNFPETASTTANTPFPTATSPAPPIISTHSSSTIPTPAPPIISTHSSSTIPIPTAADSESTTNVNSLATSDIITASSPNDGLITMVPSETQSNNEMSPTTEDNQSSGPPTGTALLETSTLNSTGPSNPCQDDPCADNSLCVKLHNTSFCLCLEGYYYNSSTCKKGKVFPGKISVTVSETFDPEEKHSMAYQDLHSEITSLFKDVFGTSVYGQTVILTVSTSLSPRSEMRADDKFVNVTIVTILAETTSDNEKTVTEKINKAIRSSSSNFLNYDLTLRCDYYGCNQTADDCLNGLACDCKSDLQRPNPQSPFCVASSLKCPDACNAQHKQCLIKKSGGAPECACVPGYQEDANGNCQKCAFGYSGLDCKDKFQLILTIVGTIAGIVILSMIIALIVTARSNNKTKHIEEENLIDEDFQNLKLRSTGFTNLGAEGSVFPKVRITASRDSQMQNPYSRHSSMPRPDY

SEQ ID NO: 226883 - DNA, 1536 bp, Artificial Sequence
  derived and/or modified sequence
atgaaagcgatcatccatctgaccctgctggctctgttatcagtcaatacagcaacgaatcaagggaacagcgccgatgctgtgacgacaactgagacagccacctccggccccactgttgctgcagccgataccaccgagactaattttcccgagacggcaagtactacggccaacacacccttccctacagccacatctcccgcccccccaatcatcagcactcatagtagttctaccatcccgacgccagctccaccaattataagtacacatagtagtagcactatcccgatcccgaccgcagcggattctgagtccaccacaaatgtgaactcccttgccactagtgacatcatcacagcaagctcgcccaatgatgggctgatcacgatggtcccgtctgagacacagtctaacaatgagatgtctcccaccaccgaagacaaccagagcagtggtcccccaacaggcaccgcgttattagaaacaagcaccttgaactcaactggaccctctaacccgtgtcaggatgacccatgtgccgataacagcctctgcgtgaagctgcataatacgagtttttgcttgtgcctggaggggtattactacaatagctctacctgtaagaagggcaaagtatttccgggaaagatctcagtcacagtatctgaaacctttgatcccgaagagaaacattccatggcttaccaagatctacattctgaaatcaccagcctgttcaaagacgtcttcggcacctcagtgtacggccaaactgtcatcctcacagtttctacgagtctgtccccccggagcgaaatgcgggcagatgacaagtttgtcaatgtgaccattgttaccattctggccgagaccaccagtgataatgaaaagactgtgacagaaaaaattaataaggccatccggtccagttcctcaaatttcctcaactatgacctcactttgagatgtgattattatggatgcaatcagactgctgatgactgccttaacggcctggcctgtgattgtaaatccgacttacagcgacctaatcctcagagccccttttgcgtggcttcttcactcaaatgcccggacgcctgcaacgcacagcacaaacaatgcctcattaagaaaagcggtggcgctcccgagtgtgcctgcgtccctggctaccaagaggacgccaacgggaactgccaaaaatgcgcctttggttactctggtctcgactgcaaagataagttccaattgattctcacaatcgtcggtaccattgctgggatcgtcatactgtctatgatcatcgcgctgatagtgacagccaggagcaacaataagaccaagcatattgaggaggagaaccttatcgacgaggattttcagaatctgaagctccgctccactggcttcacgaatcttggggccgaaggcagcgtgttccccaaagtgaggatcaccgcatcgagggatagtcagatgcaaaacccttactcgcgtcactcttccatgccaaggccagactattag

SEQ ID NO: 226884 - DNA, 1536 bp, Artificial Sequence
  derived and/or modified sequence
atgaaggccatcatccacctgaccctgctggccctgctgtctgtgaacacagccaccaaccagggcaacagcgcagatgctgtgaccaccacagaaacagccaccagcggccccaccgtggccgctgctgacaccacagagaccaacttccctgagacagccagcaccacagccaacacccccttccccacagccaccagccctgccccacccatcatcagcacccacagcagcagcaccatccccaccccagccccacccatcatcagcacccacagcagcagcaccatccccatccccacagctgctgacagcgagagcaccaccaacgtgaacagcctggccaccagtgacatcatcacagccagcagccccaatgatggcctcatcaccatggtgcccagcgagacccagagcaacaatgagatgagccccaccacagaggacaaccagagcagcggccccccaactggaacagccctgctggagaccagcaccctgaacagcacaggccccagcaacccctgccaggatgacccctgtgccgacaacagcctgtgtgtgaagctgcacaacaccagcttctgcctgtgcctggagggctactactacaacagcagcacctgcaagaagggcaaggtgtttcctgggaagatctctgtgacagtgtctgagacctttgatcctgaggagaagcacagcatggcctaccaggacctgcacagcgagatcaccagcctcttcaaggatgtgtttggcacctctgtgtatggccagaccgtcatcctgactgtgtccaccagcctgagccccaggtctgagatgagagcagatgacaagtttgtgaatgtgaccatcgtgaccatcctggccgagaccaccagtgacaatgagaagacagtgacagagaagatcaacaaggccatccgcagcagcagcagcaacttcctgaactatgacctgaccctgcgctgtgactactacggctgcaaccagacagcagatgactgcctgaatggcctggcctgtgactgcaagagtgacctgcagaggcccaacccccagagccccttctgtgtggccagcagcctgaagtgcccagatgcctgcaatgcccagcacaagcagtgcctgatcaagaagagcggcggggccccagaatgtgcctgtgtgcccggctaccaggaggatgccaatggaaactgccagaagtgtgccttcggctacagcggcctggactgcaaggacaagttccagctgatcctgaccatcgtgggcaccatcgccggcatcgtcatcctgtccatgatcatcgccctgattgtgacagcccggagcaacaacaagaccaagcacatcgaggaggagaacctgattgatgaggacttccagaacctgaagctgcggagcacaggcttcaccaacctgggcgctgagggctctgtgttccccaaggtgcgcatcacagccagccgggacagccagatgcagaacccctacagccgccacagctccatgcccaggccagactactag

SEQ ID NO: 226885 - DNA, 2876 bp, Artificial Sequence
  derived and/or modified sequence
atcatttcctcctcagattaccaagcaagaacagctaaaatgaaagccatcattcatcttactcttcttgctctcctttctgtaaacacagccaccaaccaaggcaactcagctgatgctgtaacaaccacagaaactgcgactagtggtcctacagtagctgcagctgataccactgaaactaatttccctgaaactgctagcaccacagcaaatacacctttcccaacagctacttcacctgctccccccataattagtacacatagttcctccacaattcctacacctgctccccccataattagtacacatagttcctccacaattcctatacctactgctgcagacagtgagtcaaccacaaatgtaaattcattagctacctctgacataatcaccgcttcatctccaaatgatggattaatcacaatggttccttctgaaacacaaagtaacaatgaaatgtcccccaccacagaagacaatcaatcatcagggcctcccactggcaccgctttattggagaccagcaccctaaacagcacaggtcccagcaatccttgccaagatgatccctgtgcagataattcgttatgtgttaagctgcataatacaagtttttgcctgtgtttagaagggtattactacaactcttctacatgtaagaaaggaaaggtattccctgggaagatttcagtgacagtatcagaaacatttgacccagaagagaaacattccatggcctatcaagacttgcatagtgaaattactagcttgtttaaagatgtatttggcacatctgtttatggacagactgtaattcttactgtaagcacatctctgtcaccaagatctgaaatgcgtgctgatgacaagtttgttaatgtaacaatagtaacaattttggcagaaaccacaagtgacaatgagaagactgtgactgagaaaattaataaagcaattagaagtagctcaagcaactttctaaactatgatttgacccttcggtgtgattattatggctgtaaccagactgcggatgactgcctcaatggtttagcatgcgattgcaaatctgacctgcaaaggcctaacccacagagccctttctgcgttgcttccagtctcaagtgtcctgatgcctgcaacgcacagcacaagcaatgcttaataaagaagagtggtggggcccctgagtgtgcgtgcgtgcccggctaccaggaagatgctaatgggaactgccaaaagtgtgcatttggctacagtggactcgactgtaaggacaaatttcagctgatcctcactattgtgggcaccatcgctggcattgtcattctcagcatgataattgcattgattgtcacagcaagatcaaataacaaaacgaagcatattgaagaagagaacttgattgacgaagactttcaaaatctaaaactgcggtcgacaggcttcaccaatcttggagcagaagggagcgtctttcctaaggtcaggataacggcctccagagacagccagatgcaaaatccctattcaagacacagcagcatgccccgccctgactattagaatcataagaatgtggaacccgccatggcccccaaccaatgtacaagctattatttagagtgtttagaaagactgatggagaagtgagcaccagtaaagatctggcctccggggtttttcttccatctgacatctgccagcctctctgaatggaagttgtgaatgtttgcaacgaatccagctcacttgctaaataagaatctatgacattaaatgtagtagatgctattagcgcttgtcagagaggtggttttcttcaatcagtacaaagtactgagacaatggttagggttgttttcttaattcttttcctggtagggcaacaagaaccatttccaatctagaggaaagctccccagcattgcttgctcctgggcaaacattgctcttgagttaagtgacctaattcccctgggagacatacgcatcaactgtggaggtccgaggggatgagaagggatacccaccatctttcaagggtcacaagctcactctctgacaagtcagaatagggacactgcttctatccctccaatggagagattctggcaacctttgaacagcccagagcttgcaacctagcctcacccaagaagactggaaagagacatatctctcagctttttcaggaggcgtgcctgggaatccaggaactttttgatgctaattagaaggcctggactaaaaatgtccactatggggtgcactctacagtttttgaaatgctaggaggcagaaggggcagagagtaaaaaacatgacctggtagaaggaagagaggcaaaggaaactgggtggggaggatcaattagagaggaggcacctgggatccaccttcttccttaggtcccctcctccatcagcaaaggagcacttctctaatcatgccctcccgaagactggctgggagaaggtttaaaaacaaaaaatccaggagtaagagccttaggtcagtttgaaattggagacaaactgtctggcaaagggtgcgagagggagcttgtgctcaggagtccagccgtccagcctcggggtgtaggtttctgaggtgtgccattggggcctcagccttctctggtgacagaggctcagctgtggccaccaacacacaaccacacacacacaaccacacacacaaatgggggcaaccacatccagtacaagcttttacaaatgttattagtgtccttttttatttctaatgccttgtcctcttaaaagttattttatttgttattattatttgttcttgactgttaattgtgaatggtaatgcaataaagtgcctttgttagatggtg

SEQ ID NO: 226886 - DNA, 1536 bp, Artificial Sequence
  derived and/or modified sequence
atgaaggccatcatccacctgaccctgctggccctgctgagcgtgaacactgcaaccaatcagggcaatagcgctgatgccgtgacaacaactgagacagccacttcagggcctaccgtggcagccgctgataccacagagaccaatttcccagagactgcttctacaacagcaaacaccccgtttcccaccgcaactagcccggccccgccaattatatcaactcacagctcttccaccatacctacaccagcaccacccattatcagtactcattcttcttccacaatccctatccctactgctgcagattcagagtctactacgaatgtcaacagtctggccacgagtgatatcatcacagcctcctccccaaatgacggactaattactatggtgccgtctgagacacaatccaacaatgaaatgtctccaaccacagaggataatcagtctagcggacccccgaccggaacggcactgctcgagacctctaccctgaattcaaccggaccttctaatccttgtcaagacgacccatgcgctgacaatagtctgtgtgtaaaacttcacaatacttctttttgcctctgccttgagggctattactataactcctccacttgcaagaagggaaaggttttcccaggcaaaattagcgttacggtgtccgagactttcgaccccgaggagaaacacagtatggcttatcaagaccttcattccgagatcacgagtctgtttaaagacgtgtttggcactagcgtgtacggccaaaccgtaattcttaccgtgtcaacctccctgagtccccggtcagaaatgagagccgacgataagttcgtgaatgtcacgattgtgactatactcgccgagacaacgagtgacaatgagaagaccgtcaccgagaaaatcaataaagccataaggtcttcctcttcaaactttcttaactacgacctgacactgaggtgtgactattacgggtgtaaccagactgctgacgactgcttgaacggacttgcctgcgactgtaaatctgatttgcagcggcctaacccccagtcccctttttgtgtcgctagtagccttaagtgtcccgatgcttgcaatgcacagcacaaacaatgcctcatcaagaagtctggaggggcacccgaatgcgcgtgtgttccaggttatcaagaggatgcaaacggcaattgtcagaagtgcgcctttggctactccggcttggattgtaaggataaatttcaactgatcctcacaatcgtgggaactattgcgggaatcgtgattctgtccatgatcatcgccctgatcgtcactgccaggtcgaacaacaagactaaacacatcgaggaggagaacctgatcgacgaagacttccagaacctgaagctgcgctccacgggattcacgaacttaggagccgagggttctgtcttccctaaggttagaattactgcttcacgcgactcacagatgcaaaatccctacagccggcattctagcatgcctagaccagattactag

SEQ ID NO: 226887 - DNA, 1536 bp, Artificial Sequence
  derived and/or modified sequence
atgaaggcaatcattcacctgaccctcctggcccttctctctgtgaacaccgccacgaatcaaggaaattccgctgacgcagttaccaccacagaaaccgcaacttcaggccctacagtggcagccgctgatacaaccgagactaatttccctgaaaccgcatccaccaccgccaacacgcccttcccaaccgccacctctcctgcacctcctatcatctctacccacagctcgtctaccatccccaccccagccccaccaattatttccacacatagttcaagcacaatacccatacctaccgcagcggactctgaaagtaccacaaacgtcaatagtctcgctacttcagatatcatcaccgcctcatcccccaacgacggcctgattacaatggttccgtcggaaacccaaagcaataacgagatgagtccaacaactgaggataaccagtcttcagggccacccaccggaaccgctctcttggaaacgtccactttaaatagtaccgggccttctaacccttgccaggacgacccttgtgcagataactctctgtgcgtcaagcttcataacacttccttctgcctctgccttgaggggtattactacaattcatcaacatgcaagaaagggaaagtgtttccaggcaaaatatccgtcacagtgtcagaaacatttgatcctgaggagaagcactccatggcctatcaggatttacactccgaaatcacctccttattcaaggatgttttcggcacttctgtgtatgggcagactgtgattctgactgtatccacgtcgctttctcccaggagtgaaatgagagccgacgacaagttcgtcaacgtgaccatcgtgaccatattagcagagaccacttcggacaacgagaagactgtcactgaaaaaatcaacaaagcgatcagatcttccagcagtaattttctgaattatgacctgacgctgcgctgtgactattacggctgcaatcagactgccgacgattgccttaatggtctggcctgcgactgtaagtcagaccttcagagaccgaacccccagtcccccttctgtgtggctagctcactgaagtgcccagacgcctgcaacgcccagcacaaacagtgccttattaaaaagtcaggcggtgcacctgaatgtgcctgtgtcccgggttaccaggaagatgctaacggaaactgccagaagtgcgccttcggctactccggactcgactgcaaggataagttccagctcatcctaacgatagtgggaactatcgctggcatcgtcatcctgtcgatgattattgctcttatcgtgacagcgaggtctaataataaaacaaaacacatcgaggaggagaacctaattgacgaggattttcagaatttaaaactgcggtctactgggtttaccaacctcggggctgaaggatcagtattcccaaaagtgagaatcaccgcatctcgggatagccagatgcaaaatccgtactctagacactcatccatgccacgcccagactactag

SEQ ID NO: 226888 - DNA, 1536 bp, Artificial Sequence
  derived and/or modified sequence
atgaaggccatcatccacctgaccctgctggccctgctgagcgtgaacaccgccaccaaccagggcaacagcgccgacgccgtgaccaccaccgagaccgccaccagcggccccaccgtggccgccgccgacaccaccgagaccaacttccccgagaccgccagcaccaccgccaacacccccttccccaccgccaccagccccgccccccccatcatcagcacccacagcagcagcaccatccccacccccgccccccccatcatcagcacccacagcagcagcaccatccccatccccaccgccgccgacagcgagagcaccaccaacgtgaacagcctggccaccagcgacatcatcaccgccagcagccccaacgacggcctgatcaccatggtgcccagcgagacccagagcaacaacgagatgagccccaccaccgaggacaaccagagcagcggcccccccaccggcaccgccctgctggagaccagcaccctgaacagcaccggccccagcaacccctgccaggacgacccctgcgccgacaacagcctgtgcgtgaagctgcacaacaccagcttctgcctgtgcctggagggctactactacaacagcagcacctgcaagaagggcaaggtgttccccggcaagatcagcgtgaccgtgagcgagaccttcgaccccgaggagaagcacagcatggcctaccaggacctgcacagcgagatcaccagcctgttcaaggacgtgttcggcaccagcgtgtacggccagaccgtgatcctgaccgtgagcaccagcctgagccccagaagcgagatgagagccgacgacaagttcgtgaacgtgaccatcgtgaccatcctggccgagaccaccagcgacaacgagaagaccgtgaccgagaagatcaacaaggccatcagaagcagcagcagcaacttcctgaactacgacctgaccctgagatgcgactactacggctgcaaccagaccgccgacgactgcctgaacggcctggcctgcgactgcaagagcgacctgcagagacccaacccccagagccccttctgcgtggccagcagcctgaagtgccccgacgcctgcaacgcccagcacaagcagtgcctgatcaagaagagcggcggcgcccccgagtgcgcctgcgtgcccggctaccaggaggacgccaacggcaactgccagaagtgcgccttcggctacagcggcctggactgcaaggacaagttccagctgatcctgaccatcgtgggcaccatcgccggcatcgtgatcctgagcatgatcatcgccctgatcgtgaccgccagaagcaacaacaagaccaagcacatcgaggaggagaacctgatcgacgaggacttccagaacctgaagctgagaagcaccggcttcaccaacctgggcgccgagggcagcgtgttccccaaggtgagaatcaccgccagcagagacagccagatgcagaacccctacagcagacacagcagcatgcccagacccgactactag

SEQ ID NO: 226889 - protein, 334 aa, Artificial Sequence
  derived and/or modified sequence
MLGIMAWNATCKNWLAAEAALEKYYLSIFYGIEFVVGVLGNTIVVYGYIFSLKNWNSSNIYLFNLSVSDLAFLCTLPMLIRSYANGNWIYGDVLCISNRYVLHANLYTSILFLTFISIDRYLIIKYPFREHLLQKKEFAILISLAIWVLVTLELLPILPLINPVITDNGTTCNDFASSGDPNYNLIYSMCLTLLGFLIPLFVMCFFYYKIALFLKQRNRQVATALPLEKPLNLVIMAVVIFSVLFTPYHVMRNVRIASRLGSWKQYQCTQVVINSFYIVTRPLAFLNSVINPVFYFLLGDHFRDMLMNQLRHNFKSLTSFSRWAHELLLSFREK

SEQ ID NO: 226890 - DNA, 1005 bp, Artificial Sequence
  derived and/or modified sequence
atgctgggcatcatggcctggaacgccacctgcaagaactggctggccgccgaggccgccctggagaagtactacctgagcatcttctacggcatcgagttcgtggtgggcgtgctgggcaacaccatcgtggtgtacggctacatcttcagcctgaagaactggaacagcagcaacatctacctgttcaacctgagcgtgagcgacctggccttcctgtgcaccctgcccatgctgatcagaagctacgccaacggcaactggatctacggcgacgtgctgtgcatcagcaacagatacgtgctgcacgccaacctgtacaccagcatcctgttcctgaccttcatcagcatcgacagatacctgatcatcaagtaccccttcagagagcacctgctgcagaagaaggagttcgccatcctgatcagcctggccatctgggtgctggtgaccctggagctgctgcccatcctgcccctgatcaaccccgtgatcaccgacaacggcaccacctgcaacgacttcgccagcagcggcgaccccaactacaacctgatctacagcatgtgcctgaccctgctgggcttcctgatccccctgttcgtgatgtgcttcttctactacaagatcgccctgttcctgaagcagagaaacagacaggtggccaccgccctgcccctggagaagcccctgaacctggtgatcatggccgtggtgatcttcagcgtgctgttcaccccctaccacgtgatgagaaacgtgagaatcgccagcagactgggcagctggaagcagtaccagtgcacccaggtggtgatcaacagcttctacatcgtgaccagacccctggccttcctgaacagcgtgatcaaccccgtgttctacttcctgctgggcgaccacttcagagacatgctgatgaaccagctgagacacaacttcaagagcctgaccagcttcagcagatgggcccacgagctgctgctgagcttcagagagaagtag

SEQ ID NO: 226891 - DNA, 1005 bp, Artificial Sequence
  derived and/or modified sequence
atgcttgggatcatggcttggaacgccacctgcaagaactggctggctgcagaggccgctctcgagaagtattatctgagtatcttctacggcattgagttcgtggtgggcgtcctgggcaacacaatcgtcgtctatggatatattttcagccttaaaaattggaattcctccaacatctacctgttcaatctaagcgtgtcagacctcgccttcctgtgcaccttgcctatgctcatcagatcatatgccaacgggaattggatttacggtgacgtgctctgcatcagtaacagatacgttcttcatgccaatctctacacgtcaattctgttcctgacgtttatttcaattgatcggtaccttatcatcaaataccctttcagggagcatttgttgcaaaaaaaagagttcgccattttaatcagccttgccatttgggtcctggtcactctggagctgttaccaatcttgccactcatcaatcctgtgataacagacaatgggacgacttgtaacgattttgccagtagcggcgatcccaattataaccttatatactcgatgtgcctgaccttactcggatttctgatcccactgtttgtcatgtgctttttttattacaagatcgccctgttcctgaagcaacgcaatagacaagttgccactgccctgcccctcgagaaacccctcaacttggtgatcatggcagtggtcattttcagtgtgctttttacaccatatcatgtgatgcgaaatgtccggatcgccagtagactgggttcctggaagcaatatcagtgtacacaggtggttattaactcattttacatcgtcacacggcctttggcatttcttaattccgtgataaatccagtgttttatttcctgctgggagatcacttcagagatatgttaatgaaccaactgcgccataacttcaaatccctgacctctttcagtaggtgggcacacgaactcctgcttagctttagggaaaagtag

SEQ ID NO: 226892 - DNA, 1005 bp, Artificial Sequence
  derived and/or modified sequence
atgctgggcatcatggcctggaatgccacctgcaagaactggctggccgctgaggccgccctggagaagtactacctgagcatcttctacggcatcgagtttgtggtgggcgtgctgggcaacaccatcgtggtgtatggctacatcttcagcctgaagaactggaacagcagcaacatctacctgttcaacctgtctgtgtctgacctggccttcctgtgcaccctgcccatgctgatccgctcctatgccaatggaaactggatctatggagatgtgctgtgcatcagcaaccgctacgtgctgcacgccaacctgtacaccagcatcctcttcctgaccttcatcagcattgaccgctacctgatcatcaagtaccccttccgggagcacctgctgcagaagaaggagtttgccatcctgatcagcctggccatctgggtgctggtgaccctggagctgctgcccatcctgcccctcatcaaccctgtgatcacagacaatggcaccacctgcaatgactttgccagcagcggggaccccaactacaacctgatctacagcatgtgcctgaccctgctgggcttcctgatccccctgtttgtgatgtgcttcttctactacaagatcgccctcttcctgaagcagaggaaccggcaggtggccacagccctgcccctggagaagcccctgaacctggtgatcatggctgtggtgatcttctctgtgctcttcaccccctaccacgtgatgagaaatgtgcgcatcgccagccggctgggctcctggaagcagtaccagtgcacccaggtggtgatcaacagcttctacatcgtgacccggcccctggccttcctgaacagcgtcatcaaccctgtgttctacttcctgctgggggaccacttccgggacatgctgatgaaccagctgcggcacaacttcaagagcctgaccagcttcagccgctgggcccacgagctgctgctgtccttccgggagaagtag

SEQ ID NO: 226893 - DNA, 1005 bp, Artificial Sequence
  derived and/or modified sequence
atgctgggcatcatggcctggaacgccacctgcaagaactggctggccgccgaagctgctctggaaaaatactatctatctattttttatgggattgagtttgttgtaggcgtgctgggcaacacaatagttgtgtacgggtatatattctcactcaaaaactggaatagtagcaatatttatcttttcaatctgtccgtgtccgatctcgctttcctttgtaccctgccgatgttgatacgctcatacgccaatgggaattggatatatggagatgtcctgtgtatctccaatcgctacgtactacacgctaacctttacaccagtattctatttttaacattcatctccattgaccggtacctgataatcaagtaccccttccgtgagcacttgcttcaaaagaaggagttcgccattttaatctcactggccatttgggtgcttgtgactctcgaactgctacccatccttcctctcattaatcctgttatcacagacaacggcacaacatgtaatgactttgcatcctcaggtgatcctaattataacttgatctactctatgtgcctgacacttctcggctttctcatacccctgtttgtaatgtgttttttctactacaaaattgccctgttcctgaagcagagaaatcgccaagtagcaaccgcgctcccactcgagaagccactcaacctggtgatcatggccgtggtgatatttagtgtactatttaccccatatcatgttatgagaaacgtgaggattgccagtagactggggagttggaagcagtaccaatgcacccaggtcgttattaactctttctacattgttactaggcccctcgctttcctcaacagcgtgataaatccagttttctattttcttctgggcgatcacttcagggacatgttaatgaatcagctgcgacacaattttaagagtcttaccagtttctctagatgggcccacgagttactgcttagttttagggagaagtag

SEQ ID NO: 226894 - DNA, 1005 bp, Artificial Sequence
  derived and/or modified sequence
atgctcggtattatggcatggaacgccacctgcaaaaactggttagcagcggaggctgcattggagaagtactacctttcgattttttatggcatcgaatttgtggtgggggtcctaggaaatactattgtggtttatggttatattttcagtctaaagaactggaacagttcaaatatctacctgttcaatctgagtgtaagcgatctggcgttcctgtgtaccctccctatgctgatccgctcatacgctaacggcaactggatctatggggacgttttgtgcatctccaacagatatgtacttcacgccaatctgtacactagtattctgtttctaacctttatctccatcgaccgttacctgattatcaagtatcccttccgcgagcacttgcttcagaaaaaggaattcgccattcttatatcactcgccatatgggtgctcgtgacattggagttgctccctatcctgcctctgatcaatcccgtgattaccgacaacgggactacttgcaacgatttcgcttcatccggagatcccaactataatctgatctactccatgtgtttaacactactgggttttcttatccccttgttcgtgatgtgttttttctactataaaatcgccctgttccttaagcaacggaacagacaggtcgcgactgctctccctctggaaaaaccactgaatctggtcataatggctgtcgtcatattttccgtgctgtttaccccttaccatgtcatgcgtaatgtcagaattgctagcagattagggtcatggaagcaataccagtgtacacaggtcgtgatcaacagcttctacatcgtcacaagaccattggcattcctgaacagcgtgatcaatccggtgttttactttctattgggagatcacttcagggacatgctgatgaaccaactccgccataactttaagtccttaacttcgttctccaggtgggcccatgagctgctgctgtcgttccgagaaaaatag

SEQ ID NO: 226895 - DNA, 1439 bp, Artificial Sequence
  derived and/or modified sequence
gtcagaagctatatccagctgctggcagagttcctgtcaagggatcaagtcttccaacagaatggttatggtttaactcagcagaatttgttgaacaactacgacatgctggggatcatggcatggaatgcaacttgcaaaaactggctggcagcagaggctgccctggaaaagtactacctttccattttttatgggattgagttcgttgtgggagtccttggaaataccattgttgtttacggctacatcttctctctgaagaactggaacagcagtaatatttatctctttaacctctctgtctctgacttagcttttctgtgcaccctccccatgctgataaggagttatgccaatggaaactggatatatggagacgtgctctgcataagcaaccgatatgtgcttcatgccaacctctataccagcattctctttctcacttttatcagcatagatcgatacttgataattaagtatcctttccgagaacaccttctgcaaaagaaagagtttgctattttaatctccttggccatttgggttttagtaaccttagagttactacccatacttccccttataaatcctgttataactgacaatggcaccacctgtaatgattttgcaagttctggagaccccaactacaacctcatttacagcatgtgtctaacactgttggggttccttattcctctttttgtgatgtgtttcttttattacaagattgctctcttcctaaagcagaggaataggcaggttgctactgctctgccccttgaaaagcctctcaacttggtcatcatggcagtggtaatcttctctgtgctttttacaccctatcacgtcatgcggaatgtgaggatcgcttcacgcctggggagttggaagcagtatcagtgcactcaggtcgtcatcaactccttttacattgtgacacggcctttggcctttctgaacagtgtcatcaaccctgtcttctattttcttttgggagatcacttcagggacatgctgatgaatcaactgagacacaacttcaaatcccttacatcctttagcagatgggctcatgaactcctactttcattcagagaaaagtgaggggcttgtgaaacagattgttctacagatgaatctgtaagccagttacagtttgccttaactcatagacatcaatcagagagtgtcacagatttaaccttgatctaaagacaagttgtacccagagtatgtgaaaagaatgggacgacaagaatgtactggtttcttcctctaagaattgaaaggagttgaactgccttatgtttgggcatgtaactccaaaatactaggtagtataaggctttctcaatcagtgcaaaaatggaagatatataaagcaacaagttgtctgcatttgatcactggtcagattgtaaaaaaaaaaaaaa

SEQ ID NO: 226896 - protein, 475 aa, Artificial Sequence
  derived and/or modified sequence
MSPEVTCPRRGHLPRFHPRTWVEPVVASSQVAASLYDAGLLLVVKASYGTGGSSNHSASPSPRGALEDQQQRAISNFYIIYNLVVGLSPLLSAYGLGWLSDRYHRKISICMSLLGFLLSRLGLLLKVLLDWPVEVLYGAAALNGLFGGFSAFWSGVMALGSLGSSEGRRSVRLILIDLMLGLAGFCGSMASGHLFKQMAGHSGQGLILTACSVSCASFALLYSLLVLKVPESVAKPSQELPAVDTVSGTVGTYRTLDPDQLDQQYAVGHPPSPGKAKPHKTTIALLFVGAIIYDLAVVGTVDVIPLFVLREPLGWNQVQVGYGMAAGYTIFITSFLGVLVFSRCFRDTTMIMIGMVSFGSGALLLAFVKETYMFYIARAVMLFALIPVTTIRSAMSKLIKGSSYGKVFVILQLSLALTGVVTSTLYNKIYQLTMDMFVGSCFALSSFLSFLAIIPISIVAYKQVPLSPYGDIIEK

SEQ ID NO: 226897 - DNA, 1428 bp, Artificial Sequence
  derived and/or modified sequence
atgagccccgaggtgacctgccccagaagaggccacctgcccagattccaccccagaacctgggtggagcccgtggtggccagcagccaggtggccgccagcctgtacgacgccggcctgctgctggtggtgaaggccagctacggcaccggcggcagcagcaaccacagcgccagccccagccccagaggcgccctggaggaccagcagcagagagccatcagcaacttctacatcatctacaacctggtggtgggcctgagccccctgctgagcgcctacggcctgggctggctgagcgacagataccacagaaagatcagcatctgcatgagcctgctgggcttcctgctgagcagactgggcctgctgctgaaggtgctgctggactggcccgtggaggtgctgtacggcgccgccgccctgaacggcctgttcggcggcttcagcgccttctggagcggcgtgatggccctgggcagcctgggcagcagcgagggcagaagaagcgtgagactgatcctgatcgacctgatgctgggcctggccggcttctgcggcagcatggccagcggccacctgttcaagcagatggccggccacagcggccagggcctgatcctgaccgcctgcagcgtgagctgcgccagcttcgccctgctgtacagcctgctggtgctgaaggtgcccgagagcgtggccaagcccagccaggagctgcccgccgtggacaccgtgagcggcaccgtgggcacctacagaaccctggaccccgaccagctggaccagcagtacgccgtgggccacccccccagccccggcaaggccaagccccacaagaccaccatcgccctgctgttcgtgggcgccatcatctacgacctggccgtggtgggcaccgtggacgtgatccccctgttcgtgctgagagagcccctgggctggaaccaggtgcaggtgggctacggcatggccgccggctacaccatcttcatcaccagcttcctgggcgtgctggtgttcagcagatgcttcagagacaccaccatgatcatgatcggcatggtgagcttcggcagcggcgccctgctgctggccttcgtgaaggagacctacatgttctacatcgccagagccgtgatgctgttcgccctgatccccgtgaccaccatcagaagcgccatgagcaagctgatcaagggcagcagctacggcaaggtgttcgtgatcctgcagctgagcctggccctgaccggcgtggtgaccagcaccctgtacaacaagatctaccagctgaccatggacatgttcgtgggcagctgcttcgccctgagcagcttcctgagcttcctggccatcatccccatcagcatcgtggcctacaagcaggtgcccctgagcccctacggcgacatcatcgagaagtag

SEQ ID NO: 226898 - DNA, 1428 bp, Artificial Sequence
  derived and/or modified sequence
atgagccccgaggtgacttgtcctaggaggggccaccttccacgatttcaccctcggacctgggtggagcccgtggtcgcatcttcccaggtcgctgcctccctttacgacgccggcctgctgcttgtggtcaaagcatcttatggcacaggggggtcctcaaatcacagcgccagcccatcacctagaggcgctttagaggaccaacagcaacgcgctatttccaatttttacatcatttacaaccttgtggtgggtctgagccccctgctgtccgcttacgggctgggatggctgtcagatcggtaccaccgaaagattagtatatgcatgtcactactaggctttctcctatctcggctgggcttactgttgaaagtgttactggattggccagtggaagtcctgtacggagccgcggccctgaatggactgtttggaggcttctctgccttctggtcgggggtcatggccttgggcagcctaggctctagcgagggtcgtcgatctgtaaggctcatcctgatcgatctgatgctgggcctcgctggattttgcggaagtatggcctctggccacctgttcaagcaaatggcaggccactcaggtcaaggcttgattctcactgcctgcagcgtcagctgcgccagttttgctctcttatattcccttttggtgctgaaggttcccgagtccgtggctaagcccagtcaggagctgccggctgtggatacggtttccggaaccgttggaacctatcgaacactggatcctgaccaactagatcagcaatacgctgtgggtcacccacccagccccggaaaggccaaacctcacaagacaacaatagccctcctctttgtgggtgctataatttatgatctggctgtggtaggcacagtggatgttatcccactgttcgtcctgagagaacccttggggtggaatcaggtacaggttggctacggtatggccgccggatatacaatattcatcacgtctttcctcggtgttttggttttcagccgctgctttagagatacaaccatgattatgatcggaatggtcagctttggttctggagctttgctcctggcgttcgtaaaggagacctacatgttctacatcgcacgtgcggttatgctgttcgctctgatcccagtgacaactatccgcagtgctatgagcaaactaattaaggggtccagttatggaaaagtcttcgtgatcttgcagctatctctcgctttgaccggcgtggtgacatccaccctctacaacaagatctatcagttgacaatggatatgtttgtgggctcttgtttcgcattatcttcttttctctctttcctggctattatccccataagcattgtggcatataagcaggttcctttgagtccctatggagatatcatcgagaagtag

SEQ ID NO: 226899 - DNA, 1428 bp, Artificial Sequence
  derived and/or modified sequence
atgagccctgaggtgacctgcccccggcggggccacctgccccgcttccaccccaggacctgggtggagcctgtggtggccagcagccaggtggccgccagcctgtatgatgctggcctgctgctggtggtgaaggccagctatggcaccggcggcagcagcaaccacagcgccagccccagccccaggggggccctggaggaccagcagcagagggccatcagcaacttctacatcatctacaacctggtggtgggcctgagccccctgctgagcgcctacggcctgggctggctgagtgaccgctaccacaggaagatcagcatctgcatgagcctgctgggcttcctgctgagccggctgggcctgctgctgaaggtgctgctggactggcctgtggaggtgctgtatggagctgctgccctgaatggcctgtttggaggcttcagcgccttctggagcggcgtgatggccctgggcagcctgggcagcagcgagggccgccgctctgtgcggctcatcctgattgacctgatgctgggcctggccggcttctgtggctccatggccagcggccacctgttcaagcagatggccggccacagcggccagggcctcatcctgacagcctgcagcgtgtcctgtgccagctttgccctgctgtacagcctgctggtgctgaaggtgcctgagagcgtggccaagcccagccaggagctgcctgctgtggacacagtgtctggaacagtgggcacctaccgcaccctggaccctgaccagctggaccagcagtatgctgtgggccacccccccagccctgggaaggccaagccccacaagaccaccatcgccctgctgtttgtgggcgccatcatctatgacctggccgtggtgggcaccgtggatgtgatccccctgtttgtgctgcgggagcccctgggctggaaccaggtgcaggtgggctacggcatggccgccggctacaccatcttcatcaccagcttcctgggcgtgctggtgttcagccgctgcttccgggacaccaccatgatcatgattggcatggtgtcctttggcagcggggccctgctgctggcctttgtgaaggagacctacatgttctacatcgcccgggctgtgatgctgtttgccctgatccctgtgaccaccatccgcagcgccatgagcaagctgatcaagggcagcagctatggcaaggtgtttgtgatcctgcagctgagcctggccctgactggagtggtgaccagcaccctgtacaacaagatctaccagctgaccatggacatgtttgtgggcagctgctttgccctgagcagcttcctgtccttcctggccatcatccccatcagcatcgtggcctacaagcaggtgcccctgagcccctatggagacatcatcgagaagtag

SEQ ID NO: 226900 - DNA, 1428 bp, Artificial Sequence
  derived and/or modified sequence
atgagccccgaggtgacctgcccccggcggggccacctgccccggttccacccacggacatgggtcgaacccgtcgttgccagtagtcaggttgctgcctccttgtacgacgccgggctgttgctcgtcgtgaaagcttcttatggtaccggtggtagttccaaccactcagcatccccctccccaaggggagctttggaggatcagcagcagcgcgccatttccaacttttacatcatttacaacctggtggtgggcctgtcccctctcttgtctgcctacgggctggggtggctctccgataggtaccacaggaaaatcagtatatgtatgagccttctggggttcctcttgtcacgcctgggccttttgttgaaggttctgctggactggccagtcgaagtcctctatggggccgcagccctcaacggcctgttcggaggcttcagcgccttctggtccggtgtaatggctctggggagcctgggcagttctgaggggcgccgctcagtgcgcctgattctgatcgatttaatgctaggtctggctggtttctgcgggagtatggctagcggacacttgtttaaacagatggcgggtcatagcggacaaggtctgattttaaccgcatgcagcgtatcatgcgcttcctttgcactgctatactctctgctcgtccttaaagtgccagagagcgttgcaaagccaagtcaggagctgccagccgtcgacaccgtctccgggactgtgggtacctaccggaccctcgaccccgatcagctcgaccagcagtacgcggtggggcatcctccatctccggggaaggctaagccccataagacaaccatcgccctgctgttcgtaggagcaataatatatgatctcgccgtggtgggcactgttgacgtgatccctctctttgtcttgcgggagccattaggctggaatcaggtccaggtcggctacgggatggccgcagggtatactatatttattacttcttttctgggtgtcctcgtgtttagcaggtgcttcagagatacaaccatgattatgatcggcatggtgtccttcggctccggagcactgctccttgcttttgtaaaagagacatatatgttctacattgcccgcgcggtgatgctgtttgccttgattccagttaccacgatccggagcgcgatgtcaaagctaattaaggggtctagctacggcaaggtgtttgtcatccttcagcttagcctggccctcacgggtgtggtcaccagcacactgtacaacaaaatctaccagctgacaatggacatgttcgtgggaagctgctttgccctgagctcattcctctctttcctcgctataataccgatctctatcgtggcatataagcaggtgccactgagtccatacggggatatcatcgagaaatag

SEQ ID NO: 226901 - DNA, 1428 bp, Artificial Sequence
  derived and/or modified sequence
atgtcgcccgaggtgacgtgtccgcgacgaggacatctgccacgctttcaccccagaacctgggtcgagccagtcgtcgccagttctcaggtggcagcatctttatatgacgctgggcttcttctcgtggttaaagcatcatatggaactggcggatcgagtaaccattctgccagtccatcacctagaggggcactggaagaccagcagcagcgtgccatttctaacttctacattatctataacctagtggtgggactctccccccttctcagcgcgtatggcctgggctggctcagtgaccgttatcaccggaagattagcatttgcatgtcgttgctcggattcctgctaagtcggcttggcctgctcctcaaagtcttattggattggcccgtcgaagtgttgtacggggcagcggctttaaatggcttgtttggcggtttcagcgccttctggagcggcgtcatggccctcggcagtctcgggtcctccgaaggcaggagatccgtcagactcatcctaatcgacttaatgctaggcctggcaggcttttgtgggtctatggcctccggacacctgtttaaacaaatggccggacactctggccagggcctaatcctgaccgcctgttccgtatcgtgcgcttcgtttgccctgctctattcactattagtacttaaggtaccggaatcagtagccaagccgtcccaggaacttccggctgtggacacggtctcaggcacagtcgggacttaccgcactcttgatccagatcaactcgaccagcagtatgcggtcgggcacccaccatcacccggaaaagccaaaccacataagaccaccattgccttgctgttcgttggcgctatcatctacgacctcgcggtcgtcgggactgtagacgtgatcccgctgttcgtcttaagagaacccctgggctggaatcaagtccaagtggggtatggcatggcagcaggctataccattttcatcacctcttttctcggtgtgttggtgttctccaggtgcttcagggacaccacgatgatcatgattgggatggtctcattcggtagtggggctctgttgctggcttttgtcaaggaaacctacatgttctatatcgccagagccgtgatgcttttcgccctgatccctgtgacaaccatccgttccgccatgagcaaactcatcaaggggtccagttatggcaaagttttcgtcatattgcagctgtcccttgccctcacaggggtcgtcacctctacactgtataacaaaatctaccaactgaccatggacatgtttgtggggagctgcttcgccctgagctcatttctcagttttctggctatcatcccgatctccatagttgcatataaacaagttcccctgtctccttacggcgatattattgagaagtag

SEQ ID NO: 226902 - DNA, 2502 bp, Artificial Sequence
  derived and/or modified sequence
ctcgggaggtcactcggctgctgggcgggctgctgtcacaggcgctgcgtgccctggctctgctcgccactggccggcgcgctcccggcgcacggagcacactcgcgctcccggcgcacggagcacactcgcgctccgggactgaaacctgagcagccgtagcagccgaatttgggagcatatccttgtcactgcagccagaaagcccttcgatccccatcagagaggtcacatgagccccgaggtcacctgcccgcggaggggccacctgcctcgcttccacccgaggacctgggttgagcccgtggtggcctcgtcccaggtggctgcctccctctacgatgcggggctactcctcgtggtgaaggcgtcctacggaaccggaggctcctccaaccacagtgccagcccatcgccccggggggctctagaggaccaacagcagagagccatctccaatttctacattatctacaaccttgtggtgggcctgtcccccctgctgtccgcctacgggctgggatggctcagcgaccgctaccaccgaaagatctccatctgcatgtcgctgctgggcttcctgctctcccgcctcgggctgctgctcaaggtgctgctggactggccagtggaggtgctgtacggggcggcggcgctgaacgggctattcggcggcttctccgccttctggtccggggtcatggcgctgggatcgctgggctcctccgagggccgccgctctgtgcgcctcatcctcattgacctgatgctgggcttggcggggttctgcgggagcatggcttccgggcatctcttcaagcagatggctgggcactctgggcagggcctgatactgacggcctgcagcgtgagctgtgcctcgtttgccctgctctacagccttttggtgctaaaggtccctgagtcggtggccaaacccagccaggagctccccgccgtggataccgtgtctggcacggttggcacataccgcactctggatcctgatcagttggaccaacagtatgcagtggggcaccctccatctcctggaaaagcaaaaccccataaaaccaccattgccttgctctttgtgggtgctatcatatatgacctggcggtggtgggcacagtggacgtgatccctctttttgtgctgagggagcctctcggttggaaccaagtgcaggtgggctatggtatggctgcagggtacaccatcttcatcaccagcttcctgggtgtcctggtcttctcccgctgctttcgggacaccaccatgatcatgattgggatggtctcctttgggtcaggagccctcctcttggcttttgtgaaagagacatacatgttctatattgctcgagccgtcatgctgtttgctctcatccccgtcacaaccatccgatcagctatgtccaaactcataaagggctcctcttatggaaaggtgttcgtcatactgcagctgtccttggctctgaccggcgtggtgacatccaccttgtacaacaagatctaccagctcaccatggacatgtttgtgggctcctgctttgctctctcctcctttctctccttcctggccatcattccaattagcatcgtggcctataaacaagtcccattgtcaccatatggagacatcatagagaaatgaagatgcttacctgcaggaactgaaaacatcagccatggccaggcccccagaagacaaaagaagggaccagggaactggtgacctaagcaacccactgcttaagaaacctgcgttccagccagagttggcctcagaatgacctgctctggctcagggatccctggtggatggggaaaagcactttcctggtgatggaaaaacgttctcagctttaagacacccccattaggcagacactgggttctgtgacagcagagcatgaccttaagggttacaggcaggctgcacacagcagtcccaggccctgtgaggggcttcagactccagctacagcgagcctgccccttttcttcaagggactgtcttgagggctccaaagtatagctaactagtcacctgggtgctgtgctgaaagtcccatgggagaactcaaagcgtgcattatcacagcctgaggggaatgtggaagggatgttttgtaagaactaccaacagttttgcacgaacaatgtcttttaaattaaaataaaaccttgaaaaaagtcagctttctttcctgagtcttccttacctacaaacactcaggagggggatggagctcaggcccttgtcttctgggtagttttgttactactgttgcttttaagaagcaaatgtcacaaggctttcttcaatgggatgttcaattgagtacttccagtcaacagtgcttcccaaagtgggtggtgtgaaggaagaggaggtacattaagagctattttatttgaggtagtcatttttataaccttgtttacttggatttataaaagcagactcacctaataaaatcaacattcattgta

SEQ ID NO: 226903 - protein, 1955 aa, Artificial Sequence
  derived and/or modified sequence
MFRQFYLWTCLASGIILGSLFEICLGQYDDDCKLARGGPPATIVAIDEESRNGTILVDNMLIKGTAGGPDPTIELSLKDNVDYWVLMDPVKQMLFLNSTGRVLDRDPPMNIHSIVVQVQCINKKVGTIIYHEVRIVVRDRNDNSPTFKHESYYATVNELTPVGTTIFTGFSGDNGATDIDDGPNGQIEYVIQYNPDDPTSNDTFEIPLMLTGNIVLRKRLNYEDKTRYFVIIQANDRAQNLNERRTTTTTLTVDVLDGDDLGPMFLPCVLVPNTRDCRPLTYQAAIPELRTPEELNPIIVTPPIQAIDQDRNIQPPSDRPGILYSILVGTPEDYPRFFHMHPRTAELSLLEPVNRDFHQKFDLVIKAEQDNGHPLPAFAGLHIEILDENNQSPYFTMPSYQGYILESAPVGATISDSLNLTSPLRIVALDKDIEDTKDPELHLFLNDYTSVFTVTQTGITRYLTLLQPVDREEQQTYTFSITAFDGVQESEPVIVNIQVMDANDNTPTFPEISYDVYVYTDMRPGDSVIQLTAVDADEGSNGEITYEILVGAQGDFIINKTTGLITIAPGVEMIVGRTYALTVQAADNAPPAERRNSICTVYIEVLPPNNQSPPRFPQLMYSLEISEAMRVGAVLLNLQATDREGDSITYAIENGDPQRVFNLSETTGILTLGKALDRESTDRYILIITASDGRPDGTSTATVNIVVTDVNDNAPVFDPYLPRNLSVVEEEANAFVGQVKATDPDAGINGQVHYSLGNFNNLFRITSNGSIYTAVKLNREVRDYYELVVVATDGAVHPRHSTLTLAIKVLDIDDNSPVFTNSTYTVLVEENLPAGTTILQIEAKDVDLGANVSYRIRSPEVKHFFALHPFTGELSLLRSLDYEAFPDQEASITFLVEAFDIYGTMPPGIATVTVIVKDMNDYPPVFSKRIYKGMVAPDAVKGTPITTVYAEDADPPGLPASRVRYRVDDVQFPYPASIFEVEEDSGRVITRVNLNEEPTTIFKLVVVAFDDGEPVMSSSATVKILVLHPGEIPRFTQEEYRPPPVSELATKGTMVGVISAAAINQSIVYSIVSGNEEDTFGINNITGVIYVNGPLDYETRTSYVLRVQADSLEVVLANLRVPSKSNTAKVYIEIQDENNHPPVFQKKFYIGGVSEDARMFTSVLRVKATDKDTGNYSVMAYRLIIPPIKEGKEGFVVETYTGLIKTAMLFHNMRRSYFKFQVIATDDYGKGLSGKADVLVSVVNQLDMQVIVSNVPPTLVEKKIEDLTEILDRYVQEQIPGAKVVVESIGARRHGDAFSLEDYTKCDLTVYAIDPQTNRAIDRNELFKFLDGKLLDINKDFQPYYGEGGRILEIRTPEAVTSIKKRGESLGYTEGALLALAFIIILCCIPAILVVLVSYRQFKVRQAECTKTARIQAALPAAKPAVPAPAPVAAPPPPPPPPPGAHLYEELGDSSILFLLYHFQQSRGNNSVSEDRKHQQVVMPFSSNTIEAHKSAHVDGSLKSNKLKSARKFTFLSDEDDLSAHNPLYKENISQVSTNSDISQRTDFVDPFSPKIQAKSKSLRGPREKIQRLWSQSVSLPRRLMRKVPNRPEIIDLQQWQGTRQKAENENTGICTNKRGSSNPLLTTEEANLTEKEEIRQGETLMIEGTEQLKSLSSDSSFCFPRPHFSFSTLPTVSRTVELKSEPNVISSPAECSLELSPSRPCVLHSSLSRRETPICMLPIETERNIFENFAHPPNISPSACPLPPPPPISPPSPPPAPAPLAPPPDISPFSLFCPPPSPPSIPLPLPPPTFFPLSVSTSGPPTPPLLPPFPTPLPPPPPSIPCPPPPSASFLSTECVCITGVKCTTNLMPAEKIKSSMTQLSTTTVCKTDPQREPKGILRHVKNLAELEKSVANMYSQIEKNYLRTNVSELQTMCPSEVTNMEITSEQNKGSLNNIVEGTEKQSHSQSTSL

SEQ ID NO: 226904 - protein, 329 aa, Artificial Sequence
  derived and/or modified sequence
MFRQFYLWTCLASGIILGSLFEICLGQYDDDCKLARGGPPATIVAIDEESRNGTILVDNMLIKGTAGGPDPTIELSLKDNVDYWVLMDPVKQMLFLNSTGRVLDRDPPMNIHSIVVQVQCINKKVGTIIYHEVRIVVRDRNDNSPTFKHESYYATVNELTPVGTTIFTGFSGDNGATDIDDGPNGQIEYVIQYNPDDPTSNDTFEIPLMLTGNIVLRKRLNYEDKTRYFVIIQANDRAQNLNERRTTTTTLTVDVLDGDDLGPMFLPCVLVPNTRDCRPLTYQAAIPELRTPDLGSLCSGTNSWCQGRSGVHWSSPAWRCLFPRRLHQM

SEQ ID NO: 226905 - DNA, 5868 bp, Artificial Sequence
  derived and/or modified sequence
atgtttagacagttttatctgtggacatgcctcgcttccggcataattcttggaagtctgttcgagatttgcctgggacagtacgatgacgactgcaaactcgcccgcggcggacctcctgctacgattgtagcaattgatgaggagagtagaaacggaactatcctcgtggataatatgctgattaagggaacagcgggagggcctgaccccacaattgagctcagcttgaaagacaacgttgattattgggtcctcatggaccccgtcaagcaaatgttgtttctgaattccaccggtagggtgcttgaccgagatccaccaatgaacatccactccatcgtggtgcaggtccagtgcatcaacaaaaaggtggggactatcatataccatgaagtcagaattgtggtcagagacaggaatgacaacagccctaccttcaagcatgaaagctattacgctacggtgaacgagttgacgcctgtcggcaccaccatcttcaccggtttctccggggacaacggtgctacggacatcgatgacgggccgaacggacagattgagtacgtcatacagtataacccagatgatcccacatcaaacgatacatttgaaatccctctgatgctgactggcaatattgtgttgcgtaagagactgaattacgaggacaaaactagatacttcgtgataattcaagccaatgacagagcacagaacctaaatgaacggcgaaccacgacaactacactcactgttgatgtgctggacggcgacgacttagggcccatgttcctgccctgcgtgttagtacctaatacgcgggattgtaggccgctcacataccaagcagctattccagaactcaggacccccgaggagctgaacccaatcattgtgactccaccaatccaggcaattgaccaggatagaaacatccaaccaccctccgaccgcccagggatcctttactctattctggttgggactcccgaagactatcctcggtttttccatatgcatcctaggactgcagagcttagcctactggagccagtaaaccgcgacttccatcagaagtttgatctcgtgatcaaagccgagcaggacaacggccaccctttgcccgccttcgctgggctgcacatcgagattctggatgagaataaccagtctccatactttaccatgccaagctaccagggctatattcttgaatctgcccccgtgggagcaactatttctgattccctgaaccttacatcacctctgcggatcgtggccctggataaagatatcgaggacacaaaagacccagagctccacctttttctgaatgattacacgagtgtgttcacagtcactcagacaggcattacacgatatttaacactgctgcagcctgtagacagggaggagcagcaaacttatacattttcaattactgcatttgacggcgtgcaggaaagcgagccagtaattgttaatattcaggtcatggacgctaatgacaacacccccacgtttccagaaatcagttacgatgtttacgtgtacactgatatgcgtcctggcgacagcgtaatacaacttactgccgtcgatgctgacgaaggttccaacggcgagataacatacgagattctcgtgggcgcccaaggcgacttcatcattaacaaaaccacgggcctcatcacaattgcccccggtgtagagatgatagtagggcggacgtacgcgttgactgtgcaggctgccgacaacgcgccacctgccgagagaagaaactccatctgtacagtttacattgaagtcctacctccgaataaccagagcccgccccgattcccacagctgatgtattctctggagatcagtgaagcaatgcgcgtaggcgctgtgctgctgaatctgcaggccacggacagggagggggactctatcacttacgcgattgagaatggggacccccagagagtgtttaacctgtctgagaccactgggattttaacgcttggaaaggccctagaccgagagtcaactgaccggtatatcttgatcattacggcctccgatggtaggcctgatggcacgtccaccgccacggtcaacatcgttgttactgacgtgaatgacaatgctccagtttttgatccatacctgccacgtaacctgtcagtcgttgaggaagaagcaaatgcattcgtgggccaggtgaaagccacggatcccgatgctggaataaatggccaggtccactattctctgggcaactttaacaacctgttcaggatcacctcaaacggatctatttatacagccgtaaaacttaatcgggaggtccgcgattactacgagttggtagttgttgccacggacggagccgtccatccgcggcattcaacccttactctggccattaaggtgctcgatatcgacgacaactcacctgtcttcaccaattctacctacactgtactggtggaggaaaacctccccgcgggcacaaccatcctgcagattgaggctaaagacgtggatctcggcgcgaatgttagttatagaatacggtcgccagaagtcaagcacttttttgcgctgcacccgtttacgggagagctgagtcttttacggtccctggactatgaagcctttccggaccaggaggcctctattactttcctggttgaggcattcgatatctacggcacgatgcctccgggaatcgcaaccgtgacagtaatcgtaaaggatatgaacgactatccgcctgtctttagcaagcgcatttataagggtatggtcgcccccgacgctgttaagggcacaccaattacaactgtttatgccgaggatgcagacccccccggcctgccggcttccagagtaaggtaccgagtggacgacgtgcagttcccttaccctgcctccatttttgaagtcgaagaagattccggacgagtcatcaccagagttaatttgaacgaggagcccacaaccatttttaaactggtggttgttgcctttgatgatggcgagcccgtgatgagttcctctgctactgtgaagatcctggtcttgcaccctggggaaatcccaaggttcactcaggaagagtatcgacctccgcctgtatccgagctggccaccaagggaactatggtaggggtcatcagtgctgcagccataaatcagagcatcgtctatagtatcgtgtctggtaacgaggaagatacattcggcatcaataacatcaccggcgtgatctatgtgaacgggcctctagattacgagacacggacctcatatgtcctcagagtccaagctgatagcctcgaagtggtgctcgccaaccttcgggtaccctcaaaatccaatacggccaaggtgtatatcgagattcaggacgaaaacaatcacccacctgttttccagaagaaattttatatcgggggggttagcgaagacgctagaatgttcacttcagtcctcagggtcaaagcaactgataaagatacagggaattatagcgtgatggcctaccgtcttatcatacccccgattaaggagggcaaagagggttttgtggtggaaacctatacggggttgatcaaaacagcaatgctttttcataacatgaggaggtcgtacttcaagttccaagtcattgccactgatgattatggcaagggactgagtggaaaggcagatgtcctggtttcagtggtgaatcagctggacatgcaggtaatcgtgagcaatgttccccccactctggtggagaaaaaaatagaagatcttacagagatcctggataggtacgtccaggagcagattcctggtgctaaggttgttgtcgagagcattggcgccaggcgccatggggacgccttcagtttggaggattataccaaatgtgacctgaccgtctatgctattgatccccaaaccaatagagccatcgatcggaatgagctgttcaagttcctggatgggaagttgcttgacattaataaggatttccaaccatactacggggagggagggcggattttggagattagaacaccggaggctgtgacctccattaaaaaaagaggcgagtcccttggctacacggagggagccctgctggctctggccttcattattattctatgttgcattcctgctatccttgtagtgcttgttagttaccgccagttcaaagttaggcaagccgagtgtaccaaaacggctagaatccaagccgccctgcctgctgctaagccagctgttccagcaccggccccagtggctgctcccccacccccgccccctcctcctcctggcgcacacctctacgaagaactcggcgattcaagtatcctgttcctcttgtaccatttccaacagtcccgcggcaacaactcagtgtccgaagaccgaaagcaccagcaagtggtaatgccattttctagtaataccatcgaggcccataagtctgctcatgtggacgggtctctgaagtcaaataagttgaagagcgcaagaaagttcacctttctgagcgatgaagacgatctgtccgctcataaccctctatataaagagaacatttcccaagtcagcacaaacagcgatattagtcagcgaacagacttcgtcgaccccttctcacccaagatacaggctaaaagtaagtctcttagaggcccaagagagaagatccagaggctttggtcccagagcgtaagtctaccgagacggttgatgaggaaagtgccaaatagacctgagattatcgacctgcaacagtggcaggggaccaggcaaaaagccgagaacgagaacaccggcatttgcactaacaaacgaggatcgtctaacccactcttgacgacagaggaagccaacctcacagaaaaggaagagattcgccagggagagactctcatgatagagggcactgagcagttgaagtccttgagtagtgactcgtctttttgtttcccccggccccatttctctttctctacactccctacggtatccaggacagtggaattgaaatccgaacccaatgtgatctccagccctgccgagtgttctctcgagctcagccctagtaggccgtgcgttctccattcgtcactgtctcggcgcgagacaccaatctgtatgctgcctattgagaccgagcgcaacatctttgagaattttgcccaccccccaaatatcagtccttcagcttgtcccctccctcctccaccccccatctcacctccaagcccccctccagcccccgctcccctggccccccccccagatattagccccttcagccttttttgtccccctccctctccaccctctataccactccccctgccgcctccgactttttttcctttgtccgtgagcacgtccggcccccccaccccgcccctcctgccaccgtttccaacccccctgccacctcccccaccgagtatcccctgcccacccccgcctagcgcaagcttcctgtctacggaatgtgtgtgtatcaccggagtgaagtgcactacaaatctcatgccggccgagaagatcaagagttcgatgacacagttgtccacaaccacagtgtgtaagaccgatccccagcgcgaaccaaagggcatactgcgccatgtgaagaatttggccgagctggagaaaagcgttgccaatatgtatagtcaaattgagaaaaactatcttcggactaacgttagcgagctgcaaaccatgtgtccttcagaagtgaccaatatggaaatcactagcgagcagaataagggttccctaaataatattgtcgaggggaccgagaaacaatcccactctcagtctacttctctgtag

SEQ ID NO: 226906 - DNA, 5868 bp, Artificial Sequence
  derived and/or modified sequence
atgttccggcagttctacctgtggacctgcctggccagcggcatcatcctgggcagcctgtttgagatctgcctgggccagtatgatgatgactgcaagctggcccggggcggccccccagccaccatcgtggccattgatgaggagagcagaaatggcaccatcctggtggacaacatgctgatcaagggcacagctgggggccctgaccccaccatcgagctgagcctgaaggacaacgtggactactgggtgctgatggaccctgtgaagcagatgctgttcctgaacagcacaggccgggtgctggaccgggacccccccatgaacatccacagcatcgtggtgcaggtgcagtgcatcaacaagaaggtgggcaccatcatctaccacgaggtgagaattgtggtgcgggacagaaatgacaacagccccaccttcaagcatgagagctactatgccaccgtgaatgagctgacccctgtgggcaccaccatcttcaccggcttcagcggggacaacggggccacagacattgatgatggccccaacggccagattgaatatgtgatccagtacaacccagatgaccccaccagcaatgacacctttgagatccccctgatgctgactggaaacatcgtgctgaggaagaggctgaactatgaggacaagacccgctactttgtgatcatccaggccaatgaccgggcccagaacctgaatgaaagaaggaccaccaccaccaccctgactgtggatgtgctggatggagatgacctgggccccatgttcctgccctgtgtgctggtgcccaacacccgggactgccggcccctgacctaccaggccgccatccctgagctgcggaccccagaggagctgaaccccatcatcgtgaccccacccatccaggccatcgaccaggacaggaacatccagcccccaagtgaccggcccggcatcctgtacagcatcctggtgggcaccccagaggactacccccgcttcttccacatgcaccccaggacagctgagctgagcctgctggagcctgtgaacagagacttccaccagaagtttgacctggtgatcaaggccgagcaggacaatggccaccccctgcctgcctttgctggcctgcacatcgagatcctggatgagaacaaccagagcccctacttcaccatgcccagctaccagggctacatcctggagagcgcccctgtgggcgccaccatcagtgacagcctgaacctgaccagccccctgcgcatcgtggccctggacaaggacatcgaggacaccaaggaccctgagctgcacctgttcctgaatgactacaccagcgtcttcaccgtgacccagacaggcatcacccgctacctgaccctgctgcagcctgtggaccgggaggagcagcagacctacaccttcagcatcacagcctttgatggagtgcaggagagcgagcccgtcatcgtgaacatccaggtgatggatgccaatgacaacacccccaccttccctgagatctcctatgatgtgtatgtgtacacagacatgaggcctggggacagcgtcatccagctgacagctgtggatgctgatgagggcagcaatggagagatcacctatgagatcctggtgggcgcccagggcgacttcatcatcaacaagaccaccggcctcatcaccatcgcccctggggtggagatgattgtgggccgcacctacgccctgactgtgcaggccgctgacaatgcccccccagctgagaggagaaattccatctgcaccgtgtacatcgaggtgctgccccccaacaaccagagccccccacgcttcccccagctgatgtacagcctggagatcagcgaggccatgagggtgggcgctgtgctgctgaacctgcaggccacagaccgggagggggacagcatcacctacgccattgaaaatggagacccccagagggtcttcaacctgtctgagaccaccggcatcctgaccctgggcaaggccctggaccgggagagcacagaccgctacatcctgatcatcacagccagtgatggccgcccagatggcaccagcacagccaccgtgaacatcgtggtgacagatgtgaatgacaatgcccctgtgtttgacccctacctgcccaggaacctgtctgtggtggaggaggaggccaatgcctttgtgggccaggtgaaggccacagatcctgatgctggcatcaatggccaggtgcactacagcctgggcaacttcaacaacctcttccgcatcaccagcaatggcagcatctacacagctgtgaagctgaaccgggaggtgcgggactactatgagctggtggtggtggccacagatggagctgtgcaccccaggcacagcaccctgaccctggccatcaaggtgctggacattgatgacaacagccctgtgttcaccaacagcacctacacagtgctggtggaggagaacctgcctgctggcaccaccatcctgcagatcgaggccaaggatgtggacctgggcgccaacgtgtcctaccgcatccgcagccctgaggtgaagcacttctttgccctgcaccccttcaccggggagctgagcctgctgcggagcctggactatgaggccttcccagaccaggaggccagcatcaccttcctggtggaggcctttgacatctacggcaccatgcctcctggcatcgccaccgtgacagtgattgtgaaggacatgaatgactacccacctgtgttcagcaagaggatctacaagggcatggtggccccagatgctgtgaagggcacccccatcaccaccgtgtatgcagaagatgctgaccccccaggcctgcctgccagccgggtgcgctacagagtggatgatgtgcagttcccctacccagccagcatctttgaggtggaggaggacagcggccgggtcatcaccagggtgaacctgaatgaggagcccaccaccatcttcaagctggtggtggtggcctttgatgatggagagcctgtgatgagcagcagcgccaccgtgaagatcctggtgctgcaccctggagagatcccccgcttcacccaggaggagtaccggcccccacctgtgtctgagctggccaccaagggcaccatggtgggcgtcatctctgctgctgccatcaaccagagcatcgtgtacagcatcgtgtctggaaatgaggaggacaccttcggcatcaacaacatcaccggggtcatctacgtgaatggccccctggactatgagaccaggaccagctatgtgctgcgggtgcaggccgacagcctggaggtggtgctggccaacctgcgggtgcccagcaagagcaacacagccaaggtgtacatcgagatccaggatgagaacaaccacccccctgtgttccagaagaagttctacatcggcggcgtgtctgaagatgccaggatgttcacctctgtgctgcgggtgaaggccacagacaaggacaccggcaactacagcgtgatggcctaccgcctcatcatcccccccatcaaggagggcaaggagggctttgtggtggagacctacacaggcctcatcaagacagccatgctgttccacaacatgaggaggagctacttcaagttccaggtgattgccacagatgattatggcaagggcctgagcggcaaggcagatgtgctggtgtctgtggtgaaccagctggacatgcaggtgattgtgtccaatgtgccccccaccctggtggagaagaagattgaggacctgacagagatcctggaccgctacgtgcaggagcagatccctggggccaaggtggtggtggagagcattggagccaggagacatggagatgccttcagcctggaggactacaccaagtgtgacctgactgtgtatgccatcgacccccagaccaacagagccatcgacagaaatgagctgttcaagttcctggatggcaagctgctggacatcaacaaggacttccagccctactatggagagggcggccgcatcctggagatccgcaccccagaggccgtgaccagcatcaagaagagaggagagagcctgggctacacagaaggagccctgctggccctggccttcatcatcatcctgtgctgcatcccagccatcctggtggtgctggtgtcctaccggcagttcaaggtgcggcaggccgagtgcaccaagacagcccgcatccaggccgccctgcctgctgccaagccagctgtgcctgccccagcccctgtggccgcccctcctcctcctcctcctcctcctcctggggcccacctgtatgaggagctgggggacagcagcatcctcttcctgctgtaccacttccagcagagccggggcaacaacagcgtgtctgaggacaggaagcaccagcaggtggtgatgcccttcagcagcaacaccatcgaggcccacaagagcgcccacgtggatggcagcctgaagagcaacaagctgaagagcgccaggaagttcaccttcctgagtgatgaagatgacctgagcgcccacaaccccctgtacaaggagaacatcagccaggtgtccaccaacagcgacatcagccagaggacagactttgtggaccccttcagccccaagatccaggccaagagcaagagcctgcggggcccccgggagaagatccagaggctgtggagccagagcgtgtccctgccccggcggctgatgaggaaggtgcccaacagacctgagatcatcgacctgcagcagtggcagggcacccggcagaaggccgagaatgaaaatacaggcatctgcaccaacaagaggggcagcagcaaccccctgctgaccacagaggaggccaacctgacagagaaggaggagatccggcagggcgagaccctgatgattgagggcacagagcagctgaagagcctgagcagtgacagcagcttctgcttcccccggccccacttctccttcagcaccctgcccaccgtgtccaggacagtggagctgaagtctgagcccaacgtcatcagcagccctgcagaatgttccctggagctgagccccagccggccctgtgtgctgcacagcagcctgagccggcgggagacccccatctgcatgctgcccatcgagacagagaggaacatctttgagaactttgcccacccccccaacatcagccccagcgcctgccccctgcccccacctccacccatcagcccccccagccccccaccagccccagcccccctggcccctcctccagacatcagccccttcagcctcttctgccccccacccagccccccatccatccccctgcccctgcccccacccaccttcttccccctgtctgtgtccaccagcggcccccccaccccacccctgctgccccccttccccacccccctgcccccacctccacccagcatcccctgccccccaccacccagcgccagcttcctgagcacagaatgtgtgtgcatcaccggggtgaagtgcaccaccaacctgatgcctgctgagaagatcaagagctccatgacccagctgagcaccaccaccgtgtgcaagacagacccccagcgggagcccaagggcatcctgcggcacgtgaagaacctggccgagctggagaagtctgtggccaacatgtacagccagatcgagaagaactacctgcggaccaacgtgtctgagctgcagaccatgtgccccagcgaggtgaccaacatggagatcaccagcgagcagaacaagggcagcctgaacaacatcgtggagggcacagagaagcagagccacagccagagcaccagcctgtag

SEQ ID NO: 226907 - DNA, 5868 bp, Artificial Sequence
  derived and/or modified sequence
atgttccggcagttctacctgtggacctgcctggccagcggcatcatcctagggtccttgtttgagatatgcctgggccaatatgacgatgactgtaagctagcgagaggaggccccccagctacaattgtggccattgacgaggagagcaggaatggtaccattctggtggataacatgctgattaagggaaccgcaggcggccctgatcctactattgaacttagcttaaaggataatgtagactactgggtgttgatggaccctgtgaagcagatgctgtttctgaattctacagggcgtgtccttgatagagacccccctatgaatatccactcaatcgtggtacaggtacagtgcatcaacaagaaagttgggaccatcatatatcacgaagtcagaatcgtcgtgagggacagaaatgacaactcacccacatttaaacacgagtcctattacgccactgtgaatgagctgactccagtcgggactacaattttcaccggatttagcggcgataatggcgctacagatatcgacgacgggccgaacggccagattgagtatgtgatccagtacaatccagatgaccctacatccaatgacacctttgagatccccctgatgcttacagggaacattgttctcaggaaacggctcaattatgaggataaaacgaggtattttgtgattatacaggccaacgatagggcccagaatttgaatgagcggcgtaccacaacaacgaccctcactgttgacgtattggatggggacgacctgggacctatgttcctcccctgcgtgctggttccgaatacgcgggattgtagacccctcacttaccaggctgccatacctgagctgcgcacaccggaggagctgaatccgatcattgtcactccccccattcaggctattgaccaggatcggaatatccagcctccctcagacaggccaggcatcttgtattctatcttagttggaactccagaagattatccaaggttctttcacatgcaccccaggacggccgaactgtcactcctggaaccagttaacagagattttcaccagaaattcgatttagtcatcaaagccgaacaagataatggacacccacttccagccttcgccggcctacacatagagatactggacgagaacaatcagagcccttatttcacaatgccatcttatcaggggtacatcttggagtcggctcctgtaggtgctacaatctccgatagtttaaacctcacctccccgctccgcattgtcgctctggataaagacatagaggatactaaggaccccgagttacacctgtttctcaatgactataccagcgtgttcaccgttacacaaaccggaatcactcgttaccttaccctattgcagcccgttgatcgcgaagagcagcagacttacaccttttccataacggccttcgacggcgtccaagagagtgagcctgttatcgtcaatatccaagtaatggatgccaacgacaacacgcccaccttcccagaaatctcatacgacgtttacgtctacaccgacatgcggccaggcgatagcgtcattcagttaaccgctgtggacgcagatgaaggaagcaacggtgaaatcacatatgaaattctggttggagctcagggtgattttatcatcaataaaacaacaggcctgatcactatcgcacccggtgttgagatgatcgtgggcagaacttatgcactgacggtgcaggcggcagataatgccccccccgcagaaaggagaaactccatttgtacagtctatatcgaggttctgcctccaaacaaccaatctccaccgcgcttccctcagctgatgtattcactggagatcagcgaagcaatgagagtgggggccgtgctcctcaatcttcaggccacggatagggagggggactcaattacatatgccattgagaatggtgatccccagagggtattcaacctgtcagaaacgacaggtatcttgacgctaggcaaagcactcgacagggagtcgacagacaggtatatactgatcattactgcttccgacggcaggcccgacgggaccagtaccgctacagtcaacatcgtggttacagacgtaaatgataatgcacctgtctttgacccgtaccttccgagaaacctgtcggtggtggaggaagaggccaatgcattcgtagggcaggtgaaggcaacggacccagacgcaggaattaatggccaggtgcactattccctcggtaactttaacaatctttttcggatcaccagcaacgggagcatatacacggctgtgaaactgaatcgagaagtgcgcgattattacgagctcgtagtcgtggcgaccgacggggccgtccatcccaggcattccactctgacgctcgccataaaggtgctggatattgacgacaattctcccgtattcacgaatagcacttacaccgtcctggtggaggaaaacctgcctgccggcaccaccatactgcagatcgaagcaaaggatgttgatctcggggccaacgtgtcctaccgcatcaggagtcctgaggttaaacactttttcgctctgcatccattcacaggcgaactgagtctcctgcgctctctagactacgaggcttttcctgatcaggaggcctccatcaccttcttagtggaggccttcgacatttatgggaccatgcccccaggcatagccaccgttactgttatcgtgaaggacatgaatgattacccaccagttttttcaaaacggatttacaaggggatggtggctcccgatgccgtaaagggtactcccattactaccgtgtatgccgaagacgcagatccacccgggctgcctgcatccagggtacggtaccgcgtggacgacgttcaatttccataccccgcatcaatcttcgaagtggaggaagactcaggcagggtcattactcgggtgaatttaaacgaagagccaaccacaatatttaaactggtggtggtggcttttgatgacggagagccggtgatgagctcgtctgcaactgtgaagatcctagttctgcacccaggtgagatcccaagatttactcaagaggaatatcgccctcctccagtatcagaacttgctactaaaggcaccatggtcggagttatttcagctgcggccattaaccagagtatcgtttactccatcgtgagcggaaacgaggaagacaccttcggcatcaacaacatcaccggcgtgatttatgtaaatggcccgctggactacgagacaagaactagctatgtgctgcgggtgcaggcagattcgctggaggtcgtgttagccaacctccgggtgccttctaaatcaaacactgcaaaggtgtatattgagatccaggatgaaaataaccatccaccagtgtttcagaaaaaattctatattggaggcgtgagtgaagacgcccgtatgttcacatctgtcctgcgtgtgaaagccaccgataaggacaccggaaactactccgtgatggcttacaggctgattattcctcctataaaggaaggaaaagaaggtttcgtggtggaaacatatacaggattaattaagaccgccatgctgttccataacatgcgtagatcctattttaaattccaggtgatcgccacggatgattacggcaaaggtctgtccggtaaagccgacgtgttagtttcggtggtgaaccagctggacatgcaagttatcgtatcgaacgtaccaccaactttagtggagaagaagatcgaggatttgaccgaaattctcgataggtacgtgcaggagcagattccgggcgctaaagtggtcgtggagtccattggcgcaagacgccacggcgatgcattttcattggaagattacacaaaatgtgacctgacagtctacgccatagacccccaaacaaatcgagctattgaccgcaacgagcttttcaaattcttggacggcaagctcctagacatcaacaaggactttcaaccttattatggagaggggggaagaatactggagattaggacgcccgaagcagtgacgtccattaagaaacgcggtgagtcactgggatataccgagggtgctctgttagctcttgctttcattatcattctctgttgtattccggccatcctcgtggttctggtgtcttatcggcaatttaaggtgcggcaagccgaatgtacaaagactgcacggattcaggctgcgctgccagccgccaagccagccgttcctgcacccgcccccgtggccgcgcccccgccacccccgccacctcctcccggcgcacacctctacgaggaattgggggattcatccatccttttcctcctgtaccacttccaacagtctcggggcaataattctgtcagcgaggatagaaaacaccaacaggttgtcatgccttttagctcgaacaccatcgaagcccacaagagtgcacatgtcgatgggagcctgaagtctaataagcttaagtccgctagaaaattcacctttctctctgacgaggatgatctctccgcacacaaccctctttataaagaaaatataagccaagtttctaccaattccgacatctcccaacgaacagatttcgtggaccctttctcccctaaaatccaggctaaatcgaaatccctacgtggccccagagaaaaaattcagcggctatggtcccagtctgttagcctccctcgtaggctgatgaggaaggtgcccaacaggccagagatcatcgacctccagcaatggcaggggactcggcagaaagctgaaaatgagaatactggcatctgcaccaacaaaagaggtagttcaaatcccctcctcactacagaagaagctaacctgaccgaaaaggaggaaataagacagggcgaaactttaatgattgaaggaaccgagcagttgaagtccctgagcagcgactcttccttctgtttcccgcgcccccactttagtttctctacgcttccaacagtgtccagaacagtggagctgaagagcgaacccaacgtgatctctagccctgccgagtgcagcctcgagctgagtccctctagaccctgcgtattacactcttctctttctcggagagagaccccaatatgcatgctgccaattgagactgagaggaatatattcgagaatttcgcacatccaccaaacataagcccgtctgcttgtccattgccgccgccgcccccgatcagtcccccttctcccccaccagcccccgctcctttggccccaccacccgacattagtccattttcactgttctgtcctcccccaagtccaccgtcaatcccgttacccctccccccaccaacgtttttccccttgagcgtgtcaaccagtggcccccctacacctccccttctgcccccatttccaaccccattacctccaccaccgccatccatcccttgtccaccgccaccttccgcctcattcttgtctactgaatgtgtgtgtattactggggtgaaatgtaccactaacctaatgcccgcagagaagataaaaagcagcatgactcaactttccactaccacagtttgcaagacagatccccagcgggaacctaaaggcattctcaggcatgtcaaaaacctggctgagctggagaaaagtgtcgcaaatatgtactcccaaatagagaaaaattatcttcgtaccaatgtgagtgaactccaaacaatgtgtccgtctgaggtgactaacatggaaattacatcagaacagaataaaggtagcctgaataacatcgtagaaggaaccgagaaacagagccatagccagtctacctcactgtag

SEQ ID NO: 226908 - DNA, 5867 bp, Artificial Sequence
  derived and/or modified sequence
atgttccggcagttttacctttggacttgtcttgccagcgggattatcctgggatctcttttcgaaatatgtcttggccagtacgatgacgactgcaagctcgcgagagggggaccaccagccactatcgttgcaattgacgaagaatcacggaacggcacaatcctcgtggacaatatgttgattaaggggacggctggaggccctgatcctactattgagctgtcgttgaaggataacgtcgactactgggttctgatggatccggtcaagcaaatgctttttcttaacagcactgggagagtgttagacagggaccccccaatgaacatccatagtatcgtggtgcaggtacagtgcattaacaagaaagtcggaaccattatctatcacgaagtgcgaattgttgtccgggacagaaatgacaatagtccaacctttaaacacgagtcttattatgcaacggttaacgagctgacccccgtgggtactacaatttttaccgggttttctggggataatggcgctacagatattgacgacgggccaaatggtcaaatcgaatacgtgatccagtataatccagatgaccccactagtaatgacacctttgaaatacctttgatgctcactgggaacatagtactccgcaaaagactaaactatgaggataaaacaagatacttcgtgatcattcaagcaaatgacagagcgcagaacctcaacgagcgcaggactaccaccaccactctcaccgttgacgttcttgacggagatgatctaggccctatgttccttccgtgcgtgcttgtcccaaatactcgggactgccgccctttgacctatcaagccgctattcctgaactgcgcaccccagaggagctgaacccaatcatcgtgacacctcccattcaggcaattgatcaggatagaaacattcagccaccctctgatcggcctggaattctgtattccattcttgtgggtacacccgaggactacccaagattcttccacatgcatccacgcactgctgaactgtccctgctggaaccggttaatagggattttcaccagaagtttgatctggtaatcaaggctgagcaagacaacgggcaccctctgccagccttcgcaggtcttcacatcgaaattctggacgaaaataaccaatccccctatttcactatgccaagttaccaaggctacatcctggaatcggctccagtgggagccacgatctcagatagcctcaatcttacgtcccctcttaggatagtcgccctcgataaagacattgaggatactaaggacccggagctacatctgtttcttaatgactatacgtcggtattcacagtcacacaaaccggcataactcggtatctcacactgctgcagccggttgacagagaggagcagcagacgtataccttttcaatcacagccttcgatggggtgcaggaatcggaaccagtgattgtgaacatccaggttatggatgctaatgacaataccccaacgttcccagagatctcttatgacgtctatgtgtataccgacatgcgcccaggtgacagtgtcattcagctgacggcagtggacgccgatgaaggttccaatggtgaaatcacctacgagattctggtaggggcacaaggagacttcataattaacaagactaccggcctgataactatcgcgccaggagttgagatgatagtggggagaacatacgctctgacagtacaagcggctgataatgcccctccggctgagagacggaacagcatctgtacagtctacattgaggtactgccgccaaacaaccaaagccctccacggttcccccaattaatgtactcactggagatttcagaggccatgagggttggggcagtcctgctgaaccttcaggccaccgatagggaaggggatagcatcacatacgctatagagaatggggacccccagagagtttttaacctgtcagaaacgacaggaattctcacactggggaaagccctggaccgcgagagcaccgataggtacattctcattatcaccgcctctgatgggagaccagacggtacctcaactgcaaccgtgaatatcgtcgtcactgatgtcaacgataatgcgcctgttttcgatccgtatctgcccagaaacctatctgtggtcgaggaggaagctaacgctttcgtgggccaggtgaaggctaccgacccggacgcaggtatcaatggacaggttcattactcactcggtaactttaacaatctgtttcgaattacgtctaacggctcaatttacacggccgtgaagctgaaccgcgaagtaagggattactatgagcttgtggtggtggcaacggatggggcagtgcatccacggcacagtaccttaaccctggccattaaggtgctggacattgacgataactcccccgtgtttacgaactctacttacaccgttttggtggaagaaaacctgcccgctggcactacaattcttcagattgaggcgaaagacgtggaccttggggcaaacgtgtcctacaggattcgttccccagaggtgaagcacttctttgccctgcaccccttcactggcgagctcagtctgctcaggagtttggattacgaagcgtttcccgatcaggaggctagtattacatttctggtagaggcttttgacatttacggaaccatgcctcctggtatcgctaccgtcacagtgatcgtcaaagacatgaatgactaccctcctgttttctccaagcgcatctataaaggcatggtggcacctgacgctgtcaagggtaccccaatcaccactgtttacgcggaagacgcagatcctccaggcctgccagcaagcagggtgaggtatagggtggacgacgtgcagtttccttatcctgccagtattttcgaggtagaggaggactctggacgagtgatcactagagtcaaccttaatgaagagcctacaaccatttttaaattagtagtggtcgctttcgacgatggggaaccagtcatgagttcctctgctacagtgaaaatcctcgtcttacacccaggcgagatcccgaggtttactcaggaggagtataggcctccacctgtttctgagctcgcgactaaagggacgatggtcggggtaatcagcgccgctgcaatcaaccagagcattgtttattcaatagtcagtggcaacgaagaagatactttcgggatcaacaatataaccggagtgatctatgtgaatgggccattggactatgagacacgaacatcctatgtcttgagagttcaggcagatagtttggaggtggtgctcgcaaatctgagagtaccgagcaaaagcaacaccgctaaggtgtatattgagatccaagacgagaataaccaccctccagtttttcagaaaaaattctatataggcggtgtgtctgaagacgctaggatgttcacgtctgttttgagagtcaaagcaacggataaggacactgggaattattcagtcatggcatacaggctgattatacccccaataaaggaggggaaagagggttttgtcgtggagacttacactggcctcatcaagactgcaatgctgttccacaacatgcggagaagttatttcaaattccaggtgatcgcgaccgatgactatggcaaagggctgagcgggaaggcagatgtgctcgtgtcagtggtgaatcaactcgacatgcaagttattgtgagtaatgtcccacccactcttgttgagaagaaaatcgaggacttgacggaaattttagacagatacgtgcaggaacagattccgggagctaaagtggtcgttgagtcaatcggtgcacgccgacacggcgacgcattctccttggaggactatacgaaatgtgatctcactgtgtatgccatcgaccctcagactaaccgcgctattgaccgaaatgaattatttaaatttctagacggcaaacttcttgacataaacaaggatttccagccttactatggggaaggcggaagaattctggaaatccgcacaccagaggccgtgaccagcatcaagaagcgaggtgaaagcttggggtatacagaaggcgctctgctggctttggcctttataatcatcctctgttgtatccccgctatccttgtagtactggtctcctatcgccagttcaaggtgcgccaggcggagtgcacaaagacggcgagaatacaggccgctctgcctgcggcaaagcctgctgtccccgctccggcacccgtagccgctccccctccacctccaccaccaccgcctggcgcacacctatacgaagagctaggtgactcttctatcttgtttttactctatcatttccagcagagtcggggaaacaactcagtgagtgaagaccggaagcatcagcaagtggtgatgccgttcagtagtaatactatcgaggcccacaagagcgcccacgtggacgggagccttaaatcaaataaactcaagtctgcaagaaagtttacctttttatcagacgaggatgacctgagcgctcataatcccctgtataaggaaaatatcagccaggtgtctactaactccgatatttcacaacgtacggatttcgtggatccattcagtccaaagatacaggccaagtctaaaagtcttagggggccaagagagaaaatccagaggttgtggtctcagtcagtcagtttgccaaggagactgatgcgcaaagttccgaacagacctgagataatcgatcttcagcagtggcagggaacacggcaaaaggctgaaaatgaaaataccggcatatgtactaacaagcgcggaagttcgaacccccttttgactaccgaggaggccaatctgaccgaaaaggaggaaattagacaaggtgagactctcatgattgaaggtaccgagcagctaaagtctctttccagcgatagcagcttttgttttccacgacctcatttcagcttctctacgctgcccaccgtatcccggacagtggagttaaagagcgaacctaacgtcataagtagcccagctgagtgtagcttggaacttagcccctcccgtccttgcgtgctacacagtagtctgagccggagggagacaccaatttgtatgctgcccatcgagaccgagcggaacattttcgagaatttcgcccatccacctaatataagtccatccgcctgtcctctgcctcccccaccaccgattagccccccatctcctccgccagccccagcccctctagcccctcccccagatattagtccttttagtcttttctgccctcctccatcaccaccatcaatccccctgcccctgcctcctccaaccttctttccattatcggtctcgacatccgggcctccaacaccccctctacttccgccatttccaacaccactgccaccaccaccacctagcatcccttgcccacccccacctagcgctagttttttaagtaccgagtgcgtgtgcatcacgggtgtgaaatgcacgacgaacctcatgcccgcagaaaagattaagtcgagtatgacacagctgagcacgaccacggtgtgtaaaaccgatccgcagcgcgagcccaaaggcatcttgcggcatgtcaagaatctggccgagctcgagaagtcagttgcaaatatgtacagccagattgagaagaactatctgcgtactaacgtgagtgagctgcagactatgtgcccttcggaagtgaccaacatggagatcacatccgaacagaataagggctcattgaataatatagtagaaggtacagagaaacagtcccactctcagagcacctcactgta

SEQ ID NO: 226909 - DNA, 6845 bp, Artificial Sequence
  derived and/or modified sequence
caacgtgctgagctaatagcgacagatagagggcagacagattcctgctagcagcttagtgttagttgcttgtggtaactaaggcaggtggcatacatctcagaacgtggagaatgatggtatgctttctgagttaacatgttgaactgttttgcttttctaaaaattttcctagtaacattttcttgatgatatgagagtggatatcaatgcctcacagaaacaagaggtggaacatgtgaatgaatcgtcttggaactagattatgagcactggttctttttaaagggatgtgcaagaggcagccttggcaagaaaacttgctgcataatcttacatggactaaagatgaaactttaaaccgcaaatcagctttgagtgaactttgacagaagatgtttcgacagttttatctctggacatgtttagcttcagggatcatcctgggctctctctttgaaatctgcttgggccagtatgatgatgattgcaaactagctaggggaggaccaccagctaccatagttgctattgatgaagaaagtcggaatggtacaattctggtggacaacatgctgatcaaagggactgctggaggaccagaccccaccatagaactttctttaaaggataatgtggattactgggtgttgatggatcctgttaagcaaatgcttttcctgaacagcaccggaagagttctggatagagatccaccgatgaacatacactccattgtggtgcaggtccagtgcatcaacaaaaaagtgggcactattatctaccatgaagtgcgaatagtggtgagagacaggaatgacaactcacccactttcaagcatgaaagctactatgccacagtgaatgagctcactccagttggtaccacaatattcacaggattttcaggagacaatggagctacagatatagatgatggaccaaatggacagatagagtatgttattcagtataatccagatgatccgacatccaatgacacctttgaaattcccctaatgttgactggaaatatagtgttaaggaagaggctcaactatgaagataagactcgctactttgtcataatccaagctaatgaccgtgcccaaaatctgaatgagaggcgaaccaccaccaccactctcacagtggatgttctggatggagatgacttgggtccaatgtttcttccttgtgtccttgtgccaaacactcgtgattgccgtccactcacttatcaagctgccatacctgagttgagaactccggaagaactgaaccccattattgttacgccaccaatccaagccattgatcaggaccggaatattcaaccgccatcagataggccaggaatcctctattccatccttgttgggactcctgaggattacccacgatttttccatatgcatcctaggacagcagaacttagtctcctggagccagtaaacagagactttcaccagaaatttgatttggttattaaggctgaacaagacaatggtcatcctcttcctgcctttgccggtctacacattgaaatactggatgaaaacaatcaaagtccatattttacaatgcccagttatcaaggctatatcctggaatctgccccagtgggagcaaccatttcggacagtctcaatttgacttcacctttaagaatagtagctctggacaaggacatagaagatacaaaagacccagagcttcacctttttctgaatgactacacctcagtcttcaccgtcacacagactggtattactcgctacctcaccttacttcaaccagtggacagggaagaacagcaaacttacaccttttcgataacagcatttgatggtgtacaagaaagtgagccagtcatcgtcaatattcaagtgatggatgcaaatgataacacgccaaccttccctgaaatatcctatgatgtgtatgtttatacagacatgagacctggggacagtgtcatacagctcactgcagtcgacgcagacgaagggtcaaatggggagatcacatatgaaatccttgttggggctcagggagacttcatcatcaataaaacaacagggcttatcaccatcgctccaggggtggaaatgatagtcgggcggacttacgcactcacggtccaagcagcggataatgctcctcctgcagagcgaaggaactccatctgcactgtgtatattgaagtgcttccaccaaataatcaaagccctcctcgcttcccacagctgatgtatagccttgaaattagtgaagccatgagggttggtgctgttttattaaatctacaggcaactgatcgagagggagactcaataacatatgccattgagaatggagatcctcagagagtttttaatctttcagaaaccacggggattctaaccttagggaaagcactggacagggaaagcactgatcgctacattctgatcatcacagcttcagatggcaggccagatgggacctcaactgccacagtaaacatagtggtgacagatgtcaatgacaatgctccagtgtttgatccttatctgccaagaaatttatctgtggtggaagaagaagccaatgcctttgtgggtcaagtaaaagcaacagaccctgatgctggaataaatggtcaagtgcactacagtttgggtaactttaataatctttttcgtatcacatccaatgggagcatttacacagcagtgaagcttaacagagaagtcagggactactatgaacttgttgttgtggcaacagatggagcagtacaccctcgtcattcaactctaaccttggccatcaaggttttggacattgatgataacagtcctgtgttcaccaattcaacatacactgtccttgttgaagagaatttgccagctgggactaccatccttcaaatagaggccaaagatgtcgaccttggagcaaatgtgtcttaccggataagaagcccagaagtgaagcacttttttgcactacatccatttacaggagaactatcgcttttaaggagtttagattatgaggcatttccagaccaagaagcaagtatcacttttctggtagaggcctttgatatttatggaacaatgccacctggtattgctactgtcacagtgattgtaaaggatatgaatgattatcctcctgtctttagtaaacgaatatacaaagggatggtggctccggatgcagtcaagggtacacctatcacaacagtttatgctgaagatgcagaccctcctggattacctgcaagtcgtgtgaggtatagagtagatgatgtacagtttccttaccctgccagtatttttgaagtggaagaagattctggaagagtaataacacgagtcaatcttaatgaagaacctacaacaatttttaagttggtggtggttgcttttgatgatggggagcctgtgatgtccagcagtgccacagtgaagattcttgtcttacatcctggtgagatcccacgcttcacacaggaggaatatagacctcctccagtaagtgaacttgccaccaaagggaccatggttggtgtaatttctgctgctgccattaatcaaagtattgtgtactccattgtttcaggaaatgaagaagatacatttggaattaataacatcacaggtgttatctatgtgaatggacctctggattatgagaccaggacaagctatgtacttcgagtccaagctgattccctggaagtggtccttgccaatctccgagttccttcaaaaagcaatacagctaaagtatacattgagattcaggatgaaaataatcatcccccagtgtttcagaaaaaattctacatcggaggtgtatctgaagatgcaagaatgtttacttctgtactcagagtgaaggctactgataaagatactggcaattatagtgtcatggcctacagactcataataccaccaattaaagagggaaaagaaggatttgtagtggaaacatatacagggcttatcaaaactgctatgctcttccataatatgaggagatcctacttcaagtttcaagttattgcaactgacgactatgggaagggactgagcggcaaagccgatgtactcgtctccgtggtcaatcagctggatatgcaagtcattgtttccaatgtgcctcctactctagtggaaaaaaagatagaagatcttacagagatcttggatcgctatgttcaggaacaaattcctggtgccaaggtcgtagtggagtccattggagctcgccggcatggagatgccttttccctagaagattacaccaaatgtgacttgactgtctatgcaattgacccccaaaccaacagagccatcgatagaaatgagctttttaaatttttggatggcaaactacttgatatcaataaagactttcagccgtattatggggaaggaggacgcattctggagatccggactccagaggcagtgaccagcattaaaaagagaggagaaagtctaggatacacagaaggggccttgttggctctggccttcatcatcatcctctgctgcattcctgccatcttggtggttttggtcagctacagacagtttaaagtacgtcaagctgagtgtacaaagactgcacgaattcaggccgcattacccgcggctaaaccagcagtgccggctcctgcaccagtggcagcgcccccgccgccgccgccgcctccgccaggtgcgcatctctatgaagaacttggagacagctcaattcttttccttctctaccattttcaacaaagcaggggaaataactcagtctcagaagacaggaaacatcaacaagttgtgatgcccttttcttccaatactattgaggctcacaagtcagctcatgtagacggatcacttaagagcaacaaactgaagtctgcaagaaaattcacatttctatctgatgaggatgacttaagtgcccataatcccctttataaggaaaacataagtcaagtatcaacaaattcagacatttcacagagaacagattttgtagacccattttcacccaaaatacaagccaagagtaagtctctgaggggcccaagagaaaagattcagaggctgtggagtcagtcagtcagcttacccaggaggctgatgaggaaagttccaaatagaccagagatcatagatctgcagcagtggcaaggcaccaggcagaaagctgaaaatgaaaacactggaatctgtacaaacaaaagaggtagcagcaatccattgcttacaactgaagaggcaaatttgacagagaaagaggaaataaggcaaggtgaaacactgatgatagaaggaacagaacagttgaaatctctctcttcagactcttcattttgctttcccaggcctcacttctcattctccactttgccaactgtttcaagaactgtggaactcaaatcagaacctaatgtcatcagttctcctgctgagtgttccttggaactttctccttcaaggccttgtgttttacattcttcactctctaggagagagacacctatttgtatgttacctattgaaaccgaaagaaatatttttgaaaattttgcccatccaccaaacatctctccttctgcctgtccccttccccctcctcctcctatttctcctccttctcctcctcctgctcctgctcctcttgctcctcctcctgacatttctcctttttctcttttttgtcctcctccctctcctccttctatccctcttcctcttcctcctcctacattttttccactttccgtttcaacgtctggtcccccaacaccacctcttctacctccatttccaactcctcttcctccaccacctccttctattccttgccctccacctccttcagcttcatttctgtccacagagtgtgtctgtataacaggtgttaaatgcacgaccaacttgatgcctgccgagaaaattaagtcctctatgacacagctatcaacaacgacagtgtgtaaaacagaccctcagagagaaccaaaaggcatcctcagacacgttaaaaacttagcagaacttgaaaaatcagtagctaacatgtacagtcaaatagaaaaaaactatctacgcacaaatgtttcagaacttcaaactatgtgcccttcagaagtaacaaatatggaaatcacatctgaacaaaacaaggggagtttgaacaatattgtcgagggaactgaaaaacaatctcacagtcaatctacttcactgtaatgttgcttttcttattttagtcgggcaaacctcttgttgatcatagtcttcaagttgaacatcaaatttgaacgtcaaagaagactctattattttaccccaaattcaatgaaatgcagttttttttctcgtttttaatttaaaaagatattaacctcatcactactaactcactcatataatagatttaccttactttttaaaaactacaaagtagcataatttgttctacatttatttgaaaagtaagtaattttaatctcttttttagtgggaatatgtgggcatgaaaattagatacccaacttaaaccaaaggcatgtctatcatgtggatgcagtaacatttacatttagtttttgatcgtagttttatatgaatgttccaagaaaaaagcagactgttacaaataagttaaaactgatatgattgataggttctgttttttcttgaagcctatgtatttggtaagaagaaatactaccgaagtaaaatataatgtacctagattgtaggagatgacagacataaggtatttcaaaataaatctcaggtgctataacatgtagtcatctgttttct

SEQ ID NO: 226910 - DNA, 5868 bp, Artificial Sequence
  derived and/or modified sequence
atgttcagacagttctacctgtggacctgcctggccagcggcatcatcctgggcagcctgttcgagatctgcctgggccagtacgacgacgactgcaagctggccagaggcggcccccccgccaccatcgtggccatcgacgaggagagcagaaacggcaccatcctggtggacaacatgctgatcaagggcaccgccggcggccccgaccccaccatcgagctgagcctgaaggacaacgtggactactgggtgctgatggaccccgtgaagcagatgctgttcctgaacagcaccggcagagtgctggacagagacccccccatgaacatccacagcatcgtggtgcaggtgcagtgcatcaacaagaaggtgggcaccatcatctaccacgaggtgagaatcgtggtgagagacagaaacgacaacagccccaccttcaagcacgagagctactacgccaccgtgaacgagctgacccccgtgggcaccaccatcttcaccggcttcagcggcgacaacggcgccaccgacatcgacgacggccccaacggccagatcgagtacgtgatccagtacaaccccgacgaccccaccagcaacgacaccttcgagatccccctgatgctgaccggcaacatcgtgctgagaaagagactgaactacgaggacaagaccagatacttcgtgatcatccaggccaacgacagagcccagaacctgaacgagagaagaaccaccaccaccaccctgaccgtggacgtgctggacggcgacgacctgggccccatgttcctgccctgcgtgctggtgcccaacaccagagactgcagacccctgacctaccaggccgccatccccgagctgagaacccccgaggagctgaaccccatcatcgtgaccccccccatccaggccatcgaccaggacagaaacatccagccccccagcgacagacccggcatcctgtacagcatcctggtgggcacccccgaggactaccccagattcttccacatgcaccccagaaccgccgagctgagcctgctggagcccgtgaacagagacttccaccagaagttcgacctggtgatcaaggccgagcaggacaacggccaccccctgcccgccttcgccggcctgcacatcgagatcctggacgagaacaaccagagcccctacttcaccatgcccagctaccagggctacatcctggagagcgcccccgtgggcgccaccatcagcgacagcctgaacctgaccagccccctgagaatcgtggccctggacaaggacatcgaggacaccaaggaccccgagctgcacctgttcctgaacgactacaccagcgtgttcaccgtgacccagaccggcatcaccagatacctgaccctgctgcagcccgtggacagagaggagcagcagacctacaccttcagcatcaccgccttcgacggcgtgcaggagagcgagcccgtgatcgtgaacatccaggtgatggacgccaacgacaacacccccaccttccccgagatcagctacgacgtgtacgtgtacaccgacatgagacccggcgacagcgtgatccagctgaccgccgtggacgccgacgagggcagcaacggcgagatcacctacgagatcctggtgggcgcccagggcgacttcatcatcaacaagaccaccggcctgatcaccatcgcccccggcgtggagatgatcgtgggcagaacctacgccctgaccgtgcaggccgccgacaacgccccccccgccgagagaagaaacagcatctgcaccgtgtacatcgaggtgctgccccccaacaaccagagcccccccagattcccccagctgatgtacagcctggagatcagcgaggccatgagagtgggcgccgtgctgctgaacctgcaggccaccgacagagagggcgacagcatcacctacgccatcgagaacggcgacccccagagagtgttcaacctgagcgagaccaccggcatcctgaccctgggcaaggccctggacagagagagcaccgacagatacatcctgatcatcaccgccagcgacggcagacccgacggcaccagcaccgccaccgtgaacatcgtggtgaccgacgtgaacgacaacgcccccgtgttcgacccctacctgcccagaaacctgagcgtggtggaggaggaggccaacgccttcgtgggccaggtgaaggccaccgaccccgacgccggcatcaacggccaggtgcactacagcctgggcaacttcaacaacctgttcagaatcaccagcaacggcagcatctacaccgccgtgaagctgaacagagaggtgagagactactacgagctggtggtggtggccaccgacggcgccgtgcaccccagacacagcaccctgaccctggccatcaaggtgctggacatcgacgacaacagccccgtgttcaccaacagcacctacaccgtgctggtggaggagaacctgcccgccggcaccaccatcctgcagatcgaggccaaggacgtggacctgggcgccaacgtgagctacagaatcagaagccccgaggtgaagcacttcttcgccctgcaccccttcaccggcgagctgagcctgctgagaagcctggactacgaggccttccccgaccaggaggccagcatcaccttcctggtggaggccttcgacatctacggcaccatgccccccggcatcgccaccgtgaccgtgatcgtgaaggacatgaacgactacccccccgtgttcagcaagagaatctacaagggcatggtggcccccgacgccgtgaagggcacccccatcaccaccgtgtacgccgaggacgccgacccccccggcctgcccgccagcagagtgagatacagagtggacgacgtgcagttcccctaccccgccagcatcttcgaggtggaggaggacagcggcagagtgatcaccagagtgaacctgaacgaggagcccaccaccatcttcaagctggtggtggtggccttcgacgacggcgagcccgtgatgagcagcagcgccaccgtgaagatcctggtgctgcaccccggcgagatccccagattcacccaggaggagtacagacccccccccgtgagcgagctggccaccaagggcaccatggtgggcgtgatcagcgccgccgccatcaaccagagcatcgtgtacagcatcgtgagcggcaacgaggaggacaccttcggcatcaacaacatcaccggcgtgatctacgtgaacggccccctggactacgagaccagaaccagctacgtgctgagagtgcaggccgacagcctggaggtggtgctggccaacctgagagtgcccagcaagagcaacaccgccaaggtgtacatcgagatccaggacgagaacaaccacccccccgtgttccagaagaagttctacatcggcggcgtgagcgaggacgccagaatgttcaccagcgtgctgagagtgaaggccaccgacaaggacaccggcaactacagcgtgatggcctacagactgatcatcccccccatcaaggagggcaaggagggcttcgtggtggagacctacaccggcctgatcaagaccgccatgctgttccacaacatgagaagaagctacttcaagttccaggtgatcgccaccgacgactacggcaagggcctgagcggcaaggccgacgtgctggtgagcgtggtgaaccagctggacatgcaggtgatcgtgagcaacgtgccccccaccctggtggagaagaagatcgaggacctgaccgagatcctggacagatacgtgcaggagcagatccccggcgccaaggtggtggtggagagcatcggcgccagaagacacggcgacgccttcagcctggaggactacaccaagtgcgacctgaccgtgtacgccatcgacccccagaccaacagagccatcgacagaaacgagctgttcaagttcctggacggcaagctgctggacatcaacaaggacttccagccctactacggcgagggcggcagaatcctggagatcagaacccccgaggccgtgaccagcatcaagaagagaggcgagagcctgggctacaccgagggcgccctgctggccctggccttcatcatcatcctgtgctgcatccccgccatcctggtggtgctggtgagctacagacagttcaaggtgagacaggccgagtgcaccaagaccgccagaatccaggccgccctgcccgccgccaagcccgccgtgcccgcccccgcccccgtggccgcccccccccccccccccccccccccccccggcgcccacctgtacgaggagctgggcgacagcagcatcctgttcctgctgtaccacttccagcagagcagaggcaacaacagcgtgagcgaggacagaaagcaccagcaggtggtgatgcccttcagcagcaacaccatcgaggcccacaagagcgcccacgtggacggcagcctgaagagcaacaagctgaagagcgccagaaagttcaccttcctgagcgacgaggacgacctgagcgcccacaaccccctgtacaaggagaacatcagccaggtgagcaccaacagcgacatcagccagagaaccgacttcgtggaccccttcagccccaagatccaggccaagagcaagagcctgagaggccccagagagaagatccagagactgtggagccagagcgtgagcctgcccagaagactgatgagaaaggtgcccaacagacccgagatcatcgacctgcagcagtggcagggcaccagacagaaggccgagaacgagaacaccggcatctgcaccaacaagagaggcagcagcaaccccctgctgaccaccgaggaggccaacctgaccgagaaggaggagatcagacagggcgagaccctgatgatcgagggcaccgagcagctgaagagcctgagcagcgacagcagcttctgcttccccagaccccacttcagcttcagcaccctgcccaccgtgagcagaaccgtggagctgaagagcgagcccaacgtgatcagcagccccgccgagtgcagcctggagctgagccccagcagaccctgcgtgctgcacagcagcctgagcagaagagagacccccatctgcatgctgcccatcgagaccgagagaaacatcttcgagaacttcgcccacccccccaacatcagccccagcgcctgccccctgcccccccccccccccatcagcccccccagccccccccccgcccccgcccccctggcccccccccccgacatcagccccttcagcctgttctgccccccccccagcccccccagcatccccctgcccctgcccccccccaccttcttccccctgagcgtgagcaccagcggcccccccaccccccccctgctgccccccttccccacccccctgcccccccccccccccagcatcccctgcccccccccccccagcgccagcttcctgagcaccgagtgcgtgtgcatcaccggcgtgaagtgcaccaccaacctgatgcccgccgagaagatcaagagcagcatgacccagctgagcaccaccaccgtgtgcaagaccgacccccagagagagcccaagggcatcctgagacacgtgaagaacctggccgagctggagaagagcgtggccaacatgtacagccagatcgagaagaactacctgagaaccaacgtgagcgagctgcagaccatgtgccccagcgaggtgaccaacatggagatcaccagcgagcagaacaagggcagcctgaacaacatcgtggagggcaccgagaagcagagccacagccagagcaccagcctgtag

SEQ ID NO: 226911 - protein, 357 aa, Artificial Sequence
  derived and/or modified sequence
MNWVNKSVPQEFILLVFSDQPWLEIPPFVMFLFSYILTIFGNLTIILVSHVDFKLHTPMYFFLSNLSLLDLCYTTSTVPQMLVNICNTRKVISYGGCVAQLFIFLALGSTECLLLAVMCFDRFVAICRPLHYSIIMHQRLCFQLAAASWISGFSNSVLQSTWTLKMPLCGHKEVDHFFCEVPALLKLSCVDTTANEAELFFISVLFLLIPVTLILISYAFIVQAVLRIQSAEGQRKAFGTCGSHLIVVSLFYGTAISMYLQPPSPSSKDRGKMVSLFCGIIAPMLNPLIYTLRNKEVKEAFKRLVAKSLLNQEIRNMQMISFAKDTVLTYLTNFSASCPIFVITIENYCNLPQRKFP

SEQ ID NO: 226912 - DNA, 1074 bp, Artificial Sequence
  derived and/or modified sequence
atgaactgggtgaacaagagcgtgccccaggagttcatcctgctggtgttcagcgaccagccctggctggagatcccccccttcgtgatgttcctgttcagctacatcctgaccatcttcggcaacctgaccatcatcctggtgagccacgtggacttcaagctgcacacccccatgtacttcttcctgagcaacctgagcctgctggacctgtgctacaccaccagcaccgtgccccagatgctggtgaacatctgcaacaccagaaaggtgatcagctacggcggctgcgtggcccagctgttcatcttcctggccctgggcagcaccgagtgcctgctgctggccgtgatgtgcttcgacagattcgtggccatctgcagacccctgcactacagcatcatcatgcaccagagactgtgcttccagctggccgccgccagctggatcagcggcttcagcaacagcgtgctgcagagcacctggaccctgaagatgcccctgtgcggccacaaggaggtggaccacttcttctgcgaggtgcccgccctgctgaagctgagctgcgtggacaccaccgccaacgaggccgagctgttcttcatcagcgtgctgttcctgctgatccccgtgaccctgatcctgatcagctacgccttcatcgtgcaggccgtgctgagaatccagagcgccgagggccagagaaaggccttcggcacctgcggcagccacctgatcgtggtgagcctgttctacggcaccgccatcagcatgtacctgcagccccccagccccagcagcaaggacagaggcaagatggtgagcctgttctgcggcatcatcgcccccatgctgaaccccctgatctacaccctgagaaacaaggaggtgaaggaggccttcaagagactggtggccaagagcctgctgaaccaggagatcagaaacatgcagatgatcagcttcgccaaggacaccgtgctgacctacctgaccaacttcagcgccagctgccccatcttcgtgatcaccatcgagaactactgcaacctgccccagagaaagttcccctag

SEQ ID NO: 226913 - DNA, 1074 bp, Artificial Sequence
  derived and/or modified sequence
atgaactgggttaacaaatctgtcccacaggaattcatactgctggtcttcagtgatcagccttggttagagatccccccattcgtgatgtttttgttctcctacatactaacaattttcggcaaccttaccattatcctcgtgtcccacgtggactttaagctgcacaccccaatgtacttttttctgtccaatctgagtctcctggacctctgctacaccacaagcacagtgccacaaatgctggtgaacatctgcaataccagaaaagttatttcatatgggggatgcgttgcacaactgttcattttcctggctctgggaagtaccgaatgcctgcttttagctgtcatgtgcttcgatagatttgtggctatttgccggccattgcattacagcataatcatgcaccagaggctttgcttccaactggcagctgcctcgtggatctccggatttagtaacagcgtcctgcagtctacttggaccctgaagatgccgctctgcggacacaaagaggtcgatcacttcttctgtgaggttcctgctctgctgaaactgagctgcgttgatacgacagcaaacgaggccgaattgtttttcatctccgtcctgtttctgttgatcccagtaactctcatcctgattagttatgcgtttatcgttcaggccgttttgagaatccagtccgccgaaggccagcgcaaggcattcggtacatgcggttcacatctgattgtagtaagcctgttctacggcacggccatttctatgtacctgcaaccccctagtccctcttccaaagaccgaggaaagatggtgtccctgttttgcggaatcatcgccccaatgttgaatcccctcatctatactctcagaaacaaagaggtaaaggaggcgttcaaacgcctggtcgcaaagtccctgctcaaccaggaaataaggaacatgcagatgatcagcttcgccaaagatacagtcttgacctatctcacgaacttttccgcctcctgtcctatttttgtcatcacgatagaaaattattgcaatctgccacaacgcaagtttccatag

SEQ ID NO: 226914 - DNA, 1074 bp, Artificial Sequence
  derived and/or modified sequence
atgaactgggtgaacaagtctgtgccccaggagttcatcctgctggtgttcagtgaccagccctggctggagatccccccatttgtgatgttcctgttctcctacatcctgaccatcttcggcaacctgaccatcatcctggtgagccacgtggacttcaagctgcacacccccatgtacttcttcctgagcaacctgagcctgctggacctgtgctacaccaccagcacagtgccccagatgctggtgaacatctgcaacaccaggaaggtgatctcctatggaggctgtgtggcccagctgttcatcttcctggccctgggcagcacagaatgtctgctgctggccgtgatgtgctttgacagatttgtggccatctgccggcccctgcactacagcatcatcatgcaccagaggctgtgcttccagctggccgccgcctcctggatcagcggcttcagcaacagcgtgctgcagagcacctggaccctgaagatgcccctgtgtggccacaaggaggtggaccacttcttctgtgaggtgcctgccctgctgaagctgagctgtgtggacaccacagccaatgaagctgagctgttcttcatctctgtgctcttcctgctgatccctgtgaccctcatcctgatctcctatgccttcatcgtgcaggccgtgctgcgcatccagagcgctgagggccagaggaaggccttcggcacctgtggcagccacctgattgtggtgtccctcttctacggcacagccatctccatgtacctgcagccccccagccccagcagcaaggaccggggcaagatggtgtccctcttctgtggcatcatcgcccccatgctgaaccccctcatctacaccctgaggaacaaggaggtgaaggaggccttcaagaggctggtggccaagagcctgctgaaccaggagatccggaacatgcagatgatcagctttgccaaggacacagtgctgacctacctgaccaacttcagcgccagctgccccatctttgtgatcaccatcgagaactactgcaacctgccccagaggaagttcccctag

SEQ ID NO: 226915 - DNA, 1212 bp, Artificial Sequence
  derived and/or modified sequence
gctgacaaaatcaggaagtgtgttgttaacttcctgacttcttatatttcagagaacgaagagttgaaccatttaacatgaattgggtaaataagagtgtcccacaggagttcattctgttagttttctcagatcaaccatggctagagattccaccctttgtgatgtttctgttttcctatatcttgacaatctttggcaatctgacaataattcttgtgtcacatgtggatttcaaactccacacccctatgtacttttttcttagcaatctctcactcctggacctttgctataccacaagtacagttccacaaatgctggtaaacatatgcaacaccaggaaagtaatcagttatggtggctgtgtggcccagcttttcattttcctggccttgggttccacagaatgtcttctcctggccgtcatgtgctttgataggtttgtagctatttgtcggcctctccattactcaattatcatgcaccagaggctctgcttccagttggcagctgcatcctggattagtggctttagcaattcagtattacagtccacctggacacttaagatgccactgtgtggtcacaaagaagtggatcacttcttctgtgaagtccctgctctgctcaagttgtcctgtgttgacacaacagcaaatgaggctgaactattcttcatcagtgtgctattccttctaatacccgtgacactcatccttatatcgtatgcttttattgtccaagcagtgttgagaatccagtctgctgaaggtcaacgaaaggcatttgggacatgtggctcccatctaattgtggtgtcacttttttatggtacagctatctccatgtacctgcaaccaccttcacccagctccaaagaccggggaaagatggtttctctcttctgtggaatcattgcacccatgctgaatccccttatatatacacttaggaacaaagaggtaaaggaagcctttaaaaggttggttgcaaagagtcttcttaatcaagaaataagaaatatgcaaatgataagctttgctaaagacacagtgcttacttaccttactaacttctccgcaagttgtcctatttttgtcattactatagaaaactattgtaatctccctcaaagaaaatttccttgacaaaaagctatatttgtttctgttgcctaaacattttcattgaacaagcccccagaattgg

SEQ ID NO: 226916 - DNA, 1074 bp, Artificial Sequence
  derived and/or modified sequence
atgaactgggtgaacaagagcgtgccccaggagttcatcctgctggtcttctctgatcagccatggttggagataccacccttcgtgatgtttctattctcctacatacttactatcttcgggaacctgacaattattctggtgtcccacgtagactttaaactccacacccccatgtactttttcctgtcaaatctgtctctgctcgacctgtgctacacaacctcaacagtcccgcagatgttggttaacatttgcaacactaggaaggttattagttatggtggttgcgtcgcccagttgtttatattcctggcgctgggctctacagagtgtcttctgctcgcagtgatgtgctttgacaggttcgttgctatttgcaggcccttacattatagcatcataatgcatcagagactttgctttcaactggctgccgctagctggataagcggcttttccaattcggtgttacagtcaacatggacactgaagatgccgttgtgcgggcataaggaggttgatcatttcttctgtgaggtcccagccttactcaaactgagttgtgtggatacgactgcaaatgaggcagaactcttttttatatccgtgttatttctactcatcccagtgactttgattcttatttcatacgccttcatagtgcaagcagtgttgcggattcagagcgcagagggccagcggaaagcctttggaacctgcgggagccacctgattgtggtgtccctgttttacggcaccgcgatctccatgtacctgcagccacctagcccaagctcaaaagacaggggaaagatggtgagcttgttttgcggaatcatcgccccgatgctgaatccactcatctacactcttagaaataaagaggtgaaggaggcctttaaaagactggtggccaagtcactactgaatcaagagatacgcaatatgcagatgatctccttcgcaaaggacacagtcctcacctatttaaccaatttctctgcaagttgccccatctttgtcatcacgatcgaaaattactgcaacctccctcagaggaaatttccctag

SEQ ID NO: 226917 - DNA, 1074 bp, Artificial Sequence
  derived and/or modified sequence
atgaactgggttaacaaaagcgtgccccaggagttcattcttttagtgttttctgaccagccttggttggaaattccccctttcgtaatgtttctgttcagctatattctgaccatttttggcaatctcactattatcctagttagccacgtcgactttaaactgcacacccctatgtacttttttctgtcaaacttatccctcctggatctgtgttataccacaagtacagttccccagatgctggtgaatatctgcaatacccgcaaggtgatctcctatggcggatgcgttgctcagctctttatcttcctggcactagggtctacagagtgtctgctactggccgtaatgtgttttgatcgcttcgtggcaatctgcaggcctttgcattacagcatcatcatgcaccagagactatgttttcaacttgctgccgcaagctggataagtgggttctctaactcagtcctgcagtctacctggacactgaaaatgcccctctgtggccataaagaagtcgaccatttcttttgcgaggtgcctgcactgttaaagctgtcctgtgtcgataccactgcaaacgaagctgaactcttcttcatcagtgttctgttccttctgattcccgtcaccctgattttaatctcgtacgctttcatcgttcaagccgttctgagaatccaatcagccgaaggccaaaggaaagctttcggcacttgcggatcacacctgatagtggtatccctgttttatggcactgctatatctatgtatttgcagccacccagcccgtccagcaaagacaggggaaaaatggttagcctgttttgcggaattattgcccctatgctcaatccactcatttatactttgcgtaacaaagaggtcaaagaagctttcaaacgactcgtagcgaagtctttactgaatcaggagattcgaaatatgcagatgataagctttgccaaagacacagtcttaacatatctaaccaacttttctgcctcttgtcctatctttgtgatcaccatcgaaaactattgcaacctgccccaacggaaatttccttag

SEQ ID NO: 226918 - protein, 813 aa, Artificial Sequence
  derived and/or modified sequence
MAWPCITRACCIARFWNQLDKADIAVPLVFTKYSEATEHPGAPPQPPPPQQQAQPALAPPSARAVAIETQPAQGELDAVARATGPAPGPTGEREPAAGPGRSGPGPGLGSGSTSGPADSVMRQDYRAWKVQRPEPSCRPRSEYQPSDAPFERETQYQKDFRAWPLPRRGDHPWIPKPVQISAASQASAPILGAPKRRPQSQERWPVQAAAEAREQEAAPGGAGGLAAGKASGADERDTRRKAGPAWIVRRAEGLGHEQTPLPAAQAQVQATGPEAGRGRAAADALNRQIREEVASAVSSSYRNEFRAWTDIKPVKPIKAKPQYKPPDDKMVHETSYSAQFKGEASKPTTADNKVIDRRRIRSLYSEPFKEPPKVEKPSVQSSKPKKTSASHKPTRKAKDKQAVSGQAAKKKSAEGPSTTKPDDKEQSKEMNNKLAEAKESLAQPVSDSSKTQGPVATEPDKDQGSVVPGLLKGQGPMVQEPLKKQGSVVPGPPKDLGPMIPLPVKDQDHTVPEPLKNESPVISAPVKDQGPSVPVPPKNQSPMVPAKVKDQGSVVPESLKDQGPRIPEPVKNQAPMVPAPVKDEGPMVSASVKDQGPMVSAPVKDQGPIVPAPVKGEGPIVPAPVKDEGPMVSAPIKDQDPMVPEHPKDESAMATAPIKNQGSMVSEPVKNQGLVVSGPVKDQDVVVPEHAKVHDSAVVAPVKNQGPVVPESVKNQDPILPVLVKDQGPTVLQPPKNQGRIVPEPLKNQVPIVPVPLKDQDPLVPVPAKDQGPAVPEPLKTQGPRDPQLPTVSPLPRVMIPTAPHTEYIESSP

SEQ ID NO: 226919 - protein, 439 aa, Artificial Sequence
  derived and/or modified sequence
MAWPCITRACCIARFWNQLDKADIAVPLVFTKYSEATEHPGAPPQPPPPQQQAQPALAPPSARAVAIETQPAQGELDAVARATGPAPGPTGEREPAAGPGRSGPGPGLGSGSTSGPADSVMRQDYRAWKVQRPEPSCRPRSEYQPSDAPFERETQYQKDFRAWPLPRRGDHPWIPKPVQISAASQASAPILGAPKRRPQSQERWPVQAAAEAREQEAAPGGAGGLAAGKASGADERDTRRKAGPAWIVRRAEGLGHEQTPLPAAQAQVQATGPEAGRGRAAADALNRQIREEVASAVSSSYRNEFRAWTDIKPVKPIKAKPQYKPPDDKMVHETSYSAQFKGEASKPTTADNKVIDRRRIRSLYSEPFKEPPKVEKPSVQSSKPKKTSASHKPTRKAKDKQAVSGQAAKKKSAEGPSTTKPDDKEQSKEMNNKLAEAKE

SEQ ID NO: 226920 - protein, 484 aa, Artificial Sequence
  derived and/or modified sequence
MVHETSYSAQFKGEASKPTTADNKVIDRRRIRSLYSEPFKEPPKVEKPSVQSSKPKKTSASHKPTRKAKDKQAVSGQAAKKKSAEGPSTTKPDDKEQSKEMNNKLAEAKESLAQPVSDSSKTQGPVATEPDKDQGSVVPGLLKGQGPMVQEPLKKQGSVVPGPPKDLGPMIPLPVKDQDHTVPEPLKNESPVISAPVKDQGPSVPVPPKNQSPMVPAKVKDQGSVVPESLKDQGPRIPEPVKNQAPMVPAPVKDEGPMVSASVKDQGPMVSAPVKDQGPIVPAPVKGEGPIVPAPVKDEGPMVSAPIKDQDPMVPEHPKDESAMATAPIKNQGSMVSEPVKNQGLVVSGPVKDQDVVVPEHAKVHDSAVVAPVKNQGPVVPESVKNQDPILPVLVKDQGPTVLQPPKNQGRIVPEPLKNQVPIVPVPLKDQDPLVPVPAKDQGPAVPEPLKTQGPRDPQLPTVSPLPRVMIPTAPHTEYIESSP

SEQ ID NO: 226921 - DNA, 1455 bp, Artificial Sequence
  derived and/or modified sequence
atggtgcacgagaccagctacagcgcccagttcaagggcgaggccagcaagcccaccaccgccgacaacaaggtgatcgacagaagaagaatcagaagcctgtacagcgagcccttcaaggagccccccaaggtggagaagcccagcgtgcagagcagcaagcccaagaagaccagcgccagccacaagcccaccagaaaggccaaggacaagcaggccgtgagcggccaggccgccaagaagaagagcgccgagggccccagcaccaccaagcccgacgacaaggagcagagcaaggagatgaacaacaagctggccgaggccaaggagagcctggcccagcccgtgagcgacagcagcaagacccagggccccgtggccaccgagcccgacaaggaccagggcagcgtggtgcccggcctgctgaagggccagggccccatggtgcaggagcccctgaagaagcagggcagcgtggtgcccggcccccccaaggacctgggccccatgatccccctgcccgtgaaggaccaggaccacaccgtgcccgagcccctgaagaacgagagccccgtgatcagcgcccccgtgaaggaccagggccccagcgtgcccgtgccccccaagaaccagagccccatggtgcccgccaaggtgaaggaccagggcagcgtggtgcccgagagcctgaaggaccagggccccagaatccccgagcccgtgaagaaccaggcccccatggtgcccgcccccgtgaaggacgagggccccatggtgagcgccagcgtgaaggaccagggccccatggtgagcgcccccgtgaaggaccagggccccatcgtgcccgcccccgtgaagggcgagggccccatcgtgcccgcccccgtgaaggacgagggccccatggtgagcgcccccatcaaggaccaggaccccatggtgcccgagcaccccaaggacgagagcgccatggccaccgcccccatcaagaaccagggcagcatggtgagcgagcccgtgaagaaccagggcctggtggtgagcggccccgtgaaggaccaggacgtggtggtgcccgagcacgccaaggtgcacgacagcgccgtggtggcccccgtgaagaaccagggccccgtggtgcccgagagcgtgaagaaccaggaccccatcctgcccgtgctggtgaaggaccagggccccaccgtgctgcagccccccaagaaccagggcagaatcgtgcccgagcccctgaagaaccaggtgcccatcgtgcccgtgcccctgaaggaccaggaccccctggtgcccgtgcccgccaaggaccagggccccgccgtgcccgagcccctgaagacccagggccccagagacccccagctgcccaccgtgagccccctgcccagagtgatgatccccaccgccccccacaccgagtacatcgagagcagcccctag

SEQ ID NO: 226922 - DNA, 2442 bp, Artificial Sequence
  derived and/or modified sequence
atggcctggccctgcattacacgggcctgctgcattgcccgtttttggaaccagctggacaaggcagatatagctgtccccttagtgtttaccaaatactctgaggcaactgagcatccaggtgcacctccgcagccacctcccccgcagcagcaggcccaacctgccctcgcccctccaagcgctagggcggtggcaattgaaacacagccagctcagggggaactggacgcagtggcaagagccacggggcctgccccagggccaacaggcgaacgggagcccgcagctggcccaggaagatccgggcccggccccgggcttggcagtgggtctacatccgggcccgctgattctgtgatgcgtcaagattatcgcgcctggaaagtgcaaaggccagagccatcctgtaggcccaggtcagaataccaaccatcggacgcccctttcgagcgggaaacccagtaccagaaggactttcgggcgtggccactcccgagaagaggtgaccacccttggatccccaaacccgtgcaaatttctgcggctagccaggcttcagcacccatcttgggtgcccccaaacggagaccacagtcccaggaaagatggcccgttcaggccgccgccgaggcacgggagcaggaggccgcccctgggggcgcgggtggattagcagcgggaaaggcttctggcgctgatgagcgggacacccgccgcaaagccgggccagcttggatcgtccgccgcgctgagggcttggggcatgaacagactcctctgcctgcagcacaggcccaggttcaggccactggccccgaggcgggacggggccgtgcagccgcggatgcgctaaatagacaaataagggaggaggtcgccagtgccgttagtagcagttataggaacgagttccgggcctggacagacattaaaccggtgaaaccaataaaggccaagccccagtacaaaccccccgatgataagatggtccacgagacttcctatagtgcgcagttcaaaggggaggcttccaagcctacaaccgctgacaataaggtgatcgacaggaggcggattcgttctctctattcagagccattcaaggagcccccaaaggtggaaaagccttcagtgcagtcttccaaacctaaaaaaacttcagcttcgcataagcccaccaggaaggctaaggacaaacaggcagtgagcggacaggcagcaaaaaaaaagagcgcagagggcccctctaccacgaagcccgatgacaaggaacagtctaaggagatgaacaataaattagcagaggctaaagaaagtctggcccagccagtcagcgacagcagtaaaacacagggaccggtagcaactgaaccggataaagaccagggctctgtcgttccaggcctcctgaagggccagggtccaatggtgcaggagccactgaagaagcagggatctgtggtcccgggcccgcctaaagacctagggcctatgattccattacctgtgaaggaccaggatcataccgttcccgagccactgaaaaacgagagccctgtgatatctgctcccgtgaaggatcagggaccttcagtgccagttcccccaaaaaaccagtcgccgatggttcccgccaaggtaaaggatcagggctccgtagtgcctgagtcccttaaagatcagggcccccgaatccctgaacctgtgaagaatcaggctcctatggttccagcgccggtaaaagacgaagggcccatggtttctgcatctgttaaggaccagggccctatggtcagtgcaccagtgaaggaccagggacctattgtgcccgccccagtgaaaggcgagggtcccatcgtgcccgctcctgttaaggatgagggcccgatggtgtcagcacctatcaaggatcaggatcccatggtccctgagcaccctaaagacgagtccgccatggcaacagcgccaattaagaatcagggctccatggttagcgaacccgtcaagaatcaagggttagttgtgtccgggccagtgaaggatcaagacgtggtggttcccgaacacgcgaaggtgcatgattctgccgtagtagcaccagtgaagaaccagggtcccgtggtaccagagtcagtgaagaatcaagatccaatcttgccagtcctcgttaaggaccaagggcctaccgtactgcagccaccaaaaaaccaggggaggatcgtaccggagcccctgaagaaccaggtccccatcgtgccggtgcctttgaaggaccaggatccgctggtgcctgttccagccaaggaccaggggccagccgtgccagagccactcaaaacacagggaccgcgcgacccccaacttcctaccgtttcacctctgcccagggttatgatcccaaccgccccacacacagaatatatcgagtcatcaccctag

SEQ ID NO: 226923 - DNA, 1455 bp, Artificial Sequence
  derived and/or modified sequence
atggtgcatgaaacaagttactccgcacagtttaaaggagaggcaagcaaacccactaccgccgataataaagtgattgaccggagacgaataaggtctctctactcagaaccattcaaggagccacctaaggtcgagaagccgtcagtccagtcctccaaacctaagaagacctctgcctcacataagcccacaaggaaagccaaagacaagcaggcagtgtcgggccaggccgcgaagaagaagagcgctgagggccccagtaccaccaaacctgacgataaagagcagagcaaagaaatgaacaataaactagccgaggccaaagaaagcctggctcaaccagtctcggactctagcaaaacccagggacctgtggctaccgagccagataaagaccaaggatcagtggtacccggcctcctgaagggccaggggcccatggtacaagaacccctcaagaaacagggatccgtcgttccaggtccccccaaggacctggggccgatgatccccttacccgtcaaagaccaggatcatactgtgcctgagcctctcaagaacgagagtcctgtgatttctgcacctgtgaaagaccaggggccttctgtgcctgtaccacctaagaaccagtctccaatggtccccgccaaggtgaaagatcagggatccgtggtcccagaatccctgaaggaccagggcccgagaattccagaacccgttaaaaatcaggcccccatggtgcccgctccggtgaaagacgagggtcccatggtttctgctagcgtgaaggatcagggccccatggtgagcgccccggtcaaggaccagggtcccattgtgccagctcccgtcaagggggaaggccctattgttcccgctcctgtgaaggacgaggggcccatggtgagcgctccaatcaaagaccaggatcctatggtgccggaacatccaaaagacgaatcagccatggctacagcacccatcaagaatcaaggctctatggtgtccgagcccgtaaaaaaccaaggtctggtagtcagtggcccggtgaaagatcaggacgttgtcgtgcccgaacacgccaaagtccacgatagcgcagttgtggccccggtgaagaatcaggggccagtggttccagaaagtgtcaaaaatcaggacccaattcttcccgtcttggtcaaggatcagggcccaactgtcttgcagcctcctaaaaatcaaggcagaattgtacccgaacccctgaaaaaccaggtgcctattgtcccagtgcccctcaaagaccaagacccactcgtgcccgtgcccgcgaaagatcagggaccggccgtgcctgagcccctaaaaactcaaggccctcgcgacccacagttgcctacggtttctccccttccaagggtcatgattcctacagcaccgcacacggagtatatcgagtcatccccttag

SEQ ID NO: 226924 - DNA, 2442 bp, Artificial Sequence
  derived and/or modified sequence
atggcctggccctgcatcacccgggcctgctgcatcgcccgcttctggaaccagctggacaaggctgacattgctgtgcccctggtgttcaccaagtacagcgaggccacagagcaccctggggccccaccccagcccccaccaccccagcagcaggcccagcctgccctggcccctccttctgcccgggctgtggccatcgagacccagcctgcccagggcgagctggatgctgtggcccgggccactggacctgcccctggccccaccggggagcgggagcctgctgctggccctggccgcagcggccctggccctggcctgggcagcggcagcaccagcggccctgctgacagcgtgatgaggcaggactaccgggcctggaaggtgcagaggcctgagcccagctgccggcccaggtctgagtaccagcccagtgatgccccctttgagcgggagacccagtaccagaaggacttccgggcctggcccctgcccaggagaggagaccacccctggatccccaagcctgtgcagatctctgctgccagccaggccagcgcccccatcctgggcgcccccaagaggcggccccagagccaggagcgctggcctgtgcaggccgctgctgaggcccgggagcaggaggccgcccctggaggagctgggggcctggccgccggcaaggccagcggggctgatgagcgggacaccaggaggaaggccggccctgcctggatcgtgagaagagctgagggcctgggccacgagcagacccccctgcctgctgcccaggcccaggtgcaggccactggacctgaggccggccggggccgggctgctgctgatgccctgaaccggcagatccgggaggaggtggccagcgctgtgagcagcagctacagaaatgagttccgggcctggacagacatcaagcctgtgaagcccatcaaggccaagccccagtacaagcccccagatgacaagatggtgcatgagaccagctacagcgcccagttcaagggggaggccagcaagcccaccacagctgacaacaaggtgattgacagaagacgcatccgcagcctgtacagcgagcccttcaaggagccccccaaggtggagaagcccagcgtgcagagcagcaagcccaagaagaccagcgccagccacaagcccaccaggaaggccaaggacaagcaggccgtgtctggccaggccgccaagaagaagtctgctgagggccccagcaccaccaagccagatgacaaggagcagagcaaggagatgaacaacaagctggccgaggccaaggagagcctggcccagcctgtgtctgacagcagcaagacccagggccctgtggccacagagccagacaaggaccagggctctgtggtgcccggcctgctgaagggccagggccccatggtgcaggagcccctgaagaagcagggctctgtggtgcccggcccccccaaggacctgggccccatgatccccctgcctgtgaaggaccaggaccacacagtgcctgagcccctgaagaatgaaagccctgtgatcagcgcccctgtgaaggaccagggccccagcgtgcctgtgccccccaagaaccagagccccatggtgcctgccaaggtgaaggaccagggctctgtggtgcctgagagcctgaaggaccagggcccccgcatccctgagcctgtgaagaaccaggcccccatggtgcctgcccctgtgaaggatgagggccccatggtgtctgcctctgtgaaggaccagggccccatggtgtctgcccctgtgaaggaccagggccccatcgtgcctgcccctgtgaagggggagggccccatcgtgcctgcccctgtgaaggatgagggccccatggtgtctgcccccatcaaggaccaggaccccatggtgcctgagcaccccaaggatgaaagtgccatggccacagcccccatcaagaaccagggctccatggtgtctgagcctgtgaagaaccagggcctggtggtgtctggccctgtgaaggaccaggatgtggtggtgcctgagcacgccaaggtgcatgacagcgctgtggtggcccctgtgaagaaccagggccctgtggtgcctgagagcgtgaagaaccaggaccccatcctgcctgtgctggtgaaggaccagggccccaccgtgctgcagccccccaagaaccagggcagaattgtgcctgagcccctgaagaaccaggtgcccatcgtgcctgtgcccctgaaggaccaggaccccctggtgcctgtgcctgccaaggaccagggccctgctgtgcctgagcccctgaagacccagggcccccgggacccccagctgcccaccgtgagccccctgccccgggtgatgatccccacagccccccacacagagtacatcgagagcagcccctag

SEQ ID NO: 226925 - DNA, 1455 bp, Artificial Sequence
  derived and/or modified sequence
atggtgcatgagaccagctacagcgcccagttcaagggggaggccagcaagcccaccacagctgacaacaaggtgattgacagaagacgcatccgcagcctgtacagcgagcccttcaaggagccccccaaggtggagaagcccagcgtgcagagcagcaagcccaagaagaccagcgccagccacaagcccaccaggaaggccaaggacaagcaggccgtgtctggccaggccgccaagaagaagtctgctgagggccccagcaccaccaagccagatgacaaggagcagagcaaggagatgaacaacaagctggccgaggccaaggagagcctggcccagcctgtgtctgacagcagcaagacccagggccctgtggccacagagccagacaaggaccagggctctgtggtgcccggcctgctgaagggccagggccccatggtgcaggagcccctgaagaagcagggctctgtggtgcccggcccccccaaggacctgggccccatgatccccctgcctgtgaaggaccaggaccacacagtgcctgagcccctgaagaatgaaagccctgtgatcagcgcccctgtgaaggaccagggccccagcgtgcctgtgccccccaagaaccagagccccatggtgcctgccaaggtgaaggaccagggctctgtggtgcctgagagcctgaaggaccagggcccccgcatccctgagcctgtgaagaaccaggcccccatggtgcctgcccctgtgaaggatgagggccccatggtgtctgcctctgtgaaggaccagggccccatggtgtctgcccctgtgaaggaccagggccccatcgtgcctgcccctgtgaagggggagggccccatcgtgcctgcccctgtgaaggatgagggccccatggtgtctgcccccatcaaggaccaggaccccatggtgcctgagcaccccaaggatgagagcgccatggccacagcccccatcaagaaccagggctccatggtgtctgagcctgtgaagaaccagggcctggtggtgtctggccctgtgaaggaccaggatgtggtggtgcctgagcacgccaaggtgcatgattctgctgtggtggcccctgtgaagaaccagggccctgtggtgcctgagagcgtgaagaaccaggaccccatcctgcctgtgctggtgaaggaccagggccccaccgtgctgcagccccccaagaaccagggccgcatcgtgcctgagcccctgaagaaccaggtgcccatcgtgcctgtgcccctgaaggaccaggaccccctggtgcctgtgcctgccaaggaccagggccctgctgtgcctgagcccctgaagacccagggcccccgggacccccagctgcccaccgtgagccccctgccccgggtgatgatccccacagccccccacacagagtacatcgagagcagcccctag

SEQ ID NO: 226926 - DNA, 2442 bp, Artificial Sequence
  derived and/or modified sequence
atggcctggccctgcatcacccgggcctgctgcatcgcccggttctggaatcagctggataaagctgatatcgctgtcccactggttttcaccaagtactccgaggctacagaacatccaggcgcccctccacaacctccacccccccagcagcaggctcagccggccctggcaccccccagtgctcgagcggtggcaatcgaaacccagcccgcccagggcgagcttgacgccgttgcacgcgcgaccggaccagcacccggcccaacaggagaaagagagcccgcggccggtcctgggagatccggtccaggacctgggctgggaagtggctccaccagcgggcctgcggacagcgtcatgagacaggattatagagcatggaaggttcagaggcccgagccgtcctgcaggcctcggagcgagtaccagccaagcgacgcccccttcgagcgagagactcagtaccagaaagacttcagagcgtggccgctgccccgcagaggtgatcacccttggatccctaagcccgtgcagataagtgctgcgtcccaagcttctgctcctatactgggggcacctaaacgccggccccaatctcaagagaggtggcctgttcaggctgctgcagaggcccgagaacaggaagcagctccgggtggggccggaggcttggcagctggcaaggcttctggcgctgatgagcgtgatacccgcaggaaggcggggcccgcttggatagtgcgcagggcagaaggtctgggacacgaacagacacctcttcctgctgcacaagcccaggttcaggctacaggccccgaggctggccgcggccgagccgccgctgatgccctgaataggcagattcgtgaggaagtggccagcgctgtgagctctagttacagaaacgagttccgagcgtggacagacataaaacctgtgaagcccatcaaggcgaagccacagtataaacccccagacgacaagatggttcacgagacaagttatagcgcacagttcaaaggcgaggcgagcaagccaacaacagctgataacaaggtcatcgatcgtcgccggatcaggtcactgtattccgagccattcaaggagcctcctaaggtcgaaaagcccagtgttcagtctagcaaaccaaagaagacatcggcaagccacaaacccacgcgaaaggcaaaagataaacaagccgtctcaggccaggccgccaaaaagaaatcagccgaggggccaagcacaaccaaaccagacgataaagagcagtccaaagagatgaacaataagttggcagaagctaaggagtcactcgcgcagcccgtctcagatagctccaaaacgcaggggccggtggctaccgaacccgataaagatcaaggttcagtcgtccccggcctgttaaaaggccagggcccgatggtacaggagccgctgaagaagcaaggttctgttgttccaggcccccccaaggacctgggcccaatgattcctctacccgttaaagatcaggatcacaccgttccagaaccccttaagaatgaatctccagtgatatctgctcccgtcaaagatcaggggccatccgtaccagtccccccaaaaaatcaatctcctatggtccctgcaaaggtcaaggaccaaggctctgttgtgcctgagtcactcaaggaccaggggccaaggatccctgagccagtgaaaaaccaagctccaatggtcccagctccggttaaggacgaggggccaatggtgtctgcctctgtgaaggatcagggtccaatggttagcgctcccgtgaaggatcaaggtcctatcgtgcccgccccagttaaaggcgaagggccaattgtgcccgcacccgtaaaggatgagggcccaatggtgagtgcccccattaaagaccaggatccaatggttccagaacatcccaaagatgagagcgctatggccactgcgcccatcaagaaccaggggtctatggtgagcgagcccgtgaagaaccaggggctggtggtttccgggccagtgaaggatcaggacgtggtagttcctgaacatgctaaagtccatgatagcgccgtggtggccccggtgaaaaaccaggggcccgtggtgccggagtccgtcaaaaatcaggaccctatactcccggtcctggtcaaagaccagggccctacagttctgcagccccccaagaaccagggcagaatcgttcccgaacctctaaagaaccaggtcccaattgtacctgtgccactgaaggatcaggatcctctcgtgcccgtcccagcgaaagaccaggggcccgcggtgcccgagcctctcaaaacccaaggccccagagacccccaactccctaccgtcagccccctcccgagggtaatgatccctaccgcaccacatactgaatacattgagagctccccctag

SEQ ID NO: 226927 - DNA, 1455 bp, Artificial Sequence
  derived and/or modified sequence
atggtgcacgagaccagctacagcgcccagttcaagggcgaggcctctaagcctacaaccgcagacaataaagtcatcgatcgaagaaggattcgctcactgtattccgagccctttaaagagccgcctaaagtcgaaaaaccaagcgtccaatcctccaagcctaagaagacttccgcaagtcacaagcccacgcggaaagccaaggataagcaggcagtgagtggccaggcagctaaaaaaaagtctgcggagggccccagcacaaccaagcctgatgataaagagcagagtaaggagatgaataacaagctcgccgaggcgaaggagagcctcgcccaaccagtctcagactcaagcaagacccaggggcccgtggccacagagcccgataaagatcagggctctgtcgtgcccggactgctgaagggacagggccctatggtacaggagccactgaaaaagcagggttcagtggtgccaggcccccctaaagatctagggccgatgattcccctccctgtcaaggaccaggaccacaccgtgcctgagcccctcaagaatgagtcccctgtcatctccgcccccgttaaggatcagggccctagtgtccccgtccctccaaagaatcagtcacccatggtcccagctaaggttaaggaccaaggaagcgtggtccctgagagcctcaaagatcaaggccccagaatcccggagccagtgaaaaaccaggcacctatggtgccagctcccgttaaggacgagggacccatggtgtcagcaagcgttaaggaccagggacctatggtgtctgccccagttaaggatcagggacctatcgtgcccgcccctgtgaagggcgagggccctattgtgcctgcaccggtaaaggatgagggaccaatggtttctgctcccattaaagaccaggatcctatggtaccagagcaccccaaggacgagtccgcaatggctaccgcccctatcaagaaccagggatccatggtgtccgagccagtaaaaaatcagggccttgtagtctccggcccagtaaaagatcaagacgtggttgttcccgagcacgccaaagtacatgactccgccgtggtggctccagtaaaaaatcagggccccgttgttcctgaatccgtcaaaaatcaagaccctattctaccggtcctggtgaaggatcagggtcctaccgtcctgcagccacccaagaaccagggacggatagttcctgaaccactgaagaaccaagtccccattgtccccgtaccacttaaggaccaggaccctctggtgccagtgccagccaaggaccagggtcccgccgtgcccgagcctctgaagacacaaggtcctcgggatccccaactgccaacagtctcccccctgccccgggtcatgattccaaccgcccctcacacagaatatatagagagttctccctag

SEQ ID NO: 226928 - DNA, 2442 bp, Artificial Sequence
  derived and/or modified sequence
atggcatggccctgtatcacccgggcttgctgcattgctaggttttggaaccaactggataaagcagacattgccgtacctcttgtgtttaccaaatactcagaggctacagagcatccgggagcaccaccacagcctccccctccacagcaacaggctcagcccgctctcgcacccccatctgctcgcgctgttgcgattgaaacccagcccgctcagggagaattggatgccgtcgccagggctacaggaccagccccaggccctaccggagagcgtgaaccagcagctgggccaggacgctcaggaccaggtcccggactcggcagcggttcaacttcaggcccagcagactctgtgatgcgtcaggattatcgcgcatggaaagtccagagacccgaaccctcttgtcgcccacgttctgaatatcagccttcagacgcacccttcgagcgggagacccagtatcagaaggactttagggcatggccactgccacggagaggcgaccacccatggatcccaaagccagtccaaatcagcgccgcttcacaagctagcgctccaatactgggagcccctaaaagacggccacagtcacaggaaaggtggccggtccaggccgcagctgaagctcgtgagcaggaagccgctcccggtggagcaggcggtttggccgcaggcaaggcgtccggggctgatgagcgtgacacccggaggaaagctggtccagcttggatcgtgagacgcgctgaggggctgggccatgagcagacacccctgcccgctgcgcaggcacaagtacaggctaccggtccagaggctggacgaggacgagctgccgctgacgctctgaaccggcagattagagaggaagtggcctctgctgtgtcctcatcttatcggaatgagtttcgcgcatggaccgacattaagcctgtgaagccaattaaggcaaagccacagtacaagccacctgacgataagatggttcacgagacgagctatagcgcacaatttaaaggcgaagcaagcaagccgaccaccgccgataacaaggtgatcgataggaggcggatccggtcactatatagtgagcccttcaaagagcctccgaaggtggaaaagccatctgttcagtcatccaagccaaagaagacctccgccagtcacaagcctacacggaaagctaaggataagcaggccgtgtctggccaagcagcaaaaaagaagtcggctgagggtccgagcactaccaaacccgacgacaaggaacagagcaaagagatgaacaacaaattggccgaagcaaaagaatcgctggcccaacccgttagtgatagtagcaagacccagggccctgtggccacagaacccgacaaggaccagggatccgtagtccccggtctacttaaggggcagggccctatggtgcaggagcccctgaaaaaacaggggagtgttgtgccgggtccccctaaggatttgggccctatgattccactgcccgtgaaagatcaagaccacaccgtgccagagccacttaaaaacgagagccctgtgatttccgccccagtaaaagatcagggacctagcgtgcctgtcccccctaaaaatcagtccccaatggtgccggcaaaggttaaggaccagggaagtgtggtaccagagtctcttaaagatcaggggccacggatccccgagccagttaaaaatcaggccccaatggtgccagcacccgtcaaggatgaaggcccaatggtttccgctagtgttaaggatcaaggtcctatggtctccgctccagtaaaggatcagggtcccattgtccccgctccagttaaaggcgaggggccaatcgtacccgcacccgttaaggatgagggaccgatggtgtctgccccaattaaagaccaggaccctatggtgcctgaacatcctaaggatgagagtgcaatggctacagccccaattaagaaccagggctcgatggtgagcgagcccgtgaaaaaccagggcctcgttgtttccggcccagtgaaggatcaggacgtagttgttcccgaacatgccaaggtccacgattcagccgtggtcgccccagtgaaaaaccagggcccagtggtaccagaaagtgtaaaaaatcaggacccaatcctcccagtgctagtgaaggatcagggaccaaccgtgctacagccacccaagaaccaggggaggatagtccccgagccactcaagaatcaagtgccaattgtgcccgtacctttaaaggaccaagacccgttggtacccgtcccggctaaggaccagggacctgctgttcctgagcccctgaagactcaaggaccaagggacccccaacttcctacagtatccccactccccagggttatgatacccaccgccccacacaccgaatatatcgaatcatccccttag

SEQ ID NO: 226929 - DNA, 1455 bp, Artificial Sequence
  derived and/or modified sequence
atggtgcacgaaacctcctatagtgctcaatttaagggtgaggcatccaaaccaaccaccgctgataacaaggtcattgataggcggagaatccgctccttgtacagtgaacccttcaaagaacccccaaaggttgagaaaccttcagtccagtcctcaaagcccaagaagacaagcgctagccataagcccacccgaaaagcgaaagataaacaggcagtgtccgggcaagcggctaaaaaaaaatcggcggagggcccttctaccacaaaacctgatgacaaagagcagtcgaaagagatgaacaacaagctcgcggaggctaaagagagtttagcccagccggtgagtgacagcagtaagacacagggccctgtggccaccgagcccgataaagatcaggggagtgtcgtgccgggtctgctcaagggtcagggacctatggttcaggaaccccttaaaaagcagggttctgtagtacccggacctcccaaagaccttgggccaatgatccccttgccagtcaaagatcaggatcacactgtgcccgagcctcttaaaaatgagtcccctgttatcagcgcccctgtgaaggatcaaggaccaagcgtgccagtccctcctaagaaccagtctcccatggtgcctgcaaaagttaaggaccaggggtctgttgttccagagtccttgaaagatcaagggccacgaattcccgagcctgtgaagaaccaggcaccaatggtacccgctcccgtcaaggacgagggtcccatggtgagcgcttcggtgaaggatcaagggcctatggtatcagcccctgtcaaggaccaaggacccattgtgcctgcacctgtcaaaggagagggacccattgtaccagccccagttaaggatgagggccctatggtgtccgccccaattaaggaccaggacccgatggtgccagagcaccccaaagacgaatccgctatggccaccgcccctattaagaaccagggctccatggtgagcgagccagtcaaaaaccagggtctggtagtctcgggtccagtgaaagaccaggacgttgtggtgccagagcatgctaaagtccatgactcggctgtggtggcccctgtcaagaatcaggggcctgtggtgcccgagtctgttaagaaccaggaccccattctacccgtgctggtgaaagatcagggccctaccgtgctgcagccacccaaaaatcagggcagaattgtcccggagccccttaagaatcaggtccccattgttcctgttccactcaaggatcaagatcctcttgtgcccgttcctgcaaaagaccagggcccagcggtaccggaaccacttaagactcaggggcctcgggaccctcagctgccaaccgtctcacctctacctcgggtaatgattccaaccgctcctcataccgaatatatcgagagtagcccttag

SEQ ID NO: 226930 - DNA, 1802 bp, Artificial Sequence
  derived and/or modified sequence
caagaagaaagaggaggccggcttttcagctagcatcatggcgtggccgtgcatcacgagggcctggggcacgagcagacgccgctgcccgcggcccaggcccaggtccaggccaccggccccgaggctggcagggggcgcgccgcggcggacgccctcaaccggcaaatccgcgaggaggtggcgagtgcagtgagcagctcctacaggaatgaattcagggcatggacggacatcaagcctgtgaaaccaataaaggccaagccccagtacaagcccccagatgataagatggttcatgagaccagctacagtgctcagttcaaaggagaggccagcaagccaacaacagctgacaataaggtcattgatcgcagaagaatacgcagcctctacagcgaacccttcaaggaacccccaaaggtggaaaaacctagtgttcagagttccaaaccaaaaaagacctcagcgagccataagcccacgaggaaggccaaagacaagcaggcggtgtcaggccaggctgccaagaaaaagagcgcggagggcccgagtaccaccaagccagacgacaaggagcaaagcaaagagatgaacaataaactggctgaggcgaaagagagcctggctcaacccgtcagtgattcaagtaagactcaaggtcctgtagccacagagccagacaaggatcaaggttctgtggtcccaggccttctgaaaggtcaaggtcctatggtgcaagagcctctgaagaagcaaggttctgtggtcccagggcctccaaaggatctaggtcccatgatcccattaccagtcaaggatcaagatcacacggtccctgagcctttaaagaatgaaagccctgttatctcagcaccagtcaaggaccaaggtccctcggtcccagttcctccaaagaatcaaagtcctatggttccagcaaaagttaaggatcaaggctctgtggtaccagagtctctaaaggatcaaggtcctaggattcctgagcctgtgaagaatcaagctcctatggtcccagcacctgtcaaggatgaaggtcccatggtctcagcatctgtcaaggatcaaggtcccatggtctcagcacctgtcaaggatcaaggtcccatagtcccagcacctgtcaagggtgaaggtcccatagtcccagcacctgtcaaggatgaaggtcccatggtctcagcacctatcaaggatcaagatcccatggtcccagagcatccgaaggatgaaagtgccatggccacagcacccataaagaatcaaggttccatggtctctgagcctgtaaagaatcaaggtttagtggtctcagggccagtcaaggatcaagatgttgtagtcccagagcatgcaaaggttcacgattctgcagttgtggcacctgtaaagaatcaaggtcctgtggtccccgagtccgtgaagaatcaagaccccattctcccagtactagttaaggatcaaggccccacagtcctacagcctccaaagaatcaaggtcgtatagtccctgaacctctgaagaatcaagttcctatagtcccagtgcctctgaaggatcaagatcctctggtgccagtaccagcaaaggaccaaggtcctgcagtccctgaacctctgaagactcaaggtcccagggaccctcagctacctactgtctcacctctaccccgagtcatgatcccaactgccccccatacggaatacattgagagctccccttgacactcaccccttgacacaccaatgaaggagctgacagtgagagtgctcccctccca

SEQ ID NO: 226931 - DNA, 3334 bp, Artificial Sequence
  derived and/or modified sequence
agcactctttcagtcagcatcgttcctggatttttttctcactgctgagcagcataaaagggtggggccgcttccctgcagcagaggcagaggcggcggcggcagcggctgcagcatcattcgcgggcagcggcggagaccgagagctgcagaaaagggtggggtcgcttcccaggagaagaggcggtggcggcggcggctgcggcatcctcgcgggcagcggcggaggcagcaatgctcggtctccgctggaggtgatggcctcccagccctgctaggtggccggctgcactaggacgccggcaggaaggagactcgagcccggtccgcggaccctgcggccacaccgcccggcccctcctctgcgccatggcttaagcctgtagccacctctcctcacgtcgcctcgctcgaccgaggtctgtgcgccgccgcagccgcagggaggggcgcgtcccagacaccctcgccggggactcgggaacgccgtgcgtctcacccttcggcgctcgcagcagactgcgctcccaaaggcgtttgcgaccggtaatcgagggactctacagactctcctaggacagctctccccgggtgctcgctgagggaggagggcgaactagctccggctgatcgggggtagaaaacggtgggaaccacattggccggtcaggatcggaggctgaaggaagattatagagacttgctttagaaccacaagaagaaagaggaggccggcttttcagctagcatcatggcgtggccgtgcatcacgagggcctgctgcatcgcccgcttctggaaccagttggacaaagcggacatcgctgtgccgctggttttcaccaagtactcggaggccaccgagcacccgggcgccccgccgcagccaccgccgccgcagcagcaggcgcagccggcgctcgcgcccccctcggcgcgcgcggttgccatagagacgcagccagcccagggcgagttggatgcagttgcccgggcaacggggccagcgcctgggcctaccggcgagcgcgagccggcggcgggccccggccggagcgggccgggcccgggcctgggctccggctccacctccggccccgcggactcggtgatgcggcaggattaccgagcctggaaggtgcagcggcccgagcccagctgccggccgcgcagcgaataccagccctccgacgctcccttcgagcgcgagacccagtaccagaaggacttccgcgcctggccgctgccgcgccgcggggaccacccgtggatccccaagcccgtgcagatctctgcggcctcccaggcgtcggcgcccattctcggggcgcccaagcgccggccgcagagccaggagcgctggccagtgcaggccgccgctgaggcccgggagcaggaggcggcccccggcggagcgggtggcctggcggccggaaaggcgtccggggcggacgagcgcgacacgcgcaggaaggccgggcctgcctggattgtgcgccgcgccgagggcctggggcacgagcagacgccgctgcccgcggcccaggcccaggtccaggccaccggccccgaggctggcagggggcgcgccgcggcggacgccctcaaccggcaaatccgcgaggaggtggcgagtgcagtgagcagctcctacaggaatgaattcagggcatggacggacatcaagcctgtgaaaccaataaaggccaagccccagtacaagcccccagatgataagatggttcatgagaccagctacagtgctcagttcaaaggagaggccagcaagccaacaacagctgacaataaggtcattgatcgcagaagaatacgcagcctctacagcgaacccttcaaggaacccccaaaggtggaaaaacctagtgttcagagttccaaaccaaaaaagacctcagcgagccataagcccacgaggaaggccaaagacaagcaggcggtgtcaggccaggctgccaagaaaaagagcgcggagggcccgagtaccaccaagccagacgacaaggagcaaagcaaagagatgaacaataaactggctgaggcgaaagagagcctggctcaacccgtcagtgattcaagtaagactcaaggtcctgtagccacagagccagacaaggatcaaggttctgtggtcccaggccttctgaaaggtcaaggtcctatggtgcaagagcctctgaagaagcaaggttctgtggtcccagggcctccaaaggatctaggtcccatgatcccattaccagtcaaggatcaagatcacacggtccctgagcctttaaagaatgaaagccctgttatctcagcaccagtcaaggaccaaggtccctcggtcccagttcctccaaagaatcaaagtcctatggttccagcaaaagttaaggatcaaggctctgtggtaccagagtctctaaaggatcaaggtcctaggattcctgagcctgtgaagaatcaagctcctatggtcccagcacctgtcaaggatgaaggtcccatggtctcagcatctgtcaaggatcaaggtcccatggtctcagcacctgtcaaggatcaaggtcccatagtcccagcacctgtcaagggtgaaggtcccatagtcccagcacctgtcaaggatgaaggtcccatggtctcagcacctatcaaggatcaagatcccatggtcccagagcatccgaaggatgaaagtgccatggccacagcacccataaagaatcaaggttccatggtctctgagcctgtaaagaatcaaggtttagtggtctcagggccagtcaaggatcaagatgttgtagtcccagagcatgcaaaggttcacgattctgcagttgtggcacctgtaaagaatcaaggtcctgtggtccccgagtccgtgaagaatcaagaccccattctcccagtactagttaaggatcaaggccccacagtcctacagcctccaaagaatcaaggtcgtatagtccctgaacctctgaagaatcaagttcctatagtcccagtgcctctgaaggatcaagatcctctggtgccagtaccagcaaaggaccaaggtcctgcagtccctgaacctctgaagactcaaggtcccagggaccctcagctacctactgtctcacctctaccccgagtcatgatcccaactgccccccatacggaatacattgagagctccccttgacactcaccccttgacacaccaatgaaggagctgacagtgagagtgctcccctcccaggggcagtgaagacacatatttaatctgcatgaaacatgtacagtagtcttgctggaatctaataaaaatggtccctctggctca

SEQ ID NO: 226932 - DNA, 2442 bp, Artificial Sequence
  derived and/or modified sequence
atggcctggccctgcatcaccagagcctgctgcatcgccagattctggaaccagctggacaaggccgacatcgccgtgcccctggtgttcaccaagtacagcgaggccaccgagcaccccggcgcccccccccagcccccccccccccagcagcaggcccagcccgccctggccccccccagcgccagagccgtggccatcgagacccagcccgcccagggcgagctggacgccgtggccagagccaccggccccgcccccggccccaccggcgagagagagcccgccgccggccccggcagaagcggccccggccccggcctgggcagcggcagcaccagcggccccgccgacagcgtgatgagacaggactacagagcctggaaggtgcagagacccgagcccagctgcagacccagaagcgagtaccagcccagcgacgcccccttcgagagagagacccagtaccagaaggacttcagagcctggcccctgcccagaagaggcgaccacccctggatccccaagcccgtgcagatcagcgccgccagccaggccagcgcccccatcctgggcgcccccaagagaagaccccagagccaggagagatggcccgtgcaggccgccgccgaggccagagagcaggaggccgcccccggcggcgccggcggcctggccgccggcaaggccagcggcgccgacgagagagacaccagaagaaaggccggccccgcctggatcgtgagaagagccgagggcctgggccacgagcagacccccctgcccgccgcccaggcccaggtgcaggccaccggccccgaggccggcagaggcagagccgccgccgacgccctgaacagacagatcagagaggaggtggccagcgccgtgagcagcagctacagaaacgagttcagagcctggaccgacatcaagcccgtgaagcccatcaaggccaagccccagtacaagccccccgacgacaagatggtgcacgagaccagctacagcgcccagttcaagggcgaggccagcaagcccaccaccgccgacaacaaggtgatcgacagaagaagaatcagaagcctgtacagcgagcccttcaaggagccccccaaggtggagaagcccagcgtgcagagcagcaagcccaagaagaccagcgccagccacaagcccaccagaaaggccaaggacaagcaggccgtgagcggccaggccgccaagaagaagagcgccgagggccccagcaccaccaagcccgacgacaaggagcagagcaaggagatgaacaacaagctggccgaggccaaggagagcctggcccagcccgtgagcgacagcagcaagacccagggccccgtggccaccgagcccgacaaggaccagggcagcgtggtgcccggcctgctgaagggccagggccccatggtgcaggagcccctgaagaagcagggcagcgtggtgcccggcccccccaaggacctgggccccatgatccccctgcccgtgaaggaccaggaccacaccgtgcccgagcccctgaagaacgagagccccgtgatcagcgcccccgtgaaggaccagggccccagcgtgcccgtgccccccaagaaccagagccccatggtgcccgccaaggtgaaggaccagggcagcgtggtgcccgagagcctgaaggaccagggccccagaatccccgagcccgtgaagaaccaggcccccatggtgcccgcccccgtgaaggacgagggccccatggtgagcgccagcgtgaaggaccagggccccatggtgagcgcccccgtgaaggaccagggccccatcgtgcccgcccccgtgaagggcgagggccccatcgtgcccgcccccgtgaaggacgagggccccatggtgagcgcccccatcaaggaccaggaccccatggtgcccgagcaccccaaggacgagagcgccatggccaccgcccccatcaagaaccagggcagcatggtgagcgagcccgtgaagaaccagggcctggtggtgagcggccccgtgaaggaccaggacgtggtggtgcccgagcacgccaaggtgcacgacagcgccgtggtggcccccgtgaagaaccagggccccgtggtgcccgagagcgtgaagaaccaggaccccatcctgcccgtgctggtgaaggaccagggccccaccgtgctgcagccccccaagaaccagggcagaatcgtgcccgagcccctgaagaaccaggtgcccatcgtgcccgtgcccctgaaggaccaggaccccctggtgcccgtgcccgccaaggaccagggccccgccgtgcccgagcccctgaagacccagggccccagagacccccagctgcccaccgtgagccccctgcccagagtgatgatccccaccgccccccacaccgagtacatcgagagcagcccctag

SEQ ID NO: 226933 - protein, 377 aa, Artificial Sequence
  derived and/or modified sequence
MGTTEATLRMENVDVKEEWQDEDLPRPLPEETGVELLGSPVEDTSSPPNTLNFNGAHRKRKTLVAPEINISLDQSEGSLLSDDFLDTPDDLDINVDDIETPDETDSLEFLGNGNELEWEDDTPVATAKNMPGDSADLFGDGTTEDGSAANGRLWRTVIIGEQEHRIDLHMIRPYMKVVTHGGYYGEGLNAIIVFAACFLPDSSLPDYHYIMENLFLYVISSLELLVAEDYMIVYLNGATPRRRMPGIGWLKKCYQMIDRRLRKNLKSLIIVHPSWFIRTVLAISRPFISVKFINKIQYVHSLEDLEQLIPMEHVQIPDCVLQYEEERLKARRESARPQPEFVLPRSEEKPEVAPVENRSALVSEDQETSLQPLHRSS

SEQ ID NO: 226934 - protein, 371 aa, Artificial Sequence
  derived and/or modified sequence
MGTTEATLRMENVDVKEEWQDEDLPRPLPEETGVELLGSPVEDTSSPPNTLNFNGAHRKRKTLVAPEINISLDQSEGSLLSDDFLDTPDDLDINVDDIETPDETDSLEFLGNGNELEWEDDTPVATAKNMPGDSADLFGDGTTEDGSAANGRLWRTVIIGEQEHRIDLHMIRPYMKVVTHGGYYGEGLNAIIVFAACFLPDSSLPDYHYIMENLFLYVISSLELLVAEDYMIVYLNGATPRRRMPGIGWLKKCYQMIDRRLRKNLKSLIIVHPSWFIRTVLAISRPFISVKFINKIQYVHSLEDLEQLIPMEHVQIPDCVLQYEEERLKARRESARPQPEFVLPRSEEKPEVAPVENRSALVSEDQETRMS

SEQ ID NO: 226935 - protein, 377 aa, Artificial Sequence
  derived and/or modified sequence
MAGRRSSQPGIALHNPGNHQVQNPQGRLETVRPLPEETGVELLGSPVEDTSSPPNTLNFNGAHRKRKTLVAPEINISLDQSEGSLLSDDFLDTPDDLDINVDDIETPDETDSLEFLGNGNELEWEDDTPVATAKNMPGDSADLFGDGTTEDGSAANGRLWRTVIIGEQEHRIDLHMIRPYMKVVTHGGYYGEGLNAIIVFAACFLPDSSLPDYHYIMENLFLYVISSLELLVAEDYMIVYLNGATPRRRMPGIGWLKKCYQMIDRRLRKNLKSLIIVHPSWFIRTVLAISRPFISVKFINKIQYVHSLEDLEQLIPMEHVQIPDCVLQYEEERLKARRESARPQPEFVLPRSEEKPEVAPVENRSALVSEDQETSMS

SEQ ID NO: 226936 - protein, 371 aa, Artificial Sequence
  derived and/or modified sequence
MGTTEATLRMENVDVKEEWQDEDLPRPLPEETGVELLGSPVEDTSSPPNTLNFNGAHRKRKTLVAPEINISLDQSEGSLLSDDFLDTPDDLDINVDDIETPDETDSLEFLGNGNELEWEDDTPVATAKNMPGDSADLFGDGTTEDGSAANGRLWRTVIIGEQEHRIDLHMIRPYMKVVTHGGYYGEGLNAIIVFAACFLPDSSLPDYHYIMENLFLYVISSLELLVAEDYMIVYLNGATPRRRMPGIGWLKKCYQMIDRRLRKNLKSLIIVHPSWFIRTVLAISRPFISVKFINKIQYVHSLEDLEQLIPMEHVQIPDCVLQYEEERLKARRESARPQPEFVLPRSEEKPEVAPVENRSALVSEDQETSMS

SEQ ID NO: 226937 - protein, 349 aa, Artificial Sequence
  derived and/or modified sequence
MGTTEATLRMENVDVKEEWQDEDPPPNTLNFNGAHRKRKTLVAPEINISLDQSEGSLLSDDFLDTPDDLDINVDDIETPDETDSLEFLGNGNELEWEDDTPVATAKNMPGDSADLFGDGTTEDGSAANGRLWRTVIIGEQEHRIDLHMIRPYMKVVTHGGYYGEGLNAIIVFAACFLPDSSLPDYHYIMENLFLYVISSLELLVAEDYMIVYLNGATPRRRMPGIGWLKKCYQMIDRRLRKNLKSLIIVHPSWFIRTVLAISRPFISVKFINKIQYVHSLEDLEQLIPMEHVQIPDCVLQYEEERLKARRESARPQPEFVLPRSEEKPEVAPVENRSALVSEDQETRMS

SEQ ID NO: 226938 - DNA, 1134 bp, Artificial Sequence
  derived and/or modified sequence
atgggtacaacagaagccacattgaggatggaaaatgtcgacgtgaaagaggaatggcaggatgaggacttgccacgcccccttcccgaagagaccggcgttgagctgctggggagccccgtggaagacacctcatctcccccgaacacactcaatttcaacggtgctcacagaaagcgaaaaaccctcgtggcgcccgaaattaatatctctctggaccagtccgaagggagcctgctgagtgacgattttctcgacactccagatgacctcgatattaacgttgatgacattgaaacccccgacgaaacagattcccttgagttcctgggaaacggaaatgaactcgaatgggaggacgacaccccagtggccactgccaagaatatgcctggggactcggccgatttattcggcgacggcacgaccgaagacggatccgctgccaatggaagattatggagaacagtgattatcggtgagcaggaacataggattgacctccacatgatccgaccatacatgaaggtggtcacgcacggtggatattacggcgagggtctgaatgccataattgttttcgctgcttgtttcctgcccgacagtagcctacctgattatcactacattatggagaatcttttcctgtatgtgatctcttcactggaactcctcgtggccgaggactacatgatcgtgtacttgaatggcgcaacgcctagaaggaggatgcctggaattggatggctgaagaaatgttatcagatgattgatcgccggctgcggaaaaacctgaagagtctcattatcgtgcacccaagctggttcatacggactgtcctggctatcagccgacctttcataagtgttaaatttattaacaagattcaatatgttcactctctggaggatttggaacagctgattccgatggaacacgtgcagattccggactgtgttctgcaatatgaagaagagcggctaaaagcacggagggagtccgcccgcccccagcctgagtttgtgctgcctcggtctgaggaaaagccagaagtggctcccgtcgagaacagatcagccctggtctcagaagaccaggagaccagcttgcaaccgttgcacaggagctcttag

SEQ ID NO: 226939 - DNA, 1116 bp, Artificial Sequence
  derived and/or modified sequence
atggggacaaccgaggcaactttgcgcatggaaaatgtggatgtgaaggaagaatggcaggacgaagatctgcctaggcctctgcctgaggagactggagtagagctgctaggcagccccgtggaggatacctccagcccacccaataccctgaatttcaacggggctcatcgtaaacgcaaaaccctcgtagctcccgagattaatatctccctggaccaatccgagggatctctactgtctgatgactttttggacactcctgacgatctggacattaacgtcgatgacatcgagactccggatgagactgacagtttagaatttctgggaaacgggaatgagttggagtgggaagatgatacacctgtcgccacagcaaagaacatgcccggagatagtgccgacctgtttggcgacggaactactgaggatggctccgccgcaaatggccgcttgtggcggaccgtcatcataggcgaacaggaacaccgcattgaccttcatatgattcgaccctatatgaaagtagttactcatgggggctattatggagaaggcctgaatgccattatagtttttgctgcatgttttcttccggattccagcttgcctgattatcactacattatggagaatctctttttatatgtgatctcatcactggagttgctggtggccgaggactatatgatcgtgtacctcaacggggccacaccaaggagaaggatgcccggcattggttggctgaagaagtgttaccagatgatcgatcgcaggctgagaaagaatcttaagtccctgattattgtgcatcccagctggttcattcgaactgtcttggctatttcccggccttttatctcagtgaagttcattaataagatccagtacgtgcattcactggaggacctggaacagcttatccccatggaacatgtgcagattcctgactgtgttttacaatacgaggaggagagattgaaagcccggagggaatccgcgcgaccacaaccagaattcgttctgccaaggagcgaggaaaaaccagaagtggccccagtggagaatagaagcgccctcgtgagtgaagatcaggagacacgcatgtcgtag

SEQ ID NO: 226940 - DNA, 1134 bp, Artificial Sequence
  derived and/or modified sequence
atggccgggagacgaagctcacaacccgggattgccctgcataatcccggtaaccaccaagtgcaaaacccacaaggcaggctcgagactgtccggccactccccgaagagacgggcgttgaacttcttgggagccctgtggaggatacctcatctcctccaaataccctcaacttcaatggcgcccaccgaaagcgcaagaccttagtggcccctgaaatcaatatcagtctggaccaaagcgaagggtccttgctctccgacgacttccttgacacccccgatgatctggacattaacgttgacgacatcgaaactcctgacgagaccgattcccttgagtttctgggtaacggcaacgaacttgagtgggaggatgatacgcctgtcgcgaccgccaagaacatgcctggagacagcgctgatcttttcggggacgggacaacagaagatggctccgccgcaaacgggcgcctgtggcggacagttataatcggggaacaggaacacagaatagacctccatatgatcagaccttacatgaaagtggtcacacatggaggatactacggtgaaggactgaatgccatcatcgtattcgcagcgtgctttctccccgatagtagtttgcccgattaccactacattatggagaacctctttctctacgtgatttcatccctggaattgttagtagcagaggattacatgatagtctacctgaacggggctactcccaggcgccgtatgcccgggattgggtggttgaaaaaatgctaccagatgatagataggcggctcaggaaaaatttgaagtcattaattattgtccatcccagctggttcatacgtacagtactcgccattagccgacctttcatctccgtgaagtttattaacaagatccagtacgtgcattccttagaagacctggagcagctgattcctatggagcacgtccagatccccgactgcgtgctgcagtacgaagaagaaagactgaaagccagacgagagagtgcacgtccacagccagagttcgtcctgccgagaagtgaggagaaacccgaagtggcaccagtggagaaccggtccgctctggtcagtgaggaccaggagacaagcatgtcatag

SEQ ID NO: 226941 - DNA, 1116 bp, Artificial Sequence
  derived and/or modified sequence
atgggtacaaccgaagctaccctaagaatggagaatgtggatgtcaaggaagaatggcaggacgaagatctaccacgtcctctgccagaggagactggagttgaactcttgggatcacctgttgaggatacttcctcaccacctaacaccctgaattttaacggtgcccaccgtaaacggaagaccctggtggccccagagatcaacatatccctcgaccagtctgaaggtagtctgctgtccgatgactttttagacacgcccgatgacctggacattaatgttgatgatatcgaaactccggatgaaactgacagcttggagttcttaggaaatggcaacgaactagaatgggaggacgataccccagttgccaccgccaaaaacatgcctggtgattcggccgatctttttggcgatggtactactgaagacggcagcgccgctaacggccgactctggcggactgtgatcattggagagcaggagcacagaattgatctgcatatgattcgcccttacatgaaggtagtcacgcacggcggctattatggagaggggctaaatgctattatcgtcttcgcagcctgtttcttgccagacagctctcttccggattatcactacatcatggagaatctcttcctgtacgtgattagctccctggagctgcttgtggccgaggactacatgatagtatacttgaacggtgctacacctaggagaaggatgcccggtatcggttggctcaaaaagtgttaccagatgatcgataggaggctcaggaaaaacctgaagagcctcatcattgtgcacccttcctggttcattagaaccgtgctggcaatctcaagaccctttatatctgtaaaatttataaacaagatacagtatgttcactccctcgaagacctcgaacaactaattcccatggagcacgtgcagattccggactgcgtgttgcagtacgaggaagagagactgaaagctagacgagagtccgcccgaccacaacctgagttcgtgttgcctcgttctgaggagaagcctgaggttgctcccgttgaaaataggtctgccctggtatcggaggatcaagagactagtatgtcttag

SEQ ID NO: 226942 - DNA, 1050 bp, Artificial Sequence
  derived and/or modified sequence
atggggactaccgaagcgactttgcgtatggaaaatgtggatgtgaaagaagaatggcaggatgaagatccccccccaaacactcttaatttcaacggagcccataggaaacgcaagacactggtggcacccgagataaacatatccctagaccagtctgaaggatcactgcttagcgacgacttcctcgacacccccgacgacctcgatatcaacgtggacgatatcgaaacacccgacgaaacggactcactcgagttcctgggaaacggcaatgagctggaatgggaggatgacacccctgtcgcaacagcgaaaaacatgccaggtgattctgcagatctgttcggagatggcactaccgaagacggatcagccgctaacgggcgcttgtggaggacggtcattattggagagcaggaacatcggattgacctccacatgatcagaccatacatgaaagtggtgactcacgggggctactatggcgaaggcctgaacgcgatcatcgtgtttgcagcttgttttctgccagatagcagtctacctgactaccactatattatggagaacttattcctctatgtcatctcctcgcttgagttactggttgccgaggactacatgattgtctatctgaacggtgctaccccacgaagaagaatgccaggcattggctggctgaagaagtgctatcagatgatcgataggcgccttcgaaagaatctcaagagcttgatcatcgttcatccaagctggttcattagaaccgtgttggcaatttctaggccctttatcagtgtgaagttcatcaataaaatccagtacgtccattcactggaagatctggagcagctgatccccatggagcatgtgcagattcccgattgcgttctgcagtacgaggaggagaggctaaaagcccgccgcgagagcgctcgaccacagccagagtttgttctgccacggtccgaagagaagcctgaagtggccccagtcgagaatagatcggccctagttagcgaggatcaggagacacgaatgagttag

SEQ ID NO: 226943 - DNA, 1134 bp, Artificial Sequence
  derived and/or modified sequence
atgggcaccacagaggccaccctgaggatggagaatgtggatgtgaaggaggagtggcaggatgaggacctgccccggcccctgcctgaggagaccggggtggagctgctgggcagccctgtggaggacaccagcagcccccccaacaccctgaacttcaacggggcccacaggaagaggaagaccctggtggcccctgagatcaacatcagcctggaccagagcgagggcagcctgctgagtgatgacttcctggacaccccagatgacctggacatcaacgtggatgacatcgagaccccagatgaaacagacagcctggagttcctgggcaatggaaatgagctggagtgggaggatgacacccctgtggccacagccaagaacatgcctggggacagcgctgacctgtttggagatggcaccacagaagatggcagcgctgccaacggccgcctgtggaggacagtcatcattggagagcaggagcacagaattgacctgcacatgatccggccctacatgaaggtggtgacccacggcggctactacggggagggcctgaatgccatcatcgtgtttgctgcctgcttcctgcctgacagcagcctgcctgactaccactacatcatggagaacctcttcctgtatgtgatcagcagcctggagctgctggtggccgaggactacatgattgtgtacctgaatggagccaccccaagaagaaggatgcctggcatcggctggctgaagaagtgctaccagatgattgaccggcggctgaggaagaacctgaagagcctcatcatcgtgcaccccagctggttcatcagaacagtgctggccatcagccggcccttcatctctgtgaagttcatcaacaagatccagtatgtgcacagcctggaggacctggagcagctgatccccatggagcacgtgcagatcccagactgtgtgctgcagtatgaggaggagcggctgaaggcccggcgggagagcgcccggccccagcctgagtttgtgctgcccaggtctgaggagaagccagaggtggcccctgtggagaacagaagtgccctggtgtctgaggaccaggagaccagcctgcagcccctgcacaggagcagctag

SEQ ID NO: 226944 - DNA, 1116 bp, Artificial Sequence
  derived and/or modified sequence
atgggcaccacagaggccaccctgaggatggagaatgtggatgtgaaggaggagtggcaggatgaggacctgccccggcccctgcctgaggagaccggggtggagctgctgggcagccctgtggaggacaccagcagcccccccaacaccctgaacttcaacggggcccacaggaagaggaagaccctggtggcccctgagatcaacatcagcctggaccagagcgagggcagcctgctgagtgatgacttcctggacaccccagatgacctggacatcaacgtggatgacatcgagaccccagatgaaacagacagcctggagttcctgggcaatggaaatgagctggagtgggaggatgacacccctgtggccacagccaagaacatgcctggggacagcgctgacctgtttggagatggcaccacagaagatggcagcgctgccaacggccgcctgtggaggacagtcatcattggagagcaggagcacagaattgacctgcacatgatccggccctacatgaaggtggtgacccacggcggctactacggggagggcctgaatgccatcatcgtgtttgctgcctgcttcctgcctgacagcagcctgcctgactaccactacatcatggagaacctcttcctgtatgtgatcagcagcctggagctgctggtggccgaggactacatgattgtgtacctgaatggagccaccccaagaagaaggatgcctggcatcggctggctgaagaagtgctaccagatgattgaccggcggctgaggaagaacctgaagagcctcatcatcgtgcaccccagctggttcatcagaacagtgctggccatcagccggcccttcatctctgtgaagttcatcaacaagatccagtatgtgcacagcctggaggacctggagcagctgatccccatggagcacgtgcagatcccagactgtgtgctgcagtatgaggaggagcggctgaaggcccggcgggagagcgcccggccccagcctgagtttgtgctgcccaggtctgaggagaagccagaggtggcccctgtggagaacagaagtgccctggtgtctgaggaccaggagaccaggatgtcctag

SEQ ID NO: 226945 - DNA, 1134 bp, Artificial Sequence
  derived and/or modified sequence
atggccggccgccgcagcagccagcccggcatcgccctgcacaaccctggcaaccaccaggtgcagaacccccagggccgcctggagaccgtgcggcccctgcctgaggagaccggggtggagctgctgggcagccctgtggaggacaccagcagcccccccaacaccctgaacttcaacggggcccacaggaagaggaagaccctggtggcccctgagatcaacatcagcctggaccagagcgagggcagcctgctgagtgatgacttcctggacaccccagatgacctggacatcaacgtggatgacatcgagaccccagatgaaacagacagcctggagttcctgggcaatggaaatgagctggagtgggaggatgacacccctgtggccacagccaagaacatgcctggggacagcgctgacctgtttggagatggcaccacagaagatggcagcgctgccaacggccgcctgtggaggacagtcatcattggagagcaggagcacagaattgacctgcacatgatccggccctacatgaaggtggtgacccacggcggctactacggggagggcctgaatgccatcatcgtgtttgctgcctgcttcctgcctgacagcagcctgcctgactaccactacatcatggagaacctcttcctgtatgtgatcagcagcctggagctgctggtggccgaggactacatgattgtgtacctgaatggagccaccccaagaagaaggatgcctggcatcggctggctgaagaagtgctaccagatgattgaccggcggctgaggaagaacctgaagagcctcatcatcgtgcaccccagctggttcatcagaacagtgctggccatcagccggcccttcatctctgtgaagttcatcaacaagatccagtatgtgcacagcctggaggacctggagcagctgatccccatggagcacgtgcagatcccagactgtgtgctgcagtatgaggaggagcggctgaaggcccggcgggagagcgcccggccccagcctgagtttgtgctgcccaggtctgaggagaagccagaggtggcccctgtggagaacagaagtgccctggtgtctgaggaccaggagacctccatgtcctag

SEQ ID NO: 226946 - DNA, 1116 bp, Artificial Sequence
  derived and/or modified sequence
atgggcaccacagaggccaccctgaggatggagaatgtggatgtgaaggaggagtggcaggatgaggacctgccccggcccctgcctgaggagaccggggtggagctgctgggcagccctgtggaggacaccagcagcccccccaacaccctgaacttcaacggggcccacaggaagaggaagaccctggtggcccctgagatcaacatcagcctggaccagagcgagggcagcctgctgagtgatgacttcctggacaccccagatgacctggacatcaacgtggatgacatcgagaccccagatgaaacagacagcctggagttcctgggcaatggaaatgagctggagtgggaggatgacacccctgtggccacagccaagaacatgcctggggacagcgctgacctgtttggagatggcaccacagaagatggcagcgctgccaacggccgcctgtggaggacagtcatcattggagagcaggagcacagaattgacctgcacatgatccggccctacatgaaggtggtgacccacggcggctactacggggagggcctgaatgccatcatcgtgtttgctgcctgcttcctgcctgacagcagcctgcctgactaccactacatcatggagaacctcttcctgtatgtgatcagcagcctggagctgctggtggccgaggactacatgattgtgtacctgaatggagccaccccaagaagaaggatgcctggcatcggctggctgaagaagtgctaccagatgattgaccggcggctgaggaagaacctgaagagcctcatcatcgtgcaccccagctggttcatcagaacagtgctggccatcagccggcccttcatctctgtgaagttcatcaacaagatccagtatgtgcacagcctggaggacctggagcagctgatccccatggagcacgtgcagatcccagactgtgtgctgcagtatgaggaggagcggctgaaggcccggcgggagagcgcccggccccagcctgagtttgtgctgcccaggtctgaggagaagccagaggtggcccctgtggagaacagaagtgccctggtgtctgaggaccaggagacctccatgtcctag

SEQ ID NO: 226947 - DNA, 1050 bp, Artificial Sequence
  derived and/or modified sequence
atgggcaccacagaggccaccctgaggatggagaatgtggatgtgaaggaggagtggcaggatgaggaccccccacccaacaccctgaacttcaacggggcccacaggaagaggaagaccctggtggcccctgagatcaacatcagcctggaccagagcgagggcagcctgctgagtgatgacttcctggacaccccagatgacctggacatcaacgtggatgacatcgagaccccagatgaaacagacagcctggagttcctgggcaatggaaatgagctggagtgggaggatgacacccctgtggccacagccaagaacatgcctggggacagcgctgacctgtttggagatggcaccacagaagatggcagcgctgccaacggccgcctgtggaggacagtcatcattggagagcaggagcacagaattgacctgcacatgatccggccctacatgaaggtggtgacccacggcggctactacggggagggcctgaatgccatcatcgtgtttgctgcctgcttcctgcctgacagcagcctgcctgactaccactacatcatggagaacctcttcctgtatgtgatcagcagcctggagctgctggtggccgaggactacatgattgtgtacctgaatggagccaccccaagaagaaggatgcctggcatcggctggctgaagaagtgctaccagatgattgaccggcggctgaggaagaacctgaagagcctcatcatcgtgcaccccagctggttcatcagaacagtgctggccatcagccggcccttcatctctgtgaagttcatcaacaagatccagtatgtgcacagcctggaggacctggagcagctgatccccatggagcacgtgcagatcccagactgtgtgctgcagtatgaggaggagcggctgaaggcccggcgggagagcgcccggccccagcctgagtttgtgctgcccaggtctgaggagaagccagaggtggcccctgtggagaacagaagtgccctggtgtctgaggaccaggagaccaggatgtcctag

SEQ ID NO: 226948 - DNA, 1134 bp, Artificial Sequence
  derived and/or modified sequence
atgggcaccaccgaggccaccctgcggatggagaacgtggacgtgaaggaagagtggcaagatgaagatctcccgagaccactgcccgaggagacgggggttgagctgctaggctcccccgtagaggacacaagctcacctcctaatactttgaacttcaatggtgcacatcgtaaaaggaaaactctcgtcgccccagaaatcaatatctcgctggatcaatccgagggatccctgctatctgatgactttcttgatacacccgacgaccttgacataaacgtcgacgatatcgaaactcctgatgaaactgattctttagaattcttaggcaatggcaatgaactcgagtgggaagatgatactcccgtggcgactgccaagaacatgcccggagatagcgccgatctctttggcgatgggactactgaagatggctccgccgcaaacgggaggctgtggaggacagttatcattggcgaacaggagcacaggatcgacttacacatgatccgaccctatatgaaggtggtcacccatggaggatattatggagaaggccttaatgcgatcatagtattcgctgcatgttttctgccagattcttctctccctgactaccattacattatggaaaatctttttctgtacgtcatttcatctctggagctattggttgcagaggactacatgatagtctacctgaatggggccaccccccggaggcggatgcccgggattgggtggctcaagaagtgctatcagatgatcgataggcgattacgaaagaacctgaagagcctcattatagtccaccccagttggtttatcagaaccgttctcgccatctccaggcccttcatttctgtaaaatttatcaacaaaatccagtatgtccacagtttagaggacctggagcagttaattcctatggagcatgtgcagattcctgattgcgtactgcagtatgaggaagagagacttaaagcaagacgcgaatccgcgcgacctcaacccgagtttgttctcccaaggtccgaggagaagcctgaggtggcccccgtcgagaaccggagtgccctggtctccgaggatcaagagacgagcctgcaacctctgcatagatcttcatag

SEQ ID NO: 226949 - DNA, 1116 bp, Artificial Sequence
  derived and/or modified sequence
atgggcaccaccgaggccaccctgcggatggagaacgtggacgtgaaagaggaatggcaggatgaggacctcccacgccctttgcccgaagagaccggcgtcgagctattgggctcacctgtggaagacacttctagtccacctaacacgttaaacttcaatggggcccaccgaaagcggaagacactcgtcgctccagagatcaacatttcattggatcaatccgaggggtctctgttgtctgacgatttcctggatacacccgacgacctcgacatcaacgtggatgacattgaaactccagatgagaccgacagcctcgagttcttggggaatgggaatgaacttgagtgggaggatgacaccccggtggccacagccaagaacatgcccggcgatagcgccgatctgtttggagacgggactacagaagacggcagtgccgctaacggtcgattgtggagaacagtcatcatcggggaacaggagcatcggatagatttgcatatgatcaggccatacatgaaggttgtgacgcacggaggctattacggagaaggtcttaacgcgattattgtgtttgctgcgtgctttctgccagattctagcctgccggattaccactacattatggagaatctgttcctgtacgttatcagtagtctcgagcttctggtagccgaagactacatgatcgtgtacctcaatggggccacgccccggagaaggatgcctggtatcgggtggctgaagaaatgctaccagatgattgatagaaggttaagaaaaaatctgaagtcccttatcattgtgcacccgtcttggtttattaggacagttttggccatcagccgcccctttattagtgttaagttcatcaataaaatccagtatgtgcactcacttgaagacttagagcagctgattccaatggagcatgtgcagatccccgactgtgtgctgcagtacgaagaggaacggctgaaggctcgtcgggaaagtgcgaggccccagcctgaatttgttctcccacgatctgaggagaagcctgaagtagcacccgttgaaaacaggtctgctctcgtgagcgaagatcaggagaccaggatgtcttag

SEQ ID NO: 226950 - DNA, 1134 bp, Artificial Sequence
  derived and/or modified sequence
atggccggccggcggagcagccagcccggcatcgccctgcacaaccctgggaatcaccaggtgcagaaccctcagggtaggctggagacagtgcggcccttgccagaagagaccggagtggagctgctaggcagccctgttgaagatacctcctctccaccaaatactttgaactttaacggcgctcaccgcaagagaaaaactctggtagcacctgagattaacatttcgctcgaccaatctgagggctctctcctgtctgatgacttcctggacacacccgatgatctggacatcaacgtggacgatatcgagactccagatgagacggacagcctggaatttctcgggaatggaaatgaactcgagtgggaagatgatactcccgtggctactgctaagaatatgcctggcgacagcgctgacctgttcggcgatggcacgacagaggacggaagcgccgctaacggtcgcctgtggaggactgttattatcggggagcaagagcacaggatagaccttcatatgattagaccatacatgaaagtggttacacatggaggatattacggggagggcctgaatgctataatcgtgttcgctgcatgtttccttccggactcatcgctcccagactaccattacatcatggagaatttgttcctctacgttatctcaagtctcgaactgctggtggccgaagattatatgatcgtttatctcaacggagcgaccccccggagaaggatgcccggcatcggctggcttaagaagtgttaccaaatgattgatcgccggctgcgaaaaaatctgaagagcctcataatcgtccaccccagttggtttatcaggactgtcctggctatcagtcgcccttttatctccgtcaagttcataaacaagatccaatacgtacactccttggaagacttagagcagctgatacccatggaacacgttcagatcccagattgcgtgttacagtacgaggaagagcgacttaaggcccgcagggaatcagctagaccacagcctgaattcgtgctcccccggagcgaagagaagccagaggtagctcccgttgaaaatcggagtgccctggtttcagaggaccaggagaccagcatgtcttag

SEQ ID NO: 226951 - DNA, 1116 bp, Artificial Sequence
  derived and/or modified sequence
atgggcaccaccgaggccaccctgcggatggagaacgtggacgtgaaagaggagtggcaggatgaagacctcccacgacctttacccgaggaaaccggagtcgaactcctgggctcacctgtcgaggatactagctcgccacccaacaccctgaatttcaacggcgcgcataggaagcgtaagacactggtcgccccagagattaacatctctctggaccagtcagagggttcgttattgtcagacgatttcctcgatacccctgatgatttggatataaatgtggacgacattgaaactccagatgaaactgatagcctggaattcctaggcaacggaaacgagttagagtgggaggatgatactccggtcgccacggccaagaacatgcccggcgacagcgccgatctttttggagacggcactacagaagacggaagtgcggcaaacggaagactttggaggacggtcattattggagaacaggagcataggatcgatctgcatatgatccggccctacatgaaagtggtgacccatggcgggtactatggggagggtctgaacgccattattgttttcgctgcatgttttctgcccgattcttctctgcctgattaccactacatcatggagaatctctttctgtacgttatcagttcattggaactactcgtggctgaggattacatgatcgtttatcttaatggcgccactcctaggaggcggatgccaggaatcgggtggctgaagaaatgctatcaaatgatcgacagaagactgagaaaaaatcttaaaagcctgatcattgtgcatccttcatggtttatcagaacagtgctcgcaatttcccgaccatttatcagtgttaaattcatcaacaaaatccagtatgtgcacagcctggaagatttagaacagctgattccaatggagcatgtgcagattccggactgcgtgttgcaatatgaggaagagcgcctcaaggcccgccgagagagcgcaaggccacaacccgaattcgtcctgccaagatctgaagagaagcctgaggtcgcacccgtcgaaaacaggtcagctctagtgtctgaagatcaggaaacctcaatgtcctag

SEQ ID NO: 226952 - DNA, 1050 bp, Artificial Sequence
  derived and/or modified sequence
atgggcaccaccgaggccaccctgcggatggagaacgtggacgtgaaggaggaatggcaagacgaggaccctccaccaaacaccctcaacttcaacggcgcccacaggaagaggaagaccctagttgcccccgagatcaatatttcgctggaccagagcgagggcagcctcctgtctgacgactttctcgatacaccagatgatctggacattaatgtagatgatattgaaacacccgacgagactgactcactggagttcttggggaacggaaatgagttagaatgggaagacgatacgccggtggcaacagcaaaaaatatgcccggggacagtgcagacctgttcggagacgggaccacagaagacggatccgctgccaacgggcgcctgtggcggactgtgattattggtgagcaggaacaccgaatcgacctccacatgatcaggccctatatgaaagtcgtaacccacggcggctactatggtgaggggctcaatgcgattatcgtttttgctgcttgctttttgccggactctagtcttccggactaccactatataatggaaaacctcttcctgtatgtaatatcctctctggaactgctcgtcgccgaagattatatgattgtatacttgaatggcgctactccacggagaaggatgcccggaattggttggcttaagaagtgttatcagatgatcgaccggaggctcaggaaaaatctgaaatctttgattatagttcacccatcctggttcatccggactgtcctggcaataagcaggccattcatctctgtgaagtttatcaacaagattcaatacgtccatagcttggaagacctggaacaactgattcccatggagcacgtgcaaatccctgattgcgtgctgcagtacgaagaagaacgcctcaaagcgcggcgggagtccgcccgaccccagcccgagtttgttttgccccggtccgaggaaaagccagaggtggctcctgtggagaacaggagcgctctggtttcggaagaccaggagacccggatgagctag

SEQ ID NO: 226953 - DNA, 1134 bp, Artificial Sequence
  derived and/or modified sequence
atgggcaccactgaggcgacgttaagaatggaaaatgtggacgtcaaagaggagtggcaggatgaagacctccctagaccactcccggaagagaccggcgtcgagttgctcggctctcctgtggaagacacgtcgagcccccctaacacgctgaacttcaatggggctcatcgaaagaggaagactctcgtggcacctgaaatcaatatctcactcgatcagagcgagggcagcttgctgagtgacgactttcttgacacaccggatgacttggacataaatgtggacgacatcgagacacctgatgagactgactctctggaatttctcgggaacggcaatgagttagaatgggaggatgacacgcccgttgccaccgccaaaaacatgcccggagacagcgccgatctctttggcgacggcactaccgaggacgggtcagcggcaaatggcaggctttggcgaaccgtgatcataggcgagcaggaacatcgtattgatcttcacatgattcggccttacatgaaagtcgtgacacacggagggtactacggggagggcttaaacgcgattatagtatttgccgcttgtttcctgcctgattctagcctcccggactaccattacatcatggagaacctctttctctacgttatttctagtctggaactgctggtagctgaggactatatgattgtctatttgaacggcgcaaccccacgtcgacggatgcccggaataggatggcttaagaagtgctaccagatgatcgatcgcaggctaaggaaaaatctgaaatcgctcattatcgtacacccaagttggtttattcgcacggtgcttgctatatctagaccattcatttcggtcaaattcattaacaagatacagtacgtgcatagtctggaagatctggaacagctgatccccatggagcacgtccagattccagattgtgtgctccaatacgaagaagagaggctcaaagccagacgagaaagtgccaggccacagccagagttcgtgctgccacggagcgaagagaaacctgaagtggcgccagtcgaaaaccgcagcgccctcgtatctgaagatcaagaaacctctctgcagcccctgcacagaagcagctag

SEQ ID NO: 226954 - DNA, 1116 bp, Artificial Sequence
  derived and/or modified sequence
atgggtaccactgaggcaacactccgaatggagaatgtggacgtcaaagaggagtggcaggatgaggacctacctagacccttaccagaagagacgggggtagagcttctgggtagccccgtagaagataccagctcccctcctaataccttaaatttcaacggggcacacaggaaacggaagactttagtagcccctgagattaatatcagcctggaccagtctgaaggcagtcttcttagcgatgactttctggacacacctgatgatctggacatcaacgtggacgacatagagactcctgatgaaaccgattcactggaattcttgggcaatggcaatgagctggagtgggaggacgatactccagtggcaacagccaaaaatatgccaggtgattccgccgatctctttggcgatggtacgaccgaggacgggagtgcggctaacggtcgactctggcggacagtaataattggagagcaggaacatcgaatcgatctacatatgatccgcccatacatgaaagttgtgacccacggagggtattatggggagggcctcaacgccatcatagtattcgccgcatgcttccttccggacagctccttgcccgactaccattacatcatggagaacttatttctgtacgtgataagctccctggagctgctggttgcagaggattacatgattgtgtatctcaacggtgcaacgcctagaagacggatgcccggaatagggtggctgaaaaaatgctatcaaatgatagatcggcgtttgcgtaagaacttaaagtccctcatcatcgtacacccctcctggttcattaggactgttcttgctattagcaggccgtttatatcggtgaaattcatcaataaaatccaatacgtccactctctggaggacctggaacagttgattcccatggaacacgttcaaattcccgactgcgtcctacaatacgaggaggagcggctcaaggcacggagagagtccgccagacctcagccagagttcgttctaccacgcagcgaggaaaagcccgaggttgctcctgtggaaaaccggtcggcacttgtcagcgaggatcaagagactcgcatgtcttag

SEQ ID NO: 226955 - DNA, 1134 bp, Artificial Sequence
  derived and/or modified sequence
atggctgggcgacgctcaagtcaacccggaattgccctgcacaatccaggaaaccatcaggtgcaaaacccccaaggcagactcgaaactgtcagaccactccccgaggagacaggggtggaattactgggaagtccagtcgaggacactagctctcccccaaacactttgaacttcaatggtgcccatcggaagcggaaaacactagtggcccctgaaattaatatctcgctggatcaatcagaaggcagtctgttaagcgacgactttctggacacccctgatgacttagatatcaatgttgacgatatcgagactcctgatgagacagatagtttggagtttcttggtaacggcaatgaattagagtgggaggatgatacacccgtggccacggcgaaaaatatgcctggcgatagtgctgacttatttggtgatgggaccacggaagacggttctgcagcgaacggcaggctctggcggacggtcattatcggcgagcaggagcacagaatagacctgcacatgatcaggccctacatgaaagtggtgacgcacggaggctattatggggagggacttaacgccattatagtgtttgccgcttgcttccttccagactcctccctccccgattaccactacatcatggagaatctctttctctatgtgatctcttccctagaactcctcgtggctgaagactatatgattgtttatttgaacggggcaactcctagaagacgcatgccgggaattggatggctgaaaaagtgctatcagatgatagatcggaggctgcgaaagaatttgaaaagcctcatcattgtgcatccatcttggttcatccggacagtcctcgctatctcacgcccatttatttctgtaaagttcatcaacaagatacaatacgtccactcattagaagacttggagcaacttattcccatggaacacgtgcagatacccgactgtgtcctacagtatgaggaagaaaggctgaaagcaagacgggagagcgccagacctcagccagagtttgtgctaccgcgaagtgaagagaagcccgaagttgctcctgttgagaaccgtagtgctttggtttctgaagatcaagagacctctatgagctag

SEQ ID NO: 226956 - DNA, 1116 bp, Artificial Sequence
  derived and/or modified sequence
atgggcacaacagaagccacactgcggatggagaatgttgatgtgaaggaggagtggcaagatgaggacttgccacgacccctgccagaagagaccggggtggagttgctcggcagtcctgtcgaggacactagcagtcccccaaacacattaaactttaacggagcgcatcgcaagaggaagaccctcgttgcccctgagataaatatcagcctggatcagagtgaaggcagcctactgtccgatgatttcctagatactcctgacgacctggatatcaacgtggatgacatcgagaccccggatgagacagactccctcgaattcctcggaaacggaaatgagcttgaatgggaggacgatacccccgtagcaacggcaaagaacatgccaggggactcagcggacttattcggcgatgggactaccgaggacggctccgcggctaacggtaggctgtggcggacggttatcatcggagagcaggagcacagaattgatctgcatatgatacgtccatacatgaaagtggtgacgcacggtggttactatggcgagggcctgaacgcaatcatagtctttgccgcatgttttctgcctgatagcagtctgccggactaccattacatcatggagaacctgtttctgtacgtcatctcatctcttgagctactggtggcagaagactatatgattgtgtacctgaatggcgctacacctcgccgaaggatgccgggaatcggctggttgaagaagtgttatcagatgatcgacagaaggctgcgcaaaaacctcaagtccttgatcatagtccacccatcatggttcattaggacagtgctcgcaatcagcaggcccttcatttccgtcaagttcatcaacaagatccaatatgtgcactcgctggaagacctcgagcagttaatccccatggaacatgtccaaattcccgactgtgtgctgcaatacgaagaggagcggctcaaggcccgtagggagtcagccaggccccagcccgagttcgttcttcccaggtctgaagagaagcctgaggttgcgccagtcgaaaacagatctgctctggtctctgaagatcaggaaacaagcatgtcctag

SEQ ID NO: 226957 - DNA, 1050 bp, Artificial Sequence
  derived and/or modified sequence
atgggcactactgaggctaccctcagaatggaaaatgtggatgtgaaagaagaatggcaagatgaggatccgcctccaaataccctcaattttaatggagcccaccgcaaacgaaagaccttggttgctcccgagatcaatatctcgctggatcagtcagaaggctcattgctttcagatgactttttggacacacccgatgatctggatatcaatgttgacgatatcgaaacaccagacgagaccgatagtttggaattcctgggcaatggaaatgagcttgagtgggaggacgacacgcccgtggcaactgctaaaaatatgcctggagattctgcagacctgttcggggatggcaccacagaggacggctctgctgccaacggcaggctgtggagaacggtgataatcggtgagcaggaacataggatcgatttgcacatgataaggccttatatgaaggtggtcacacatgggggttattacggagaggggctgaacgccattattgtcttcgctgcatgttttcttcctgactcttccttgccagattatcactacatcatggagaatctgttcctatacgtgatctcttctctcgagctcctcgtcgctgaggattacatgattgtgtatcttaatggggctactccccgacggagaatgccaggtatcgggtggttaaagaaatgctaccagatgatcgacaggagactgcgtaaaaaccttaaaagcctgataatagtgcacccttcctggtttatacgcaccgtcctggcaatctctcggcctttcatctcagtcaaattcattaataagatacagtacgtgcactctctggaggatctcgagcaactgatcccgatggaacatgtgcaaatacccgattgcgtattacagtatgaagaggagcgtttgaaagctaggcgcgagagcgcacggccacaacccgagtttgtgctgccccgtagcgaagaaaaacctgaggtcgcaccggtcgaaaacagaagcgccctggtaagtgaggaccaggaaaccaggatgagctag

SEQ ID NO: 226958 - DNA, 1564 bp, Artificial Sequence
  derived and/or modified sequence
accccccaccccctcctccctgcacacaaaagcagcataaattaaccgtcttcgggaagccgagcctctgccagccctgagctgggaagaagcagctacctcggaggcagggcgcgcaggcgggcggcgatgagagggggcgcagccgcagccccgcgctggggagcccaccgctaaccctgcaccccacccacccctgcacaaaagagctggcgggcgctggccacgtcgccctgggtgaccttcctcggatgcagaatccgcccctgcgagcatcctcttcctcctaggctctgaaggcccggggagcgtgagcgatgcccagctgcacccgggcagggctcgcctttgtttgccagtaaggaggagaggctgtctcagctgcagaggggtcatccctgcttcaagccagtgcctcttcccagctcccatggggaccaccgaagccacgctccggatggaaaacgtggacgtgaaggaggaatggcaggacgaagatcttcccaggccactcccagaagagacgggggtggaactgcttggcagcccggtggaagacacatcctctcctcccaacacgctaaatttcaacggagcgcatcgtaagaggaagacgctggtggccccagagatcaacatttctctggatcagagtgaggggtccctgctgtccgatgacttcttggatacccctgatgacctggatattaacgtggatgacatcgagacccccgatgagaccgactcgctggagttcctggggaatggcaacgaactggagtgggaagacgacacccccgtggccaccgccaagaacatgcccggggacagcgcggatctatttggggacggcacgacggaggacggcagcgccgccaacgggcgcctgtggcggacagtgatcatcggggagcaagagcaccgtatagacctgcacatgatccggccttacatgaaagtggtcacccacggagggtactacggcgaaggcctcaacgccatcatcgtcttcgcagcctgcttccttccagacagcagcctccccgactaccactacatcatggagaacctcttcctgtacgtcatcagcagcttagagctcctggtggctgaggactacatgatcgtgtacctgaacggtgccacgccccggcggaggatgcctggaatcggctggctgaagaagtgctaccagatgatcgaccggaggttgcggaaaaacctgaagtccttgatcatcgtccacccctcgtggttcattcggactgtgctggccatctctcgccctttcatcagcgtcaagttcatcaacaagatccagtacgtgcacagcttggaagacctggagcaactcatccctatggaacacgtccagatcccagactgcgtcctgcaatacgaagaggaaagactgaaggccaggagggagagcgcgaggccccagccggagtttgtgctgcccaggtctgaagagaagccagaggtggcaccagtggaaaacaggtctgctctggtctcagaagatcaggaaacaagcctccagcccctgcacagatcaagctga

SEQ ID NO: 226959 - DNA, 1543 bp, Artificial Sequence
  derived and/or modified sequence
accccccaccccctcctccctgcacacaaaagcagcataaattaaccgtcttcgggaagccgagcctctgccagccctgagctgggaagaagcagctacctcggaggcagggcgcgcaggcgggcggcgatgagagggggcgcagccgcagccccgcgctggggagcccaccgctaaccctgcaccccacccacccctgcacaaaagagctggcgggcgctggccacgtcgccctgggtgaccttcctcggatgcagaatccgcccctgcgagcatcctcttcctcctaggctctgaaggcccggggagcgtgagcgatgcccagctgcacccgggcagggctcgcctttgtttgccagtaaggaggagaggctgtctcagctgcagaggggtcatccctgcttcaagccagtgcctcttcccagctcccatggggaccaccgaagccacgctccggatggaaaacgtggacgtgaaggaggaatggcaggacgaagatcttcccaggccactcccagaagagacgggggtggaactgcttggcagcccggtggaagacacatcctctcctcccaacacgctaaatttcaacggagcgcatcgtaagaggaagacgctggtggccccagagatcaacatttctctggatcagagtgaggggtccctgctgtccgatgacttcttggatacccctgatgacctggatattaacgtggatgacatcgagacccccgatgagaccgactcgctggagttcctggggaatggcaacgaactggagtgggaagacgacacccccgtggccaccgccaagaacatgcccggggacagcgcggatctatttggggacggcacgacggaggacggcagcgccgccaacgggcgcctgtggcggacagtgatcatcggggagcaagagcaccgtatagacctgcacatgatccggccttacatgaaagtggtcacccacggagggtactacggcgaaggcctcaacgccatcatcgtcttcgcagcctgcttccttccagacagcagcctccccgactaccactacatcatggagaacctcttcctgtacgtcatcagcagcttagagctcctggtggctgaggactacatgatcgtgtacctgaacggtgccacgccccggcggaggatgcctggaatcggctggctgaagaagtgctaccagatgatcgaccggaggttgcggaaaaacctgaagtccttgatcatcgtccacccctcgtggttcattcggactgtgctggccatctctcgccctttcatcagcgtcaagttcatcaacaagatccagtacgtgcacagcttggaagacctggagcaactcatccctatggaacacgtccagatcccagactgcgtcctgcaatacgaagaggaaagactgaaggccaggagggagagcgcgaggccccagccggagtttgtgctgcccaggtctgaagagaagccagaggtggcaccagtggaaaacaggtctgctctggtctcagaagatcaggaaacaagaatgtcc

SEQ ID NO: 226960 - DNA, 1957 bp, Artificial Sequence
  derived and/or modified sequence
ctctgccagccctgagctgggaagaagcagctacctcggaggcagggcgcgcaggcgggcggcgatgagagggggcgcagccgcagccccgcgctggggagcccaccgctaaccctgcaccccacccacccctgcacaaaagagctggcgggcgctggccacgtcgccctgggtgaccttcctcggatgcagaatccgcccctgcgagcatcctcttcctcctaggctctgaaggcccggggagcgtgagcgatgcccagctgcacccgggcagggctcgcctttgtttgccagtaaggaggagaggctgtctcagctgcagaggggtcatccctgcttcaagccagtgcctcttcccagctcccatggggaccaccgaagccacgctccggatggaaaacgtggacgtgaaggaggaatggcaggacgaagatcttcccagccaggaattgctttgcacaatcctgggaaccaccaagtccaaaatccacagggcaggctggaaactgtcaggccactcccagaagagacgggggtggaactgcttggcagcccggtggaagacacatcctctcctcccaacacgctaaatttcaacggagcgcatcgtaagaggaagacgctggtggccccagagatcaacatttctctggatcagagtgaggggtccctgctgtccgatgacttcttggatacccctgatgacctggatattaacgtggatgacatcgagacccccgatgagaccgactcgctggagttcctggggaatggcaacgaactggagtgggaagacgacacccccgtggccaccgccaagaacatgcccggggacagcgcggatctatttggggacggcacgacggaggacggcagcgccgccaacgggcgcctgtggcggacagtgatcatcggggagcaagagcaccgtatagacctgcacatgatccggccttacatgaaagtggtcacccacggagggtactacggcgaaggcctcaacgccatcatcgtcttcgcagcctgcttccttccagacagcagcctccccgactaccactacatcatggagaacctcttcctgtacgtcatcagcagcttagagctcctggtggctgaggactacatgatcgtgtacctgaacggtgccacgccccggcggaggatgcctggaatcggctggctgaagaagtgctaccagatgatcgaccggaggttgcggaaaaacctgaagtccttgatcatcgtccacccctcgtggttcattcggactgtgctggccatctctcgccctttcatcagcgtcaagttcatcaacaagatccagtacgtgcacagcttggaagacctggagcaactcatccctatggaacacgtccagatcccagactgcgtcctgcaatacgaagaggaaagactgaaggccaggagggagagcgcgaggccccagccggagtttgtgctgcccaggtctgaagagaagccagaggtggcaccagtggaaaacaggtctgctctggtctcagaagatcaggaaacaagcatgtcctgaggcgacgtgagcataacaaaggacatggaagaagattccagatgccagaaaacctctgtcagacgcccactggccccagatctcatcctgcctcatcctgagtcccaatcttccaagggtgccagcccctccgttcatctctgaaacccagcatccttttcagctgcttgaaaacattgtattttttttttttaacgatgcagtatttgtgcgttccagaaaagggcccagctctgagcccctcacccttccacactcacgaactctcagccgaggaaggcaagaagcgcagggggtggcccgcgtggcgtcggtggcctccgctcctgctcgcagcctctgtggtcagagctggatacaagattcaagacccttctcttgcttgtcacccgctccaggttggag

SEQ ID NO: 226961 - DNA, 5032 bp, Artificial Sequence
  derived and/or modified sequence
accccccaccccctcctccctgcacacaaaagcagcataaattaaccgtcttcgggaagccgagcctctgccagccctgagctgggaagaagcagctacctcggaggcagggcgcgcaggcgggcggcgatgagagggggcgcagccgcagccccgcgctggggagcccaccgctaaccctgcaccccacccacccctgcacaaaagagctggcgggcgctggccacgtcgccctgggtgaccttcctcggatgcagaatccgcccctgcgagcatcctcttcctcctaggctctgaaggcccggggagcgtgagcgatgcccagctgcacccgggcagggctcgcctttgtttgccagtaaggaggagaggctgtctcagctgcagaggggtcatccctgcttcaagccagtgcctcttcccagctcccatggggaccaccgaagccacgctccggatggaaaacgtggacgtgaaggaggaatggcaggacgaagatcttcccaggccactcccagaagagacgggggtggaactgcttggcagcccggtggaagacacatcctctcctcccaacacgctaaatttcaacggagcgcatcgtaagaggaagacgctggtggccccagagatcaacatttctctggatcagagtgaggggtccctgctgtccgatgacttcttggatacccctgatgacctggatattaacgtggatgacatcgagacccccgatgagaccgactcgctggagttcctggggaatggcaacgaactggagtgggaagacgacacccccgtggccaccgccaagaacatgcccggggacagcgcggatctatttggggacggcacgacggaggacggcagcgccgccaacgggcgcctgtggcggacagtgatcatcggggagcaagagcaccgtatagacctgcacatgatccggccttacatgaaagtggtcacccacggagggtactacggcgaaggcctcaacgccatcatcgtcttcgcagcctgcttccttccagacagcagcctccccgactaccactacatcatggagaacctcttcctgtacgtcatcagcagcttagagctcctggtggctgaggactacatgatcgtgtacctgaacggtgccacgccccggcggaggatgcctggaatcggctggctgaagaagtgctaccagatgatcgaccggaggttgcggaaaaacctgaagtccttgatcatcgtccacccctcgtggttcattcggactgtgctggccatctctcgccctttcatcagcgtcaagttcatcaacaagatccagtacgtgcacagcttggaagacctggagcaactcatccctatggaacacgtccagatcccagactgcgtcctgcaatacgaagaggaaagactgaaggccaggagggagagcgcgaggccccagccggagtttgtgctgcccaggtctgaagagaagccagaggtggcaccagtggaaaacaggtctgctctggtctcagaagatcaggaaacaagcatgtcctgaggcgacgtgagcataacaaaggacatggaagaagattccagatgccagaaaacctctgtcagacgcccactggccccagatctcatcctgcctcatcctgagtcccaatcttccaagggtgccagcccctccgttcatctctgaaacccagcatccttttcagctgcttgaaaacattgtattttttttttttaacgatgcagtatttgtgcgttccagaaaagggcccagctctgagcccctcacccttccacactcacgaactctcagccgaggaaggcaagaagcgcagggggtggcccgcgtggcgtcggtggcctccgctcctgctcgcagcctctgtggtcagagctggatacaagattcaagacccttctcttgcttgtcacccgctccaggttggagccacagacacccaccgccaccccggctgggtctgcgtcctttcctgtgcctttccctccagaatgcggcctcagacctagaagctcaacccccctatgagggccacgtcctggggtagctcctgacctccgaccttatgtccaaatttcacacccatggtttttcatttgacccgcccccttctcgctcataatgacacccagctcctttgagaggatcagagcccattgcacaagaagagccgctgccaaccatccttgtcctccgattgcaaaatgacaccccagtaatctagaacattctcaagcccctttaactcagatgtcaagccaccgggcaaaccccgtcaatacctcccaccaaggaatgagatatgtggacctcactgctcccccaacccagcgtcaggctgggacacgccaacgctgttccgggttggaacagcagaggctcagaaactggctctgaaataggcagacctagcaagaggaagatacagggtatcgggcgtttgagtgtttcagaagtcattcgggaagataaatccagtgcgctggccgcagccacctgcattcaaagcttggaccagcgggttcttgttcgggaggcaaatttccctaggaaaaagaagacagacttttctaatgtggtccaaatgcggatcactggtcagatggactctagaagcactgagctccctgtctctggaagtatttaagaaaaggctgggccaggcacgatggctcacgcctgtaatcccagactttgggaggccgaggcaggcggatcacctgaggtgaggagtttgagaacagcctggccaacatggtgaaacctcatctctactaaaaatacaaaaattagccaggcgtggtggcaggtgcctgtaatcccagctacttgggaggctgaggcatgagaatcacttaaacctgagaggcagaggttacagtgagccaagatcgtgccactgcattccagcctgggcgacagagcaagactctgtctcaaaaaaaataaaaaataatcagggcacagtggctcatgcctgtaatcccagcactctgggaggctgaggtgggtggatcacctgaggtcaggagttcaagaccagcctggtgaacatggcgaaaccccgtctctaataaaaatacaaaaattagccgggcatggtggtgcatgcctgtaatcccagctactcgggaggctgaggcaggagaactgcttgaacccaggaggcagaggttgcagtgatccaagatcatgccactgcactccagcctgggcaacaagagcaaaactccgtctcaaaataaaaagaaaagaaaagaatggacagtgtttgcagagagttgctcacgagtttccctctaatcctaaatgtcttcatgtctatcagtctgagcagacggtgagtagggcgggcacattctccaggcccttcttcctagctctgtggttgacctctcagcaagtgctatccaggctgggccaaccagacccacaattaactgagcctcagtgaaagcgtccagtgcatcttgacctgagacagcaaggaattgcatttggggttattccaacgatgatggcagggaactggtggtatttagtgctgaggggcagtgatacagaaagatttgccctgtgggacagggtcctgcgcgagtcccatccccaaaagccagcagctcctgccatgaggaagacggggtttctgagcaggcttatgcctgcaggttcctgtggagccaccggctgtgacgggacacctctgggtctcagcattgccctggggaggctgggacatttagggacatggtagggttttaacatttgtttcccaaatgtcaaatcccgggcacaggggcaagaccctgtcccgaattcccaccccagtgaatggtgtcgctgccaaagccaacacaagatgacaaaagtggctgggtacggtggctcacgcctataatcccagcactttgggagaccgagacaggtggatcacctgaggtcaggagttcgagaccaggctggccaacatggtgaaaccccatctctactaaaaatacaaaaattagctgggtgtggtggcgcgcacctgtagtcccagctactcaggaggctgaggtagaagaatagctggaacccaggaggcagagattgcagtcagccgagattgcaccactgcactccagcctgggagacagagcaagactgactcaaaagaaaaaaaatgacagaagcctgattatcagactgcccggaggagacaggctccagcagatagatgccagccaggcccagctgccacgatttgtcccaggtgaccaaaggcacgcagctccagcatgaatcgttctaacccaacagtgacaagaactgctgggccttaaccgtcatggaagactggggccgcttccaagtcacagacaggagacggggacaggaaagaactcattccacccaatcggacacctaataattgagtgtctacagcagcaatcaagtgacaagtgaggccctacctgacccagaaggtgcctgccggctaaacattctgcccccaccagaaactccagggggtccgcccgttatgccgtggcccacccacgcccctttggatcaccagcagtcacagacaacaggcaggcgaaactgaagaccccaactcagccccagcggaccctccagagcaaaagaggcccccggcgaggccacctgtcggcaggcatgccgaggtcaaacagccggggccaccgttcccagctgggccacgacctgcaccgtccacagatgggctttgagatggatttgtatcagggtggggggtgtggtttggccaaaatgcaatggaccccgacccctcctcgtaaaaggatgttgggtttccctctggtgacacatgggatgcgtcataaaccctcccccaaagtcctggtcagcagcccatccttccaacgatgagttttgcggtttttcagaacagaaatgatcactacgattgacgacggtcgtgatgttaagacgtcgtctccatgagctttggggggacttttatgtggaataaagaaactatcactg

SEQ ID NO: 226962 - DNA, 1047 bp, Artificial Sequence
  derived and/or modified sequence
atggggaccaccgaagccacgctccggatggaaaacgtggacgtgaaggaggaatggcaggacgaagatcctcctcccaacacgctaaatttcaacggagcgcatcgtaagaggaagacgctggtggccccagagatcaacatttctctggatcagagtgaggggtccctgctgtccgatgacttcttggatacccctgatgacctggatattaacgtggatgacatcgagacccccgatgagaccgactcgctggagttcctggggaatggcaacgaactggagtgggaagacgacacccccgtggccaccgccaagaacatgcccggggacagcgcggatctatttggggacggcacgacggaggacggcagcgccgccaacgggcgcctgtggcggacagtgatcatcggggagcaagagcaccgtatagacctgcacatgatccggccttacatgaaagtggtcacccacggagggtactacggcgaaggcctcaacgccatcatcgtcttcgcagcctgcttccttccagacagcagcctccccgactaccactacatcatggagaacctcttcctgtacgtcatcagcagcttagagctcctggtggctgaggactacatgatcgtgtacctgaacggtgccacgccccggcggaggatgcctggaatcggctggctgaagaagtgctaccagatgatcgaccggaggttgcggaaaaacctgaagtccttgatcatcgtccacccctcgtggttcattcggactgtgctggccatctctcgccctttcatcagcgtcaagttcatcaacaagatccagtacgtgcacagcttggaagacctggagcaactcatccctatggaacacgtccagatcccagactgcgtcctgcaatacgaagaggaaagactgaaggccaggagggagagcgcgaggccccagccggagtttgtgctgcccaggtctgaagagaagccagaggtggcaccagtggaaaacaggtctgctctggtctcagaagatcaggaaacaagaatgtcc

SEQ ID NO: 226963 - DNA, 1134 bp, Artificial Sequence
  derived and/or modified sequence
atgggcaccaccgaggccaccctgagaatggagaacgtggacgtgaaggaggagtggcaggacgaggacctgcccagacccctgcccgaggagaccggcgtggagctgctgggcagccccgtggaggacaccagcagcccccccaacaccctgaacttcaacggcgcccacagaaagagaaagaccctggtggcccccgagatcaacatcagcctggaccagagcgagggcagcctgctgagcgacgacttcctggacacccccgacgacctggacatcaacgtggacgacatcgagacccccgacgagaccgacagcctggagttcctgggcaacggcaacgagctggagtgggaggacgacacccccgtggccaccgccaagaacatgcccggcgacagcgccgacctgttcggcgacggcaccaccgaggacggcagcgccgccaacggcagactgtggagaaccgtgatcatcggcgagcaggagcacagaatcgacctgcacatgatcagaccctacatgaaggtggtgacccacggcggctactacggcgagggcctgaacgccatcatcgtgttcgccgcctgcttcctgcccgacagcagcctgcccgactaccactacatcatggagaacctgttcctgtacgtgatcagcagcctggagctgctggtggccgaggactacatgatcgtgtacctgaacggcgccacccccagaagaagaatgcccggcatcggctggctgaagaagtgctaccagatgatcgacagaagactgagaaagaacctgaagagcctgatcatcgtgcaccccagctggttcatcagaaccgtgctggccatcagcagacccttcatcagcgtgaagttcatcaacaagatccagtacgtgcacagcctggaggacctggagcagctgatccccatggagcacgtgcagatccccgactgcgtgctgcagtacgaggaggagagactgaaggccagaagagagagcgccagaccccagcccgagttcgtgctgcccagaagcgaggagaagcccgaggtggcccccgtggagaacagaagcgccctggtgagcgaggaccaggagaccagcctgcagcccctgcacagaagcagctag

SEQ ID NO: 226964 - DNA, 1116 bp, Artificial Sequence
  derived and/or modified sequence
atgggcaccaccgaggccaccctgagaatggagaacgtggacgtgaaggaggagtggcaggacgaggacctgcccagacccctgcccgaggagaccggcgtggagctgctgggcagccccgtggaggacaccagcagcccccccaacaccctgaacttcaacggcgcccacagaaagagaaagaccctggtggcccccgagatcaacatcagcctggaccagagcgagggcagcctgctgagcgacgacttcctggacacccccgacgacctggacatcaacgtggacgacatcgagacccccgacgagaccgacagcctggagttcctgggcaacggcaacgagctggagtgggaggacgacacccccgtggccaccgccaagaacatgcccggcgacagcgccgacctgttcggcgacggcaccaccgaggacggcagcgccgccaacggcagactgtggagaaccgtgatcatcggcgagcaggagcacagaatcgacctgcacatgatcagaccctacatgaaggtggtgacccacggcggctactacggcgagggcctgaacgccatcatcgtgttcgccgcctgcttcctgcccgacagcagcctgcccgactaccactacatcatggagaacctgttcctgtacgtgatcagcagcctggagctgctggtggccgaggactacatgatcgtgtacctgaacggcgccacccccagaagaagaatgcccggcatcggctggctgaagaagtgctaccagatgatcgacagaagactgagaaagaacctgaagagcctgatcatcgtgcaccccagctggttcatcagaaccgtgctggccatcagcagacccttcatcagcgtgaagttcatcaacaagatccagtacgtgcacagcctggaggacctggagcagctgatccccatggagcacgtgcagatccccgactgcgtgctgcagtacgaggaggagagactgaaggccagaagagagagcgccagaccccagcccgagttcgtgctgcccagaagcgaggagaagcccgaggtggcccccgtggagaacagaagcgccctggtgagcgaggaccaggagaccagaatgagctag

SEQ ID NO: 226965 - DNA, 1134 bp, Artificial Sequence
  derived and/or modified sequence
atggccggcagaagaagcagccagcccggcatcgccctgcacaaccccggcaaccaccaggtgcagaacccccagggcagactggagaccgtgagacccctgcccgaggagaccggcgtggagctgctgggcagccccgtggaggacaccagcagcccccccaacaccctgaacttcaacggcgcccacagaaagagaaagaccctggtggcccccgagatcaacatcagcctggaccagagcgagggcagcctgctgagcgacgacttcctggacacccccgacgacctggacatcaacgtggacgacatcgagacccccgacgagaccgacagcctggagttcctgggcaacggcaacgagctggagtgggaggacgacacccccgtggccaccgccaagaacatgcccggcgacagcgccgacctgttcggcgacggcaccaccgaggacggcagcgccgccaacggcagactgtggagaaccgtgatcatcggcgagcaggagcacagaatcgacctgcacatgatcagaccctacatgaaggtggtgacccacggcggctactacggcgagggcctgaacgccatcatcgtgttcgccgcctgcttcctgcccgacagcagcctgcccgactaccactacatcatggagaacctgttcctgtacgtgatcagcagcctggagctgctggtggccgaggactacatgatcgtgtacctgaacggcgccacccccagaagaagaatgcccggcatcggctggctgaagaagtgctaccagatgatcgacagaagactgagaaagaacctgaagagcctgatcatcgtgcaccccagctggttcatcagaaccgtgctggccatcagcagacccttcatcagcgtgaagttcatcaacaagatccagtacgtgcacagcctggaggacctggagcagctgatccccatggagcacgtgcagatccccgactgcgtgctgcagtacgaggaggagagactgaaggccagaagagagagcgccagaccccagcccgagttcgtgctgcccagaagcgaggagaagcccgaggtggcccccgtggagaacagaagcgccctggtgagcgaggaccaggagaccagcatgagctag

SEQ ID NO: 226966 - DNA, 1116 bp, Artificial Sequence
  derived and/or modified sequence
atgggcaccaccgaggccaccctgagaatggagaacgtggacgtgaaggaggagtggcaggacgaggacctgcccagacccctgcccgaggagaccggcgtggagctgctgggcagccccgtggaggacaccagcagcccccccaacaccctgaacttcaacggcgcccacagaaagagaaagaccctggtggcccccgagatcaacatcagcctggaccagagcgagggcagcctgctgagcgacgacttcctggacacccccgacgacctggacatcaacgtggacgacatcgagacccccgacgagaccgacagcctggagttcctgggcaacggcaacgagctggagtgggaggacgacacccccgtggccaccgccaagaacatgcccggcgacagcgccgacctgttcggcgacggcaccaccgaggacggcagcgccgccaacggcagactgtggagaaccgtgatcatcggcgagcaggagcacagaatcgacctgcacatgatcagaccctacatgaaggtggtgacccacggcggctactacggcgagggcctgaacgccatcatcgtgttcgccgcctgcttcctgcccgacagcagcctgcccgactaccactacatcatggagaacctgttcctgtacgtgatcagcagcctggagctgctggtggccgaggactacatgatcgtgtacctgaacggcgccacccccagaagaagaatgcccggcatcggctggctgaagaagtgctaccagatgatcgacagaagactgagaaagaacctgaagagcctgatcatcgtgcaccccagctggttcatcagaaccgtgctggccatcagcagacccttcatcagcgtgaagttcatcaacaagatccagtacgtgcacagcctggaggacctggagcagctgatccccatggagcacgtgcagatccccgactgcgtgctgcagtacgaggaggagagactgaaggccagaagagagagcgccagaccccagcccgagttcgtgctgcccagaagcgaggagaagcccgaggtggcccccgtggagaacagaagcgccctggtgagcgaggaccaggagaccagcatgagctag

SEQ ID NO: 226967 - DNA, 1050 bp, Artificial Sequence
  derived and/or modified sequence
atgggcaccaccgaggccaccctgagaatggagaacgtggacgtgaaggaggagtggcaggacgaggaccccccccccaacaccctgaacttcaacggcgcccacagaaagagaaagaccctggtggcccccgagatcaacatcagcctggaccagagcgagggcagcctgctgagcgacgacttcctggacacccccgacgacctggacatcaacgtggacgacatcgagacccccgacgagaccgacagcctggagttcctgggcaacggcaacgagctggagtgggaggacgacacccccgtggccaccgccaagaacatgcccggcgacagcgccgacctgttcggcgacggcaccaccgaggacggcagcgccgccaacggcagactgtggagaaccgtgatcatcggcgagcaggagcacagaatcgacctgcacatgatcagaccctacatgaaggtggtgacccacggcggctactacggcgagggcctgaacgccatcatcgtgttcgccgcctgcttcctgcccgacagcagcctgcccgactaccactacatcatggagaacctgttcctgtacgtgatcagcagcctggagctgctggtggccgaggactacatgatcgtgtacctgaacggcgccacccccagaagaagaatgcccggcatcggctggctgaagaagtgctaccagatgatcgacagaagactgagaaagaacctgaagagcctgatcatcgtgcaccccagctggttcatcagaaccgtgctggccatcagcagacccttcatcagcgtgaagttcatcaacaagatccagtacgtgcacagcctggaggacctggagcagctgatccccatggagcacgtgcagatccccgactgcgtgctgcagtacgaggaggagagactgaaggccagaagagagagcgccagaccccagcccgagttcgtgctgcccagaagcgaggagaagcccgaggtggcccccgtggagaacagaagcgccctggtgagcgaggaccaggagaccagaatgagctag

SEQ ID NO: 226968 - protein, 977 aa, Artificial Sequence
  derived and/or modified sequence
MVVAEDLSALRMAEDSCVDADLPDCNCDVTRQRVKKLKETLVAVQQLDKNMSSLRTWLAHIESELAKPIVYDSCNSEEIQRKLNEQQELQRDIEKHSTGVASVLNLCEVLLHDCDACATDAECDSIQQATRNLDRRWRNICAMSMERRLKIEETWRLWQKFLDDYSRFEDWLKSSERTAAFPSSSGVIYTVAKEELKKFEAFQRQVHECLTQLELINKQYRRLARENRTDSACSLKQMVHEGNQRWDNLQKRVTSILRRLKHFIGQREEFETARDSILVWLTEMDLQLTNIEHFSECDVQAKIKQLKAFQQEISLNHNKIEQIIAQGEQLIEKSEPLDAAIIEEELDELRRYCQEVFGRVERYHKKLIRLPLPDDEHDLSDRELELEDSAALSDLHWHDRSADSLLSPQPSSNLSLSLAQPLRSERSGRDTPASVDSIPLEWDHDYDLSRDLESAMSRALPSEDEEGQDDKDFYLRGAVGLSDVMIPESPEAYVKLTENAIKNTSGDHSALESQIRQLGKALDDSRFQIQQTENIIRSKTPTGPELDTSYKGYMKLLGECSSSIDSVKRLEHKLKEEEESLPGFVNLHSTETQTAGVIDRWELLQAQALSKELRMKQNLQKWQQFNSDLNSIWAWLGDTEEELEQLQRLELSTDIQTIELQIKKLKELQKAVDHRKAIILSINLCSPEFTQADSKESRDLQDRLSQMNGRWDRVCSLLEEWRGLLQDALMQCQGFHEMSHGLLLMLENIDRRKNEIVPIDSNLDAEILQDHHKQLMQIKHELLESQLRVASLQDMSCQLLVNAEGTDCLEAKEKVHVIGNRLKLLLKEVSRHIKELEKLLDVSSSQQDLSSWSSADELDTSGSVSPTSGRSTPNRQKTPRGKCSLSQPGPSVSSPHSRSTKGGSDSSLSEPGPGRSGRGFLFRVLRAALPLQLLLLLLIGLACLVPMSEEDYSCALSNNFARSFHPMLRYTNGPPPL

SEQ ID NO: 226969 - protein, 8749 aa, Artificial Sequence
  derived and/or modified sequence
MATSRGASRCPRDIANVMQRLQDEQEIVQKRTFTKWINSHLAKRKPPMVVDDLFEDMKDGVKLLALLEVLSGQKLPCEQGRRMKRIHAVANIGTALKFLEGRKSMHRGSPIKLVNINSTDIADGRPSIVLGLMWTIILYFQIEELTSNLPQLQSLSSSASSVDSIVSSETPSPPSKRKVTTKIQGNAKKALLKWVQYTAGKQTGIEVKDFGKSWRSGVAFHSVIHAIRPELVDLETVKGRSNRENLEDAFTIAETELGIPRLLDPEDVDVDKPDEKSIMTYVAQFLKHYPDIHNASTDGQEDDEILPGFPSFANSVQNFKREDRVIFKEMKVWIEQFERDLTRAQMVESNLQDKYQSFKHFRVQYEMKRKQIEHLIQPLHRDGKLSLDQALVKQSWDRVTSRLFDWHIQLDKSLPAPLGTIGAWLYRAEVALREEITVQQVHEETANTIQRKLEQHKDLLQNTDAHKRAFHEIYRTRSVNGIPVPPDQLEDMAERFHFVSSTSELHLMKMEFLELKYRLLSLLVLAESKLKSWIIKYGRRESVEQLLQNYVSFIENSKFFEQYEVTYQILKQTAEMYVKADGSVEEAENVMKFMNETTAQWRNLSVEVRSVRSMLEEVISNWDRYGNTVASLQAWLEDAEKMLNQSENAKKDFFRNLPHWIQQHTAMNDAGNFLIETCDEMVSRDLKQQLLLLNGRWRELFMEVKQYAQADEMDRMKKEYTDCVVTLSAFATEAHKKLSEPLEVSFMNVKLLIQDLEDIEQRVPVMDAQYKIITKTAHLITKESPQEEGKEMFATMSKLKEQLTKVKECYSPLLYESQQLLIPLEELEKQMTSFYDSLGKINEIITVLEREAQSSALFKQKHQELLACQENCKKTLTLIEKGSQSVQKFVTLSNVLKHFDQTRLQRQIADIHVAFQSMVKKTGDWKKHVETNSRLMKKFEESRAELEKVLRIAQEGLEEKGDPEELLRRHTEFFSQLDQRVLNAFLKACDELTDILPEQEQQGLQEAVRKLHKQWKDLQGEAPYHLLHLKIDVEKNRFLASVEECRTELDRETKLMPQEGSEKIIKEHRVFFSDKGPHHLCEKRLQLIEELCVKLPVRDPVRDTPGTCHVTLKELRAAIDSTYRKLMEDPDKWKDYTSRFSEFSSWISTNETQLKGIKGEAIDTANHGEVKRAVEEIRNGVTKRGETLSWLKSRLKVLTEVSSENEAQKQGDELAKLSSSFKALVTLLSEVEKMLSNFGDCVQYKEIVKNSLEELISGSKEVQEQAEKILDTENLFEAQQLLLHHQQKTKRISAKKRDVQQQIAQAQQGEGGLPDRGHEELRKLESTLDGLERSRERQERRIQVTLRKWERFETNKETVVRYLFQTGSSHERFLSFSSLESLSSELEQTKEFSKRTESIAVQAENLVKEASEIPLGPQNKQLLQQQAKSIKEQVKKLEDTLEEDIKTMEMVKTKWDHFGSNFETLSVWITEKEKELNALETSSSAMDMQISQIKVTIQEIESKLSSIVGLEEEAQSFAQFVTTGESARIKAKLTQIRRYGEELREHAQCLEGTILGHLSQQQKFEENLRKIQQSVSEFEDKLAVPIKICSSATETYKVLQEHMDLCQALESLSSAITAFSASARKVVNRDSCVQEAAALQQQYEDILRRAKERQTALENLLAHWQRLEKELSSFLTWLERGEAKASSPEMDISADRVKVEGELQLIQALQNEVVSQASFYSKLLQLKESLFSVASKDDVKMMKLHLEQLDERWRDLPQIINKRINFLQSVVAEHQQFDELLLSFSVWIKLFLSELQTTSEISIMDHQVALTRHKDHAAEVESKKGELQSLQGHLAKLGSLGRAEDLHLLQGKAEDCFQLFEEASQVVERRQLALSHLAEFLQSHASLSGILRQLRQTVEATNSMNKNESDLIEKDLNDALQNAKALESAAVSLDGILSKAQYHLKIGSSEQRTSCRATADQLCGEVERIQNLLGTKQSEADALAVLKKAFQDQKEELLKSIEDIEERTDKERLKEPTRQALQQRLRVFNQLEDELNSHEHELCWLKDKAKQIAQKDVAFAPEVDREINRLEVTWDDTKRLIHENQGQCCGLIDLMREYQNLKSAVSKVLENASSVIVTRTTIKDQEDLKWAFSKHETAKNKMNYKQKDLDNFTSKGKHLLSELKKIHSSDFSLVKTDMESTVDKWLDVSEKLEENMDRLRVSLSIWDDVLSTRDEIEGWSNNCVPQMAENISNLDNHLRAEELLKEFESEVKNKALRLEELHSKVNDLKELTKNLETPPDLQFIEADLMQKLEHAKEITEVAKGTLKDFTAQSTQVEKFINDITTWFTKVEESLMNCAQNETCEALKKVKDIQKELQSQQSNISSTQENLNSLCRKYHSAELESLGRAMTGLIKKHEAVSQLCSKTQASLQESLEKHFSESMQEFQEWFLGAKAAAKESSDRTGDSKVLEAKLHDLQNILDSVSDGQSKLDAVTQEGQTLYAHLSKQIVSSIQEQITKANEEFQAFLKQCLKDKQALQDCASELGSFEDQHRKLNLWIHEMEERFNTENLGESKQHIPEKKNEVHKVEMFLGELLAARESLDKLSQRGQLLSEEGHGAGQEGRLCSQLLTSHQNLLRMTKEKLRSCQVALQEHEALEEALQSMWFWVKAIQDRLACAESTLGSKDTLEKRLSQIQDILLMKGEGEVKLNMAIGKGEQALRSSNKEGQRVIQTQLETLKEVWADIMSSSVHAQSTLESVISQWNDYVERKNQLEQWMESVDQKIEHPLQPQPGLKEKFVLLDHLQSILSEAEDHTRALHRLIAKSRELYEKTEDESFKDTAQEELKTQFNDIMTVAKEKMRKVEEIVKDHLMYLDAVHEFTDWLHSAKEELHRWSDMSGDSSATQKKLSKIKELIDSREIGASRLSRVESLAPEVKQNTTASGCELMHTEMQALRADWKQWEDSVFQTQSCLENLVSQMALSEQEFSGQVAQLEQALEQFSALLKTWAQQLTLLEGKNTDEEIVECWHKGQEILDALQKAEPRTEDLKSQLNELCRFSRDLSTYSGKVSGLIKEYNCLCLQASKGCQNKEQILQQRFRKAFRDFQQWLVNAKITTAKCFDIPQNISEVSTSLQKIQEFLSESENGQHKLNMMLSKGELLSTLLTKEKAKGIQAKVTAAKEDWKNFHSNLHQKESALENLKIQMKDFEVSAEPIQDWLSKTEKMVHESSNRLYDLPAKRREQQKLQSVLEEIHCYEPQLNRLKEKAQQLWEGQAASKSFRHRVSQLSSQYLALSNLTKEKVSRLDRIVAEHNQFSLGIKELQDWMTDAIHMLDSYCHPTSDKSVLDSRTLKLEALLSVKQEKEIQMKMIVTRGESVLQNTSPEGIPTIQQQLQSVKDMWASLLSAGIRCKSQLEGALSKWTSYQDGVRQFSGWMDSMEANLNESERQHAELRDKTTMLGKAKLLNEEVLSYSSLLETIEVKGAGMTEHYVTQLELQDLQERYRAIQERAKEAVTKSEKLVRLHQEYQRDLKAFEVWLGQEQEKLDQYSVLEGDAHTHETTLRDLQELQVHCAEGQALLNSVLHTREDVIPSGIPQAEDRALESLRQDWQAYQHRLSETRTQFNNVVNKLRLMEQKFQQVDEWLKTAEEKKWHEEVTAYRDEVEEVGARAQEILDESHVNSRMGCQATQLTSRYQALLLQVLEQIKFLEEEIQSLEESESSLSSYSDWYGSTHKNFKNVATKIDKVDTVMMGKKLKTLEVLLKDMEKGHSLLKSAREKGERAVKYLEEGEAERLRKEIHDHMEQLKELTSTVRKEHMTLEKGLHLAKEFSDKCKALTQWIAEYQEILHVPEEPKMELYEKKAQLSKYKSLQQTVLSHEPSVKSVREKGEALLELVQDVTLKDKIDQLQSDYQDLCSIGKAMMEEIAGFEDRLNNLQMKGDTLIGQCADHLQAKLKQNVHAHLQGTKDSYSAICSTAQRMYQSLEHELQKHVSRQDTLQQCQAWLSAVQPDLEPSPQPPLSRAEAIKQVKHFRALQEQARTYLDLLCSMCDLSNASVKTTAKDIQQTEQTIEQKLVQAQNLTQGWEEIKHLKSELWIYLQDADQQLQNMKRRHSELELNIAQNMVSQVKDFVKKLQSKQASVNTIIEKVNKLTKKEESPEHKEINHLNDQWLDLCRQSNNLCLQREEDLQRTRDYHDCMNVVEVFLEKFTTEWDNLARSDAESTAVHLEALKKLALALQERKYAIEDLKDQKQKMIEHLNLDDKELVKEQTSHLEQRWFQLEDLIKRKIQVSVTNLEELNVVQSRFQELMEWAEEQQPNIAEALKQSPPPDMAQNLLMDHLAICSELEAKQMLLKSLIKDADRVMADLGLNERQVIQKALSDAQSHVNCLSDLVGQRRKYLNKALSEKTQFLMAVFQATSQIQQHERKIMFREHICLLPDDVSKQVKTCKSAQASLKTYQNEVTGLWAQGRELMKEVTEQEKSEVLGKLQELQSVYDSVLQKCSHRLQELEKNLVSRKHFKEDFDKACHWLKQADIVTFPEINLMNESSELHTQLAKYQNILEQSPEYENLLLTLQRTGQTILPSLNEVDHSYLSEKLNALPRQFNVIVALAKDKFYKVQEAILARKEYASLIELTTQSLSELEAQFLRMSKVPTDLAVEEALSLQDGCRAILDEVAGLGEAVDELNQKKEGFRSTGQPWQPDKMLHLVTLYHRLKRQTEQRVSLLEDTTSAYQEHEKMCQQLERQLKSVKEEQSKVNEETLPAEEKLKMYHSLAGSLQDSGIVLKRVTIHLEDLAPHLDPLAYEKARHQIQSWQGELKLLTSAIGETVTECESRMVQSIDFQTEMSRSLDWLRRVKAELSGPVYLDLNLQDIQEEIRKIQIHQEEVQSSLRIMNALSHKEKEKFTKAKELISADLEHSLAELSELDGDIQEALRTRQATLTEIYSQCQRYYQVFQAANDWLEDAQELLQLAGNGLDVESAEENLKSHMEFFSTEDQFHSNLEELHSLVATLDPLIKPTGKEDLEQKVASLELRSQRMSRDSGAQVDLLQRCTAQWHDYQKAREEVIELMNDTEKKLSEFSLLKTSSSHEAEEKLSEHKALVSVVNSFHEKIVALEEKASQLEKTGNDASKATLSRSMTTVWQRWTRLRAVAQDQEKILEDAVDEWTGFNNKVKKATEMIDQLQDKLPGSSAEKASKAELLTLLEYHDTFVLELEQQQSALGMLRQQTLSMLQDGAAPTPGEEPPLMQEITAMQDRCLNMQEKVKTNGKLVKQELKDREMVETQINSVKCWVQETKEYLGNPTIEIDAQLEELQILLTEATNHRQNIEKMAEEQKEKYLGLYTILPSELSLQLAEVALDLKIRDQIQDKIKEVEQSKATSQELSRQIQKLAKDLTTILTKLKAKTDNVVQAKTDQKVLGEELDGCNSKLMELDAAVQKFLEQNGQLGKPLAKKIGKLTELHQQTIRQAENRLSKLNQAASHLEEYNEMLELILKWIEKAKVLAHGTIAWNSASQLREQYILHQTLLEESKEIDSELEAMTEKLQYLTSVYCTEKMSQQVAELGRETEELRQMIKIRLQNLQDAAKDMKKFEAELKKLQAALEQAQATLTSPEVGRLSLKEQLSHRQHLLSEMESLKPKVQAVQLCQSALRIPEDVVASLPLCHAALRLQEEASRLQHTAIQQCNIMQAAVVQYEQYEQEMKHLQQLIEGAHREIEDKPVATSNIQELQAQISRHEELAQKIKGYQEQIASLNSKCKMLTMKAKHATMLLTVTEVEGLAEGTEDLDGELLPTPSAHPSVVMMTAGRCHTLLSPVTEESGEEGTNSEISSPPACRSPSPVANTDASVNQDIAYYQALSAERLQTDAAKIHPSTSASQEFYEPGLEPSATAKLGDLQRSWETLKNVISEKQRTLYEALERQQKYQDSLQSISTKMEAIELKLSESPEPGRSPESQMAEHQALMDEILMLQDEINELQSSLAEELVSESCEADPAEQLALQSTLTVLAERMSTIRMKASGKRQLLEEKLNDQLEEQRQEQALQRYRCEADELDSWLLSTKATLDTALSPPKEPMDMEAQLMDCQNMLVEIEQKVVALSELSVHNENLLLEGKAHTKDEAEQLAGKLRRLKGSLLELQRALHDKQLNMQGTAQEKEESDVDLTATQSPGVQEWLAQARTTWTQQRQSSLQQQKELEQELAEQKSLLRSVASRGEEILIQHSAAETSGDAGEKPDVLSQELGMEGEKSSAEDQMRMKWESLHQEFSTKQKLLQNVLEQEQEQVLYSRPNRLLSGVPLYKGDVPTQDKSAVTSLLDGLNQAFEEVSSQSGGAKRQSIHLEQKLYDGVSATSTWLDDVEERLFVATALLPEETETCLFNQEILAKDIKEMSEEMDKNKNLFSQAFPENGDNRDVIEDTLGCLLGRLSLLDSVVNQRCHQMKERLQQILNFQNDLKVLFTSLADNKYIILQKLANVFEQPVAEQIEAIQQAEDGLKEFDAGIIELKRRGDKLQVEQPSMQELSKLQDMYDELMMIIGSRRSGLNQNLTLKSQYERALQDLADLLETGQEKMAGDQKIIVSSKEEIQQLLDKHKEYFQGLESHMILTETLFRKIISFAVQKETQFHTELMAQASAVLKRAHKRGVELEYILETWSHLDEDQQELSRQLEVVESSIPSVGLVEENEDRLIDRITLYQHLKSSLNEYQPKLYQVLDDGKRLLISISCSDLESQLNQLGECWLSNTNKMSKELHRLETILKHWTRYQSESADLIHWLQSAKDRLEFWTQQSVTVPQELEMVRDHLNAFLEFSKEVDAQSSLKSSVLSTGNQLLRLKKVDTATLRSELSRIDSQWTDLLTNIPAVQEKLHQLQMDKLPSRHAISEVMSWISLMENVIQKDEDNIKNSIGYKAIHEYLQKYKGFKIDINCKQLTVDFVNQSVLQISSQDVESKRSDKTDFAEQLGAMNKSWQILQGLVTEKIQLLEGLLESWSEYENNVQCLKTWFETQEKRLKQQHRIGDQASVQNALKDCQDLEDLIKAKEKEVEKIEQNGLALIQNKKEDVSSIVMSTLRELGQTWANLDHMVGQLKILLKSVLDQWSSHKVAFDKINSYLMEARYSLSRFRLLTGSLEAVQVQVDNLQNLQDDLEKQERSLQKFGSITNQLLKECHPPVTETLTNTLKEVNMRWNNLLEEIAEQLQSSKALLQLWQRYKDYSKQCASTVQQQEDRTNELLKAATNKDIADDEVATWIQDCNDLLKGLGTVKDSLFFLHELGEQLKQQVDASAASAIQSDQLSLSQHLCALEQALCKQQTSLQAGVLDYETFAKSLEALEAWIVEAEEILQGQDPSHSSDLSTIQERMEELKGQMLKFSSMAPDLDRLNELGYRLPLNDKEIKRMQNLNRHWSLISSQTTERFSKLQSFLLQHQTFLEKCETWMEFLVQTEQKLAVEISGNYQHLLEQQRAHELFQAEMFSRQQILHSIIIDGQRLLEQGQVDDRDEFNLKLTLLSNQWQGVIRRAQQRRGIIDSQIRQWQRYREMAEKLRKWLVEVSYLPMSGLGSVPIPLQQARTLFDEVQFKEKVFLRQQGSYILTVEAGKQLLLSADSGAEAALQAELAEIQEKWKSASMRLEEQKKKLAFLLKDWEKCEKGIADSLEKLRTFKKKLSQSLPDHHEELHAEQMRCKELENAVGSWTDDLTQLSLLKDTLSAYISADDISILNERVELLQRQWEELCHQLSLRRQQIGERLNEWAVFSEKNKELCEWLTQMESKVSQNGDILIEEMIEKLKKDYQEEIAIAQENKIQLQQMGERLAKASHESKASEIEYKLGKVNDRWQHLLDLIAARVKKLKETLVAVQQLDKNMSSLRTWLAHIESELAKPIVYDSCNSEEIQRKLNEQQELQRDIEKHSTGVASVLNLCEVLLHDCDACATDAECDSIQQATRNLDRRWRNICAMSMERRLKIEETWRLWQKFLDDYSRFEDWLKSSERTAAFPSSSGVIYTVAKEELKKFEAFQRQVHECLTQLELINKQYRRLARENRTDSACSLKQMVHEGNQRWDNLQKRVTSILRRLKHFIGQREEFETARDSILVWLTEMDLQLTNIEHFSECDVQAKIKQLKAFQQEISLNHNKIEQIIAQGEQLIEKSEPLDAAIIEEELDELRRYCQEVFGRVERYHKKLIRLPLPDDEHDLSDRELELEDSAALSDLHWHDRSADSLLSPQPSSNLSLSLAQPLRSERSGRDTPASVDSIPLEWDHDYDLSRDLESAMSRALPSEDEEGQDDKDFYLRGAVGLSDVMIPESPEAYVKLTENAIKNTSGDHSALESQIRQLGKALDDSRFQIQQTENIIRSKTPTGPELDTSYKGYMKLLGECSSSIDSVKRLEHKLKEEEESLPGFVNLHSTETQTAGVIDRWELLQAQALSKELRMKQNLQKWQQFNSDLNSIWAWLGDTEEELEQLQRLELSTDIQTIELQIKKLKELQKAVDHRKAIILSINLCSPEFTQADSKESRDLQDRLSQMNGRWDRVCSLLEEWRGLLQDALMQCQGFHEMSHGLLLMLENIDRRKNEIVPIDSNLDAEILQDHHKQLMQIKHELLESQLRVASLQDMSCQLLVNAEGTDCLEAKEKVHVIGNRLKLLLKEVSRHIKELEKLLDVSSSQQDLSSWSSADELDTSGSVSPTSGRSTPNRQKTPRGKCSLSQPGPSVSSPHSRSTKGGSDSSLSEPGPGRSGRGFLFRVLRAALPLQLLLLLLIGLACLVPMSEEDYSCALSNNFARSFHPMLRYTNGPPPL

SEQ ID NO: 226970 - protein, 8749 aa, Artificial Sequence
  derived and/or modified sequence
MATSRGASRCPRDIANVMQRLQDEQEIVQKRTFTKWINSHLAKRKPPMVVDDLFEDMKDGVKLLALLEVLSGQKLPCEQGRRMKRIHAVANIGTALKFLEGRKSMHRGSPIKLVNINSTDIADGRPSIVLGLMWTIILYFQIEELTSNLPQLQSLSSSASSVDSIVSSETPSPPSKRKVTTKIQGNAKKALLKWVQYTAGKQTGIEVKDFGKSWRSGVAFHSVIHAIRPELVDLETVKGRSNRENLEDAFTIAETELGIPRLLDPEDVDVDKPDEKSIMTYVAQFLKHYPDIHNASTDGQEDDEILPGFPSFANSVQNFKREDRVIFKEMKVWIEQFERDLTRAQMVESNLQDKYQSFKHFRVQYEMKRKQIEHLIQPLHRDGKLSLDQALVKQSWDRVTSRLFDWHIQLDKSLPAPLGTIGAWLYRAEVALREEITVQQVHEETANTIQRKLEQHKDLLQNTDAHKRAFHEIYRTRSVNGIPVPPDQLEDMAERFHFVSSTSELHLMKMEFLELKYRLLSLLVLAESKLKSWIIKYGRRESVEQLLQNYVSFIENSKFFEQYEVTYQILKQTAEMYVKADGSVEEAENVMKFMNETTAQWRNLSVEVRSVRSMLEEVISNWDRYGNTVASLQAWLEDAEKMLNQSENAKKDFFRNLPHWIQQHTAMNDAGNFLIETCDEMVSRDLKQQLLLLNGRWRELFMEVKQYAQADEMDRMKKEYTDCVVTLSAFATEAHKKLSEPLEVSFMNVKLLIQDLEDIEQRVPVMDAQYKIITKTAHLITKESPQEEGKEMFATMSKLKEQLTKVKECYSPLLYESQQLLIPLEELEKQMTSFYDSLGKINEIITVLEREAQSSALFKQKHQELLACQENCKKTLTLIEKGSQSVQKFVTLSNVLKHFDQTRLQRQIADIHVAFQSMVKKTGDWKKHVETNSRLMKKFEESRAELEKVLRIAQEGLEEKGDPEELLRRHTEFFSQLDQRVLNAFLKACDELTDILPEQEQQGLQEAVRKLHKQWKDLQGEAPYHLLHLKIDVEKNRFLASVEECRTELDRETKLMPQEGSEKIIKEHRVFFSDKGPHHLCEKRLQLIEELCVKLPVRDPVRDTPGTCHVTLKELRAAIDSTYRKLMEDPDKWKDYTSRFSEFSSWISTNETQLKGIKGEAIDTANHGEVKRAVEEIRNGVTKRGETLSWLKSRLKVLTEVSSENEAQKQGDELAKLSSSFKALVTLLSEVEKMLSNFGDCVQYKEIVKNSLEELISGSKEVQEQAEKILDTENLFEAQQLLLHHQQKTKRISAKKRDVQQQIAQAQQGEGGLPDRGHEELRKLESTLDGLERSRERQERRIQVTLRKWERFETNKETVVRYLFQTGSSHERFLSFSSLESLSSELEQTKEFSKRTESIAVQAENLVKEASEIPLGPQNKQLLQQQAKSIKEQVKKLEDTLEEDIKTMEMVKTKWDHFGSNFETLSVWITEKEKELNALETSSSAMDMQISQIKVTIQEIESKLSSIVGLEEEAQSFAQFVTTGESARIKAKLTQIRRYGEELREHAQCLEGTILGHLSQQQKFEENLRKIQQSVSEFEDKLAVPIKICSSATETYKVLQEHMDLCQALESLSSAITAFSASARKVVNRDSCVQEAAALQQQYEDILRRAKERQTALENLLAHWQRLEKELSSFLTWLERGEAKASSPEMDISADRVKVEGELQLIQASSRKFVSQASFYSKLLQLKESLFSVASKDDVKMMKLHLEQLDERWRDLPQIINKRINFLQSVVAEHQQFDELLLSFSVWIKLFLSELQTTSEISIMDHQVALTRHKDHAAEVESKKGELQSLQGHLAKLGSLGRAEDLHLLQGKAEDCFQLFEEASQVVERRQLALSHLAEFLQSHASLSGILRQLRQTVEATNSMNKNESDLIEKDLNDALQNAKALESAAVSLDGILSKAQYHLKIGSSEQRTSCRATADQLCGEVERIQNLLGTKQSEADALAVLKKAFQDQKEELLKSIEDIEERTDKERLKEPTRQALQQRLRVFNQLEDELNSHEHELCWLKDKAKQIAQKDVAFAPEVDREINRLEVTWDDTKRLIHENQGQCCGLIDLMREYQNLKSAVSKVLENASSVIVTRTTIKDQEDLKWAFSKHETAKNKMNYKQKDLDNFTSKGKHLLSELKKIHSSDFSLVKTDMESTVDKWLDVSEKLEENMDRLRVSLSIWDDVLSTRDEIEGWSNNCVPQMAENISNLDNHLRAEELLKEFESEVKNKALRLEELHSKVNDLKELTKNLETPPDLQFIEADLMQKLEHAKEITEVAKGTLKDFTAQSTQVEKFINDITTWFTKVEESLMNCAQNETCEALKKVKDIQKELQSQQSNISSTQENLNSLCRKYHSAELESLGRAMTGLIKKHEAVSQLCSKTQASLQESLEKHFSESMQEFQEWFLGAKAAAKESSDRTGDSKVLEAKLHDLQNILDSVSDGQSKLDAVTQEGQTLYAHLSKQIVSSIQEQITKANEEFQAFLKQCLKDKQALQDCASELGSFEDQHRKLNLWIHEMEERFNTENLGESKQHIPEKKNEVHKVEMFLGELLAARESLDKLSQRGQLLSEEGHGAGQEGRLCSQLLTSHQNLLRMTKEKLRSCQVALQEHEALEEALQSMWFWVKAIQDRLACAESTLGSKDTLEKRLSQIQDILLMKGEGEVKLNMAIGKGEQALRSSNKEGQRVIQTQLETLKEVWADIMSSSVHAQSTLESVISQWNDYVERKNQLEQWMESVDQKIEHPLQPQPGLKEKFVLLDHLQSILSEAEDHTRALHRLIAKSRELYEKTEDESFKDTAQEELKTQFNDIMTVAKEKMRKVEEIVKDHLMYLDAVHEFTDWLHSAKEELHRWSDMSGDSSATQKKLSKIKELIDSREIGASRLSRVESLAPEVKQNTTASGCELMHTEMQALRADWKQWEDSVFQTQSCLENLVSQMALSEQEFSGQVAQLEQALEQFSALLKTWAQQLTLLEGKNTDEEIVECWHKGQEILDALQKAEPRTEDLKSQLNELCRFSRDLSTYSGKVSGLIKEYNCLCLQASKGCQNKEQILQQRFRKAFRDFQQWLVNAKITTAKCFDIPQNISEVSTSLQKIQEFLSESENGQHKLNMMLSKGELLSTLLTKEKAKGIQAKVTAAKEDWKNFHSNLHQKESALENLKIQMKDFEVSAEPIQDWLSKTEKMVHESSNRLYDLPAKRREQQKLQSVLEEIHCYEPQLNRLKEKAQQLWEGQAASKSFRHRVSQLSSQYLALSNLTKEKVSRLDRIVAEHNQFSLGIKELQDWMTDAIHMLDSYCHPTSDKSVLDSRTLKLEALLSVKQEKEIQMKMIVTRGESVLQNTSPEGIPTIQQQLQSVKDMWASLLSAGIRCKSQLEGALSKWTSYQDGVRQFSGWMDSMEANLNESERQHAELRDKTTMLGKAKLLNEEVLSYSSLLETIEVKGAGMTEHYVTQLELQDLQERYRAIQERAKEAVTKSEKLVRLHQEYQRDLKAFEVWLGQEQEKLDQYSVLEGDAHTHETTLRDLQELQVHCAEGQALLNSVLHTREDVIPSGIPQAEDRALESLRQDWQAYQHRLSETRTQFNNVVNKLRLMEQKFQQVDEWLKTAEEKKWHEEVTAYRDEVEEVGARAQEILDESHVNSRMGCQATQLTSRYQALLLQVLEQIKFLEEEIQSLEESESSLSSYSDWYGSTHKNFKNVATKIDKVDTVMMGKKLKTLEVLLKDMEKGHSLLKSAREKGERAVKYLEEGEAERLRKEIHDHMEQLKELTSTVRKEHMTLEKGLHLAKEFSDKCKALTQWIAEYQEILHVPEEPKMELYEKKAQLSKYKSLQQTVLSHEPSVKSVREKGEALLELVQDVTLKDKIDQLQSDYQDLCSIGKAMMEEIAGFEDRLNNLQMKGDTLIGQCADHLQAKLKQNVHAHLQGTKDSYSAICSTAQRMYQSLEHELQKHVSRQDTLQQCQAWLSAVQPDLEPSPQPPLSRAEAIKQVKHFRALQEQARTYLDLLCSMCDLSNASVKTTAKDIQQTEQTIEQKLVQAQNLTQGWEEIKHLKSELWIYLQDADQQLQNMKRRHSELELNIAQNMVSQVKDFVKKLQSKQASVNTIIEKVNKLTKKEESPEHKEINHLNDQWLDLCRQSNNLCLQREEDLQRTRDYHDCMNVVEVFLEKFTTEWDNLARSDAESTAVHLEALKKLALALQERKYAIEDLKDQKQKMIEHLNLDDKELVKEQTSHLEQRWFQLEDLIKRKIQVSVTNLEELNVVQSRFQELMEWAEEQQPNIAEALKQSPPPDMAQNLLMDHLAICSELEAKQMLLKSLIKDADRVMADLGLNERQVIQKALSDAQSHVNCLSDLVGQRRKYLNKALSEKTQFLMAVFQATSQIQQHERKIMFREHICLLPDDVSKQVKTCKSAQASLKTYQNEVTGLWAQGRELMKEVTEQEKSEVLGKLQELQSVYDSVLQKCSHRLQELEKNLVSRKHFKEDFDKACHWLKQADIVTFPEINLMNESSELHTQLAKYQNILEQSPEYENLLLTLQRTGQTILPSLNEVDHSYLSEKLNALPRQFNVIVALAKDKFYKVQEAILARKEYASLIELTTQSLSELEAQFLRMSKVPTDLAVEEALSLQDGCRAILDEVAGLGEAVDELNQKKEGFRSTGQPWQPDKMLHLVTLYHRLKRQTEQRVSLLEDTTSAYQEHEKMCQQLERQLKSVKEEQSKVNEETLPAEEKLKMYHSLAGSLQDSGIVLKRVTIHLEDLAPHLDPLAYEKARHQIQSWQGELKLLTSAIGETVTECESRMVQSIDFQTEMSRSLDWLRRVKAELSGPVYLDLNLQDIQEEIRKIQIHQEEVQSSLRIMNALSHKEKEKFTKAKELISADLEHSLAELSELDGDIQEALRTRQATLTEIYSQCQRYYQVFQAANDWLEDAQELLQLAGNGLDVESAEENLKSHMEFFSTEDQFHSNLEELHSLVATLDPLIKPTGKEDLEQKVASLELRSQRMSRDSGAQVDLLQRCTAQWHDYQKAREEVIELMNDTEKKLSEFSLLKTSSSHEAEEKLSEHKALVSVVNSFHEKIVALEEKASQLEKTGNDASKATLSRSMTTVWQRWTRLRAVAQDQEKILEDAVDEWTGFNNKVKKATEMIDQLQDKLPGSSAEKASKAELLTLLEYHDTFVLELEQQQSALGMLRQQTLSMLQDGAAPTPGEEPPLMQEITAMQDRCLNMQEKVKTNGKLVKQELKDREMVETQINSVKCWVQETKEYLGNPTIEIDAQLEELQILLTEATNHRQNIEKMAEEQKEKYLGLYTILPSELSLQLAEVALDLKIRDQIQDKIKEVEQSKATSQELSRQIQKLAKDLTTILTKLKAKTDNVVQAKTDQKVLGEELDGCNSKLMELDAAVQKFLEQNGQLGKPLAKKIGKLTELHQQTIRQAENRLSKLNQAASHLEEYNEMLELILKWIEKAKVLAHGTIAWNSASQLREQYILHQTLLEESKEIDSELEAMTEKLQYLTSVYCTEKMSQQVAELGRETEELRQMIKIRLQNLQDAAKDMKKFEAELKKLQAALEQAQATLTSPEVGRLSLKEQLSHRQHLLSEMESLKPKVQAVQLCQSALRIPEDVVASLPLCHAALRLQEEASRLQHTAIQQCNIMQAAVVQYEQYEQEMKHLQQLIEGAHREIEDKPVATSNIQELQAQISRHEELAQKIKGYQEQIASLNSKCKMLTMKAKHATMLLTVTEVEGLAEGTEDLDGELLPTPSAHPSVVMMTAGRCHTLLSPVTEESGEEGTNSEISSPPACRSPSPVANTDASVNQDIAYYQALSAERLQTDAAKIHPSTSASQEFYEPGLEPSATAKLGDLQRSWETLKNVISEKQRTLYEALERQQKYQDSLQSISTKMEAIELKLSESPEPGRSPESQMAEHQALMDEILMLQDEINELQSSLAEELVSESCEADPAEQLALQSTLTVLAERMSTIRMKASGKRQLLEEKLNDQLEEQRQEQALQRYRCEADELDSWLLSTKATLDTALSPPKEPMDMEAQLMDCQNMLVEIEQKVVALSELSVHNENLLLEGKAHTKDEAEQLAGKLRRLKGSLLELQRALHDKQLNMQGTAQEKEESDVDLTATQSPGVQEWLAQARTTWTQQRQSSLQQQKELEQELAEQKSLLRSVASRGEEILIQHSAAETSGDAGEKPDVLSQELGMEGEKSSAEDQMRMKWESLHQEFSTKQKLLQNVLEQEQEQVLYSRPNRLLSGVPLYKGDVPTQDKSAVTSLLDGLNQAFEEVSSQSGGAKRQSIHLEQKLYDGVSATSTWLDDVEERLFVATALLPEETETCLFNQEILAKDIKEMSEEMDKNKNLFSQAFPENGDNRDVIEDTLGCLLGRLSLLDSVVNQRCHQMKERLQQILNFQNDLKVLFTSLADNKYIILQKLANVFEQPVAEQIEAIQQAEDGLKEFDAGIIELKRRGDKLQVEQPSMQELSKLQDMYDELMMIIGSRRSGLNQNLTLKSQYERALQDLADLLETGQEKMAGDQKIIVSSKEEIQQLLDKHKEYFQGLESHMILTETLFRKIISFAVQKETQFHTELMAQASAVLKRAHKRGVELEYILETWSHLDEDQQELSRQLEVVESSIPSVGLVEENEDRLIDRITLYQHLKSSLNEYQPKLYQVLDDGKRLLISISCSDLESQLNQLGECWLSNTNKMSKELHRLETILKHWTRYQSESADLIHWLQSAKDRLEFWTQQSVTVPQELEMVRDHLNAFLEFSKEVDAQSSLKSSVLSTGNQLLRLKKVDTATLRSELSRIDSQWTDLLTNIPAVQEKLHQLQMDKLPSRHAISEVMSWISLMENVIQKDEDNIKNSIGYKAIHEYLQKYKGFKIDINCKQLTVDFVNQSVLQISSQDVESKRSDKTDFAEQLGAMNKSWQILQGLVTEKIQLLEGLLESWSEYENNVQCLKTWFETQEKRLKQQHRIGDQASVQNALKDCQDLEDLIKAKEKEVEKIEQNGLALIQNKKEDVSSIVMSTLRELGQTWANLDHMVGQLKILLKSVLDQWSSHKVAFDKINSYLMEARYSLSRFRLLTGSLEAVQVQVDNLQNLQDDLEKQERSLQKFGSITNQLLKECHPPVTETLTNTLKEVNMRWNNLLEEIAEQLQSSKALLQLWQRYKDYSKQCASTVQQQEDRTNELLKAATNKDIADDEVATWIQDCNDLLKGLGTVKDSLFFLHELGEQLKQQVDASAASAIQSDQLSLSQHLCALEQALCKQQTSLQAGVLDYETFAKSLEALEAWIVEAEEILQGQDPSHSSDLSTIQERMEELKGQMLKFSSMAPDLDRLNELGYRLPLNDKEIKRMQNLNRHWSLISSQTTERFSKLQSFLLQHQTFLEKCETWMEFLVQTEQKLAVEISGNYQHLLEQQRAHELFQAEMFSRQQILHSIIIDGQRLLEQGQVDDRDEFNLKLTLLSNQWQGVIRRAQQRRGIIDSQIRQWQRYREMAEKLRKWLVEVSYLPMSGLGSVPIPLQQARTLFDEVQFKEKVFLRQQGSYILTVEAGKQLLLSADSGAEAALQAELAEIQEKWKSASMRLEEQKKKLAFLLKDWEKCEKGIADSLEKLRTFKKKLSQSLPDHHEELHAEQMRCKELENAVGSWTDDLTQLSLLKDTLSAYISADDISILNERVELLQRQWEELCHQLSLRRQQIGERLNEWAVFSEKNKELCEWLTQMESKVSQNGDILIEEMIEKLKKDYQEEIAIAQENKIQLQQMGERLAKASHESKASEIEYKLGKVNDRWQHLLDLIAARVKKLKETLVAVQQLDKNMSSLRTWLAHIESELAKPIVYDSCNSEEIQRKLNEQQELQRDIEKHSTGVASVLNLCEVLLHDCDACATDAECDSIQQATRNLDRRWRNICAMSMERRLKIEETWRLWQKFLDDYSRFEDWLKSSERTAAFPSSSGVIYTVAKEELKKFEAFQRQVHECLTQLELINKQYRRLARENRTDSACSLKQMVHEGNQRWDNLQKRVTSILRRLKHFIGQREEFETARDSILVWLTEMDLQLTNIEHFSECDVQAKIKQLKAFQQEISLNHNKIEQIIAQGEQLIEKSEPLDAAIIEEELDELRRYCQEVFGRVERYHKKLIRLPLPDDEHDLSDRELELEDSAALSDLHWHDRSADSLLSPQPSSNLSLSLAQPLRSERSGRDTPASVDSIPLEWDHDYDLSRDLESAMSRALPSEDEEGQDDKDFYLRGAVGLSDVMIPESPEAYVKLTENAIKNTSGDHSALESQIRQLGKALDDSRFQIQQTENIIRSKTPTGPELDTSYKGYMKLLGECSSSIDSVKRLEHKLKEEEESLPGFVNLHSTETQTAGVIDRWELLQAQALSKELRMKQNLQKWQQFNSDLNSIWAWLGDTEEELEQLQRLELSTDIQTIELQIKKLKELQKAVDHRKAIILSINLCSPEFTQADSKESRDLQDRLSQMNGRWDRVCSLLEEWRGLLQDALMQCQGFHEMSHGLLLMLENIDRRKNEIVPIDSNLDAEILQDHHKQLMQIKHELLESQLRVASLQDMSCQLLVNAEGTDCLEAKEKVHVIGNRLKLLLKEVSRHIKELEKLLDVSSSQQDLSSWSSADELDTSGSVSPTSGRSTPNRQKTPRGKCSLSQPGPSVSSPHSRSTKGGSDSSLSEPGPGRSGRGFLFRVLRAALPLQLLLLLLIGLACLVPMSEEDYSCALSNNFARSFHPMLRYTNGPPPL

SEQ ID NO: 226971 - DNA, 26250 bp, Artificial Sequence
  derived and/or modified sequence
atggccaccagcagaggcgccagcagatgccccagagacatcgccaacgtgatgcagagactgcaggacgagcaggagatcgtgcagaagagaaccttcaccaagtggatcaacagccacctggccaagagaaagccccccatggtggtggacgacctgttcgaggacatgaaggacggcgtgaagctgctggccctgctggaggtgctgagcggccagaagctgccctgcgagcagggcagaagaatgaagagaatccacgccgtggccaacatcggcaccgccctgaagttcctggagggcagaaagagcatgcacagaggcagccccatcaagctggtgaacatcaacagcaccgacatcgccgacggcagacccagcatcgtgctgggcctgatgtggaccatcatcctgtacttccagatcgaggagctgaccagcaacctgccccagctgcagagcctgagcagcagcgccagcagcgtggacagcatcgtgagcagcgagacccccagcccccccagcaagagaaaggtgaccaccaagatccagggcaacgccaagaaggccctgctgaagtgggtgcagtacaccgccggcaagcagaccggcatcgaggtgaaggacttcggcaagagctggagaagcggcgtggccttccacagcgtgatccacgccatcagacccgagctggtggacctggagaccgtgaagggcagaagcaacagagagaacctggaggacgccttcaccatcgccgagaccgagctgggcatccccagactgctggaccccgaggacgtggacgtggacaagcccgacgagaagagcatcatgacctacgtggcccagttcctgaagcactaccccgacatccacaacgccagcaccgacggccaggaggacgacgagatcctgcccggcttccccagcttcgccaacagcgtgcagaacttcaagagagaggacagagtgatcttcaaggagatgaaggtgtggatcgagcagttcgagagagacctgaccagagcccagatggtggagagcaacctgcaggacaagtaccagagcttcaagcacttcagagtgcagtacgagatgaagagaaagcagatcgagcacctgatccagcccctgcacagagacggcaagctgagcctggaccaggccctggtgaagcagagctgggacagagtgaccagcagactgttcgactggcacatccagctggacaagagcctgcccgcccccctgggcaccatcggcgcctggctgtacagagccgaggtggccctgagagaggagatcaccgtgcagcaggtgcacgaggagaccgccaacaccatccagagaaagctggagcagcacaaggacctgctgcagaacaccgacgcccacaagagagccttccacgagatctacagaaccagaagcgtgaacggcatccccgtgccccccgaccagctggaggacatggccgagagattccacttcgtgagcagcaccagcgagctgcacctgatgaagatggagttcctggagctgaagtacagactgctgagcctgctggtgctggccgagagcaagctgaagagctggatcatcaagtacggcagaagagagagcgtggagcagctgctgcagaactacgtgagcttcatcgagaacagcaagttcttcgagcagtacgaggtgacctaccagatcctgaagcagaccgccgagatgtacgtgaaggccgacggcagcgtggaggaggccgagaacgtgatgaagttcatgaacgagaccaccgcccagtggagaaacctgagcgtggaggtgagaagcgtgagaagcatgctggaggaggtgatcagcaactgggacagatacggcaacaccgtggccagcctgcaggcctggctggaggacgccgagaagatgctgaaccagagcgagaacgccaagaaggacttcttcagaaacctgccccactggatccagcagcacaccgccatgaacgacgccggcaacttcctgatcgagacctgcgacgagatggtgagcagagacctgaagcagcagctgctgctgctgaacggcagatggagagagctgttcatggaggtgaagcagtacgcccaggccgacgagatggacagaatgaagaaggagtacaccgactgcgtggtgaccctgagcgccttcgccaccgaggcccacaagaagctgagcgagcccctggaggtgagcttcatgaacgtgaagctgctgatccaggacctggaggacatcgagcagagagtgcccgtgatggacgcccagtacaagatcatcaccaagaccgcccacctgatcaccaaggagagcccccaggaggagggcaaggagatgttcgccaccatgagcaagctgaaggagcagctgaccaaggtgaaggagtgctacagccccctgctgtacgagagccagcagctgctgatccccctggaggagctggagaagcagatgaccagcttctacgacagcctgggcaagatcaacgagatcatcaccgtgctggagagagaggcccagagcagcgccctgttcaagcagaagcaccaggagctgctggcctgccaggagaactgcaagaagaccctgaccctgatcgagaagggcagccagagcgtgcagaagttcgtgaccctgagcaacgtgctgaagcacttcgaccagaccagactgcagagacagatcgccgacatccacgtggccttccagagcatggtgaagaagaccggcgactggaagaagcacgtggagaccaacagcagactgatgaagaagttcgaggagagcagagccgagctggagaaggtgctgagaatcgcccaggagggcctggaggagaagggcgaccccgaggagctgctgagaagacacaccgagttcttcagccagctggaccagagagtgctgaacgccttcctgaaggcctgcgacgagctgaccgacatcctgcccgagcaggagcagcagggcctgcaggaggccgtgagaaagctgcacaagcagtggaaggacctgcagggcgaggccccctaccacctgctgcacctgaagatcgacgtggagaagaacagattcctggccagcgtggaggagtgcagaaccgagctggacagagagaccaagctgatgccccaggagggcagcgagaagatcatcaaggagcacagagtgttcttcagcgacaagggcccccaccacctgtgcgagaagagactgcagctgatcgaggagctgtgcgtgaagctgcccgtgagagaccccgtgagagacacccccggcacctgccacgtgaccctgaaggagctgagagccgccatcgacagcacctacagaaagctgatggaggaccccgacaagtggaaggactacaccagcagattcagcgagttcagcagctggatcagcaccaacgagacccagctgaagggcatcaagggcgaggccatcgacaccgccaaccacggcgaggtgaagagagccgtggaggagatcagaaacggcgtgaccaagagaggcgagaccctgagctggctgaagagcagactgaaggtgctgaccgaggtgagcagcgagaacgaggcccagaagcagggcgacgagctggccaagctgagcagcagcttcaaggccctggtgaccctgctgagcgaggtggagaagatgctgagcaacttcggcgactgcgtgcagtacaaggagatcgtgaagaacagcctggaggagctgatcagcggcagcaaggaggtgcaggagcaggccgagaagatcctggacaccgagaacctgttcgaggcccagcagctgctgctgcaccaccagcagaagaccaagagaatcagcgccaagaagagagacgtgcagcagcagatcgcccaggcccagcagggcgagggcggcctgcccgacagaggccacgaggagctgagaaagctggagagcaccctggacggcctggagagaagcagagagagacaggagagaagaatccaggtgaccctgagaaagtgggagagattcgagaccaacaaggagaccgtggtgagatacctgttccagaccggcagcagccacgagagattcctgagcttcagcagcctggagagcctgagcagcgagctggagcagaccaaggagttcagcaagagaaccgagagcatcgccgtgcaggccgagaacctggtgaaggaggccagcgagatccccctgggcccccagaacaagcagctgctgcagcagcaggccaagagcatcaaggagcaggtgaagaagctggaggacaccctggaggaggacatcaagaccatggagatggtgaagaccaagtgggaccacttcggcagcaacttcgagaccctgagcgtgtggatcaccgagaaggagaaggagctgaacgccctggagaccagcagcagcgccatggacatgcagatcagccagatcaaggtgaccatccaggagatcgagagcaagctgagcagcatcgtgggcctggaggaggaggcccagagcttcgcccagttcgtgaccaccggcgagagcgccagaatcaaggccaagctgacccagatcagaagatacggcgaggagctgagagagcacgcccagtgcctggagggcaccatcctgggccacctgagccagcagcagaagttcgaggagaacctgagaaagatccagcagagcgtgagcgagttcgaggacaagctggccgtgcccatcaagatctgcagcagcgccaccgagacctacaaggtgctgcaggagcacatggacctgtgccaggccctggagagcctgagcagcgccatcaccgccttcagcgccagcgccagaaaggtggtgaacagagacagctgcgtgcaggaggccgccgccctgcagcagcagtacgaggacatcctgagaagagccaaggagagacagaccgccctggagaacctgctggcccactggcagagactggagaaggagctgagcagcttcctgacctggctggagagaggcgaggccaaggccagcagccccgagatggacatcagcgccgacagagtgaaggtggagggcgagctgcagctgatccaggccctgcagaacgaggtggtgagccaggccagcttctacagcaagctgctgcagctgaaggagagcctgttcagcgtggccagcaaggacgacgtgaagatgatgaagctgcacctggagcagctggacgagagatggagagacctgccccagatcatcaacaagagaatcaacttcctgcagagcgtggtggccgagcaccagcagttcgacgagctgctgctgagcttcagcgtgtggatcaagctgttcctgagcgagctgcagaccaccagcgagatcagcatcatggaccaccaggtggccctgaccagacacaaggaccacgccgccgaggtggagagcaagaagggcgagctgcagagcctgcagggccacctggccaagctgggcagcctgggcagagccgaggacctgcacctgctgcagggcaaggccgaggactgcttccagctgttcgaggaggccagccaggtggtggagagaagacagctggccctgagccacctggccgagttcctgcagagccacgccagcctgagcggcatcctgagacagctgagacagaccgtggaggccaccaacagcatgaacaagaacgagagcgacctgatcgagaaggacctgaacgacgccctgcagaacgccaaggccctggagagcgccgccgtgagcctggacggcatcctgagcaaggcccagtaccacctgaagatcggcagcagcgagcagagaaccagctgcagagccaccgccgaccagctgtgcggcgaggtggagagaatccagaacctgctgggcaccaagcagagcgaggccgacgccctggccgtgctgaagaaggccttccaggaccagaaggaggagctgctgaagagcatcgaggacatcgaggagagaaccgacaaggagagactgaaggagcccaccagacaggccctgcagcagagactgagagtgttcaaccagctggaggacgagctgaacagccacgagcacgagctgtgctggctgaaggacaaggccaagcagatcgcccagaaggacgtggccttcgcccccgaggtggacagagagatcaacagactggaggtgacctgggacgacaccaagagactgatccacgagaaccagggccagtgctgcggcctgatcgacctgatgagagagtaccagaacctgaagagcgccgtgagcaaggtgctggagaacgccagcagcgtgatcgtgaccagaaccaccatcaaggaccaggaggacctgaagtgggccttcagcaagcacgagaccgccaagaacaagatgaactacaagcagaaggacctggacaacttcaccagcaagggcaagcacctgctgagcgagctgaagaagatccacagcagcgacttcagcctggtgaagaccgacatggagagcaccgtggacaagtggctggacgtgagcgagaagctggaggagaacatggacagactgagagtgagcctgagcatctgggacgacgtgctgagcaccagagacgagatcgagggctggagcaacaactgcgtgccccagatggccgagaacatcagcaacctggacaaccacctgagagccgaggagctgctgaaggagttcgagagcgaggtgaagaacaaggccctgagactggaggagctgcacagcaaggtgaacgacctgaaggagctgaccaagaacctggagaccccccccgacctgcagttcatcgaggccgacctgatgcagaagctggagcacgccaaggagatcaccgaggtggccaagggcaccctgaaggacttcaccgcccagagcacccaggtggagaagttcatcaacgacatcaccacctggttcaccaaggtggaggagagcctgatgaactgcgcccagaacgagacctgcgaggccctgaagaaggtgaaggacatccagaaggagctgcagagccagcagagcaacatcagcagcacccaggagaacctgaacagcctgtgcagaaagtaccacagcgccgagctggagagcctgggcagagccatgaccggcctgatcaagaagcacgaggccgtgagccagctgtgcagcaagacccaggccagcctgcaggagagcctggagaagcacttcagcgagagcatgcaggagttccaggagtggttcctgggcgccaaggccgccgccaaggagagcagcgacagaaccggcgacagcaaggtgctggaggccaagctgcacgacctgcagaacatcctggacagcgtgagcgacggccagagcaagctggacgccgtgacccaggagggccagaccctgtacgcccacctgagcaagcagatcgtgagcagcatccaggagcagatcaccaaggccaacgaggagttccaggccttcctgaagcagtgcctgaaggacaagcaggccctgcaggactgcgccagcgagctgggcagcttcgaggaccagcacagaaagctgaacctgtggatccacgagatggaggagagattcaacaccgagaacctgggcgagagcaagcagcacatccccgagaagaagaacgaggtgcacaaggtggagatgttcctgggcgagctgctggccgccagagagagcctggacaagctgagccagagaggccagctgctgagcgaggagggccacggcgccggccaggagggcagactgtgcagccagctgctgaccagccaccagaacctgctgagaatgaccaaggagaagctgagaagctgccaggtggccctgcaggagcacgaggccctggaggaggccctgcagagcatgtggttctgggtgaaggccatccaggacagactggcctgcgccgagagcaccctgggcagcaaggacaccctggagaagagactgagccagatccaggacatcctgctgatgaagggcgagggcgaggtgaagctgaacatggccatcggcaagggcgagcaggccctgagaagcagcaacaaggagggccagagagtgatccagacccagctggagaccctgaaggaggtgtgggccgacatcatgagcagcagcgtgcacgcccagagcaccctggagagcgtgatcagccagtggaacgactacgtggagagaaagaaccagctggagcagtggatggagagcgtggaccagaagatcgagcaccccctgcagccccagcccggcctgaaggagaagttcgtgctgctggaccacctgcagagcatcctgagcgaggccgaggaccacaccagagccctgcacagactgatcgccaagagcagagagctgtacgagaagaccgaggacgagagcttcaaggacaccgcccaggaggagctgaagacccagttcaacgacatcatgaccgtggccaaggagaagatgagaaaggtggaggagatcgtgaaggaccacctgatgtacctggacgccgtgcacgagttcaccgactggctgcacagcgccaaggaggagctgcacagatggagcgacatgagcggcgacagcagcgccacccagaagaagctgagcaagatcaaggagctgatcgacagcagagagatcggcgccagcagactgagcagagtggagagcctggcccccgaggtgaagcagaacaccaccgccagcggctgcgagctgatgcacaccgagatgcaggccctgagagccgactggaagcagtgggaggacagcgtgttccagacccagagctgcctggagaacctggtgagccagatggccctgagcgagcaggagttcagcggccaggtggcccagctggagcaggccctggagcagttcagcgccctgctgaagacctgggcccagcagctgaccctgctggagggcaagaacaccgacgaggagatcgtggagtgctggcacaagggccaggagatcctggacgccctgcagaaggccgagcccagaaccgaggacctgaagagccagctgaacgagctgtgcagattcagcagagacctgagcacctacagcggcaaggtgagcggcctgatcaaggagtacaactgcctgtgcctgcaggccagcaagggctgccagaacaaggagcagatcctgcagcagagattcagaaaggccttcagagacttccagcagtggctggtgaacgccaagatcaccaccgccaagtgcttcgacatcccccagaacatcagcgaggtgagcaccagcctgcagaagatccaggagttcctgagcgagagcgagaacggccagcacaagctgaacatgatgctgagcaagggcgagctgctgagcaccctgctgaccaaggagaaggccaagggcatccaggccaaggtgaccgccgccaaggaggactggaagaacttccacagcaacctgcaccagaaggagagcgccctggagaacctgaagatccagatgaaggacttcgaggtgagcgccgagcccatccaggactggctgagcaagaccgagaagatggtgcacgagagcagcaacagactgtacgacctgcccgccaagagaagagagcagcagaagctgcagagcgtgctggaggagatccactgctacgagccccagctgaacagactgaaggagaaggcccagcagctgtgggagggccaggccgccagcaagagcttcagacacagagtgagccagctgagcagccagtacctggccctgagcaacctgaccaaggagaaggtgagcagactggacagaatcgtggccgagcacaaccagttcagcctgggcatcaaggagctgcaggactggatgaccgacgccatccacatgctggacagctactgccaccccaccagcgacaagagcgtgctggacagcagaaccctgaagctggaggccctgctgagcgtgaagcaggagaaggagatccagatgaagatgatcgtgaccagaggcgagagcgtgctgcagaacaccagccccgagggcatccccaccatccagcagcagctgcagagcgtgaaggacatgtgggccagcctgctgagcgccggcatcagatgcaagagccagctggagggcgccctgagcaagtggaccagctaccaggacggcgtgagacagttcagcggctggatggacagcatggaggccaacctgaacgagagcgagagacagcacgccgagctgagagacaagaccaccatgctgggcaaggccaagctgctgaacgaggaggtgctgagctacagcagcctgctggagaccatcgaggtgaagggcgccggcatgaccgagcactacgtgacccagctggagctgcaggacctgcaggagagatacagagccatccaggagagagccaaggaggccgtgaccaagagcgagaagctggtgagactgcaccaggagtaccagagagacctgaaggccttcgaggtgtggctgggccaggagcaggagaagctggaccagtacagcgtgctggagggcgacgcccacacccacgagaccaccctgagagacctgcaggagctgcaggtgcactgcgccgagggccaggccctgctgaacagcgtgctgcacaccagagaggacgtgatccccagcggcatcccccaggccgaggacagagccctggagagcctgagacaggactggcaggcctaccagcacagactgagcgagaccagaacccagttcaacaacgtggtgaacaagctgagactgatggagcagaagttccagcaggtggacgagtggctgaagaccgccgaggagaagaagtggcacgaggaggtgaccgcctacagagacgaggtggaggaggtgggcgccagagcccaggagatcctggacgagagccacgtgaacagcagaatgggctgccaggccacccagctgaccagcagataccaggccctgctgctgcaggtgctggagcagatcaagttcctggaggaggagatccagagcctggaggagagcgagagcagcctgagcagctacagcgactggtacggcagcacccacaagaacttcaagaacgtggccaccaagatcgacaaggtggacaccgtgatgatgggcaagaagctgaagaccctggaggtgctgctgaaggacatggagaagggccacagcctgctgaagagcgccagagagaagggcgagagagccgtgaagtacctggaggagggcgaggccgagagactgagaaaggagatccacgaccacatggagcagctgaaggagctgaccagcaccgtgagaaaggagcacatgaccctggagaagggcctgcacctggccaaggagttcagcgacaagtgcaaggccctgacccagtggatcgccgagtaccaggagatcctgcacgtgcccgaggagcccaagatggagctgtacgagaagaaggcccagctgagcaagtacaagagcctgcagcagaccgtgctgagccacgagcccagcgtgaagagcgtgagagagaagggcgaggccctgctggagctggtgcaggacgtgaccctgaaggacaagatcgaccagctgcagagcgactaccaggacctgtgcagcatcggcaaggccatgatggaggagatcgccggcttcgaggacagactgaacaacctgcagatgaagggcgacaccctgatcggccagtgcgccgaccacctgcaggccaagctgaagcagaacgtgcacgcccacctgcagggcaccaaggacagctacagcgccatctgcagcaccgcccagagaatgtaccagagcctggagcacgagctgcagaagcacgtgagcagacaggacaccctgcagcagtgccaggcctggctgagcgccgtgcagcccgacctggagcccagcccccagccccccctgagcagagccgaggccatcaagcaggtgaagcacttcagagccctgcaggagcaggccagaacctacctggacctgctgtgcagcatgtgcgacctgagcaacgccagcgtgaagaccaccgccaaggacatccagcagaccgagcagaccatcgagcagaagctggtgcaggcccagaacctgacccagggctgggaggagatcaagcacctgaagagcgagctgtggatctacctgcaggacgccgaccagcagctgcagaacatgaagagaagacacagcgagctggagctgaacatcgcccagaacatggtgagccaggtgaaggacttcgtgaagaagctgcagagcaagcaggccagcgtgaacaccatcatcgagaaggtgaacaagctgaccaagaaggaggagagccccgagcacaaggagatcaaccacctgaacgaccagtggctggacctgtgcagacagagcaacaacctgtgcctgcagagagaggaggacctgcagagaaccagagactaccacgactgcatgaacgtggtggaggtgttcctggagaagttcaccaccgagtgggacaacctggccagaagcgacgccgagagcaccgccgtgcacctggaggccctgaagaagctggccctggccctgcaggagagaaagtacgccatcgaggacctgaaggaccagaagcagaagatgatcgagcacctgaacctggacgacaaggagctggtgaaggagcagaccagccacctggagcagagatggttccagctggaggacctgatcaagagaaagatccaggtgagcgtgaccaacctggaggagctgaacgtggtgcagagcagattccaggagctgatggagtgggccgaggagcagcagcccaacatcgccgaggccctgaagcagagccccccccccgacatggcccagaacctgctgatggaccacctggccatctgcagcgagctggaggccaagcagatgctgctgaagagcctgatcaaggacgccgacagagtgatggccgacctgggcctgaacgagagacaggtgatccagaaggccctgagcgacgcccagagccacgtgaactgcctgagcgacctggtgggccagagaagaaagtacctgaacaaggccctgagcgagaagacccagttcctgatggccgtgttccaggccaccagccagatccagcagcacgagagaaagatcatgttcagagagcacatctgcctgctgcccgacgacgtgagcaagcaggtgaagacctgcaagagcgcccaggccagcctgaagacctaccagaacgaggtgaccggcctgtgggcccagggcagagagctgatgaaggaggtgaccgagcaggagaagagcgaggtgctgggcaagctgcaggagctgcagagcgtgtacgacagcgtgctgcagaagtgcagccacagactgcaggagctggagaagaacctggtgagcagaaagcacttcaaggaggacttcgacaaggcctgccactggctgaagcaggccgacatcgtgaccttccccgagatcaacctgatgaacgagagcagcgagctgcacacccagctggccaagtaccagaacatcctggagcagagccccgagtacgagaacctgctgctgaccctgcagagaaccggccagaccatcctgcccagcctgaacgaggtggaccacagctacctgagcgagaagctgaacgccctgcccagacagttcaacgtgatcgtggccctggccaaggacaagttctacaaggtgcaggaggccatcctggccagaaaggagtacgccagcctgatcgagctgaccacccagagcctgagcgagctggaggcccagttcctgagaatgagcaaggtgcccaccgacctggccgtggaggaggccctgagcctgcaggacggctgcagagccatcctggacgaggtggccggcctgggcgaggccgtggacgagctgaaccagaagaaggagggcttcagaagcaccggccagccctggcagcccgacaagatgctgcacctggtgaccctgtaccacagactgaagagacagaccgagcagagagtgagcctgctggaggacaccaccagcgcctaccaggagcacgagaagatgtgccagcagctggagagacagctgaagagcgtgaaggaggagcagagcaaggtgaacgaggagaccctgcccgccgaggagaagctgaagatgtaccacagcctggccggcagcctgcaggacagcggcatcgtgctgaagagagtgaccatccacctggaggacctggccccccacctggaccccctggcctacgagaaggccagacaccagatccagagctggcagggcgagctgaagctgctgaccagcgccatcggcgagaccgtgaccgagtgcgagagcagaatggtgcagagcatcgacttccagaccgagatgagcagaagcctggactggctgagaagagtgaaggccgagctgagcggccccgtgtacctggacctgaacctgcaggacatccaggaggagatcagaaagatccagatccaccaggaggaggtgcagagcagcctgagaatcatgaacgccctgagccacaaggagaaggagaagttcaccaaggccaaggagctgatcagcgccgacctggagcacagcctggccgagctgagcgagctggacggcgacatccaggaggccctgagaaccagacaggccaccctgaccgagatctacagccagtgccagagatactaccaggtgttccaggccgccaacgactggctggaggacgcccaggagctgctgcagctggccggcaacggcctggacgtggagagcgccgaggagaacctgaagagccacatggagttcttcagcaccgaggaccagttccacagcaacctggaggagctgcacagcctggtggccaccctggaccccctgatcaagcccaccggcaaggaggacctggagcagaaggtggccagcctggagctgagaagccagagaatgagcagagacagcggcgcccaggtggacctgctgcagagatgcaccgcccagtggcacgactaccagaaggccagagaggaggtgatcgagctgatgaacgacaccgagaagaagctgagcgagttcagcctgctgaagaccagcagcagccacgaggccgaggagaagctgagcgagcacaaggccctggtgagcgtggtgaacagcttccacgagaagatcgtggccctggaggagaaggccagccagctggagaagaccggcaacgacgccagcaaggccaccctgagcagaagcatgaccaccgtgtggcagagatggaccagactgagagccgtggcccaggaccaggagaagatcctggaggacgccgtggacgagtggaccggcttcaacaacaaggtgaagaaggccaccgagatgatcgaccagctgcaggacaagctgcccggcagcagcgccgagaaggccagcaaggccgagctgctgaccctgctggagtaccacgacaccttcgtgctggagctggagcagcagcagagcgccctgggcatgctgagacagcagaccctgagcatgctgcaggacggcgccgcccccacccccggcgaggagccccccctgatgcaggagatcaccgccatgcaggacagatgcctgaacatgcaggagaaggtgaagaccaacggcaagctggtgaagcaggagctgaaggacagagagatggtggagacccagatcaacagcgtgaagtgctgggtgcaggagaccaaggagtacctgggcaaccccaccatcgagatcgacgcccagctggaggagctgcagatcctgctgaccgaggccaccaaccacagacagaacatcgagaagatggccgaggagcagaaggagaagtacctgggcctgtacaccatcctgcccagcgagctgagcctgcagctggccgaggtggccctggacctgaagatcagagaccagatccaggacaagatcaaggaggtggagcagagcaaggccaccagccaggagctgagcagacagatccagaagctggccaaggacctgaccaccatcctgaccaagctgaaggccaagaccgacaacgtggtgcaggccaagaccgaccagaaggtgctgggcgaggagctggacggctgcaacagcaagctgatggagctggacgccgccgtgcagaagttcctggagcagaacggccagctgggcaagcccctggccaagaagatcggcaagctgaccgagctgcaccagcagaccatcagacaggccgagaacagactgagcaagctgaaccaggccgccagccacctggaggagtacaacgagatgctggagctgatcctgaagtggatcgagaaggccaaggtgctggcccacggcaccatcgcctggaacagcgccagccagctgagagagcagtacatcctgcaccagaccctgctggaggagagcaaggagatcgacagcgagctggaggccatgaccgagaagctgcagtacctgaccagcgtgtactgcaccgagaagatgagccagcaggtggccgagctgggcagagagaccgaggagctgagacagatgatcaagatcagactgcagaacctgcaggacgccgccaaggacatgaagaagttcgaggccgagctgaagaagctgcaggccgccctggagcaggcccaggccaccctgaccagccccgaggtgggcagactgagcctgaaggagcagctgagccacagacagcacctgctgagcgagatggagagcctgaagcccaaggtgcaggccgtgcagctgtgccagagcgccctgagaatccccgaggacgtggtggccagcctgcccctgtgccacgccgccctgagactgcaggaggaggccagcagactgcagcacaccgccatccagcagtgcaacatcatgcaggccgccgtggtgcagtacgagcagtacgagcaggagatgaagcacctgcagcagctgatcgagggcgcccacagagagatcgaggacaagcccgtggccaccagcaacatccaggagctgcaggcccagatcagcagacacgaggagctggcccagaagatcaagggctaccaggagcagatcgccagcctgaacagcaagtgcaagatgctgaccatgaaggccaagcacgccaccatgctgctgaccgtgaccgaggtggagggcctggccgagggcaccgaggacctggacggcgagctgctgcccacccccagcgcccaccccagcgtggtgatgatgaccgccggcagatgccacaccctgctgagccccgtgaccgaggagagcggcgaggagggcaccaacagcgagatcagcagcccccccgcctgcagaagccccagccccgtggccaacaccgacgccagcgtgaaccaggacatcgcctactaccaggccctgagcgccgagagactgcagaccgacgccgccaagatccaccccagcaccagcgccagccaggagttctacgagcccggcctggagcccagcgccaccgccaagctgggcgacctgcagagaagctgggagaccctgaagaacgtgatcagcgagaagcagagaaccctgtacgaggccctggagagacagcagaagtaccaggacagcctgcagagcatcagcaccaagatggaggccatcgagctgaagctgagcgagagccccgagcccggcagaagccccgagagccagatggccgagcaccaggccctgatggacgagatcctgatgctgcaggacgagatcaacgagctgcagagcagcctggccgaggagctggtgagcgagagctgcgaggccgaccccgccgagcagctggccctgcagagcaccctgaccgtgctggccgagagaatgagcaccatcagaatgaaggccagcggcaagagacagctgctggaggagaagctgaacgaccagctggaggagcagagacaggagcaggccctgcagagatacagatgcgaggccgacgagctggacagctggctgctgagcaccaaggccaccctggacaccgccctgagcccccccaaggagcccatggacatggaggcccagctgatggactgccagaacatgctggtggagatcgagcagaaggtggtggccctgagcgagctgagcgtgcacaacgagaacctgctgctggagggcaaggcccacaccaaggacgaggccgagcagctggccggcaagctgagaagactgaagggcagcctgctggagctgcagagagccctgcacgacaagcagctgaacatgcagggcaccgcccaggagaaggaggagagcgacgtggacctgaccgccacccagagccccggcgtgcaggagtggctggcccaggccagaaccacctggacccagcagagacagagcagcctgcagcagcagaaggagctggagcaggagctggccgagcagaagagcctgctgagaagcgtggccagcagaggcgaggagatcctgatccagcacagcgccgccgagaccagcggcgacgccggcgagaagcccgacgtgctgagccaggagctgggcatggagggcgagaagagcagcgccgaggaccagatgagaatgaagtgggagagcctgcaccaggagttcagcaccaagcagaagctgctgcagaacgtgctggagcaggagcaggagcaggtgctgtacagcagacccaacagactgctgagcggcgtgcccctgtacaagggcgacgtgcccacccaggacaagagcgccgtgaccagcctgctggacggcctgaaccaggccttcgaggaggtgagcagccagagcggcggcgccaagagacagagcatccacctggagcagaagctgtacgacggcgtgagcgccaccagcacctggctggacgacgtggaggagagactgttcgtggccaccgccctgctgcccgaggagaccgagacctgcctgttcaaccaggagatcctggccaaggacatcaaggagatgagcgaggagatggacaagaacaagaacctgttcagccaggccttccccgagaacggcgacaacagagacgtgatcgaggacaccctgggctgcctgctgggcagactgagcctgctggacagcgtggtgaaccagagatgccaccagatgaaggagagactgcagcagatcctgaacttccagaacgacctgaaggtgctgttcaccagcctggccgacaacaagtacatcatcctgcagaagctggccaacgtgttcgagcagcccgtggccgagcagatcgaggccatccagcaggccgaggacggcctgaaggagttcgacgccggcatcatcgagctgaagagaagaggcgacaagctgcaggtggagcagcccagcatgcaggagctgagcaagctgcaggacatgtacgacgagctgatgatgatcatcggcagcagaagaagcggcctgaaccagaacctgaccctgaagagccagtacgagagagccctgcaggacctggccgacctgctggagaccggccaggagaagatggccggcgaccagaagatcatcgtgagcagcaaggaggagatccagcagctgctggacaagcacaaggagtacttccagggcctggagagccacatgatcctgaccgagaccctgttcagaaagatcatcagcttcgccgtgcagaaggagacccagttccacaccgagctgatggcccaggccagcgccgtgctgaagagagcccacaagagaggcgtggagctggagtacatcctggagacctggagccacctggacgaggaccagcaggagctgagcagacagctggaggtggtggagagcagcatccccagcgtgggcctggtggaggagaacgaggacagactgatcgacagaatcaccctgtaccagcacctgaagagcagcctgaacgagtaccagcccaagctgtaccaggtgctggacgacggcaagagactgctgatcagcatcagctgcagcgacctggagagccagctgaaccagctgggcgagtgctggctgagcaacaccaacaagatgagcaaggagctgcacagactggagaccatcctgaagcactggaccagataccagagcgagagcgccgacctgatccactggctgcagagcgccaaggacagactggagttctggacccagcagagcgtgaccgtgccccaggagctggagatggtgagagaccacctgaacgccttcctggagttcagcaaggaggtggacgcccagagcagcctgaagagcagcgtgctgagcaccggcaaccagctgctgagactgaagaaggtggacaccgccaccctgagaagcgagctgagcagaatcgacagccagtggaccgacctgctgaccaacatccccgccgtgcaggagaagctgcaccagctgcagatggacaagctgcccagcagacacgccatcagcgaggtgatgagctggatcagcctgatggagaacgtgatccagaaggacgaggacaacatcaagaacagcatcggctacaaggccatccacgagtacctgcagaagtacaagggcttcaagatcgacatcaactgcaagcagctgaccgtggacttcgtgaaccagagcgtgctgcagatcagcagccaggacgtggagagcaagagaagcgacaagaccgacttcgccgagcagctgggcgccatgaacaagagctggcagatcctgcagggcctggtgaccgagaagatccagctgctggagggcctgctggagagctggagcgagtacgagaacaacgtgcagtgcctgaagacctggttcgagacccaggagaagagactgaagcagcagcacagaatcggcgaccaggccagcgtgcagaacgccctgaaggactgccaggacctggaggacctgatcaaggccaaggagaaggaggtggagaagatcgagcagaacggcctggccctgatccagaacaagaaggaggacgtgagcagcatcgtgatgagcaccctgagagagctgggccagacctgggccaacctggaccacatggtgggccagctgaagatcctgctgaagagcgtgctggaccagtggagcagccacaaggtggccttcgacaagatcaacagctacctgatggaggccagatacagcctgagcagattcagactgctgaccggcagcctggaggccgtgcaggtgcaggtggacaacctgcagaacctgcaggacgacctggagaagcaggagagaagcctgcagaagttcggcagcatcaccaaccagctgctgaaggagtgccacccccccgtgaccgagaccctgaccaacaccctgaaggaggtgaacatgagatggaacaacctgctggaggagatcgccgagcagctgcagagcagcaaggccctgctgcagctgtggcagagatacaaggactacagcaagcagtgcgccagcaccgtgcagcagcaggaggacagaaccaacgagctgctgaaggccgccaccaacaaggacatcgccgacgacgaggtggccacctggatccaggactgcaacgacctgctgaagggcctgggcaccgtgaaggacagcctgttcttcctgcacgagctgggcgagcagctgaagcagcaggtggacgccagcgccgccagcgccatccagagcgaccagctgagcctgagccagcacctgtgcgccctggagcaggccctgtgcaagcagcagaccagcctgcaggccggcgtgctggactacgagaccttcgccaagagcctggaggccctggaggcctggatcgtggaggccgaggagatcctgcagggccaggaccccagccacagcagcgacctgagcaccatccaggagagaatggaggagctgaagggccagatgctgaagttcagcagcatggcccccgacctggacagactgaacgagctgggctacagactgcccctgaacgacaaggagatcaagagaatgcagaacctgaacagacactggagcctgatcagcagccagaccaccgagagattcagcaagctgcagagcttcctgctgcagcaccagaccttcctggagaagtgcgagacctggatggagttcctggtgcagaccgagcagaagctggccgtggagatcagcggcaactaccagcacctgctggagcagcagagagcccacgagctgttccaggccgagatgttcagcagacagcagatcctgcacagcatcatcatcgacggccagagactgctggagcagggccaggtggacgacagagacgagttcaacctgaagctgaccctgctgagcaaccagtggcagggcgtgatcagaagagcccagcagagaagaggcatcatcgacagccagatcagacagtggcagagatacagagagatggccgagaagctgagaaagtggctggtggaggtgagctacctgcccatgagcggcctgggcagcgtgcccatccccctgcagcaggccagaaccctgttcgacgaggtgcagttcaaggagaaggtgttcctgagacagcagggcagctacatcctgaccgtggaggccggcaagcagctgctgctgagcgccgacagcggcgccgaggccgccctgcaggccgagctggccgagatccaggagaagtggaagagcgccagcatgagactggaggagcagaagaagaagctggccttcctgctgaaggactgggagaagtgcgagaagggcatcgccgacagcctggagaagctgagaaccttcaagaagaagctgagccagagcctgcccgaccaccacgaggagctgcacgccgagcagatgagatgcaaggagctggagaacgccgtgggcagctggaccgacgacctgacccagctgagcctgctgaaggacaccctgagcgcctacatcagcgccgacgacatcagcatcctgaacgagagagtggagctgctgcagagacagtgggaggagctgtgccaccagctgagcctgagaagacagcagatcggcgagagactgaacgagtgggccgtgttcagcgagaagaacaaggagctgtgcgagtggctgacccagatggagagcaaggtgagccagaacggcgacatcctgatcgaggagatgatcgagaagctgaagaaggactaccaggaggagatcgccatcgcccaggagaacaagatccagctgcagcagatgggcgagagactggccaaggccagccacgagagcaaggccagcgagatcgagtacaagctgggcaaggtgaacgacagatggcagcacctgctggacctgatcgccgccagagtgaagaagctgaaggagaccctggtggccgtgcagcagctggacaagaacatgagcagcctgagaacctggctggcccacatcgagagcgagctggccaagcccatcgtgtacgacagctgcaacagcgaggagatccagagaaagctgaacgagcagcaggagctgcagagagacatcgagaagcacagcaccggcgtggccagcgtgctgaacctgtgcgaggtgctgctgcacgactgcgacgcctgcgccaccgacgccgagtgcgacagcatccagcaggccaccagaaacctggacagaagatggagaaacatctgcgccatgagcatggagagaagactgaagatcgaggagacctggagactgtggcagaagttcctggacgactacagcagattcgaggactggctgaagagcagcgagagaaccgccgccttccccagcagcagcggcgtgatctacaccgtggccaaggaggagctgaagaagttcgaggccttccagagacaggtgcacgagtgcctgacccagctggagctgatcaacaagcagtacagaagactggccagagagaacagaaccgacagcgcctgcagcctgaagcagatggtgcacgagggcaaccagagatgggacaacctgcagaagagagtgaccagcatcctgagaagactgaagcacttcatcggccagagagaggagttcgagaccgccagagacagcatcctggtgtggctgaccgagatggacctgcagctgaccaacatcgagcacttcagcgagtgcgacgtgcaggccaagatcaagcagctgaaggccttccagcaggagatcagcctgaaccacaacaagatcgagcagatcatcgcccagggcgagcagctgatcgagaagagcgagcccctggacgccgccatcatcgaggaggagctggacgagctgagaagatactgccaggaggtgttcggcagagtggagagataccacaagaagctgatcagactgcccctgcccgacgacgagcacgacctgagcgacagagagctggagctggaggacagcgccgccctgagcgacctgcactggcacgacagaagcgccgacagcctgctgagcccccagcccagcagcaacctgagcctgagcctggcccagcccctgagaagcgagagaagcggcagagacacccccgccagcgtggacagcatccccctggagtgggaccacgactacgacctgagcagagacctggagagcgccatgagcagagccctgcccagcgaggacgaggagggccaggacgacaaggacttctacctgagaggcgccgtgggcctgagcgacgtgatgatccccgagagccccgaggcctacgtgaagctgaccgagaacgccatcaagaacaccagcggcgaccacagcgccctggagagccagatcagacagctgggcaaggccctggacgacagcagattccagatccagcagaccgagaacatcatcagaagcaagacccccaccggccccgagctggacaccagctacaagggctacatgaagctgctgggcgagtgcagcagcagcatcgacagcgtgaagagactggagcacaagctgaaggaggaggaggagagcctgcccggcttcgtgaacctgcacagcaccgagacccagaccgccggcgtgatcgacagatgggagctgctgcaggcccaggccctgagcaaggagctgagaatgaagcagaacctgcagaagtggcagcagttcaacagcgacctgaacagcatctgggcctggctgggcgacaccgaggaggagctggagcagctgcagagactggagctgagcaccgacatccagaccatcgagctgcagatcaagaagctgaaggagctgcagaaggccgtggaccacagaaaggccatcatcctgagcatcaacctgtgcagccccgagttcacccaggccgacagcaaggagagcagagacctgcaggacagactgagccagatgaacggcagatgggacagagtgtgcagcctgctggaggagtggagaggcctgctgcaggacgccctgatgcagtgccagggcttccacgagatgagccacggcctgctgctgatgctggagaacatcgacagaagaaagaacgagatcgtgcccatcgacagcaacctggacgccgagatcctgcaggaccaccacaagcagctgatgcagatcaagcacgagctgctggagagccagctgagagtggccagcctgcaggacatgagctgccagctgctggtgaacgccgagggcaccgactgcctggaggccaaggagaaggtgcacgtgatcggcaacagactgaagctgctgctgaaggaggtgagcagacacatcaaggagctggagaagctgctggacgtgagcagcagccagcaggacctgagcagctggagcagcgccgacgagctggacaccagcggcagcgtgagccccaccagcggcagaagcacccccaacagacagaagacccccagaggcaagtgcagcctgagccagcccggccccagcgtgagcagcccccacagcagaagcaccaagggcggcagcgacagcagcctgagcgagcccggccccggcagaagcggcagaggcttcctgttcagagtgctgagagccgccctgcccctgcagctgctgctgctgctgctgatcggcctggcctgcctggtgcccatgagcgaggaggactacagctgcgccctgagcaacaacttcgccagaagcttccaccccatgctgagatacaccaacggccccccccccctgtag

SEQ ID NO: 226972 - DNA, 26250 bp, Artificial Sequence
  derived and/or modified sequence
atggccaccagcagaggcgccagcagatgccccagagacatcgccaacgtgatgcagagactgcaggacgagcaggagatcgtgcagaagagaaccttcaccaagtggatcaacagccacctggccaagagaaagccccccatggtggtggacgacctgttcgaggacatgaaggacggcgtgaagctgctggccctgctggaggtgctgagcggccagaagctgccctgcgagcagggcagaagaatgaagagaatccacgccgtggccaacatcggcaccgccctgaagttcctggagggcagaaagagcatgcacagaggcagccccatcaagctggtgaacatcaacagcaccgacatcgccgacggcagacccagcatcgtgctgggcctgatgtggaccatcatcctgtacttccagatcgaggagctgaccagcaacctgccccagctgcagagcctgagcagcagcgccagcagcgtggacagcatcgtgagcagcgagacccccagcccccccagcaagagaaaggtgaccaccaagatccagggcaacgccaagaaggccctgctgaagtgggtgcagtacaccgccggcaagcagaccggcatcgaggtgaaggacttcggcaagagctggagaagcggcgtggccttccacagcgtgatccacgccatcagacccgagctggtggacctggagaccgtgaagggcagaagcaacagagagaacctggaggacgccttcaccatcgccgagaccgagctgggcatccccagactgctggaccccgaggacgtggacgtggacaagcccgacgagaagagcatcatgacctacgtggcccagttcctgaagcactaccccgacatccacaacgccagcaccgacggccaggaggacgacgagatcctgcccggcttccccagcttcgccaacagcgtgcagaacttcaagagagaggacagagtgatcttcaaggagatgaaggtgtggatcgagcagttcgagagagacctgaccagagcccagatggtggagagcaacctgcaggacaagtaccagagcttcaagcacttcagagtgcagtacgagatgaagagaaagcagatcgagcacctgatccagcccctgcacagagacggcaagctgagcctggaccaggccctggtgaagcagagctgggacagagtgaccagcagactgttcgactggcacatccagctggacaagagcctgcccgcccccctgggcaccatcggcgcctggctgtacagagccgaggtggccctgagagaggagatcaccgtgcagcaggtgcacgaggagaccgccaacaccatccagagaaagctggagcagcacaaggacctgctgcagaacaccgacgcccacaagagagccttccacgagatctacagaaccagaagcgtgaacggcatccccgtgccccccgaccagctggaggacatggccgagagattccacttcgtgagcagcaccagcgagctgcacctgatgaagatggagttcctggagctgaagtacagactgctgagcctgctggtgctggccgagagcaagctgaagagctggatcatcaagtacggcagaagagagagcgtggagcagctgctgcagaactacgtgagcttcatcgagaacagcaagttcttcgagcagtacgaggtgacctaccagatcctgaagcagaccgccgagatgtacgtgaaggccgacggcagcgtggaggaggccgagaacgtgatgaagttcatgaacgagaccaccgcccagtggagaaacctgagcgtggaggtgagaagcgtgagaagcatgctggaggaggtgatcagcaactgggacagatacggcaacaccgtggccagcctgcaggcctggctggaggacgccgagaagatgctgaaccagagcgagaacgccaagaaggacttcttcagaaacctgccccactggatccagcagcacaccgccatgaacgacgccggcaacttcctgatcgagacctgcgacgagatggtgagcagagacctgaagcagcagctgctgctgctgaacggcagatggagagagctgttcatggaggtgaagcagtacgcccaggccgacgagatggacagaatgaagaaggagtacaccgactgcgtggtgaccctgagcgccttcgccaccgaggcccacaagaagctgagcgagcccctggaggtgagcttcatgaacgtgaagctgctgatccaggacctggaggacatcgagcagagagtgcccgtgatggacgcccagtacaagatcatcaccaagaccgcccacctgatcaccaaggagagcccccaggaggagggcaaggagatgttcgccaccatgagcaagctgaaggagcagctgaccaaggtgaaggagtgctacagccccctgctgtacgagagccagcagctgctgatccccctggaggagctggagaagcagatgaccagcttctacgacagcctgggcaagatcaacgagatcatcaccgtgctggagagagaggcccagagcagcgccctgttcaagcagaagcaccaggagctgctggcctgccaggagaactgcaagaagaccctgaccctgatcgagaagggcagccagagcgtgcagaagttcgtgaccctgagcaacgtgctgaagcacttcgaccagaccagactgcagagacagatcgccgacatccacgtggccttccagagcatggtgaagaagaccggcgactggaagaagcacgtggagaccaacagcagactgatgaagaagttcgaggagagcagagccgagctggagaaggtgctgagaatcgcccaggagggcctggaggagaagggcgaccccgaggagctgctgagaagacacaccgagttcttcagccagctggaccagagagtgctgaacgccttcctgaaggcctgcgacgagctgaccgacatcctgcccgagcaggagcagcagggcctgcaggaggccgtgagaaagctgcacaagcagtggaaggacctgcagggcgaggccccctaccacctgctgcacctgaagatcgacgtggagaagaacagattcctggccagcgtggaggagtgcagaaccgagctggacagagagaccaagctgatgccccaggagggcagcgagaagatcatcaaggagcacagagtgttcttcagcgacaagggcccccaccacctgtgcgagaagagactgcagctgatcgaggagctgtgcgtgaagctgcccgtgagagaccccgtgagagacacccccggcacctgccacgtgaccctgaaggagctgagagccgccatcgacagcacctacagaaagctgatggaggaccccgacaagtggaaggactacaccagcagattcagcgagttcagcagctggatcagcaccaacgagacccagctgaagggcatcaagggcgaggccatcgacaccgccaaccacggcgaggtgaagagagccgtggaggagatcagaaacggcgtgaccaagagaggcgagaccctgagctggctgaagagcagactgaaggtgctgaccgaggtgagcagcgagaacgaggcccagaagcagggcgacgagctggccaagctgagcagcagcttcaaggccctggtgaccctgctgagcgaggtggagaagatgctgagcaacttcggcgactgcgtgcagtacaaggagatcgtgaagaacagcctggaggagctgatcagcggcagcaaggaggtgcaggagcaggccgagaagatcctggacaccgagaacctgttcgaggcccagcagctgctgctgcaccaccagcagaagaccaagagaatcagcgccaagaagagagacgtgcagcagcagatcgcccaggcccagcagggcgagggcggcctgcccgacagaggccacgaggagctgagaaagctggagagcaccctggacggcctggagagaagcagagagagacaggagagaagaatccaggtgaccctgagaaagtgggagagattcgagaccaacaaggagaccgtggtgagatacctgttccagaccggcagcagccacgagagattcctgagcttcagcagcctggagagcctgagcagcgagctggagcagaccaaggagttcagcaagagaaccgagagcatcgccgtgcaggccgagaacctggtgaaggaggccagcgagatccccctgggcccccagaacaagcagctgctgcagcagcaggccaagagcatcaaggagcaggtgaagaagctggaggacaccctggaggaggacatcaagaccatggagatggtgaagaccaagtgggaccacttcggcagcaacttcgagaccctgagcgtgtggatcaccgagaaggagaaggagctgaacgccctggagaccagcagcagcgccatggacatgcagatcagccagatcaaggtgaccatccaggagatcgagagcaagctgagcagcatcgtgggcctggaggaggaggcccagagcttcgcccagttcgtgaccaccggcgagagcgccagaatcaaggccaagctgacccagatcagaagatacggcgaggagctgagagagcacgcccagtgcctggagggcaccatcctgggccacctgagccagcagcagaagttcgaggagaacctgagaaagatccagcagagcgtgagcgagttcgaggacaagctggccgtgcccatcaagatctgcagcagcgccaccgagacctacaaggtgctgcaggagcacatggacctgtgccaggccctggagagcctgagcagcgccatcaccgccttcagcgccagcgccagaaaggtggtgaacagagacagctgcgtgcaggaggccgccgccctgcagcagcagtacgaggacatcctgagaagagccaaggagagacagaccgccctggagaacctgctggcccactggcagagactggagaaggagctgagcagcttcctgacctggctggagagaggcgaggccaaggccagcagccccgagatggacatcagcgccgacagagtgaaggtggagggcgagctgcagctgatccaggccagcagcagaaagttcgtgagccaggccagcttctacagcaagctgctgcagctgaaggagagcctgttcagcgtggccagcaaggacgacgtgaagatgatgaagctgcacctggagcagctggacgagagatggagagacctgccccagatcatcaacaagagaatcaacttcctgcagagcgtggtggccgagcaccagcagttcgacgagctgctgctgagcttcagcgtgtggatcaagctgttcctgagcgagctgcagaccaccagcgagatcagcatcatggaccaccaggtggccctgaccagacacaaggaccacgccgccgaggtggagagcaagaagggcgagctgcagagcctgcagggccacctggccaagctgggcagcctgggcagagccgaggacctgcacctgctgcagggcaaggccgaggactgcttccagctgttcgaggaggccagccaggtggtggagagaagacagctggccctgagccacctggccgagttcctgcagagccacgccagcctgagcggcatcctgagacagctgagacagaccgtggaggccaccaacagcatgaacaagaacgagagcgacctgatcgagaaggacctgaacgacgccctgcagaacgccaaggccctggagagcgccgccgtgagcctggacggcatcctgagcaaggcccagtaccacctgaagatcggcagcagcgagcagagaaccagctgcagagccaccgccgaccagctgtgcggcgaggtggagagaatccagaacctgctgggcaccaagcagagcgaggccgacgccctggccgtgctgaagaaggccttccaggaccagaaggaggagctgctgaagagcatcgaggacatcgaggagagaaccgacaaggagagactgaaggagcccaccagacaggccctgcagcagagactgagagtgttcaaccagctggaggacgagctgaacagccacgagcacgagctgtgctggctgaaggacaaggccaagcagatcgcccagaaggacgtggccttcgcccccgaggtggacagagagatcaacagactggaggtgacctgggacgacaccaagagactgatccacgagaaccagggccagtgctgcggcctgatcgacctgatgagagagtaccagaacctgaagagcgccgtgagcaaggtgctggagaacgccagcagcgtgatcgtgaccagaaccaccatcaaggaccaggaggacctgaagtgggccttcagcaagcacgagaccgccaagaacaagatgaactacaagcagaaggacctggacaacttcaccagcaagggcaagcacctgctgagcgagctgaagaagatccacagcagcgacttcagcctggtgaagaccgacatggagagcaccgtggacaagtggctggacgtgagcgagaagctggaggagaacatggacagactgagagtgagcctgagcatctgggacgacgtgctgagcaccagagacgagatcgagggctggagcaacaactgcgtgccccagatggccgagaacatcagcaacctggacaaccacctgagagccgaggagctgctgaaggagttcgagagcgaggtgaagaacaaggccctgagactggaggagctgcacagcaaggtgaacgacctgaaggagctgaccaagaacctggagaccccccccgacctgcagttcatcgaggccgacctgatgcagaagctggagcacgccaaggagatcaccgaggtggccaagggcaccctgaaggacttcaccgcccagagcacccaggtggagaagttcatcaacgacatcaccacctggttcaccaaggtggaggagagcctgatgaactgcgcccagaacgagacctgcgaggccctgaagaaggtgaaggacatccagaaggagctgcagagccagcagagcaacatcagcagcacccaggagaacctgaacagcctgtgcagaaagtaccacagcgccgagctggagagcctgggcagagccatgaccggcctgatcaagaagcacgaggccgtgagccagctgtgcagcaagacccaggccagcctgcaggagagcctggagaagcacttcagcgagagcatgcaggagttccaggagtggttcctgggcgccaaggccgccgccaaggagagcagcgacagaaccggcgacagcaaggtgctggaggccaagctgcacgacctgcagaacatcctggacagcgtgagcgacggccagagcaagctggacgccgtgacccaggagggccagaccctgtacgcccacctgagcaagcagatcgtgagcagcatccaggagcagatcaccaaggccaacgaggagttccaggccttcctgaagcagtgcctgaaggacaagcaggccctgcaggactgcgccagcgagctgggcagcttcgaggaccagcacagaaagctgaacctgtggatccacgagatggaggagagattcaacaccgagaacctgggcgagagcaagcagcacatccccgagaagaagaacgaggtgcacaaggtggagatgttcctgggcgagctgctggccgccagagagagcctggacaagctgagccagagaggccagctgctgagcgaggagggccacggcgccggccaggagggcagactgtgcagccagctgctgaccagccaccagaacctgctgagaatgaccaaggagaagctgagaagctgccaggtggccctgcaggagcacgaggccctggaggaggccctgcagagcatgtggttctgggtgaaggccatccaggacagactggcctgcgccgagagcaccctgggcagcaaggacaccctggagaagagactgagccagatccaggacatcctgctgatgaagggcgagggcgaggtgaagctgaacatggccatcggcaagggcgagcaggccctgagaagcagcaacaaggagggccagagagtgatccagacccagctggagaccctgaaggaggtgtgggccgacatcatgagcagcagcgtgcacgcccagagcaccctggagagcgtgatcagccagtggaacgactacgtggagagaaagaaccagctggagcagtggatggagagcgtggaccagaagatcgagcaccccctgcagccccagcccggcctgaaggagaagttcgtgctgctggaccacctgcagagcatcctgagcgaggccgaggaccacaccagagccctgcacagactgatcgccaagagcagagagctgtacgagaagaccgaggacgagagcttcaaggacaccgcccaggaggagctgaagacccagttcaacgacatcatgaccgtggccaaggagaagatgagaaaggtggaggagatcgtgaaggaccacctgatgtacctggacgccgtgcacgagttcaccgactggctgcacagcgccaaggaggagctgcacagatggagcgacatgagcggcgacagcagcgccacccagaagaagctgagcaagatcaaggagctgatcgacagcagagagatcggcgccagcagactgagcagagtggagagcctggcccccgaggtgaagcagaacaccaccgccagcggctgcgagctgatgcacaccgagatgcaggccctgagagccgactggaagcagtgggaggacagcgtgttccagacccagagctgcctggagaacctggtgagccagatggccctgagcgagcaggagttcagcggccaggtggcccagctggagcaggccctggagcagttcagcgccctgctgaagacctgggcccagcagctgaccctgctggagggcaagaacaccgacgaggagatcgtggagtgctggcacaagggccaggagatcctggacgccctgcagaaggccgagcccagaaccgaggacctgaagagccagctgaacgagctgtgcagattcagcagagacctgagcacctacagcggcaaggtgagcggcctgatcaaggagtacaactgcctgtgcctgcaggccagcaagggctgccagaacaaggagcagatcctgcagcagagattcagaaaggccttcagagacttccagcagtggctggtgaacgccaagatcaccaccgccaagtgcttcgacatcccccagaacatcagcgaggtgagcaccagcctgcagaagatccaggagttcctgagcgagagcgagaacggccagcacaagctgaacatgatgctgagcaagggcgagctgctgagcaccctgctgaccaaggagaaggccaagggcatccaggccaaggtgaccgccgccaaggaggactggaagaacttccacagcaacctgcaccagaaggagagcgccctggagaacctgaagatccagatgaaggacttcgaggtgagcgccgagcccatccaggactggctgagcaagaccgagaagatggtgcacgagagcagcaacagactgtacgacctgcccgccaagagaagagagcagcagaagctgcagagcgtgctggaggagatccactgctacgagccccagctgaacagactgaaggagaaggcccagcagctgtgggagggccaggccgccagcaagagcttcagacacagagtgagccagctgagcagccagtacctggccctgagcaacctgaccaaggagaaggtgagcagactggacagaatcgtggccgagcacaaccagttcagcctgggcatcaaggagctgcaggactggatgaccgacgccatccacatgctggacagctactgccaccccaccagcgacaagagcgtgctggacagcagaaccctgaagctggaggccctgctgagcgtgaagcaggagaaggagatccagatgaagatgatcgtgaccagaggcgagagcgtgctgcagaacaccagccccgagggcatccccaccatccagcagcagctgcagagcgtgaaggacatgtgggccagcctgctgagcgccggcatcagatgcaagagccagctggagggcgccctgagcaagtggaccagctaccaggacggcgtgagacagttcagcggctggatggacagcatggaggccaacctgaacgagagcgagagacagcacgccgagctgagagacaagaccaccatgctgggcaaggccaagctgctgaacgaggaggtgctgagctacagcagcctgctggagaccatcgaggtgaagggcgccggcatgaccgagcactacgtgacccagctggagctgcaggacctgcaggagagatacagagccatccaggagagagccaaggaggccgtgaccaagagcgagaagctggtgagactgcaccaggagtaccagagagacctgaaggccttcgaggtgtggctgggccaggagcaggagaagctggaccagtacagcgtgctggagggcgacgcccacacccacgagaccaccctgagagacctgcaggagctgcaggtgcactgcgccgagggccaggccctgctgaacagcgtgctgcacaccagagaggacgtgatccccagcggcatcccccaggccgaggacagagccctggagagcctgagacaggactggcaggcctaccagcacagactgagcgagaccagaacccagttcaacaacgtggtgaacaagctgagactgatggagcagaagttccagcaggtggacgagtggctgaagaccgccgaggagaagaagtggcacgaggaggtgaccgcctacagagacgaggtggaggaggtgggcgccagagcccaggagatcctggacgagagccacgtgaacagcagaatgggctgccaggccacccagctgaccagcagataccaggccctgctgctgcaggtgctggagcagatcaagttcctggaggaggagatccagagcctggaggagagcgagagcagcctgagcagctacagcgactggtacggcagcacccacaagaacttcaagaacgtggccaccaagatcgacaaggtggacaccgtgatgatgggcaagaagctgaagaccctggaggtgctgctgaaggacatggagaagggccacagcctgctgaagagcgccagagagaagggcgagagagccgtgaagtacctggaggagggcgaggccgagagactgagaaaggagatccacgaccacatggagcagctgaaggagctgaccagcaccgtgagaaaggagcacatgaccctggagaagggcctgcacctggccaaggagttcagcgacaagtgcaaggccctgacccagtggatcgccgagtaccaggagatcctgcacgtgcccgaggagcccaagatggagctgtacgagaagaaggcccagctgagcaagtacaagagcctgcagcagaccgtgctgagccacgagcccagcgtgaagagcgtgagagagaagggcgaggccctgctggagctggtgcaggacgtgaccctgaaggacaagatcgaccagctgcagagcgactaccaggacctgtgcagcatcggcaaggccatgatggaggagatcgccggcttcgaggacagactgaacaacctgcagatgaagggcgacaccctgatcggccagtgcgccgaccacctgcaggccaagctgaagcagaacgtgcacgcccacctgcagggcaccaaggacagctacagcgccatctgcagcaccgcccagagaatgtaccagagcctggagcacgagctgcagaagcacgtgagcagacaggacaccctgcagcagtgccaggcctggctgagcgccgtgcagcccgacctggagcccagcccccagccccccctgagcagagccgaggccatcaagcaggtgaagcacttcagagccctgcaggagcaggccagaacctacctggacctgctgtgcagcatgtgcgacctgagcaacgccagcgtgaagaccaccgccaaggacatccagcagaccgagcagaccatcgagcagaagctggtgcaggcccagaacctgacccagggctgggaggagatcaagcacctgaagagcgagctgtggatctacctgcaggacgccgaccagcagctgcagaacatgaagagaagacacagcgagctggagctgaacatcgcccagaacatggtgagccaggtgaaggacttcgtgaagaagctgcagagcaagcaggccagcgtgaacaccatcatcgagaaggtgaacaagctgaccaagaaggaggagagccccgagcacaaggagatcaaccacctgaacgaccagtggctggacctgtgcagacagagcaacaacctgtgcctgcagagagaggaggacctgcagagaaccagagactaccacgactgcatgaacgtggtggaggtgttcctggagaagttcaccaccgagtgggacaacctggccagaagcgacgccgagagcaccgccgtgcacctggaggccctgaagaagctggccctggccctgcaggagagaaagtacgccatcgaggacctgaaggaccagaagcagaagatgatcgagcacctgaacctggacgacaaggagctggtgaaggagcagaccagccacctggagcagagatggttccagctggaggacctgatcaagagaaagatccaggtgagcgtgaccaacctggaggagctgaacgtggtgcagagcagattccaggagctgatggagtgggccgaggagcagcagcccaacatcgccgaggccctgaagcagagccccccccccgacatggcccagaacctgctgatggaccacctggccatctgcagcgagctggaggccaagcagatgctgctgaagagcctgatcaaggacgccgacagagtgatggccgacctgggcctgaacgagagacaggtgatccagaaggccctgagcgacgcccagagccacgtgaactgcctgagcgacctggtgggccagagaagaaagtacctgaacaaggccctgagcgagaagacccagttcctgatggccgtgttccaggccaccagccagatccagcagcacgagagaaagatcatgttcagagagcacatctgcctgctgcccgacgacgtgagcaagcaggtgaagacctgcaagagcgcccaggccagcctgaagacctaccagaacgaggtgaccggcctgtgggcccagggcagagagctgatgaaggaggtgaccgagcaggagaagagcgaggtgctgggcaagctgcaggagctgcagagcgtgtacgacagcgtgctgcagaagtgcagccacagactgcaggagctggagaagaacctggtgagcagaaagcacttcaaggaggacttcgacaaggcctgccactggctgaagcaggccgacatcgtgaccttccccgagatcaacctgatgaacgagagcagcgagctgcacacccagctggccaagtaccagaacatcctggagcagagccccgagtacgagaacctgctgctgaccctgcagagaaccggccagaccatcctgcccagcctgaacgaggtggaccacagctacctgagcgagaagctgaacgccctgcccagacagttcaacgtgatcgtggccctggccaaggacaagttctacaaggtgcaggaggccatcctggccagaaaggagtacgccagcctgatcgagctgaccacccagagcctgagcgagctggaggcccagttcctgagaatgagcaaggtgcccaccgacctggccgtggaggaggccctgagcctgcaggacggctgcagagccatcctggacgaggtggccggcctgggcgaggccgtggacgagctgaaccagaagaaggagggcttcagaagcaccggccagccctggcagcccgacaagatgctgcacctggtgaccctgtaccacagactgaagagacagaccgagcagagagtgagcctgctggaggacaccaccagcgcctaccaggagcacgagaagatgtgccagcagctggagagacagctgaagagcgtgaaggaggagcagagcaaggtgaacgaggagaccctgcccgccgaggagaagctgaagatgtaccacagcctggccggcagcctgcaggacagcggcatcgtgctgaagagagtgaccatccacctggaggacctggccccccacctggaccccctggcctacgagaaggccagacaccagatccagagctggcagggcgagctgaagctgctgaccagcgccatcggcgagaccgtgaccgagtgcgagagcagaatggtgcagagcatcgacttccagaccgagatgagcagaagcctggactggctgagaagagtgaaggccgagctgagcggccccgtgtacctggacctgaacctgcaggacatccaggaggagatcagaaagatccagatccaccaggaggaggtgcagagcagcctgagaatcatgaacgccctgagccacaaggagaaggagaagttcaccaaggccaaggagctgatcagcgccgacctggagcacagcctggccgagctgagcgagctggacggcgacatccaggaggccctgagaaccagacaggccaccctgaccgagatctacagccagtgccagagatactaccaggtgttccaggccgccaacgactggctggaggacgcccaggagctgctgcagctggccggcaacggcctggacgtggagagcgccgaggagaacctgaagagccacatggagttcttcagcaccgaggaccagttccacagcaacctggaggagctgcacagcctggtggccaccctggaccccctgatcaagcccaccggcaaggaggacctggagcagaaggtggccagcctggagctgagaagccagagaatgagcagagacagcggcgcccaggtggacctgctgcagagatgcaccgcccagtggcacgactaccagaaggccagagaggaggtgatcgagctgatgaacgacaccgagaagaagctgagcgagttcagcctgctgaagaccagcagcagccacgaggccgaggagaagctgagcgagcacaaggccctggtgagcgtggtgaacagcttccacgagaagatcgtggccctggaggagaaggccagccagctggagaagaccggcaacgacgccagcaaggccaccctgagcagaagcatgaccaccgtgtggcagagatggaccagactgagagccgtggcccaggaccaggagaagatcctggaggacgccgtggacgagtggaccggcttcaacaacaaggtgaagaaggccaccgagatgatcgaccagctgcaggacaagctgcccggcagcagcgccgagaaggccagcaaggccgagctgctgaccctgctggagtaccacgacaccttcgtgctggagctggagcagcagcagagcgccctgggcatgctgagacagcagaccctgagcatgctgcaggacggcgccgcccccacccccggcgaggagccccccctgatgcaggagatcaccgccatgcaggacagatgcctgaacatgcaggagaaggtgaagaccaacggcaagctggtgaagcaggagctgaaggacagagagatggtggagacccagatcaacagcgtgaagtgctgggtgcaggagaccaaggagtacctgggcaaccccaccatcgagatcgacgcccagctggaggagctgcagatcctgctgaccgaggccaccaaccacagacagaacatcgagaagatggccgaggagcagaaggagaagtacctgggcctgtacaccatcctgcccagcgagctgagcctgcagctggccgaggtggccctggacctgaagatcagagaccagatccaggacaagatcaaggaggtggagcagagcaaggccaccagccaggagctgagcagacagatccagaagctggccaaggacctgaccaccatcctgaccaagctgaaggccaagaccgacaacgtggtgcaggccaagaccgaccagaaggtgctgggcgaggagctggacggctgcaacagcaagctgatggagctggacgccgccgtgcagaagttcctggagcagaacggccagctgggcaagcccctggccaagaagatcggcaagctgaccgagctgcaccagcagaccatcagacaggccgagaacagactgagcaagctgaaccaggccgccagccacctggaggagtacaacgagatgctggagctgatcctgaagtggatcgagaaggccaaggtgctggcccacggcaccatcgcctggaacagcgccagccagctgagagagcagtacatcctgcaccagaccctgctggaggagagcaaggagatcgacagcgagctggaggccatgaccgagaagctgcagtacctgaccagcgtgtactgcaccgagaagatgagccagcaggtggccgagctgggcagagagaccgaggagctgagacagatgatcaagatcagactgcagaacctgcaggacgccgccaaggacatgaagaagttcgaggccgagctgaagaagctgcaggccgccctggagcaggcccaggccaccctgaccagccccgaggtgggcagactgagcctgaaggagcagctgagccacagacagcacctgctgagcgagatggagagcctgaagcccaaggtgcaggccgtgcagctgtgccagagcgccctgagaatccccgaggacgtggtggccagcctgcccctgtgccacgccgccctgagactgcaggaggaggccagcagactgcagcacaccgccatccagcagtgcaacatcatgcaggccgccgtggtgcagtacgagcagtacgagcaggagatgaagcacctgcagcagctgatcgagggcgcccacagagagatcgaggacaagcccgtggccaccagcaacatccaggagctgcaggcccagatcagcagacacgaggagctggcccagaagatcaagggctaccaggagcagatcgccagcctgaacagcaagtgcaagatgctgaccatgaaggccaagcacgccaccatgctgctgaccgtgaccgaggtggagggcctggccgagggcaccgaggacctggacggcgagctgctgcccacccccagcgcccaccccagcgtggtgatgatgaccgccggcagatgccacaccctgctgagccccgtgaccgaggagagcggcgaggagggcaccaacagcgagatcagcagcccccccgcctgcagaagccccagccccgtggccaacaccgacgccagcgtgaaccaggacatcgcctactaccaggccctgagcgccgagagactgcagaccgacgccgccaagatccaccccagcaccagcgccagccaggagttctacgagcccggcctggagcccagcgccaccgccaagctgggcgacctgcagagaagctgggagaccctgaagaacgtgatcagcgagaagcagagaaccctgtacgaggccctggagagacagcagaagtaccaggacagcctgcagagcatcagcaccaagatggaggccatcgagctgaagctgagcgagagccccgagcccggcagaagccccgagagccagatggccgagcaccaggccctgatggacgagatcctgatgctgcaggacgagatcaacgagctgcagagcagcctggccgaggagctggtgagcgagagctgcgaggccgaccccgccgagcagctggccctgcagagcaccctgaccgtgctggccgagagaatgagcaccatcagaatgaaggccagcggcaagagacagctgctggaggagaagctgaacgaccagctggaggagcagagacaggagcaggccctgcagagatacagatgcgaggccgacgagctggacagctggctgctgagcaccaaggccaccctggacaccgccctgagcccccccaaggagcccatggacatggaggcccagctgatggactgccagaacatgctggtggagatcgagcagaaggtggtggccctgagcgagctgagcgtgcacaacgagaacctgctgctggagggcaaggcccacaccaaggacgaggccgagcagctggccggcaagctgagaagactgaagggcagcctgctggagctgcagagagccctgcacgacaagcagctgaacatgcagggcaccgcccaggagaaggaggagagcgacgtggacctgaccgccacccagagccccggcgtgcaggagtggctggcccaggccagaaccacctggacccagcagagacagagcagcctgcagcagcagaaggagctggagcaggagctggccgagcagaagagcctgctgagaagcgtggccagcagaggcgaggagatcctgatccagcacagcgccgccgagaccagcggcgacgccggcgagaagcccgacgtgctgagccaggagctgggcatggagggcgagaagagcagcgccgaggaccagatgagaatgaagtgggagagcctgcaccaggagttcagcaccaagcagaagctgctgcagaacgtgctggagcaggagcaggagcaggtgctgtacagcagacccaacagactgctgagcggcgtgcccctgtacaagggcgacgtgcccacccaggacaagagcgccgtgaccagcctgctggacggcctgaaccaggccttcgaggaggtgagcagccagagcggcggcgccaagagacagagcatccacctggagcagaagctgtacgacggcgtgagcgccaccagcacctggctggacgacgtggaggagagactgttcgtggccaccgccctgctgcccgaggagaccgagacctgcctgttcaaccaggagatcctggccaaggacatcaaggagatgagcgaggagatggacaagaacaagaacctgttcagccaggccttccccgagaacggcgacaacagagacgtgatcgaggacaccctgggctgcctgctgggcagactgagcctgctggacagcgtggtgaaccagagatgccaccagatgaaggagagactgcagcagatcctgaacttccagaacgacctgaaggtgctgttcaccagcctggccgacaacaagtacatcatcctgcagaagctggccaacgtgttcgagcagcccgtggccgagcagatcgaggccatccagcaggccgaggacggcctgaaggagttcgacgccggcatcatcgagctgaagagaagaggcgacaagctgcaggtggagcagcccagcatgcaggagctgagcaagctgcaggacatgtacgacgagctgatgatgatcatcggcagcagaagaagcggcctgaaccagaacctgaccctgaagagccagtacgagagagccctgcaggacctggccgacctgctggagaccggccaggagaagatggccggcgaccagaagatcatcgtgagcagcaaggaggagatccagcagctgctggacaagcacaaggagtacttccagggcctggagagccacatgatcctgaccgagaccctgttcagaaagatcatcagcttcgccgtgcagaaggagacccagttccacaccgagctgatggcccaggccagcgccgtgctgaagagagcccacaagagaggcgtggagctggagtacatcctggagacctggagccacctggacgaggaccagcaggagctgagcagacagctggaggtggtggagagcagcatccccagcgtgggcctggtggaggagaacgaggacagactgatcgacagaatcaccctgtaccagcacctgaagagcagcctgaacgagtaccagcccaagctgtaccaggtgctggacgacggcaagagactgctgatcagcatcagctgcagcgacctggagagccagctgaaccagctgggcgagtgctggctgagcaacaccaacaagatgagcaaggagctgcacagactggagaccatcctgaagcactggaccagataccagagcgagagcgccgacctgatccactggctgcagagcgccaaggacagactggagttctggacccagcagagcgtgaccgtgccccaggagctggagatggtgagagaccacctgaacgccttcctggagttcagcaaggaggtggacgcccagagcagcctgaagagcagcgtgctgagcaccggcaaccagctgctgagactgaagaaggtggacaccgccaccctgagaagcgagctgagcagaatcgacagccagtggaccgacctgctgaccaacatccccgccgtgcaggagaagctgcaccagctgcagatggacaagctgcccagcagacacgccatcagcgaggtgatgagctggatcagcctgatggagaacgtgatccagaaggacgaggacaacatcaagaacagcatcggctacaaggccatccacgagtacctgcagaagtacaagggcttcaagatcgacatcaactgcaagcagctgaccgtggacttcgtgaaccagagcgtgctgcagatcagcagccaggacgtggagagcaagagaagcgacaagaccgacttcgccgagcagctgggcgccatgaacaagagctggcagatcctgcagggcctggtgaccgagaagatccagctgctggagggcctgctggagagctggagcgagtacgagaacaacgtgcagtgcctgaagacctggttcgagacccaggagaagagactgaagcagcagcacagaatcggcgaccaggccagcgtgcagaacgccctgaaggactgccaggacctggaggacctgatcaaggccaaggagaaggaggtggagaagatcgagcagaacggcctggccctgatccagaacaagaaggaggacgtgagcagcatcgtgatgagcaccctgagagagctgggccagacctgggccaacctggaccacatggtgggccagctgaagatcctgctgaagagcgtgctggaccagtggagcagccacaaggtggccttcgacaagatcaacagctacctgatggaggccagatacagcctgagcagattcagactgctgaccggcagcctggaggccgtgcaggtgcaggtggacaacctgcagaacctgcaggacgacctggagaagcaggagagaagcctgcagaagttcggcagcatcaccaaccagctgctgaaggagtgccacccccccgtgaccgagaccctgaccaacaccctgaaggaggtgaacatgagatggaacaacctgctggaggagatcgccgagcagctgcagagcagcaaggccctgctgcagctgtggcagagatacaaggactacagcaagcagtgcgccagcaccgtgcagcagcaggaggacagaaccaacgagctgctgaaggccgccaccaacaaggacatcgccgacgacgaggtggccacctggatccaggactgcaacgacctgctgaagggcctgggcaccgtgaaggacagcctgttcttcctgcacgagctgggcgagcagctgaagcagcaggtggacgccagcgccgccagcgccatccagagcgaccagctgagcctgagccagcacctgtgcgccctggagcaggccctgtgcaagcagcagaccagcctgcaggccggcgtgctggactacgagaccttcgccaagagcctggaggccctggaggcctggatcgtggaggccgaggagatcctgcagggccaggaccccagccacagcagcgacctgagcaccatccaggagagaatggaggagctgaagggccagatgctgaagttcagcagcatggcccccgacctggacagactgaacgagctgggctacagactgcccctgaacgacaaggagatcaagagaatgcagaacctgaacagacactggagcctgatcagcagccagaccaccgagagattcagcaagctgcagagcttcctgctgcagcaccagaccttcctggagaagtgcgagacctggatggagttcctggtgcagaccgagcagaagctggccgtggagatcagcggcaactaccagcacctgctggagcagcagagagcccacgagctgttccaggccgagatgttcagcagacagcagatcctgcacagcatcatcatcgacggccagagactgctggagcagggccaggtggacgacagagacgagttcaacctgaagctgaccctgctgagcaaccagtggcagggcgtgatcagaagagcccagcagagaagaggcatcatcgacagccagatcagacagtggcagagatacagagagatggccgagaagctgagaaagtggctggtggaggtgagctacctgcccatgagcggcctgggcagcgtgcccatccccctgcagcaggccagaaccctgttcgacgaggtgcagttcaaggagaaggtgttcctgagacagcagggcagctacatcctgaccgtggaggccggcaagcagctgctgctgagcgccgacagcggcgccgaggccgccctgcaggccgagctggccgagatccaggagaagtggaagagcgccagcatgagactggaggagcagaagaagaagctggccttcctgctgaaggactgggagaagtgcgagaagggcatcgccgacagcctggagaagctgagaaccttcaagaagaagctgagccagagcctgcccgaccaccacgaggagctgcacgccgagcagatgagatgcaaggagctggagaacgccgtgggcagctggaccgacgacctgacccagctgagcctgctgaaggacaccctgagcgcctacatcagcgccgacgacatcagcatcctgaacgagagagtggagctgctgcagagacagtgggaggagctgtgccaccagctgagcctgagaagacagcagatcggcgagagactgaacgagtgggccgtgttcagcgagaagaacaaggagctgtgcgagtggctgacccagatggagagcaaggtgagccagaacggcgacatcctgatcgaggagatgatcgagaagctgaagaaggactaccaggaggagatcgccatcgcccaggagaacaagatccagctgcagcagatgggcgagagactggccaaggccagccacgagagcaaggccagcgagatcgagtacaagctgggcaaggtgaacgacagatggcagcacctgctggacctgatcgccgccagagtgaagaagctgaaggagaccctggtggccgtgcagcagctggacaagaacatgagcagcctgagaacctggctggcccacatcgagagcgagctggccaagcccatcgtgtacgacagctgcaacagcgaggagatccagagaaagctgaacgagcagcaggagctgcagagagacatcgagaagcacagcaccggcgtggccagcgtgctgaacctgtgcgaggtgctgctgcacgactgcgacgcctgcgccaccgacgccgagtgcgacagcatccagcaggccaccagaaacctggacagaagatggagaaacatctgcgccatgagcatggagagaagactgaagatcgaggagacctggagactgtggcagaagttcctggacgactacagcagattcgaggactggctgaagagcagcgagagaaccgccgccttccccagcagcagcggcgtgatctacaccgtggccaaggaggagctgaagaagttcgaggccttccagagacaggtgcacgagtgcctgacccagctggagctgatcaacaagcagtacagaagactggccagagagaacagaaccgacagcgcctgcagcctgaagcagatggtgcacgagggcaaccagagatgggacaacctgcagaagagagtgaccagcatcctgagaagactgaagcacttcatcggccagagagaggagttcgagaccgccagagacagcatcctggtgtggctgaccgagatggacctgcagctgaccaacatcgagcacttcagcgagtgcgacgtgcaggccaagatcaagcagctgaaggccttccagcaggagatcagcctgaaccacaacaagatcgagcagatcatcgcccagggcgagcagctgatcgagaagagcgagcccctggacgccgccatcatcgaggaggagctggacgagctgagaagatactgccaggaggtgttcggcagagtggagagataccacaagaagctgatcagactgcccctgcccgacgacgagcacgacctgagcgacagagagctggagctggaggacagcgccgccctgagcgacctgcactggcacgacagaagcgccgacagcctgctgagcccccagcccagcagcaacctgagcctgagcctggcccagcccctgagaagcgagagaagcggcagagacacccccgccagcgtggacagcatccccctggagtgggaccacgactacgacctgagcagagacctggagagcgccatgagcagagccctgcccagcgaggacgaggagggccaggacgacaaggacttctacctgagaggcgccgtgggcctgagcgacgtgatgatccccgagagccccgaggcctacgtgaagctgaccgagaacgccatcaagaacaccagcggcgaccacagcgccctggagagccagatcagacagctgggcaaggccctggacgacagcagattccagatccagcagaccgagaacatcatcagaagcaagacccccaccggccccgagctggacaccagctacaagggctacatgaagctgctgggcgagtgcagcagcagcatcgacagcgtgaagagactggagcacaagctgaaggaggaggaggagagcctgcccggcttcgtgaacctgcacagcaccgagacccagaccgccggcgtgatcgacagatgggagctgctgcaggcccaggccctgagcaaggagctgagaatgaagcagaacctgcagaagtggcagcagttcaacagcgacctgaacagcatctgggcctggctgggcgacaccgaggaggagctggagcagctgcagagactggagctgagcaccgacatccagaccatcgagctgcagatcaagaagctgaaggagctgcagaaggccgtggaccacagaaaggccatcatcctgagcatcaacctgtgcagccccgagttcacccaggccgacagcaaggagagcagagacctgcaggacagactgagccagatgaacggcagatgggacagagtgtgcagcctgctggaggagtggagaggcctgctgcaggacgccctgatgcagtgccagggcttccacgagatgagccacggcctgctgctgatgctggagaacatcgacagaagaaagaacgagatcgtgcccatcgacagcaacctggacgccgagatcctgcaggaccaccacaagcagctgatgcagatcaagcacgagctgctggagagccagctgagagtggccagcctgcaggacatgagctgccagctgctggtgaacgccgagggcaccgactgcctggaggccaaggagaaggtgcacgtgatcggcaacagactgaagctgctgctgaaggaggtgagcagacacatcaaggagctggagaagctgctggacgtgagcagcagccagcaggacctgagcagctggagcagcgccgacgagctggacaccagcggcagcgtgagccccaccagcggcagaagcacccccaacagacagaagacccccagaggcaagtgcagcctgagccagcccggccccagcgtgagcagcccccacagcagaagcaccaagggcggcagcgacagcagcctgagcgagcccggccccggcagaagcggcagaggcttcctgttcagagtgctgagagccgccctgcccctgcagctgctgctgctgctgctgatcggcctggcctgcctggtgcccatgagcgaggaggactacagctgcgccctgagcaacaacttcgccagaagcttccaccccatgctgagatacaccaacggccccccccccctgtag

SEQ ID NO: 226973 - DNA, 26250 bp, Artificial Sequence
  derived and/or modified sequence
atggcgacgtcccgcggcgcctcgagatgtcctcgggatatcgcgaacgtgatgcagcggctgcaggatgagcaagaaatcgtgcagaagcgaacgtttacgaagtggatcaatagccatctagctaaacggaaacccccgatggtggtggacgacctttttgaagacatgaaagatggtgtgaagcttctcgcactgctggaagttctctccggtcagaaattgccgtgcgagcaggggcgcagaatgaagcgcatccatgcagtggccaacatcggcactgctcttaaatttctagaaggacgcaaatctatgcacagaggcagccctattaagctggtcaatatcaattcaacggacattgcagacggccgcccaagcatcgtccttggtctgatgtggacgataatcctttatttccagattgaagagctgacttcaaatctcccgcaactgcagtccctaagttcttccgcctcctctgtggacagtatcgtgagcagtgaaaccccaagcccccccagtaagagaaaagtgaccactaagattcagggtaacgccaagaaggcccttctgaaatgggtccagtacaccgccggcaaacagacaggaattgaagtgaaggacttcggaaagtcatggcggagtggggtggcttttcacagtgtgatccatgcgatccggcccgaattggtcgacttagagacagtgaagggtcgcagtaatagagaaaatttagaagacgcttttaccatcgccgagacagaattgggaattcccaggttgctggatcctgaggatgtggacgtggataaaccagacgagaagagcataatgacatatgttgcccaattcttgaagcattaccctgatattcacaacgcaagcactgatggccaagaagatgatgagattctgcccggctttccatcatttgccaacagcgtgcagaacttcaaacgtgaagatagagtgatctttaaggagatgaaagtgtggatagagcagtttgaaagagatctgacccgagctcaaatggtggagtccaacttgcaggacaaatatcaaagcttcaagcactttagagtgcagtacgagatgaagagaaaacagatcgaacatcttatacagcccctgcatcgcgatggaaaactgagtttggaccaggctttggttaaacagtcatgggatcgcgtgaccagtaggttattcgattggcatatacagctggacaagtcccttccagcacctctcggaactattggggcctggttgtatcgcgcagaggttgctctgcgtgaggagatcaccgttcagcaggtccacgaagaaactgccaacactatacagagaaagttagagcagcacaaggatttactgcagaataccgacgcacataagagggcttttcacgagatctaccggactaggagtgtcaatgggatacccgtcccacccgaccagcttgaagatatggccgagaggtttcactttgtcagtagcacatccgagttgcacctgatgaaaatggagttcctagaactaaagtaccggctactgagtctcttggtcttggccgaatcaaaactaaaatcatggatcataaaatacggcaggagagagtccgttgagcagctactccagaactacgtaagcttcattgaaaatagtaagttttttgaacagtacgaggtgacctatcaaattctgaagcagacagccgaaatgtatgtgaaagctgatggctcggtggaagaagccgaaaacgtgatgaagtttatgaacgaaacgaccgcccagtggcgtaacttatccgttgaggtgcgaagcgtcagaagtatgctggaggaagttatatccaactgggatcggtatggaaatactgtcgcttctctgcaggcttggcttgaggatgctgagaaaatgttaaatcagtcggagaacgcaaagaaggatttttttcgcaacctcccacactggattcagcaacacaccgccatgaacgacgctggaaattttcttattgaaacctgcgatgaaatggtgagccgcgacctgaaacagcagttacttttacttaatggccgctggcgtgaactgttcatggaagtcaagcagtacgcccaagccgacgagatggatcggatgaagaaggagtacacggattgtgttgttacactctctgctttcgctacggaagcgcacaagaagctgtctgaaccactggaggtgagcttcatgaatgtcaaactgctcatccaggatctggaggacattgagcaacgcgttccagtcatggatgcacaatacaaaattataacgaaaacagcgcatctgattactaaggaatcccctcaggaggagggaaaagaaatgtttgccaccatgagcaagctgaaagagcagttgaccaaggtcaaagagtgctattcccccctgttatacgagtcccaacagctgctgatcccactggaagaactggagaagcagatgacctccttttatgactccttgggcaaaataaacgaaattataacggtgctcgaacgcgaagcccagtcatctgccctgtttaaacagaagcaccaggagttactcgcttgtcaggagaactgcaagaaaactctcaccctgatcgagaaaggatcccagagcgtccaaaagttcgttaccttgtccaacgtgctcaaacacttcgaccagacaagattgcagaggcagatcgcggatatacacgttgccttccaaagcatggtgaagaagacaggtgactggaagaagcatgtggagaccaatagtcgcctgatgaagaaatttgaagaatccagggcagaactcgaaaaagtactcaggatcgcacaggagggtctagaggagaagggagatccagaggaactgctgcggcgccatacagaattcttctcccagttggaccagcgagtattgaacgctttcttgaaagcatgtgacgaacttaccgacatcctgcctgaacaggaacagcaaggattacaggaggctgtcaggaagctgcacaagcagtggaaagacttgcaaggagaagccccctatcacttgctacacctcaaaatcgatgtggaaaagaatcggttcttagccagcgtcgaggaatgtagaaccgagttggacagggagaccaaactgatgccacaggaaggcagcgaaaagatcattaaagaacaccgggtcttctttagtgataagggaccccatcatctttgtgaaaagcgtttgcagcttatcgaagagctatgtgtcaagctgccagtgcgggaccccgtaagggatacccccggcacttgccatgtcacactgaaagaactcagagcggctatagacagtacttatagaaaactgatggaggaccctgataagtggaaagactatacttcccgcttctccgagttttcatcatggatatctacaaacgaaacccaactcaagggcataaaaggagaggctatcgacaccgctaatcatggagaagtgaaaagggcggtggaggagattaggaacggcgtgacaaaacgaggtgagacactcagctggctgaaaagcaggttgaaggtactcaccgaggttagctccgaaaacgaagcacaaaaacagggcgacgaactcgcaaagctctccagctcctttaaggctttagtcacccttttgtcagaggtcgagaagatgttgagcaatttcggcgactgcgtgcagtataaggagatcgtgaagaactccctggaagagctgatctctggttctaaagaggtccaagaacaggcggagaagatcttggatactgaaaacctgtttgaggcccagcagttgttactgcaccaccagcaaaagactaaaaggatatcagctaagaaacgcgacgttcagcagcagatcgcccaggcccaacagggtgaaggcggtctgcctgatagaggccacgaggagctgcggaagttagaatcaaccctggacggcctggagcgctcacgggaaagacaagagcgccggatccaggtgacgctgaggaagtgggaaagattcgagaccaataaagaaaccgtggttcgctatctctttcagacagggtcgtctcacgaacgctttctgtctttctccagcctggagtccctcagtagtgagctcgagcagactaaagaattttcaaagagaacagaaagtatagctgtccaggcggaaaacctggtcaaagaggcctccgaaatccctctggggccccagaataagcagctgttgcaacagcaggccaagtccatcaaggaacaggtgaagaaactggaagatacactagaagaggatattaaaaccatggagatggtgaaaaccaaatgggaccatttcggctctaatttcgagaccctctccgtgtggataactgagaaagaaaaggagctaaacgccctcgagaccagcagcagtgctatggatatgcagataagtcagattaaagttactatacaggagattgagagcaaactaagcagtattgttgggttagaggaagaggcccagtcctttgcgcagttcgttacaaccggagaatccgcgcgtatcaaggccaagctcactcagataaggcgctacggtgaagaactcagagagcacgcgcaatgcctggagggaacaatcctggggcacctcagccagcagcagaaattcgaggagaatttgagaaagattcaacagtctgttagcgagtttgaagacaaactggcagtgccaattaagatctgctcatccgctaccgagacctacaaggtgctgcaggaacatatggatctttgccaggccctcgaaagcctgagttcggctatcacagcattctccgcttctgcccggaaggtggtaaatcgcgacagctgtgtccaggaagccgccgccttacagcagcagtacgaggacatcctgagaagagctaaagaacgtcagacggctctggagaacctgttggcacattggcaacgcctggagaaagaactgtcttcctttttgacctggctagagaggggtgaggctaaggcaagctctcctgagatggatatctcagccgatagggttaaggtggagggggaactgcagctgatccaggcactgcagaacgaggttgtgtcacaggcctccttctacagtaaactgctgcaactgaaagaaagcttgttctccgtggcttcaaaagatgatgtgaagatgatgaaattacatctggagcagcttgatgagagatggcgggaccttccccagattattaacaagagaattaactttctgcagtcagttgtcgccgaacaccaacagttcgacgagctccttctgtctttctcagtttggattaaattgttcctgtcagagctgcagaccactagcgagatttcgatcatggatcaccaagtggcactcacccgccacaaagatcatgcggccgaagtagaaagtaaaaagggcgaactccagtctctgcagggacatttggccaaattaggttccctggggagggctgaggacctccatctgcttcaaggaaaagccgaggattgttttcagctgtttgaagaggcctcacaggtcgtggaacgcaggcagcttgccctgagccatttggcagagttcctacagtctcacgcctctctgagtggcatcttaaggcagttgcggcagacagtagaggctacgaattcaatgaacaagaacgagtctgacctcatcgaaaaggatctgaatgatgctttgcaaaacgccaaagcccttgaaagcgccgctgtctcgcttgacggcatcttaagcaaagctcagtaccacctcaagattgggtccagtgagcagcgtacttcttgtcgtgcaaccgccgaccagctctgtggagaggttgaacggatccagaacctcctaggtacgaaacagtcagaagcagacgcgcttgccgtactgaagaaagccttccaggaccagaaagaagagctgctgaagtctattgaagatattgaagaaaggactgacaaggagaggctgaaggaacctacaaggcaagctctccagcagaggctgagggtgtttaatcagctggaagacgagctgaactcacacgagcacgagctgtgttggttgaaggacaaagccaagcagatcgcccagaaagacgtcgcgtttgcgccggaggttgatcgggaaattaacaggctggaagttacttgggatgataccaagaggctaatccacgaaaatcaagggcagtgctgcgggttgatcgatcttatgagggagtatcagaacctaaagtctgctgtgtctaaagttctggaaaatgcatctagtgtgatcgtcactcgaaccaccattaaggaccaggaggaccttaagtgggctttctctaaacacgagacagccaagaacaagatgaattacaagcagaaggatctggataattttacgtccaaggggaagcacctgctttctgagctgaagaaaatccatagcagcgactttagcctcgtcaaaacagacatggagagcacggtcgacaaatggctggatgtgagtgagaagcttgaagagaacatggataggctgcgtgtgagcctgagcatttgggacgatgtgctttcaacaagagacgagatcgagggttggagtaacaactgtgtgccacagatggcggaaaatatttccaatctggacaaccatctgagggccgaggagttgctcaaggaatttgaatccgaggtaaaaaacaaggcacttagactggaagagctgcatagcaaggtgaatgatttaaaagaactcaccaagaatctcgaaacaccaccagacttgcagttcatcgaagctgaccttatgcagaagttggagcacgcaaaagagataaccgaggtggcaaagggaacacttaaggactttaccgctcagtcaacgcaggtcgaaaagtttatcaatgacataactacgtggttcaccaaggtagaggaatctctgatgaactgcgcccagaatgaaacctgtgaagccctgaagaaggtcaaggacatacagaaggagctgcagtcccaacaatctaacattagtagcacccaagaaaacctgaatagcctctgtcggaaatatcattctgccgagctggaatcattagggagagccatgactgggttaataaagaagcacgaagccgtctctcagctgtgctccaaaacgcaggcaagcttgcaggaaagtctcgagaagcacttctccgagagcatgcaagagttccaggagtggtttctaggggccaaggcagccgccaaggagtcgtcagaccgcactggagatagcaaggtgctggaggccaaactgcacgaccttcagaatatactcgacagcgtttcagacgggcaaagcaagctggatgctgtgacccaggaaggccagactctgtacgcccacctgtccaagcagattgtgtcctctatccaggaacaaattactaaggcaaacgaagaatttcaggcattccttaagcagtgcttgaaagacaaacaggccctgcaggattgcgctagcgagcttggatcattcgaagatcagcatcgaaagctgaacctctggatacacgaaatggaagagcgcttcaatacggaaaatctgggagagagcaagcaacacatcccggaaaaaaagaacgaagtccataaagttgaaatgttcctcggcgagctgctggctgcccgagaatctttggataaactcagtcagaggggccagctccttagtgaggagggccatggggccggacaggagggaaggctgtgttcacagctcctgacttcacaccagaatctgcttcggatgaccaaggagaaattacggtcctgtcaggtggcactgcaagagcacgaagcactggaagaagcactgcagtccatgtggttctgggtgaaagccattcaggatcgcctggcgtgtgctgaaagtactctgggcagtaaggacaccctcgaaaagaggttatctcagatacaggacatccttctcatgaaaggcgagggggaagtgaaactcaatatggccatcgggaagggggagcaggcactccggtcttccaacaaagaaggacagcgggtaatccaaactcaactggagactctgaaggaagtttgggcagacatcatgtcaagtagcgtgcacgcccagagcaccctagaaagtgtaatatcccaatggaacgactatgtggaacggaagaaccaactggagcagtggatggaatcagtcgatcaaaagattgagcacccactgcagccccagcccggcctcaaggaaaagtttgtcttgctcgaccacctgcagagtattctaagcgaggccgaagatcacacacgcgcattacatcgactcatcgctaaatcacgcgaactgtacgagaaaacggaggacgagagcttcaaagataccgctcaggaggagctgaagacacagttcaacgatatcatgactgttgctaaggagaaaatgaggaaagtagaggagatcgttaaggaccatctaatgtacctggatgctgttcacgaattcacagactggctccactccgcaaaagaagaattgcatcgctggagcgatatgtccggagattccagcgctactcaaaagaagttgtcgaagattaaggaactgatagattcacgcgagatcggcgcctctagactgagtcgagttgagagcttggccccagaggtaaagcagaataccactgcctctggctgcgagctcatgcacacagaaatgcaggctttgagagcagactggaagcagtgggaggatagcgtcttccagacccagtcatgcctggaaaatcttgtctctcaaatggctctcagtgagcaggaattcagcggacaggtggcccagctcgaacaagctcttgaacagttctcagctctcctcaagacttgggctcagcagctgacactgctggaggggaagaatactgacgaagagatagtggagtgttggcacaaaggtcaggaaatccttgacgccctacagaaggccgagccccgtaccgaggacctgaaatcacagttgaacgaactctgtcgcttctcccgggatttgagcacctactcggggaaagtatccggcttaatcaaagagtacaattgcctgtgtcttcaggcctcaaagggatgccagaataaggaacagattctgcaacagcgttttcggaaagcctttcgtgacttccaacaatggctagttaacgcaaagataacaacagcgaaatgtttcgacattcctcagaatatatcagaagtgagcacctcactgcaaaagatacaagagttcctaagcgaatccgaaaatggacaacataaactgaatatgatgctgagtaagggggagctgctgtctacactactgacaaaggagaaggccaaggggatccaggcaaaggtgaccgcggctaaggaagattggaagaatttccatagcaatctccaccaaaaggaaagtgctctggaaaacctgaaaattcagatgaaagactttgaggtgtcagccgaacctatccaggactggctatcgaagacagaaaaaatggttcacgagtcatcgaacagactgtatgacctacctgctaagcgccgggagcagcagaagctgcaatctgttctagaggaaattcactgttatgagcctcaattgaaccgcctcaaggagaaagcacagcagctgtgggagggtcaggccgcgagtaaatcatttaggcacagggtttcacaattgagttctcagtacctggcacttagcaatctcacgaaggagaaggtcagccgccttgatcgtatagttgcagagcacaatcagtttagtctagggataaaagagttgcaggattggatgaccgatgctattcacatgctcgacagctattgccaccctacctctgacaaatcagtcctagattctcgaaccctgaagctggaggctcttcttagcgttaagcaggagaaagagattcaaatgaaaatgattgtgaccaggggggagagtgtgctacaaaatacgtcacctgagggtattcccaccatccagcagcagctacagagtgtcaaggatatgtgggcttctttgcttagtgccggaatcagatgcaaaagccagctcgaaggagccttaagtaaatggacctcataccaagatggtgtgcggcagtttagcgggtggatggattccatggaagcgaatctcaatgaaagtgagaggcaacacgccgaactccgggacaaaactacaatgctaggaaaggcaaaacttttgaatgaagaggtcctctcctactcttctctcttggagacaatagaagtgaagggggccggaatgaccgagcactacgtgacgcagttagaacttcaggatcttcaggagagataccgcgccattcaggaacgagctaaggaagccgtgaccaaatcagaaaaactagtgcgtctccaccaggaatatcagcgagacctcaaagctttcgaagtatggctgggccaggagcaggaaaagttggaccagtacagtgtacttgagggggatgcacacactcacgagaccacacttagggacctgcaagaactccaggtccattgcgctgagggacaagctctgctcaactccgtgctgcacacaagggaggacgttattccatctggcatcccacaagccgaagatagggcattggaaagtttacggcaagactggcaggcatatcagcataggctgtcagaaactagaacacagtttaataatgtcgtcaacaagctcaggctcatggaacagaagtttcagcaggtcgatgaatggctgaaaaccgccgaggagaagaagtggcacgaagaagtgacagcgtacagagacgaggtggaagaggtcggggcccgagcccaggagatactcgatgagtcccatgtgaacagtcgcatgggctgccaggcaacccagcttacaagtcgttaccaggcgcttttgctccaggtgctggaacagatcaagttcttagaggaggagattcagtccttggaggaatcggaatcgtcattgagttcttattcagactggtatggtagcacccacaagaattttaagaacgtggctaccaaaatagataaagtggacaccgtgatgatgggcaaaaagctgaaaactttggaggtgctgctaaaggatatggaaaaagggcactctctacttaaaagtgcccgcgaaaaaggcgaacgcgccgtcaagtacctggaggaaggcgaggccgagaggttgcgcaaggagatccacgaccacatggaacagctcaaggagttaaccagtaccgttcgcaaggagcacatgaccttggaaaagggactgcacctcgccaaggagttctcagacaagtgcaaggctctgactcaatggatagctgaatatcaggaaattctgcacgtcccagaagaacccaagatggagctgtacgagaaaaaagctcagttgagcaaatacaaaagtctgcaacagacagtactatcccacgaacctagcgttaagtcagtgcgcgagaaaggggaggcgctgctcgagctggtgcaggacgtcaccctcaaggacaagatcgaccagctgcagtctgactatcaggacttgtgttctatcgggaaagctatgatggaagagattgcaggctttgaggatagattgaataatctccagatgaaaggggacactctcatcgggcagtgcgcagaccacctgcaggccaaattaaaacagaatgttcacgcccacttgcaaggaacgaaggactcatacagcgctatttgcagcacagcccagagaatgtaccaatccctcgagcacgaattgcagaagcacgtcagtagacaggacacgttacagcagtgtcaggcgtggctgagcgctgtgcagcctgatctcgaaccgtcaccgcaacctcccctttctcgcgccgaagcaataaaacaggtcaaacactttagggcattacaagagcaagcgcgcacatacctggacctgctgtgttccatgtgcgacctgagtaatgcatctgtgaagaccaccgccaaagacatccagcagactgaacaaactatcgagcagaaactggtccaggcccagaatctcactcagggctgggaggagattaagcacctgaagagtgagctgtggatatacctccaggacgccgatcagcaactccagaatatgaaacgccgccatagtgaactcgaactgaacattgcccaaaatatggtgagccaggtgaaggactttgttaagaagctccagtccaagcaggcctctgtgaataccattatcgagaaggtcaataagctgaccaaaaaagaggagtctccagagcacaaggaaattaaccatctgaatgatcagtggctcgatctgtgcagacagagtaataatctttgtcttcagagagaggaagatctccagcgtacacgcgactaccacgactgcatgaacgtcgttgaggtctttctggaaaaatttacgaccgaatgggacaatctggcacggagcgatgcagagtccacagcagttcacctggaagccctgaagaaattggccttagcactccaggagagaaaatatgcaatcgaagatttgaaagaccagaaacagaagatgattgagcacctcaacctcgatgataaagaactggttaaggaacagacaagtcacctcgagcagcgttggttccagctggaggatctcataaaaagaaagatccaggtttctgtcacaaatcttgaagaactgaatgtggttcaaagccggttccaagaactgatggagtgggcggaggagcagcagcctaacatcgcggaggccctcaaacagtccccgccgcccgacatggcgcagaatttactcatggaccacctcgctatatgctccgagttggaggcaaagcagatgctgctgaaaagtctcattaaggacgcggatagagtgatggcagatcttggattaaacgagaggcaggtaatacagaaggctctgtcagatgcccagagccacgtgaactgtctgtccgatttggttggccagaggcgtaagtacctgaacaaagcgctcagtgaaaagacccaatttcttatggccgtgttccaggcaacaagtcagattcagcagcatgagcgaaaaatcatgttccgtgagcacatctgcttgctgcccgacgatgtgtccaaacaggttaaaacatgtaagtcggcacaggcctccctgaaaacttatcagaatgaggtcaccggactttgggcccaggggagagagttgatgaaggaggtcacagagcaggaaaagagtgaggttctaggaaagcttcaggagctgcaaagcgtgtacgatagcgtactacaaaaatgcagccaccggttacaagaactggaaaaaaatctggttagcagaaagcactttaaagaggatttcgataaagcatgccactggctcaaacaggccgatatcgtcaccttccctgagatcaatctgatgaacgagtctagcgaactgcatacacagctcgcgaagtaccagaatatcttggaacaatcacctgagtacgagaatctcctgctgacactgcaacgtactggccagacgatcttacccagcttaaacgaggttgatcatagctacctctctgaaaagttgaacgcgctcccgaggcagttcaacgtcatagtggctctggctaaggacaaattctataaggtccaggaagccattctggctagaaaagagtacgcttctcttatcgagttgaccacacagagcctgtctgaactggaggcacagttcctgcggatgagcaaggtgccaacagaccttgctgtcgaagaagccctcagtctgcaggacggctgtcgtgctatactggacgaggtagccgggttgggtgaagccgtagacgaactaaaccagaagaaggaaggtttcaggagtactggccaaccatggcagccagacaaaatgctgcacttggtgactctttaccataggttgaaacggcagacagaacaacgagtgagtctgcttgaggacacaacctctgcctaccaagaacacgaaaaaatgtgccaacagcttgagaggcagctcaaatcagtgaaagaagaacagagcaaggtaaacgaggagacactgccggccgaagagaagctgaagatgtaccatagcctcgcagggagcctacaggattctgggatcgtgctgaaaagggtcacaatccacttagaggatctcgcaccccacctcgatccgttagcctacgagaaggccaggcaccagattcagagctggcagggcgaattgaaactgctgacctctgctataggagagacagttaccgagtgcgaatccaggatggtgcagtcaattgacttccagacagaaatgtctaggtctttagactggctgcggcgtgtgaaagcagagctgagtgggcccgtgtatctcgacctaaacctacaagatatacaagaggagatccgcaaaatccagattcatcaggaggaggtgcagtcaagcttgagaataatgaatgcactgagccataaggaaaaggaaaagttcacgaaagccaaggagctaatctccgccgatttggagcactcgctggcagagctgtctgagctcgatggggacattcaggaggccctgcgcaccagacaagctactctgaccgaaatttactcacagtgtcagcggtattaccaggtatttcaggccgccaatgactggctagaagatgcccaagagctcctacaattggccgggaacggactggatgtcgagtccgccgaggaaaacctaaagagccacatggaatttttctcaaccgaagatcagttccactctaatcttgaggaacttcatagcttggtggcaactcttgatcctctgataaaacccactggaaaggaggatctggagcagaaggttgccagccttgagctacggtctcagcggatgagcagagacagcggtgcacaagttgatctgctccaacggtgtaccgctcagtggcatgattaccagaaggctagggaggaggttatcgagcttatgaacgacaccgagaagaaactctcagaattctctctactgaagacatccagcagtcatgaggccgaagaaaagctgagtgagcataaggccctggtgtcagtggtgaactcctttcatgagaagattgtggctttagaggagaaggcttcacagctagagaaaaccggcaatgacgctagcaaggccacgctgagtcggtccatgacaacagtgtggcaacggtggacaagactccgcgctgtggcacaggatcaggagaaaatcctggaagatgccgtcgatgagtggactggattcaacaataaagttaaaaaggccaccgaaatgatcgaccagcttcaggataagctcccggggtcaagcgctgagaaggcatccaaggcagagttactgacgcttctagagtaccacgataccttcgtcttggaactggaacaacaacaaagtgctctgggaatgctgaggcagcagactctcagcatgctgcaggacggagctgcacccacacctggcgaggagcctccacttatgcaggagatcactgccatgcaggaccggtgccttaatatgcaagaaaaggtgaaaacaaacggcaagcttgttaagcaggagctcaaggatcgcgagatggttgagacacagatcaatagtgtgaagtgttgggtgcaagagaccaaggaatacctggggaatcccaccattgaaatcgatgcccaacttgaggagcttcagatcctcctaaccgaggctaccaaccatagacaaaacatagagaagatggcggaagagcagaaagaaaagtacctcggcttatatactatactcccaagcgaactctcactccaactcgccgaggtggctctagatctcaagatccgcgaccaaatccaggacaaaattaaagaggttgagcagtcaaaggcaacgtctcaggagctttctcgacagatacagaagctagccaaagatctaactaccattcttactaagctgaaagcgaagacagataatgtcgtgcaagctaagactgatcagaaggtgcttggtgaggagctcgatggatgcaattcaaaactaatggaactcgacgccgccgtccagaagttcttagagcagaatggacaactcgggaaacccctcgccaagaagatcgggaagttgacggagctgcatcagcagacaatccggcaagcagaaaaccggcttagcaaattgaaccaagcggccagtcacctggaggaatataatgagatgctggaacttattctcaagtggatcgagaaggctaaggtgttggcacatggcactatcgcctggaactccgcaagtcagctgcgagagcagtacatactgcatcaaaccttactcgaagagtctaaagagatcgactccgaattggaagccatgaccgaaaagctccagtacctgactagcgtttactgcaccgagaagatgagccagcaggttgctgagcttggacgggaaactgaagaattgagacagatgattaagattagactgcagaatctgcaagacgcggccaaggatatgaagaagtttgaggctgaactgaagaaattgcaagcagcgctggaacaggcacaggccactctgacaagcccggaggtaggccggctttccctcaaggagcaactcagtcacagacagcacttgctgtctgaaatggagagcttaaagccgaaggttcaggcagtgcaattatgccagtctgccctacgaataccagaggatgtagtggcgtctctgccattgtgtcatgcagccctacgactccaagaggaagcgagccggcttcagcatactgctattcagcagtgtaacataatgcaggctgcagtggtgcagtacgaacagtatgaacaggagatgaaacatcttcagcagttaatagaaggggcccatcgagaaatcgaggacaaacctgtcgcgacaagcaatattcaggagcttcaagcccagatctccaggcatgaggagctcgcacaaaagatcaagggttaccaggagcagatcgcgtcactcaactcgaagtgtaagatgctgacaatgaaagccaagcatgctaccatgctgctgaccgtgactgaggtggagggtctggctgagggaacggaagatttggacggggaattgcttcccacccctagtgcacacccgtctgtggtaatgatgacggccggcagatgccacaccttactgtccccagttacagaggaaagtggcgaggagggaactaattctgagatcagcagtcccccggcttgcagaagcccctcccccgtggcaaataccgatgcgtctgttaaccaggacatcgcgtattaccaggcactttccgccgagcgtctacagaccgatgctgccaaaatacacccttctacctccgcaagtcaggaattttacgagcccggattggagccctccgcaacagccaagctcggtgacttgcagagatcctgggagaccttgaagaacgttatctccgaaaaacagcgaaccctgtacgaagcgctggagaggcagcaaaaataccaggatagcctgcagtccatatcaaccaagatggaggcaatagaattaaaactctcagagagtcccgagcccgggcgctcccctgagtcccagatggctgagcaccaggccctgatggacgaaatattaatgcttcaagacgagattaacgaattacaaagctcacttgccgaagaactcgttagcgagtcatgtgaagcggatcctgctgaacagctcgccctccaatcgactctgaccgtgcttgcagagcggatgtcaaccatccgcatgaaggcgtccggtaagcggcaattgctcgaagagaaactgaacgaccagctcgaggaacaacgccaggaacaggctctccagaggtataggtgcgaggcggatgagttggactcttggctgttgtcgacaaaagcgaccctagacaccgcccttagccctccaaaggaacccatggacatggaagcccaactgatggactgtcagaatatgttggtagaaattgaacagaaggtagttgccctgagcgaattaagtgtccacaatgaaaacttactccttgaaggcaaagctcatactaaggacgaggccgaacagctggccggcaagctcaggcgcctgaagggctcgcttctggaactgcaacgcgccttacacgataaacagctgaacatgcaagggacagctcaggagaaggaagaatcggatgtagatctgacggccacacaaagccccggcgtgcaggaatggctggctcaggcccgcacgacctggacgcagcagagacagagttcactacaacaacaaaaggaactggagcaggaactggcagaacaaaaatctctcttgaggtctgtagcgagccgcggagaggaaattctgattcagcacagtgctgcagagacatctggcgatgcaggcgagaagcctgatgttctgagccaggaactcggcatggaaggggagaagtcgagcgccgaagaccagatgcgtatgaaatgggagagcttgcatcaagaattttccaccaagcaaaaactcctgcagaatgtcctggaacaagaacaggagcaggtcttatatagcaggcctaaccggctcttgagcggtgttcctttgtacaagggagatgtgcccacccaggataagtcggcagtgactagcctgctggacgggttaaaccaggccttcgaagaggtgtcttcccagtctgggggggctaagcgccagtcaatccacctggaacaaaagctctacgacggcgtgtctgctacctcaacatggttagacgacgtggaggagcgtctgtttgtagccaccgctctccttccagaagagaccgaaacgtgtctgttcaaccaggaaattctggccaaagatataaaggaaatgagcgaggagatggacaagaacaaaaacctcttcagtcaagcatttcctgagaatggcgataaccgcgacgtcattgaggatacattgggctgcctcctcggtagattgagccttctggactcagtggttaaccagaggtgccatcaaatgaaagagagattacaacagatcctaaactttcagaacgaccttaaggttctgttcacatctttagccgataataagtacattatactgcaaaaactcgccaacgtttttgagcaaccagtcgccgaacagattgaagccatccaacaggcagaggacggattgaaggaattcgacgccggcataattgaattgaagcgccgaggcgataagttacaggtcgaacagccttccatgcaggagttgtcgaagctccaggatatgtatgacgaattgatgatgatcattggaagtaggagatcaggccttaatcagaatctgacactcaagagtcagtacgaacgggctctccaggatctggctgacctactagaaacaggtcaggagaagatggctggcgaccagaaaataattgtaagtagcaaagaagagatacagcagctactggataaacataaggagtactttcaaggtctggaatcccacatgattctgaccgagacactgttccgaaaaatcatttcttttgccgtgcagaaagaaacacagtttcataccgagctaatggctcaagctagtgctgtcctgaaacgggctcataagaggggggtcgaactggagtacatcctggaaacctggtcccacctggacgaggatcagcaagagctgagccgtcagctggaagtggttgaatcctctatcccctccgttggtctggtcgaggaaaacgaagacagattgattgacagaatcacactgtaccagcatttgaaaagcagtctcaacgaatatcagccaaaactgtaccaggtgctcgatgacgggaagcgcctgctgatttcaataagctgttctgatttggaaagccagttgaaccaactcggagaatgctggttatcgaacactaacaagatgtctaaagaactccatagactggagacaattctcaagcactggacaaggtaccagagtgagtcggctgacctaattcactggctgcagagcgcaaaggacagactagagttttggacacagcagtcagtgactgttccacaagaactagagatggtacgcgaccatctgaatgcttttttagaattctctaaagaggtggatgcccagtcaagcctgaaaagcagcgtcctgagtaccggcaatcaattactgcgactcaaaaaagtggacaccgctacactgaggagcgagctctcacgcatcgatagtcagtggactgacctgctgacaaacattcctgccgtccaggagaagctacaccaactgcagatggacaagttgccaagtaggcacgctatctctgaagtaatgtcatggatcagtctcatggaaaacgtgattcagaaggacgaggataacatcaagaattccatcggttacaaggccatccatgagtacctgcagaagtataagggctttaagatcgacattaattgtaaacaactgacagtcgattttgtgaaccaatcagtgcttcagattagcagccaagatgtggaatcaaagaggtctgacaaaacggactttgccgaacaacttggtgcaatgaacaaaagttggcagattctgcagggcctcgtgacagagaagatccaattgctggaggggcttctggaatcttggtccgaatacgagaataacgtgcagtgcctgaagacgtggttcgaaacacaggagaaaaggctgaagcagcagcatcggattggcgatcaagcctcagtccagaacgcactcaaagactgccaagacctagaggatcttattaaggccaaagagaaagaggttgagaaaatcgaacagaatgggctggcactgatccagaacaaaaaagaggacgtatcctccatcgtgatgtccacgctcagagaattggggcagacctgggcgaacctggaccatatggtgggccagcttaagatcctcctgaaaagtgttctggatcagtggtcatcccacaaagtggccttcgataaaataaactcctatctgatggaggccaggtactcactatcgcggtttaggttgttaactgggagcctggaagctgtccaggtgcaggttgacaatctgcagaatctgcaggatgatctggagaaacaggagagaagcctccagaagtttggatcaattacaaaccagctcctgaaggaatgtcacccgccagtcactgagacgttaacgaacactttgaaggaggtgaatatgaggtggaataacctgctcgaggaaatcgccgagcaattgcaaagcagcaaagccctactgcagctttggcaaaggtataaggattacagcaagcagtgtgcatccactgtgcagcagcaggaggacaggactaacgaactgctcaaagcggcgaccaacaaggacattgccgatgatgaagtggctacttggattcaggattgtaacgatctgctgaaaggacttgggaccgttaaggactcgctgttctttctacacgaactgggagaacagctcaagcagcaggtcgacgcgtctgcagcctctgcaatccagagtgatcaattatcactatcccaacatttatgcgccctggagcaggcgttgtgcaagcaacagacatcacttcaggccggcgttctggattacgaaacctttgccaagagccttgaggccctggaggcttggatagtcgaagcagaggagatactgcagggtcaggatccctcccactcatcagatctgagtactattcaagaaagaatggaggaacttaaaggccagatgctgaagttctccagtatggcgcctgacctggatcgcctcaatgaactggggtacaggctgcccctcaacgacaaggagataaaacgtatgcagaatctcaatcgccactggtcactcatctcttcacagaccaccgagagattcagcaaactgcagagtttcctgctgcagcatcagacctttttggagaagtgcgaaacgtggatggaattcctagtgcagaccgagcagaagctggccgtggagatatccgggaactatcaacacttgctggaacagcaacgcgctcatgagctgtttcaagcggagatgttcagcaggcagcagattctgcacagtattattatcgatggacaacgcctgctcgaacagggccaggtggatgatcgtgatgagtttaacctgaaactgacgctcttgtctaatcagtggcagggagtcatcagacgtgctcagcaacggcgtggcatcattgattctcagattcgccaatggcagaggtatcgtgagatggccgagaagctcagaaagtggttggtggaagtctcttacctgcctatgtccggacttggttcagtgccaatccctctgcaacaggcgagaacactgttcgacgaagttcagtttaaggagaaggtattcttacgccagcagggcagttacatcctcacggtggaagccggcaaacagttattgctatctgccgatagcggggcagaggccgctctgcaagcagagctggccgaaatccaggagaagtggaagtcagcctccatgaggcttgaagagcagaagaagaagctcgccttcctcctcaaagattgggagaagtgtgaaaaggggatcgccgatagcttggaaaaactccgcacgtttaaaaagaagctgtcacaatctctccccgatcaccacgaagagcttcatgccgaacaaatgcggtgtaaggaattggaaaacgctgtggggtcttggacggatgatttgacacagttgtccctgttgaaggatactctctcggcatacatctctgccgatgacatttccatcttgaacgagcgcgtcgagttgctgcagagacagtgggaagagttgtgtcaccaactgtcattgaggaggcagcagattggcgagagactgaatgaatgggccgtgttttccgagaagaacaaggagctctgcgagtggctcacacaaatggaatctaaggtgagccagaacggcgacatcttgattgaagagatgattgagaagctcaaaaaagattaccaggaggaaattgctattgctcaggaaaacaagattcagctgcagcagatgggagaaaggctggccaaggcttcacatgagtccaaagcgagtgaaatcgaatataaactggggaaggtcaacgaccggtggcagcatctgctggatctgatcgccgcaagggttaagaagctaaaggagacgctggtcgccgtgcagcagcttgacaagaatatgtcttcccttcgaacgtggttagcacacatcgagtccgagctcgctaagcccatcgtgtacgactcctgcaacagcgaagagatccaacgcaagttaaacgagcagcaggaattgcagcgggatatcgaaaagcattccactggggtggcgtcagtgttgaacctgtgtgaagttctcctccacgactgcgacgcatgtgccactgatgctgaatgtgactctatccagcaagccacgaggaatctggatcggcgctggaggaatatctgcgcgatgagcatggaacgacggctgaagattgaagagacttggcggctctggcaaaaattcctggacgactattcaaggtttgaagattggctgaagagctcagagcgcaccgccgcttttccttccagttctggggtcatttatacagtcgctaaggaagagttgaaaaaattcgaagcttttcagcggcaggtgcacgaatgcctcactcagcttgagttaattaacaagcagtaccggagacttgcccgagaaaatagaacagactctgcctgcagtctaaaacagatggtgcacgagggcaatcagagatgggataatctccaaaagcgagtgacatctatcttgagacgcctcaagcacttcatcggccagcgagaggagtttgagacagcccgtgacagcatcctggtctggctgacagagatggatctgcagcttactaacatcgaacacttcagcgaatgtgacgtccaggccaagattaaacagttaaaggctttccaacaggaaatctcactgaatcacaataagatcgagcagataatagcacaaggagaacaactgatcgaaaagtccgagccgctggacgccgccatcatcgaagaagaactcgacgagctgaggcggtactgtcaagaggtttttggacgagtcgagagataccacaagaagctcatccgactcccgctgcctgatgatgagcatgacctgagtgaccgcgaattagagcttgaggattccgccgccctgtcagacttacattggcacgaccgaagtgctgactcccttttaagcccccaaccaagcagcaatctgagcttaagcctagcacagccattgaggtctgagagatccggccgggacactcctgcgtctgtcgattccattccgctggagtgggaccacgattatgacctgtctcgcgacttggaaagcgcgatgtcacgcgcactgccaagtgaggacgaggaaggccaggacgacaaggatttctatctgcggggagcggttggtctgtccgatgtaatgatcccagaaagcccggaagcgtacgtgaaactgaccgagaacgccatcaagaacacatccggagatcacagcgccctcgaatcccagatccgccaacttggaaaggcattagatgatagtcgattccagatccagcaaaccgaaaacatcatccggtccaaaacaccaaccggccctgagttggacacttcctataaaggatacatgaaactcctgggagagtgcagctcaagcatcgattccgttaagaggttagaacacaaactcaaggaggaggaggagtcacttccagggttcgtgaatctgcactccacggaaacgcagactgccggcgttatcgataggtgggaactgctgcaggcccaagcactatcaaaagaattgcggatgaagcagaatctccagaagtggcagcagtttaattctgatctcaattccatctgggcctggctgggggataccgaagaggaactcgagcagctccagcgcctggagctgtccaccgacattcagactattgaactgcagataaagaaactaaaggaactgcaaaaagcagtggaccataggaaagctattattctcagtatcaacctttgcagtcccgagttcacccaggcagattctaaagagagcagagacttgcaggacagactgagtcagatgaatggaagatgggatagggtgtgctcacttctggaggagtggcgcggcctgttgcaagatgccttgatgcagtgccaggggttccacgagatgtcccatgggctgttgctgatgctcgagaacattgataggagaaagaacgagattgtgcctatcgacagcaatcttgacgctgagatcttacaagaccatcacaaacaactcatgcagattaaacacgaactcctcgagagccagctgagagttgctagcctgcaagatatgagctgccagttgctcgtgaatgctgagggcaccgattgcctcgaggcaaaagaaaaggtgcacgttatcggaaatcggttgaagctgctgctgaaggaagtctctcgacacatcaaagagctcgagaagttgctcgatgtctctagcagccagcaggatctgagttcgtggagcagtgcagacgagctcgacacatctgggtctgtcagtccaacctcaggtcgctcaaccccaaatcggcagaagactccacgaggaaaatgcagcctgtcacaacccgggccctctgttagtagcccacactcccgctcgaccaaagggggctctgatagtagcctctccgagccaggacccggtagatccggacgagggttcttattcagggtgctccgcgccgctctgcccctgcagctcttgttgctgctcctgatcgggttggcctgcctcgtgcctatgagcgaggaggactattcttgcgccctaagcaataactttgctagaagctttcacccgatgttgcggtacaccaacggccccccgcccctgtag

SEQ ID NO: 226974 - DNA, 26250 bp, Artificial Sequence
  derived and/or modified sequence
atggcgacctcccgaggcgcttctagatgccctcgtgacatcgctaacgtgatgcagcgcttacaggatgaacaggagatagtacagaagaggaccttcaccaagtggattaattcacatttggccaagcggaagccccccatggtggttgacgatctgtttgaggacatgaaggatggagtgaaactgctggctctgctcgaggtgctcagtggtcagaagttgccctgtgagcaaggccggagaatgaagcggatccacgcggtggcaaacatcggtaccgcccttaagtttctggaaggccggaaaagcatgcaccggggtagtccaattaagctggtgaacattaattccacggatattgcagatggaaggccctcgattgtgctgggtctgatgtggactattatcctttacttccagatcgaagagctgacatcgaatctccctcaactccagagcttgtcctcaagcgcaagtagcgttgatagtatcgtgtccagtgagacaccctcaccgccctctaagcgtaaagtgactacaaaaatccagggaaatgctaaaaaggcactgctgaaatgggtccagtacacagccggcaagcagacaggcatcgaagtgaaagactttggtaagagttggagaagcggggtggcctttcattcagtgattcacgcgatccggcccgaactcgtggatttggaaacagtgaaaggcaggtcaaaccgggaaaaccttgaagacgctttcacaattgccgagactgagctggggattcccaggcttctcgatcccgaggacgttgatgtggacaaaccagacgaaaagagcattatgacgtacgttgctcaattcctgaagcactatccagacatccataatgcctccactgacgggcaagaggatgatgagattttgcccggattcccttcttttgcgaatagcgtccagaatttcaagagagaagaccgagtgatcttcaaagaaatgaaggtatggatagagcagttcgaacgtgatcttactcgggcccagatggtggaatccaatctacaggacaagtaccagagtttcaaacactttcgggttcaatacgagatgaagcgaaagcaaattgagcatctgatccagcctctgcatcgggatggaaagctttccctagatcaagccttggtaaagcagagttgggatcgcgttacttcaagactgtttgattggcacatccagttggacaaaagcttaccagcacccctgggcacgatcggggcatggttatatcgagccgaagtggcgttgcgggaggaaatcacggtccagcaggttcacgaggagaccgcgaacacgatccagcgaaaactcgaacagcataaagatcttctgcagaacacagatgcccacaagcgtgctttccatgagatttatcggacacggtctgtcaatgggatccccgtaccccctgatcagctcgaggatatggccgaaaggttccatttcgtgagctcaacttctgaacttcatctgatgaagatggaattcttggaactcaaatatcgcctgctgagtttactagtcctggctgaatcaaagttgaagtcttggattatcaagtatggtagacgtgagtctgtagagcagcttctgcaaaattacgtgagctttattgaaaacagcaaatttttcgagcaatatgaggtgacgtaccagattctaaagcaaacagcagaaatgtacgtcaaagccgacggttcagtggaagaggctgaaaacgtgatgaagtttatgaatgagaccaccgcgcaatggcggaacctgtcggttgaggtgcggtccgtccggtcaatgctggaggaggtcatcagcaactgggatcggtacggtaacacggtcgcctcattacaggcatggttggaggacgcggaaaaaatgctaaaccaatccgagaatgctaagaaggatttttttcggaatctgccacactggatccagcaacacaccgcgatgaatgacgccggcaattttctgattgaaacctgcgacgagatggtatctagggatctgaaacagcagctacttttattgaacgggcgctggagggagctatttatggaggtgaagcaatatgcccaggctgacgaaatggatcgtatgaaaaaggagtacacggactgcgtggtgaccctgagtgcattcgccaccgaagcacacaaaaagcttagcgagcctctggaggtgtctttcatgaacgtaaagcttctgattcaagatctggaagacatcgaacagagggtgcccgtgatggatgcccaatacaagatcatcaccaagaccgctcatctcatcactaaagagtctccacaggaagaaggtaaggaaatgtttgccactatgtcgaagcttaaggaacagctaacaaaggtaaaagagtgctacagtcctctgctttacgaaagccagcagttgttgatccctctggaagaattagagaagcagatgacttccttctatgactcattgggtaagataaacgagatcatcacggtgttagagcgggaagcccaatcgtccgccctgttcaagcagaaacaccaggaactgttagcttgccaggagaattgtaaaaaaacactgactttaattgagaagggctcccaatcggtccaaaagttcgtaaccttgtccaacgtgctgaagcattttgaccaaaccaggctgcagaggcagatcgctgatattcatgtggcctttcagtctatggtgaaaaaaaccggggattggaagaaacacgtggaaaccaactctagactcatgaagaaattcgaagaatcgagagccgagctggaaaaagtcctacggatagcacaggagggtttggaagaaaagggcgaccccgaagagctactgaggcggcacactgagtttttctcccagctggaccagagggtgcttaatgccttcctcaaagcatgtgacgagttaactgatatactccctgagcaggagcaacaaggactgcaggaggccgtcagaaaactgcataaacagtggaaggacctccagggggaagcaccataccatttgctccaccttaaaatagacgtggagaagaaccgcttcctcgcttccgttgaagagtgtagaactgagctggacagagaaacgaagcttatgcctcaggagggcagtgaaaaaattatcaaagaacatcgggtgttcttttcggataaaggccctcaccatctgtgcgagaaaaggcttcagctaatcgaagagctgtgcgtgaaactcccagtacgcgacccagtgagagacaccccagggacgtgtcacgttaccctaaaggagctgcgggcagctatagatagcacctatcgcaagttaatggaggaccctgataaatggaaagactacacatcccggttttccgaattttctagctggataagtacaaatgaaacacaactgaaggggattaaaggcgaagcaatcgacaccgctaaccacggagaagtgaaaagagccgtggaagagattcggaatggagtgacaaaacggggggaaaccttaagctggcttaagtctaggctgaaggtgctgaccgaagtgagttccgaaaacgaagcccagaagcagggtgacgaactggctaagctttctagcagtttcaaggctctcgttactctgctttctgaagtcgaaaaaatgctctctaacttcggagattgcgtacagtataaggaaatcgtgaagaattccctcgaggagctcatcagcggctctaaggaggtgcaggagcaggcggagaaaatccttgacactgagaacctgttcgaggcgcagcagctgctattacatcaccagcagaagaccaagcgaatcagtgccaaaaagcgagacgttcagcagcaaatcgcccaggcgcaacaaggcgaggggggcctccccgaccggggacatgaggaactaagaaaactggagtccaccctcgacggtctcgagcgttctagggaaaggcaggagaggcgcatccaggtgaccttgcgaaaatgggaacggttcgaaaccaataaagaaacagttgtccgatatctgttccagaccgggtcatctcatgagcgcttcctctctttttcctccctagaaagtctctccagtgaattggagcaaacaaaagaattcagtaaaagaacagagtctatcgccgtacaagcagaaaacctcgtgaaagaagccagcgaaattcccttaggcccacagaacaagcaattactgcaacaacaggctaagagcattaaagagcaggtaaaaaaattggaggataccttggaagaggacattaagaccatggagatggtgaaaaccaaatgggatcatttcggcagtaactttgaaaccttatccgtgtggataacagagaaggaaaaggagcttaacgccctcgagactagttcaagtgctatggacatgcagatcagccagatcaaagttaccatccaggaaattgagagcaagcttagttccatcgtcggtctggaagaggaagcgcagagtttcgcacagtttgtgactacgggggagagtgcccgaattaaggcgaaattaacacaaattcgtaggtacggcgaggagctacgggagcatgcacaatgtctagagggtaccattctcggtcacttgagccaacagcagaaatttgaagaaaacctcagaaagatccagcagagcgtctctgaattcgaagacaaattggccgtccctatcaagatctgttccagcgcgacggagacatacaaggttcttcaggagcacatggatctttgtcaagccttagagtcgcttagttccgccattacagctttttccgccagtgctaggaaagtcgtgaatagggactcatgcgtccaggaggccgcggcgctccaacagcagtacgaggacatcctgcgcagagcgaaggagcgccagaccgccctagagaacctcttagctcactggcagaggctggagaaggagttgtcttcattcctcacctggcttgagcggggcgaggccaaggccagctccccggagatggacatctcagctgatagagtcaaagtggagggcgaactgcagttaattcaggcgagctccagaaagttcgtgagccaggcctcattttactcgaagctgcttcagctaaaggagtcgttgttctctgtcgcctcgaaggacgatgtaaaaatgatgaagcttcacttggagcagctggacgagaggtggagagacctgccccagattataaataaacgcatcaacttccttcaaagcgtcgtggcagagcaccaacagttcgacgagctactgctgagcttctccgtgtggatcaagctgttcctcagtgagctgcagaccacgtctgaaatctccattatggaccatcaggtggctctcacgcgccacaaagaccacgctgctgaggttgagtcaaagaagggggaactgcagagtctccagggccacctcgccaaactagggagcttagggcgcgccgaggatctccaccttctacaaggcaaggccgaagactgcttccaactgttcgaagaggcgagtcaagtcgtggagagacgccaattggcccttagtcatctggccgagttcttgcagtctcatgctagcctgtctggcatactgagacagctgagacagactgtggaggcgaccaatagcatgaacaaaaacgaatcagatctgattgagaaagacctaaacgatgccctgcagaatgccaaggcgctcgagagcgcagcagtgtcactggacggcattttgagcaaggcacagtatcatctgaagataggcagcagcgaacaacggacaagttgcagagcaaccgcagatcagctgtgtggggaagtggaaagaatacagaatcttcttggtaccaaacagagcgaggcggatgcactggctgttttgaagaaagcattccaggaccaaaaggaggagttgcttaaatcaattgaagacattgaagagcgaacggataaagagcgcctgaaggaacctaccaggcaagccttacagcagcggctgagggtgtttaaccagctcgaggacgaactgaattcccacgagcatgaactttgctggttgaaggataaagccaaacagattgcccagaaggatgtcgcctttgcccccgaagtggatcgagaaattaataggcttgaagttacctgggacgatactaaacgtcttattcatgagaaccaaggccagtgttgcggattgatcgacctcatgcgggaataccagaatctgaagtccgcagtgtcaaaagtcctggagaatgcgtcttcagtcatcgtgactaggactaccattaaagatcaggaggatctgaagtgggccttcagcaagcacgaaaccgccaaaaataaaatgaactacaaacagaaggaccttgacaattttacttcaaagggaaaacacttactctcagaacttaaaaagattcatagttccgacttttccttagtgaagaccgacatggagtccactgtggataagtggttggacgtctctgaaaaacttgaggagaacatggaccggctaagggttagcctgagtatatgggatgatgtgttgagtactagggacgagattgagggctggagcaacaattgcgtgccgcagatggctgagaacatctctaatctcgacaaccatctcagggccgaagaactgcttaaggagtttgaaagcgaagttaaaaacaaggcactgcgattggaggagctccactccaaagtgaacgatctgaaagaactgactaaaaatctggaaacccctcccgaccttcaatttattgaagcagatctgatgcagaaactagaacacgctaaggaaataactgaagtggcaaaaggaacgctgaaggactttaccgcccagtcaacgcaagtggaaaagttcataaatgacataactacttggttcactaaagttgaggagagccttatgaactgtgcccagaatgaaacatgcgaggccctgaaaaaagtgaaggacatccagaaagagctgcaaagtcagcagtctaatatttcatcaactcaagagaaccttaattctctgtgccgcaaatatcatagcgccgagctcgaatctctcggccgggcgatgacaggacttataaaaaagcatgaggccgtctcccagctgtgcagcaaaactcaggccagtttacaggaatctctagagaagcacttttcagagtcaatgcaggagttccaggagtggttcttaggcgcaaaggccgccgccaaggaatcatccgatcgcacaggcgactcaaaagtcctcgaagcaaagttgcacgacctgcagaacattcttgattccgtgagtgacggccagtccaaactggatgcagtgacacaggaaggccagactctgtacgcccacctatccaaacaaatagtcagtagtattcaagagcaaatcacgaaggctaacgaggaattccaggcgtttctaaagcagtgtctcaaagataagcaggccctccaagactgtgcatcagagttggggtctttcgaagatcagcataggaagctcaatctttggattcacgaaatggaggagaggtttaacacagagaatcttggtgagtcaaagcagcatattccagaaaagaaaaacgaggttcataaggtggagatgttcctgggcgagctgctcgcagcccgcgaaagtctagacaaactgtcacaaagaggacagctgctgtccgaggaaggacacggtgcaggccaggaggggagactttgctcacagcttctgacttcgcaccagaaccttttgcggatgaccaaagagaagctcaggtcctgccaggtcgcgttgcaggagcatgaggccctagaagaagcgctccagagcatgtggttttgggttaaggccatccaggaccgccttgcttgcgccgagtctaccctgggatctaaggataccttggagaagcgtctcagccagatccaagacattctgctcatgaagggagagggcgaggtgaagctcaacatggccattggaaagggcgagcaggcacttcggagttctaataaggagggacaacgggtcatccaaacacagctcgaaactctgaaagaggtgtgggccgatattatgagctctagcgttcacgctcaatcaactctggagtcagtgatctctcagtggaatgattacgtcgaaaggaaaaaccagctggagcagtggatggaaagtgtggaccagaagatagagcacccactgcagccccagccagggctgaaggagaaattcgtgttgctagaccacctgcagtctattctatccgaggcagaagaccatactagagcattacacagactcatcgcgaagagcagagagctctacgaaaagaccgaggacgagtcctttaaagacaccgcacaggaggagcttaagacacagttcaacgatattatgaccgttgccaaggagaagatgcggaaagtggaggaaatcgtgaaggaccatttgatgtacctcgacgctgtacacgaatttaccgactggctgcactcagcaaaagaggagctgcaccgttggagtgacatgagtggtgattctagtgcaacacagaaaaaactgagtaagatcaaggagttaatcgacagccgggaaatcggtgcttcccgcctctccagggtcgagtccctggcccccgaggttaaacagaatacaactgcttcgggttgcgaactgatgcacacggaaatgcaggccctgagggccgactggaagcagtgggaggattctgtgtttcagacccagtcctgcctggaaaatttagtctctcaaatggcgctctccgaacaagagttttccggacaggttgcgcagcttgagcaggccttagagcagtttagcgcgctcctgaagacctgggcccagcaactcactctgctggagggaaagaatactgacgaggagatcgtggaatgttggcacaaggggcaggaaatcctagacgccctgcaaaaggccgaacccaggacagaagatctgaagagccaactcaacgagctgtgcagattcagcagagatttatctacttacagtggcaaagtctctggacttatcaaggagtacaactgcttatgcttgcaggcttccaaaggttgtcagaacaaagagcaaatcctgcagcagcgcttcagaaaggctttccgggactttcagcaatggcttgtgaatgctaagattaccacggctaagtgcttcgatatcccacagaacatttctgaggtctctaccagtctccagaagatccaggagtttctctctgaaagcgagaatggtcagcacaaactcaatatgatgctttccaaaggggaactgctgtcaacgcttctgacgaaggagaaagcaaaggggatccaggccaaagtaaccgccgccaaggaggattggaagaatttccacagtaacctgcatcagaaagaaagtgcactcgaaaatctcaagatacaaatgaaagacttcgaagtctctgctgaaccaatccaggattggctttcaaaaaccgaaaagatggtccacgagagctccaatcggctctacgatttaccagctaaacggcgagaacagcagaagctccagtcagtcctggaggaaattcattgctatgaacctcagcttaatcgcttgaaagagaaggcccagcagctttgggagggacaggccgctagtaagtcattccgacatcgcgtgtcccagctgtcgagccagtatctggctttgtccaatctgacaaaagaaaaggtctccagacttgaccgtatcgtggccgaacacaaccagttctcactgggtattaaggagctccaagactggatgactgacgcgatacatatgcttgactcatattgtcacccaacaagcgataaatcagtgctggactcccgcacccttaagctagaagcactcctgtccgtcaagcaggagaaggaaatccagatgaagatgatcgtgacgagaggggagagcgtgctgcagaatacttctcccgagggaatacctacaatacagcaacagcttcagtcagtaaaagatatgtgggcttcgctcctatcggctggcatcagatgcaagtcccaactcgaaggcgcgttgagtaagtggacttcttaccaggatggcgttaggcagttttcaggctggatggatagcatggaagccaacctgaatgaaagtgaaaggcagcacgctgaactcagagacaaaacgactatgttgggaaaagccaaattgctgaacgaggaggttctgtcatactcttctctgttggagaccatcgaggtgaaaggtgcagggatgacagagcactatgtcactcagctggagcttcaagatttgcaagagcgctacagggcaatacaggaacgagcgaaagaggctgtgaccaagtctgaaaagctggtgcgcttacaccaagagtaccagcgagatctgaaagcttttgaggtgtggctgggacaggaacaggagaagctcgaccaatattctgtgttggaaggggatgcccacacccatgagaccacgttgagagatttacaggaactgcaggttcattgcgcagaaggacaggctctgcttaacagtgtgctccacaccagggaggatgtgattccgtccgggatccctcaagccgaagatagagcattagaatcactaaggcaagattggcaggcctatcagcacaggctgtcagaaacgagaacgcagtttaacaacgtcgtcaataaacttagacttatggagcagaagttccagcaggtcgatgaatggctcaagacggccgaagaaaaaaagtggcacgaggaagtgaccgcataccgtgatgaagtcgaggaagttggcgctagggcccaagaaattctcgacgaatcacatgtgaattcacggatggggtgccaggcaactcaactgacttcgaggtatcaggctttacttctccaagtcctcgagcagattaagtttctagaggaggaaattcagtctctggaagagagtgagtcttctctttcaagctactctgattggtatggaagtacccataaaaattttaagaacgtggctactaaaatcgataaggtggatacagtcatgatggggaagaagttaaaaacactggaggtcctgctcaaagacatggaaaaagggcatagcctgcttaagtctgcgcgagaaaagggcgaacgagccgttaagtacctggaagaaggggaagcggagcggctccgaaaagagatccacgatcatatggagcagctgaaagagctcacaagtaccgttaggaaggaacacatgacactggaaaaaggcttgcaccttgccaaggaattttccgataagtgcaaggcgttgacacagtggattgccgaataccaagagatcctgcatgtgcccgaggaacccaagatggagctctatgagaaaaaagcacagttgagcaaatacaagagtctgcaacagacagtactgagtcatgagcctagcgttaagagtgtgcgcgaaaaaggtgaggccctcctcgaactcgtgcaggacgttacgctgaaggacaagatcgaccaactgcagagcgattatcaggacctgtgtagtatcggcaaggccatgatggaggagatcgcaggtttcgaggacaggttaaataatctgcagatgaagggcgacaccctaattggacagtgcgctgatcacctgcaggctaaattgaagcagaacgtacatgcccacctccagggtaccaaggactcttactccgcaatatgttcaaccgctcagcgcatgtatcagtccctcgaacatgaactccagaagcacgtgtctcggcaagacacactccagcaatgccaggcttggttatcagctgtccagcccgaccttgagcctagccctcaacctccactgtctcgggccgaggctattaaacaggtgaaacacttccgggcgcttcaggagcaggccagaacatatctggatctactgtgttccatgtgcgatctcagtaatgcgagcgtgaagaccaccgcaaaagatattcaacagacagaacagacgattgagcagaagttggtgcaggcccagaaccttacacagggatgggaagagattaaacatctgaagtcagaactctggatatacctgcaggacgccgaccagcagctccagaacatgaaaagacggcattcggagctggaacttaacattgcacagaacatggtttctcaagtgaaggattttgttaagaagctgcagtccaaacaggcctccgtgaacacaataattgaaaaggtcaataaacttacgaagaaagaggagagccccgagcataaggaaattaaccatttgaacgaccagtggttggatctgtgtagacaaagtaataatctgtgcttacagagggaagaagacctgcagaggacaagggattaccacgattgtatgaatgtcgtcgaagtcttcctcgagaaattcacaacggagtgggataatctagcccggagtgacgcagagagcaccgcagtccacctcgaagcattgaagaagcttgccctggcgctgcaggagcgcaagtacgctatcgaagatctgaaggatcagaaacagaagatgatcgaacatttgaacctcgatgacaaggagctggttaaggagcagacgtcccacctagagcagcgctggtttcagttggaggacttgattaaacggaagattcaggtgtccgtgaccaacctggaagaactgaacgtcgttcagtctcgcttccaagaactcatggagtgggctgaagaacaacagcccaacatcgccgaggccctgaagcagtctcccccgccagatatggcccagaatctgctgatggatcatctagccatatgctccgagcttgaggcgaagcagatgctacttaagtccctgataaaggacgccgaccgtgtgatggcagatctggggctgaacgaacgccaagtgatacaaaaagccctgtctgatgcccagtcccatgtcaactgcttatctgatcttgtggggcaaagaagaaaatacctgaataaggccctgagcgagaagacacagtttctgatggccgtttttcaagctacttctcagattcagcagcacgaaagaaaaatcatgtttcgggaacacatttgcctgctaccagatgatgtgtctaagcaagtcaaaacttgcaagagcgcgcaggcttcattaaagacataccaaaatgaagtgactggcctgtgggctcaggggcgggaattgatgaaagaagtgacagagcaggaaaaaagcgaggtgttgggcaagctacaggagctccagtccgtctatgatagtgtgttgcagaagtgctctcacagactccaggagttagaaaaaaatctggtgagcaggaaacatttcaaagaagatttcgataaagcatgtcactggctgaagcaggccgacatcgttacgtttcccgagattaacttaatgaacgagagctcagagctccatacgcagcttgcaaagtaccagaacatcctggaacagagtcccgagtatgagaatctgctgctaactctccagaggactggccaaactatactgccatcattgaatgaagtggatcatagttacctgtctgagaaactaaacgcccttccacgccagtttaacgttatcgtggcactagccaaggacaaattttacaaggtgcaggaggctatacttgcccgcaaggagtatgcctctcttattgagttgacgacacaatccctgagcgagcttgaggcccagttccttcggatgagtaaagtgcccacagaccttgcggttgaggaggccctgtctctacaggacggctgtagagccatcctggatgaggtcgccggcctgggtgaagctgtggacgagctcaatcagaagaaggaaggcttccggtcaaccgggcaaccttggcagcccgataagatgttacatctggtcactctttaccacagactcaaaaggcaaaccgaacagagagtgtccctcttagaagacacaactagcgcataccaagaacacgagaagatgtgtcagcagctggagagacagctgaaatctgtcaaagaggagcagtccaaagtgaacgaggaaacacttcctgccgaagagaagttaaaaatgtatcatagcctggccggatcactccaggactctggcattgtccttaagcgcgttactatccatctcgaagacctggcacctcatctggaccctctggcttatgagaaagctcggcatcaaatccagagttggcagggagaacttaagctgttaacttccgccattggagaaactgtcacagaatgtgaatctcggatggttcaaagtatagattttcaaactgagatgagcagaagcctggattggctgaggcgggtgaaggccgaactgagcggccctgtatacttagatttgaacctccaggacatccaggaagagatccgaaagatccagatccaccaggaagaagtacagtcgtcactaagaataatgaacgccctgtcccacaaggagaaggagaagtttactaaagctaaggagctgatttcagctgatctagaacatagcctggcagagctgagcgagctggatggcgatattcaggaggcactgcgaacgcgacaggccacgctgaccgaaatatacagtcagtgtcagaggtattaccaggttttccaagccgcaaacgactggctcgaggacgcccaggagttgctccaactcgcgggtaacggacttgacgttgagtcggctgaggagaacttgaaatcacatatggagttcttcagtacagaagaccaattccacagcaacttagaagagttacacagcctagttgcaacgctggaccccttaataaaacccacggggaaggaggacctggagcagaaggttgcttcgctcgagctgaggagtcaacggatgtcacgggactctggtgcacaggtggatctattgcaacggtgtacggctcaatggcacgattatcaaaaggcacgcgaggaggtcatagagttgatgaatgataccgaaaagaaactgtctgaattcagcctgttaaaaacctccagcagccacgaagccgaagaaaaactctcggagcataaagccctggtctccgtggttaattcgttccatgagaaaattgtggcacttgaggaaaaggcctctcagttagagaagactggcaacgatgctagcaaggccaccttgtcacggtcaatgactaccgtgtggcaaaggtggacacgactgcgggcggtcgcccaagaccaggaaaaaatattggaggacgcggtcgatgaatggacaggattcaataacaaagtgaaaaaggccaccgagatgatcgaccagctacaagataagctgcccggctcttccgccgaaaaagcctcaaaggccgaactgctgacgctgcttgagtaccacgatacctttgtgctggagctggaacagcaacaaagtgcattggggatgctacgccagcagactctgtccatgctccaggacggcgccgcgcctaccccaggagaggagccccccctgatgcaggaaatcacagccatgcaggacaggtgtctcaacatgcaggaaaaggtgaaaactaatggcaagctggtaaagcaagagctgaaagatagagaaatggtggagacacaaatcaacagcgtgaaatgttgggtacaggagacgaaggaatacctcgggaatccaaccatagagatagacgctcaactcgaggagctgcagatcctgctgaccgaggccacaaaccacaggcagaatatcgagaaaatggctgaggagcagaaagaaaaatacctcggactctatacaatacttccgagtgaactgtccctgcagttggcagaggtggccctagatctgaagataagagaccagattcaagacaagattaaagaagttgagcaaagcaaggctacgtcccaggaactcagtcgccagatccagaaactcgctaaggacctaacaacaattctgactaaactcaaggcgaagacggacaacgtggtgcaggccaaaacagaccagaaagtgctgggtgaagagcttgacgggtgtaactctaaactcatggagctggacgccgccgtgcagaagtttcttgaacagaatggtcagttaggtaagccattggcaaagaagattggcaagctgaccgaacttcatcaacagactataaggcaggctgaaaatcgactgtcaaaactgaatcaggctgcgtcccatctggaggagtacaacgaaatgcttgaactaatactcaaatggatagagaaggcgaaagtactggcacacgggaccatcgcctggaattccgcgtcccagcttcgagagcagtatattctccaccagacactcctggaagagtccaaagagatcgactctgagttggaggctatgactgaaaagcttcagtacctgacaagtgtgtactgtacagaaaaaatgtctcagcaagtggctgaacttggcagggagaccgaggaactccgccagatgataaagatccgcctgcagaatttacaggatgctgcaaaggatatgaagaagtttgaagcagagcttaagaaactgcaggcagctctggaacaagcccaggcaactctaactagtccggaagttggtcgactctccctgaaagaacagttgtcccatagacagcatctcctatcggagatggaaagcttgaagccaaaggtccaggctgtgcagctgtgccaaagcgcactccgtatccctgaggatgtggtggcttccctgccactgtgtcacgctgctctgcgtctgcaggaagaagcttctagactccagcacaccgctattcagcaatgcaacattatgcaggcagccgtcgtccagtacgagcagtacgaacaggaaatgaagcacctgcagcagctcatagaaggggctcatcgagaaattgaagacaagcctgtagctacctcaaacatacaggagctccaggctcagataagtcgccatgaagaattggcccagaaaattaaaggctaccaggaacagatcgcctctctcaacagcaagtgtaagatgctcactatgaaggctaagcacgcaaccatgctgcttaccgttacagaagtagaggggctggccgagggcaccgaggacctcgacggcgagctgctccctaccccaagcgcccatccttcggtggtcatgatgaccgctgggagatgccacactttactgagccctgttacagaagaatcaggggaggaggggaccaactccgagattagctctccccctgcctgtcgatctccaagtccggtcgcgaacaccgatgcctcagttaatcaggacatcgcctactaccaggccttaagcgccgaaagactgcagacagatgccgctaaaatacatccatctacgagtgcctcacaagagttttacgagccaggtcttgagcccagcgccacagccaaattaggggacctccagcgctcctgggagacactgaaaaatgtgatcagtgagaagcagaggacgctgtatgaagcactggaacgacaacagaagtatcaggattctctgcagagtatcagcacgaagatggaagccattgagctcaagctgtccgagtccccagaacccggcagaagcccagagagtcagatggctgaacaccaggctttgatggatgagattctgatgctccaggatgaaattaacgagctccagtcatctctggcagaggagttagtgagcgaaagttgtgaggccgatccagcagagcagttggccctgcaatctacgctgacagtgcttgccgagagaatgagtactatccgtatgaaagcttcaggcaagcggcaactcctggaggagaagcttaacgaccagctggaggagcagcgccaagaacaggctttgcagcgataccgatgtgaggcagacgagcttgacagttggctgctcagcactaaggccactctggacacggcactgagtccaccaaaggagcccatggacatggaggctcagctgatggactgtcaaaacatgctggttgagatcgagcagaaagtggtcgccctcagtgagctaagcgtgcacaatgaaaatctgttactggaaggaaaagcacacaccaaggatgaggccgagcagctggcaggcaagctgagaagactcaagggtagcctgttggagctccagagagctctgcatgacaaacagctcaacatgcagggaacggcacaggagaaggaggagtcagacgtcgatctaaccgcaacccagtctcctggcgtgcaggaatggttggcccaggcccgcacgacatggacccaacaacgccagtcttccctgcagcagcagaaggagctggaacaggagttagccgaacaaaagtcattgctgcgctcagtagcctcccgaggagaagagatcttgatacagcacagcgcagcagaaacttccggggatgccggcgagaagcccgacgttctgtcccaggaactcggtatggaaggagagaaatcaagtgctgaggaccagatgcgtatgaaatgggaaagtctgcaccaggagttctccacaaaacagaagttgttgcagaacgttctagaacaggaacaggaacaggttttgtactcacgtcctaacaggcttctctcaggggtgcctctttataagggagacgtacctacccaggataaatctgccgtgacctcacttctcgatggacttaatcaggctttcgaggaggtcagctctcagagcggaggggcaaagagacagtcaattcacttggagcagaaactgtatgatggcgttagcgccacatccacctggttggacgatgtcgaggagcgactgtttgtggcgacagccctcctcccagaggagactgaaacatgtctctttaatcaagaaattctcgcaaaggatatcaaagagatgtctgaagaaatggataagaacaagaacctattcagtcaggctttccctgaaaatggagacaatagagacgttatcgaagatacattgggttgtctcctcggcagactcagtctcctagattcggtggtcaaccaaaggtgtcatcagatgaaggaaaggctccagcagattctcaacttccaaaacgacctcaaagtgctgttcacctccttggcagacaacaagtacatcattcttcagaaactcgccaatgtctttgagcagcccgtggccgaacagatcgaggcgattcagcaggcagaggacggattgaaagagttcgacgcagggatcatcgagctgaagcggcgcggagataagcttcaggtggagcagcccagcatgcaggagctgagtaaactgcaggacatgtatgacgagctgatgatgattattgggtctcgtagaagtggactgaaccagaatctcaccctaaagtctcagtatgaaagggccctgcaggaccttgccgaccttctggagactggccaggagaagatggccggagaccagaaaatcatagtgtcctccaaggaggagatccagcaactgctcgacaaacacaaggaatacttccaaggactggagtcccatatgattctgaccgagactctgtttagaaagattatatccttcgccgttcagaaggaaacacagttccacactgagctaatggcccaggcctcagccgtgctgaaacgggcccataaacgtggcgtggaactcgaatacattttagaaacgtggtctcatctcgacgaggaccaacaagagttgtctagacaactcgaggttgtggagtctagcattccttctgttggactggtggaggagaacgaggaccgcctcatagaccgaatcacattgtaccaacatttgaagtcttcccttaacgagtatcagccaaagctttaccaggtattagatgacggcaagcgactgctgatctcaatctcgtgctccgatctcgaatcacagctgaaccaacttggggaatgttggctgagcaacacaaacaaaatgtctaaagagcttcatagattggagaccattctgaagcattggactcggtatcaatccgagtcagctgacttaatccactggcttcagtccgcgaaagatcgcctggagttttggacacaacagagcgttactgtgcctcaggagctggaaatggtcagggaccacttgaacgcctttcttgaatttagtaaggaagtggatgcccagtctagtttaaagtcttcggtcctgagtactggtaatcagctcttacgcttgaaaaaagttgataccgccactttgcgatcagagctatctaggattgactcgcagtggaccgatctgcttactaatattcccgctgtgcaggagaaactccatcagcttcaaatggacaagcttccttcaagacacgctatctctgaagtgatgagttggatcagcctcatggaaaacgtgattcagaaagacgaagacaatatcaaaaacagtattgggtacaaggctatccacgagtatctccagaagtacaaagggtttaaaattgacattaattgcaaacaactcactgtggactttgtgaatcaaagtgtgctgcagatcagcagtcaagacgtggaatctaagcgatcagacaagacagacttcgccgagcagttaggagccatgaataagagctggcaaatactgcagggcctggttaccgagaaaattcagcttctagaaggtctgctggagagttggtctgaatacgagaataacgttcaatgcctgaagacgtggttcgagacccaggaaaaacggctgaaacaacagcacaggattggcgaccaagcctccgttcagaacgctctaaaggattgtcaggacctggaggatctcataaaagcgaaggagaaagaagtcgagaaaatcgagcagaatgggttagccctcatacaaaacaagaaggaggacgtgagcagtatcgtgatgtccacacttagggagctgggccagacttgggcaaatctggaccacatggtcggccagcttaaaattcttctcaagagtgtgctcgaccaatggtccagccacaaagtagccttcgataagataaatagctacctgatggaggcacgatatagcctgagtcgattcagactcctgacaggatcgcttgaggccgtgcaggtgcaggtagacaatctccagaatctgcaggacgatctcgagaagcaggagcgatcgcttcagaagttcgggtctataacaaaccagcttttgaaggagtgtcaccctccagtgactgagactcttacaaacacactgaaagaagtgaacatgagatggaataacttactggaggagattgctgagcagctgcagagtagcaaggcactgctccagctgtggcagaggtacaaggattactccaaacagtgtgcctcaaccgtgcaacagcaggaagacaggacaaatgagttgttgaaggctgcaacaaataaagatattgcagatgacgaggttgcaacatggatccaggactgtaatgatctcttgaaaggactgggcacagtcaaggatagtctattctttctgcacgagctgggcgaacagctgaaacagcaggtagatgctagtgccgcctcagctatccagtccgaccagctcagtctatcacagcatctgtgtgctttggagcaggccctctgtaaacaacagacaagcctacaggctggcgtgctggactatgagaccttcgcgaaatccctggaagccctggaggcctggattgtggaggccgaggaaatcttgcaaggccaggacccctcacacagtagcgacctctccactattcaagagcgcatggaagagctaaaggggcagatgctcaaattcagttccatggccccggacctggaccgcctgaacgaactcggatataggctcccgcttaacgacaaggaaatcaagcggatgcaaaatttgaaccgccattggtctctcattagcagtcagacaaccgaacgctttagcaagctgcagagtttcctgcttcagcaccagacttttcttgagaagtgcgaaacctggatggagttcctggttcaaaccgaacagaagttggctgttgagatcagtgggaactatcaacacttgcttgagcagcagagagcccatgaattgtttcaagccgagatgttcagtcgccagcagatcctgcactcaattatcattgacggtcagaggttactggagcaggggcaggtcgacgacagagatgagtttaatttgaaactgacactgctatctaatcagtggcagggtgtcatcaggcgggctcagcagcgaagagggatcattgactcccagattagacagtggcagcggtacagagaaatggcggagaagcttcgcaaatggctggttgaggtttcttacctgcccatgagcggattgggtagcgtgcctattccactccagcaggctcggacactttttgatgaagtccaatttaaagagaaagtcttcttaagacagcaaggctcttatatcctgaccgtggaagctggcaagcagctgttgctgagtgcagactcgggagccgaggcagctcttcaggccgagttagccgagatccaagagaagtggaaatcagctagcatgcgcctggaagagcagaaaaagaaactcgcattcctgttaaaagactgggagaagtgtgaaaaaggaattgctgactccctagaaaagcttagaacttttaagaaaaaattgagccagtccctgcctgatcatcacgaggagctgcatgcggaacagatgcgctgcaaggagctggaaaacgcagttggcagttggacggacgacctcactcagctctccttgctgaaagacaccctgagtgcctatatctccgctgacgacatttccatcctgaacgagagggtggagcttctgcagagacagtgggaagagctctgccaccagctatcattgagaaggcagcagatcggagagaggctgaacgagtgggcagttttcagcgaaaagaacaaggaactctgtgagtggctcacacaaatggagagtaaggtgtctcaaaacggtgatatactcatagaggagatgattgagaaattgaagaaagactaccaggaagaaattgcgatagcccaagaaaataagatccagctgcagcagatgggtgagcggctcgccaaggcctcacatgagagtaaggctagtgaaatcgaatacaaactcggtaaagtcaacgatcgctggcagcacctactagaccttattgctgcacgcgtaaaaaaactgaaggaaactctagtggcagtacagcaacttgataagaacatgagtagcctgaggacctggctagctcacattgaaagtgagttagccaagccaattgtatatgatagctgtaattccgaagaaattcagcgcaaacttaacgaacagcaggaacttcagagagatattgaaaagcatagcaccggggtcgcttcagttttgaacctgtgtgaggtgttgctgcacgactgtgatgcttgcgctactgacgctgaatgtgactccatccagcaggcgaccaggaatctcgaccgaagatggcgtaacatttgcgccatgtctatggagcgacgactcaaaatcgaggagacctggcgactctggcaaaagtttctggatgactactcaagatttgaggattggctgaagtcatcagagagaactgcagcctttccctccagtagcggggtcatctatactgttgccaaggaggaacttaaaaagttcgaggcttttcagcgacaggttcatgagtgtcttacccagcttgagctgatcaataagcagtatcgcagactggcaagggagaatcggacagattccgcttgttcactgaagcagatggtgcacgaaggaaatcaaagatgggataacctgcaaaagcgcgtgacctctatcttgcggcggcttaagcatttcatcgggcagcgcgaggagtttgagactgcccgcgacagcatactggtgtggctcactgagatggacctgcaactgaccaatattgagcacttcagtgagtgcgatgtgcaggctaaaatcaagcagctgaaggcgttccaacaagagatctccttaaaccataataaaatcgaacagattatcgcacagggcgagcagcttattgaaaaaagcgaaccacttgatgctgccattatcgaggaggagctggatgagctgagacggtattgtcaagaggtattcgggcgcgtggagaggtaccataagaaactcatacgcctgccccttcctgatgatgagcatgacttgtccgatcgggaactcgagctagaggatagtgctgctctgagtgatcttcactggcatgacaggtctgctgactctttactatctccccagccaagcagcaatctaagtttgtccctagcacagcccctgagaagcgagcgaagcggaagggatacccctgccagtgtggactccatccccctcgaatgggaccacgattacgatctgtctcgcgacctggaatccgctatgtccagggcgctgccctcggaggacgaggaggggcaggacgacaaagacttctacctgcgtggggcagtgggactatctgatgtgatgatccccgagtctcccgaggcttacgttaaactaacggagaacgccattaaaaacacgtctggcgatcactcagccctggagagtcagatccgccagctgggtaaggcgttagatgactctagatttcagattcagcagaccgaaaatattatacgatccaaaaccccaacaggacctgagctggacactagctataaggggtatatgaaactcctgggcgaatgttcttcttcaattgattctgtgaagagactagaacacaagttgaaggaggaagaggaatcccttccagggttcgtaaatctgcattctactgagactcagacagccggcgtaattgatcgctgggaactcctgcaagcgcaggccctttccaaggagctccgaatgaagcagaatctacaaaaatggcaacagtttaattcggatctcaactccatctgggcctggctcggcgacacagaagaggagcttgagcagctgcagcggctggagctgtccacagacatccaaaccattgaacttcaaatcaagaagttaaaagagctccaaaaggccgtagaccatcggaaggctatcatactatcaattaacctgtgctcaccggagtttacacaggcggacagcaaagaatctcgagaccttcaggataggctctcacagatgaatggaagatgggaccgcgtgtgctcactgctcgaggaatggcgcggcctgttgcaggacgccctcatgcagtgccaaggttttcacgagatgtcgcatggacttctcctgatgctggagaatatcgaccgtaggaagaatgaaatagtgcccatcgactctaatctagacgctgagatcctgcaggatcatcacaagcagctcatgcagatcaagcacgagctgctggagtctcagctgagggtggcctccctgcaggacatgagctgtcagttgctggtgaatgcagaaggcactgactgcctggaagcgaaggaaaaagtgcacgtaattggaaaccgactgaaactcctgctcaaggaagtgagccgtcacattaaagaactcgagaagctgctggatgtcagctcaagtcagcaagatcttagtagctggagcagcgccgatgagctggatacatctgggtccgttagtcccacctctgggaggtccactccaaatcgccagaagaccccacgaggcaaatgctcactgtcacagcccggtccatctgtgagcagcccccactcacggagcacgaagggcggctctgacagctcactgagcgagcctggcccgggccggagcggtcggggcttcctgtttcgagtcctacgtgccgccctgcccctgcagctccttcttttattgctgatcggtctggcatgcctggttcccatgtccgaagaggactatagttgcgccttgtccaataatttcgcccgcagcttccatccgatgttgcgttatacaaacggaccaccgccactgtag

SEQ ID NO: 226975 - DNA, 26250 bp, Artificial Sequence
  derived and/or modified sequence
atggccaccagcagaggagccagccgctgcccccgggacatcgccaacgtgatgcagaggctgcaggatgagcaggagatcgtgcagaagaggaccttcaccaagtggatcaacagccacctggccaagaggaagccacccatggtggtggatgacctgtttgaggacatgaaggatggagtgaagctgctggccctgctggaggtgctgagcggccagaagctgccctgtgagcagggccgcaggatgaagagaattcatgctgtggccaacatcggcacagccctgaagttcctggagggcaggaagtccatgcaccggggcagccccatcaagctggtgaacatcaacagcacagacattgctgatggccggcccagcatcgtgctgggcctgatgtggaccatcatcctgtacttccagatcgaggagctgaccagcaacctgccccagctgcagagcctgagcagcagcgccagctctgtggacagcatcgtgagcagcgagacccccagcccccccagcaagaggaaggtgaccaccaagatccagggcaatgccaagaaggccctgctgaagtgggtgcagtacacagctgggaagcagacaggaattgaggtgaaggactttgggaagtcctggaggtctggagtggccttccacagcgtcatccacgccatccggcctgagctggtggacctggagaccgtgaagggccgcagcaaccgggagaacctggaggatgccttcaccatcgccgagacagagctgggcatcccccggctgctggaccctgaagatgtggatgtggacaagccagatgagaagagcatcatgacctacgtggcccagttcctgaagcactacccagacatccacaatgccagcacagatggccaggaggatgatgagatcctgcccggcttccccagctttgccaacagcgtgcagaacttcaagcgggaggacagagtcatcttcaaggagatgaaggtgtggattgagcagtttgagcgggacctgacccgggcccagatggtggagagcaacctgcaggacaagtaccagagcttcaagcacttccgggtgcagtatgagatgaagaggaagcagatcgagcacctgatccagcccctgcacagagatggcaagctgagcctggaccaggccctggtgaagcagagctgggacagagtgaccagccggctgtttgactggcacatccagctggacaagagcctgcctgcccccctgggcaccatcggggcctggctgtacagagctgaggtggccctgcgggaggagatcaccgtgcagcaggtgcatgaggagacagccaacaccatccagaggaagctggagcagcacaaggacctgctgcagaacacagatgcccacaagagggccttccacgagatctaccgcaccaggtctgtgaatggcatccctgtgcccccagaccagctggaggacatggccgagcgcttccactttgtgagcagcaccagcgagctgcacctgatgaagatggagttcctggagctgaagtaccgcctgctgagcctgctggtgctggccgagagcaagctgaagtcctggatcatcaagtatggaagaagagagagcgtggagcagctgctgcagaactacgtgtccttcatcgagaacagcaagttctttgagcagtatgaggtgacctaccagatcctgaagcagacagctgagatgtatgtgaaggcagatggctctgtggaggaggccgagaatgtgatgaagttcatgaatgagaccacagcccagtggaggaacctgtctgtggaggtgcgctctgtgcgctccatgctggaggaggtgatcagcaactgggacagatatggcaacacagtggccagcctgcaggcctggctggaggatgctgagaagatgctgaaccagagtgaaaatgccaagaaggacttcttcaggaacctgccccactggatccagcagcacacagccatgaatgatgctggcaacttcctgattgagacctgtgatgagatggtgtcccgggacctgaagcagcagctgctgctgctgaatggccgctggagggagctgttcatggaggtgaagcagtatgcccaggctgatgagatggacaggatgaagaaggagtacacagactgtgtggtgaccctgagcgcctttgccacagaggcccacaagaagctgtctgagcccctggaggtgtccttcatgaatgtgaagctgctgatccaggacctggaggacatcgagcagagggtgcctgtgatggatgcccagtacaagatcatcaccaagacagcccacctgatcaccaaggagagcccccaggaggagggcaaggagatgtttgccaccatgagcaagctgaaggagcagctgaccaaggtgaaggagtgctacagccccctgctgtatgagagccagcagctgctgatccccctggaggagctggagaagcagatgaccagcttctatgacagcctgggcaagatcaatgagatcatcaccgtgctggagcgggaggcccagagcagcgccctcttcaagcagaagcaccaggagctgctggcctgccaggagaactgcaagaagaccctgaccctgattgagaagggcagccagagcgtgcagaagtttgtgaccctgagcaatgtgctgaagcactttgaccagacccggctgcagaggcagattgctgacatccacgtggccttccagagcatggtgaagaagacaggagactggaagaagcacgtggagaccaacagccggctgatgaagaagtttgaggagagcagagctgagctggagaaggtgctgcgcatcgcccaggagggcctggaggagaagggggaccctgaggagctgctgcggcggcacacagagttcttcagccagctggaccagagggtgctgaatgccttcctgaaggcctgtgatgagctgacagacatcctgcctgagcaggagcagcagggcctgcaggaggccgtgaggaagctgcacaagcagtggaaggacctgcagggcgaggccccctaccacctgctgcacctgaagattgatgtggagaagaaccgcttcctggcctctgtggaggagtgcaggacagagctggaccgggagaccaagctgatgccccaggagggcagcgagaagatcatcaaggagcacagggtcttcttcagtgacaagggcccccaccacctgtgtgagaagaggctgcagctgattgaggagctgtgtgtgaagctgcctgtgcgggaccctgtgcgggacaccccaggcacctgccacgtgaccctgaaggagctgcgggccgccatcgacagcacctacaggaagctgatggaggaccctgacaagtggaaggactacaccagccgcttcagcgagttcagctcctggatcagcaccaatgagacccagctgaagggcatcaagggggaggccatcgacacagccaaccacggggaggtgaagagagctgtggaggagatcagaaatggagtgaccaagagaggagagaccctgtcctggctgaagagccggctgaaggtgctgacagaggtgtccagtgaaaatgaggcccagaagcagggagatgagctggccaagctgagcagcagcttcaaggccctggtgaccctgctgtctgaggtggagaagatgctgagcaactttggagactgtgtgcagtacaaggagatcgtgaagaacagcctggaggagctgatcagcggcagcaaggaggtgcaggagcaggccgagaagatcctggacacagagaacctgtttgaggcccagcagctgctgctgcaccaccagcagaagaccaagaggatcagcgccaagaagagagatgtgcagcagcagatcgcccaggcccagcagggcgagggcggcctgcctgaccggggccacgaggagctgaggaagctggagagcaccctggatggcctggagaggagccgggagcggcaggagcggcgcatccaggtgaccctgaggaagtgggagagatttgagaccaacaaggagaccgtggtgcgctacctgttccagacaggcagcagccatgagcgcttcctgtccttcagcagcctggagagcctgagcagcgagctggagcagaccaaggagttcagcaagaggacagagagcattgctgtgcaggccgagaacctggtgaaggaggccagcgagatccccctgggcccccagaacaagcagctgctgcagcagcaggccaagagcatcaaggagcaggtgaagaagctggaggacaccctggaggaggacatcaagaccatggagatggtgaagaccaagtgggaccacttcggcagcaactttgagaccctgtctgtgtggatcacagagaaggagaaggagctgaatgccctggagaccagcagcagcgccatggacatgcagatcagccagatcaaggtgaccatccaggagattgagagcaagctgagcagcatcgtgggcctggaggaggaggcccagagctttgcccagtttgtgaccactggagagagcgcccgcatcaaggccaagctgacccagatcagaagatatggagaggagctgcgggagcacgcccagtgcctggagggcaccatcctgggccacctgagccagcagcagaagtttgaggagaacctgaggaagatccagcagagcgtgtctgaatttgaggacaagctggccgtgcccatcaagatctgcagcagcgccacagagacctacaaggtgctgcaggagcacatggacctgtgccaggccctggagagcctgagcagcgccatcacagccttcagcgccagcgccaggaaggtggtgaacagagacagctgtgtgcaggaggccgccgccctgcagcagcagtatgaggacatcctgcggcgggccaaggagcggcagacagccctggagaacctgctggcccactggcagaggctggagaaggagctgagcagcttcctgacctggctggagcggggggaggccaaggccagcagccctgagatggacatctctgctgacagagtgaaggtggagggggagctgcagctgatccaggccctgcagaatgaggtggtgtcccaggccagcttctacagcaagctgctgcagctgaaggagagcctcttctctgtggccagcaaggatgatgtgaagatgatgaagctgcacctggagcagctggatgagcgctggagggacctgccccagatcatcaacaagaggatcaacttcctgcagagcgtggtggccgagcaccagcagtttgatgagctgctgctgtccttctctgtgtggatcaagctgttcctgtctgagctgcagaccaccagcgagatcagcatcatggaccaccaggtggccctgaccaggcacaaggaccatgctgctgaggtggagagcaagaagggggagctgcagagcctgcagggccacctggccaagctgggcagcctgggccgggcagaggacctgcacctgctgcagggcaaggccgaggactgcttccagctgtttgaggaggccagccaggtggtggagcggcggcagctggccctgagccacctggccgagttcctgcagagccacgccagcctgagcggcatcctgcggcagctgcggcagacagtggaggccaccaacagcatgaacaagaatgaaagtgacctgattgagaaggacctgaatgatgccctgcagaatgccaaggccctggagagcgctgctgtgtccctggatggcatcctgagcaaggcccagtaccacctgaagattggcagcagcgagcagaggaccagctgccgggccacagctgaccagctgtgtggggaggtggagcgcatccagaacctgctgggcaccaagcagagcgaggctgatgccctggccgtgctgaagaaggccttccaggaccagaaggaggagctgctgaagagcattgaggacatcgaggagaggacagacaaggagcggctgaaggagcccacccggcaggccctgcagcagaggctgcgggtcttcaaccagctggaggatgagctgaacagccatgagcacgagctgtgctggctgaaggacaaggccaagcagatcgcccagaaggatgtggcctttgcccctgaggtggaccgggagatcaaccggctggaggtgacctgggatgacaccaagaggctcatccacgagaaccagggccagtgctgcggcctgattgacctgatgagggagtaccagaacctgaagtctgctgtgtccaaggtgctggagaatgccagcagcgtcatcgtgaccaggaccaccatcaaggaccaggaggacctgaagtgggccttcagcaagcatgaaacagccaagaacaagatgaactacaagcagaaggacctggacaacttcaccagcaagggcaagcacctgctgtctgagctgaagaagatccacagcagtgacttcagcctggtgaagacagacatggagagcacagtggacaagtggctggatgtgtctgagaagctggaggagaacatggaccggctgcgggtgtccctgagcatctgggatgatgtgctgagcaccagagatgaaattgagggctggagcaacaactgtgtgccccagatggccgagaacatcagcaacctggacaaccacctgcgggcagaggagctgctgaaggagtttgaaagtgaggtgaagaacaaggccctgcggctggaggagctgcacagcaaggtgaatgacctgaaggagctgaccaagaacctggagaccccaccagacctgcagttcatcgaggccgacctgatgcagaagctggagcacgccaaggagatcacagaggtggccaagggcaccctgaaggacttcaccgcccagagcacccaggtggagaagttcatcaatgacatcaccacctggttcaccaaggtggaggagagcctgatgaactgtgcccagaatgagacctgtgaggccctgaagaaggtgaaggacatccagaaggagctgcagagccagcagagcaacatcagcagcacccaggagaacctgaacagcctgtgcaggaagtaccacagcgctgagctggagagcctgggccgggccatgacaggcctcatcaagaagcatgaggccgtgtcccagctgtgcagcaagacccaggccagcctgcaggagagcctggagaagcacttcagcgagagcatgcaggagttccaggagtggttcctgggcgccaaggctgctgccaaggagagcagtgacagaactggagacagcaaggtgctggaggccaagctgcatgacctgcagaacatcctggacagcgtgtctgatggccagagcaagctggatgctgtgacccaggagggccagaccctgtatgcccacctgagcaagcagatcgtgagcagcatccaggagcagatcaccaaggccaatgaggagttccaggccttcctgaagcagtgcctgaaggacaagcaggccctgcaggactgtgccagcgagctgggcagctttgaggaccagcacaggaagctgaacctgtggattcatgagatggaggagcgcttcaacacagagaacctgggggagagcaagcagcacatccctgagaagaagaatgaggtgcacaaggtggagatgttcctgggggagctgctggccgcccgggagagcctggacaagctgagccagaggggccagctgctgtctgaggagggccacggggccggccaggagggccgcctgtgcagccagctgctgaccagccaccagaacctgctgaggatgaccaaggagaagctgcggagctgccaggtggccctgcaggagcacgaggccctggaggaggccctgcagagcatgtggttctgggtgaaggccatccaggaccggctggcctgtgccgagagcaccctgggcagcaaggacaccctggagaagaggctgagccagatccaggacatcctgctgatgaagggggagggggaggtgaagctgaacatggccatcggcaagggggagcaggccctgcggagcagcaacaaggagggccagagggtcatccagacccagctggagaccctgaaggaggtgtgggccgacatcatgagcagctctgtgcacgcccagagcaccctggagagcgtcatcagccagtggaatgactatgtggagaggaagaaccagctggagcagtggatggagagcgtggaccagaagattgagcaccccctgcagccccagcccggcctgaaggagaagtttgtgctgctggaccacctgcagagcatcctgtctgaggccgaggaccacacccgggccctgcaccggctgattgccaagagccgggagctgtatgagaagacagaagatgagagcttcaaggacacagcccaggaggagctgaagacccagttcaatgacatcatgacagtggccaaggagaagatgaggaaggtggaggagatcgtgaaggaccacctgatgtacctggatgctgtgcatgagttcacagactggctgcacagcgccaaggaggagctgcaccgctggagcgacatgtctggggacagcagcgccacccagaagaagctgagcaagatcaaggagctgattgacagccgggagattggagccagccggctgagccgggtggagagcctggcccctgaggtgaagcagaacaccacagccagcggctgtgagctgatgcacacagagatgcaggccctgcgggctgactggaagcagtgggaggacagcgtcttccagacccagagctgcctggagaacctggtgtcccagatggccctgtctgagcaggagttcagcggccaggtggcccagctggagcaggccctggagcagttcagcgccctgctgaagacctgggcccagcagctgaccctgctggagggcaagaacacagatgaggagatcgtggagtgctggcacaagggccaggagatcctggatgccctgcagaaggccgagcccaggacagaggacctgaagagccagctgaatgagctgtgccgcttcagccgggacctgagcacctacagcggcaaggtgtctggcctcatcaaggagtacaactgcctgtgcctgcaggccagcaagggctgccagaacaaggagcagatcctgcagcagcgcttcaggaaggccttccgggacttccagcagtggctggtgaatgccaagatcaccacagccaagtgctttgacatcccccagaacatcagcgaggtgtccaccagcctgcagaagatccaggagttcctgtctgagagtgaaaatggccagcacaagctgaacatgatgctgagcaagggggagctgctgagcaccctgctgaccaaggagaaggccaagggcatccaggccaaggtgacagctgccaaggaggactggaagaacttccacagcaacctgcaccagaaggagagcgccctggagaacctgaagatccagatgaaggactttgaggtgtctgctgagcccatccaggactggctgagcaagacagagaagatggtgcatgagagcagcaaccggctgtatgacctgcctgccaagagaagagagcagcagaagctgcagagcgtgctggaggagatccactgctatgagccccagctgaaccggctgaaggagaaggcccagcagctgtgggagggccaggccgccagcaagagcttccgccaccgggtgtcccagctgagcagccagtacctggccctgagcaacctgaccaaggagaaggtgtcccggctggacagaattgtggccgagcacaaccagttcagcctgggcatcaaggagctgcaggactggatgacagatgccatccacatgctggacagctactgccaccccaccagtgacaagtctgtgctggacagcaggaccctgaagctggaggccctgctgtctgtgaagcaggagaaggagatccagatgaagatgattgtgaccagaggagagagcgtgctgcagaacaccagccctgagggcatccccaccatccagcagcagctgcagagcgtgaaggacatgtgggccagcctgctgtctgctggcatccgctgcaagagccagctggagggcgccctgagcaagtggaccagctaccaggatggagtgcggcagttcagcggctggatggacagcatggaggccaacctgaatgaaagtgagcggcagcacgccgagctgcgggacaagaccaccatgctgggcaaggccaagctgctgaatgaggaggtgctgagctacagcagcctgctggagaccatcgaggtgaagggagctggcatgacagagcactacgtgacccagctggagctgcaggacctgcaggagcgctaccgggccatccaggagcgggccaaggaggccgtgaccaagtctgagaagctggtgcggctgcaccaggagtaccagagggacctgaaggcctttgaggtgtggctgggccaggagcaggagaagctggaccagtacagcgtgctggagggagatgcccacacccatgagaccaccctgcgggacctgcaggagctgcaggtgcactgtgccgagggccaggccctgctgaacagcgtgctgcacacccgggaggatgtgatccccagcggcatcccccaggctgaagatcgggccctggagagcctgcggcaggactggcaggcctaccagcaccggctgtctgagaccaggacccagttcaacaacgtggtgaacaagctgcggctgatggagcagaagttccagcaggtggatgagtggctgaagacagctgaggagaagaagtggcatgaggaggtgacagcctacagagatgaggtggaggaggtgggcgcccgggcccaggagatcctggatgagagccacgtgaacagcaggatgggctgccaggccacccagctgaccagccgctaccaggccctgctgctgcaggtgctggagcagatcaagttcctggaggaggagatccagagcctggaggagagcgagagcagcctgagcagctacagcgactggtacggcagcacccacaagaacttcaagaatgtggccaccaagattgacaaggtggacacagtgatgatgggcaagaagctgaagaccctggaggtgctgctgaaggacatggagaagggccacagcctgctgaagagcgcccgggagaagggggagagagctgtgaagtacctggaggagggggaggccgagcggctgaggaaggagatccatgaccacatggagcagctgaaggagctgaccagcacagtgaggaaggagcacatgaccctggagaagggcctgcacctggccaaggagttcagtgacaagtgcaaggccctgacccagtggattgctgagtaccaggagatcctgcacgtgcctgaggagcccaagatggagctgtatgagaagaaggcccagctgagcaagtacaagagcctgcagcagacagtgctgagccatgagcccagcgtgaagtctgtgcgggagaagggggaggccctgctggagctggtgcaggatgtgaccctgaaggacaagattgaccagctgcagagcgactaccaggacctgtgcagcatcggcaaggccatgatggaggagattgctggctttgaggaccggctgaacaacctgcagatgaagggggacaccctcatcggccagtgtgccgaccacctgcaggccaagctgaagcagaatgtgcacgcccacctgcagggcaccaaggacagctacagcgccatctgcagcacagcccagaggatgtaccagagcctggagcacgagctgcagaagcacgtgtcccggcaggacaccctgcagcagtgccaggcctggctgtctgctgtgcagcctgacctggagcccagcccccagccccccctgagcagagctgaggccatcaagcaggtgaagcacttccgggccctgcaggagcaggcccggacctacctggacctgctgtgcagcatgtgtgacctgagcaatgcctctgtgaagaccacagccaaggacatccagcagacagagcagaccatcgagcagaagctggtgcaggcccagaacctgacccagggctgggaggagatcaagcacctgaagtctgagctgtggatctacctgcaggatgctgaccagcagctgcagaacatgaagagaagacacagcgagctggagctgaacatcgcccagaacatggtgtcccaggtgaaggactttgtgaagaagctgcagagcaagcaggcctctgtgaacaccatcatcgagaaggtgaacaagctgaccaagaaggaggagagccctgagcacaaggagatcaaccacctgaatgaccagtggctggacctgtgccggcagagcaacaacctgtgcctgcagcgggaggaggacctgcagaggacccgggactaccatgactgcatgaatgtggtggaggtgttcctggagaagttcaccacagagtgggacaacctggcccggagtgatgctgagagcacagctgtgcacctggaggccctgaagaagctggccctggccctgcaggagaggaaatatgccatcgaggacctgaaggaccagaagcagaagatgattgagcacctgaacctggatgacaaggagctggtgaaggagcagaccagccacctggagcagcgctggttccagctggaggacctgatcaagaggaagatccaggtgtctgtgaccaacctggaggagctgaatgtggtgcagagccgcttccaggagctgatggagtgggccgaggagcagcagcccaacattgctgaggccctgaagcagagccccccaccagacatggcccagaacctgctgatggaccacctggccatctgcagcgagctggaggccaagcagatgctgctgaagagcctcatcaaggatgctgacagagtgatggctgacctgggcctgaatgaaaggcaggtgatccagaaggccctgagtgatgcccagagccacgtgaactgcctgagtgacctggtgggccagaggaggaagtacctgaacaaggccctgtctgagaagacccagttcctgatggctgtgttccaggccaccagccagatccagcagcacgagaggaagatcatgttccgggagcacatctgcctgctgcctgatgatgtgtccaagcaggtgaagacctgcaagagcgcccaggccagcctgaagacctaccagaatgaggtgacaggcctgtgggcccagggccgggagctgatgaaggaggtgacagagcaggagaagtctgaggtgctgggcaagctgcaggagctgcagagcgtgtatgacagcgtgctgcagaagtgcagccaccggctgcaggagctggagaagaacctggtgtccaggaagcacttcaaggaggactttgacaaggcctgccactggctgaagcaggccgacatcgtgaccttccctgagatcaacctgatgaatgaatcttctgagctgcacacccagctggccaagtaccagaacatcctggagcagagcccagaatatgagaacctgctgctgaccctgcagaggacaggccagaccatcctgcccagcctgaatgaggtggaccacagctacctgtctgagaagctgaatgccctgccccggcagttcaacgtcatcgtggccctggccaaggacaagttctacaaggtgcaggaggccatcctggccaggaaggagtatgccagcctgattgagctgaccacccagagcctgtctgagctggaggcccagttcctgaggatgagcaaggtgcccacagacctggccgtggaggaggccctgagcctgcaggacggctgccgggccatcctggatgaggtggccggcctgggggaggccgtggatgagctgaaccagaagaaggagggcttccgcagcacaggccagccctggcagcctgacaagatgctgcacctggtgaccctgtaccaccggctgaagaggcagacagagcagagggtgtccctgctggaggacaccaccagcgcctaccaggagcacgagaagatgtgccagcagctggagcggcagctgaagtctgtgaaggaggagcagagcaaggtgaatgaggagaccctgcctgctgaggagaagctgaagatgtaccacagcctggccggcagcctgcaggacagcggcatcgtgctgaagagggtgaccatccacctggaggacctggccccccacctggaccccctggcctatgagaaggcccggcaccagatccagagctggcagggcgagctgaagctgctgaccagcgccatcggggagaccgtgacagaatgtgagagcaggatggtgcagagcattgacttccagacagagatgagccgcagcctggactggctgcggcgggtgaaggccgagctgagcggccctgtgtacctggacctgaacctgcaggacatccaggaggagatcaggaagatccagatccaccaggaggaggtgcagagcagcctgcgcatcatgaatgccctgagccacaaggagaaggagaagttcaccaaggccaaggagctgatctctgctgacctggagcacagcctggccgagctgtctgagctggatggagacatccaggaggccctgcggacccggcaggccaccctgacagagatctacagccagtgccagcgctactaccaggtgttccaggccgccaatgactggctggaggatgcccaggagctgctgcagctggccggaaatggcctggatgtggagagcgctgaggagaacctgaagagccacatggagttcttcagcacagaggaccagttccacagcaacctggaggagctgcacagcctggtggccaccctggaccccctcatcaagcccaccgggaaggaggacctggagcagaaggtggccagcctggagctgcggagccagaggatgagccgggacagcggggcccaggtggacctgctgcagcgctgcacagcccagtggcatgactaccagaaggcccgggaggaggtgattgagctgatgaatgacacagagaagaagctgtctgagttcagcctgctgaagaccagcagcagccatgaagctgaggagaagctgtctgagcacaaggccctggtgtctgtggtgaacagcttccacgagaagatcgtggccctggaggagaaggccagccagctggagaagacaggaaatgatgccagcaaggccaccctgagccgctccatgaccaccgtgtggcagcgctggacccggctgcgggctgtggcccaggaccaggagaagatcctggaggatgctgtggatgagtggacaggcttcaacaacaaggtgaagaaggccacagagatgattgaccagctgcaggacaagctgcccggcagcagcgctgagaaggccagcaaggccgagctgctgaccctgctggagtaccatgacacctttgtgctggagctggagcagcagcagagcgccctgggcatgctgcggcagcagaccctgtccatgctgcaggatggagctgcccccaccccaggagaggagccccccctgatgcaggagatcacagccatgcaggaccgctgcctgaacatgcaggagaaggtgaagaccaacgggaagctggtgaagcaggagctgaaggaccgggagatggtggagacccagatcaacagcgtgaagtgctgggtgcaggagaccaaggagtacctgggcaaccccaccatcgagattgatgcccagctggaggagctgcagatcctgctgacagaggccaccaaccaccggcagaacatcgagaagatggccgaggagcagaaggagaagtacctgggcctgtacaccatcctgcccagcgagctgagcctgcagctggccgaggtggccctggacctgaagatccgggaccagatccaggacaagatcaaggaggtggagcagagcaaggccaccagccaggagctgagccggcagatccagaagctggccaaggacctgaccaccatcctgaccaagctgaaggccaagacagacaacgtggtgcaggccaagacagaccagaaggtgctgggggaggagctggatggctgcaacagcaagctgatggagctggatgctgctgtgcagaagttcctggagcagaatggccagctgggcaagcccctggccaagaagattggcaagctgacagagctgcaccagcagaccatccggcaggctgaaaatcggctgagcaagctgaaccaggccgccagccacctggaggagtacaatgagatgctggagctgatcctgaagtggattgagaaggccaaggtgctggcccacggcaccatcgcctggaacagcgccagccagctgcgggagcagtacatcctgcaccagaccctgctggaggagagcaaggagattgacagcgagctggaggccatgacagagaagctgcagtacctgacctctgtgtactgcacagagaagatgagccagcaggtggccgagctgggccgggagacagaggagctgcggcagatgatcaagatccggctgcagaacctgcaggatgctgccaaggacatgaagaagtttgaggccgagctgaagaagctgcaggccgccctggagcaggcccaggccaccctgaccagccctgaggtgggccgcctgagcctgaaggagcagctgagccaccggcagcacctgctgtctgagatggagagcctgaagcccaaggtgcaggccgtgcagctgtgccagagcgccctgcgcatcccagaagatgtggtggccagcctgcccctgtgccacgccgccctgcggctgcaggaggaggccagccggctgcagcacacagccatccagcagtgcaacatcatgcaggccgctgtggtgcagtatgagcagtatgagcaggagatgaagcacctgcagcagctgattgaaggagcccaccgggagattgaggacaagcctgtggccaccagcaacatccaggagctgcaggcccagatcagcagacatgaggagctggcccagaagatcaagggctaccaggagcagatcgccagcctgaacagcaagtgcaagatgctgaccatgaaggccaagcacgccaccatgctgctgactgtgacagaggtggagggcctggccgagggcacagaggacctggatggagagctgctgcccaccccatctgcccaccccagcgtggtgatgatgacagctggccgctgccacaccctgctgagccctgtgacagaggagagcggggaggagggcaccaacagcgagatcagcagccccccagcctgccgcagccccagccctgtggccaacacagatgcctctgtgaaccaggacatcgcctactaccaggccctgtctgctgagcggctgcagacagatgctgccaagatccaccccagcaccagcgccagccaggagttctatgagcccggcctggagcccagcgccacagccaagctgggggacctgcagaggtcctgggagaccctgaagaatgtcatcagcgagaagcagaggaccctgtatgaggccctggagcggcagcagaagtaccaggacagcctgcagagcatcagcaccaagatggaggccatcgagctgaagctgtctgagagccctgagcccggccgcagccctgagagccagatggccgagcaccaggccctgatggatgagatcctgatgctgcaggatgagatcaatgagctgcagagcagcctggccgaggagctggtgtctgagagctgtgaggccgaccctgctgagcagctggccctgcagagcaccctgactgtgctggccgagaggatgagcaccatccgcatgaaggccagcggcaagaggcagctgctggaggagaagctgaatgaccagctggaggagcagaggcaggagcaggccctgcagcgctaccgctgtgaggctgatgagctggacagctggctgctgagcaccaaggccaccctggacacagccctgagcccccccaaggagcccatggacatggaggcccagctgatggactgccagaacatgctggtggagattgagcagaaggtggtggccctgtctgagctgtctgtgcacaatgaaaacctgctgctggagggcaaggcccacaccaaggatgaagctgagcagctggccggcaagctgcggcggctgaagggcagcctgctggagctgcagagggccctgcatgacaagcagctgaacatgcagggcacagcccaggagaaggaggagagtgatgtggacctgacagccacccagagccctggggtgcaggagtggctggcccaggcccggaccacctggacccagcagaggcagagcagcctgcagcagcagaaggagctggagcaggagctggccgagcagaagagcctgctgcggtctgtggccagcagaggagaggagatcctgatccagcacagcgctgctgagaccagcggagatgctggggagaagccagatgtgctgagccaggagctgggcatggagggggagaagagcagcgctgaggaccagatgaggatgaagtgggagagcctgcaccaggagttcagcaccaagcagaagctgctgcagaatgtgctggagcaggagcaggagcaggtgctgtacagccggcccaaccggctgctgtctggagtgcccctgtacaagggagatgtgcccacccaggacaagtctgctgtgaccagcctgctggatggcctgaaccaggcctttgaggaggtgagcagccagagcggcggggccaagaggcagagcatccacctggagcagaagctgtatgatggagtgtctgccaccagcacctggctggatgatgtggaggagcggctgtttgtggccacagccctgctgcctgaggagacagagacctgcctcttcaaccaggagatcctggccaaggacatcaaggagatgtctgaggagatggacaagaacaagaacctcttcagccaggccttcccagaaaatggagacaacagagatgtgattgaggacaccctgggctgcctgctgggccgcctgagcctgctggacagcgtggtgaaccagcgctgccaccagatgaaggagcggctgcagcagatcctgaacttccagaatgacctgaaggtgctcttcaccagcctggccgacaacaagtacatcatcctgcagaagctggccaacgtgtttgagcagcctgtggccgagcagatcgaggccatccagcaggctgaagatggcctgaaggagtttgatgctggcatcatcgagctgaagagaagaggagacaagctgcaggtggagcagcccagcatgcaggagctgagcaagctgcaggacatgtatgatgagctgatgatgatcatcggcagccgccgcagcggcctgaaccagaacctgaccctgaagagccagtatgaaagagccctgcaggacctggccgacctgctggagaccggccaggagaagatggccggggaccagaagatcatcgtgagcagcaaggaggagatccagcagctgctggacaagcacaaggagtacttccagggcctggagagccacatgatcctgacagagaccctcttcaggaagatcatcagctttgctgtgcagaaggagacccagttccacacagagctgatggcccaggccagcgctgtgctgaagagggcccacaagaggggcgtggagctggagtacatcctggagacctggagccacctggatgaggaccagcaggagctgagccggcagctggaggtggtggagagcagcatccccagcgtgggcctggtggaggagaatgaagatcggctgattgaccgcatcaccctgtaccagcacctgaagagcagcctgaatgagtaccagcccaagctgtaccaggtgctggatgatggcaagaggctgctgatcagcatcagctgcagcgacctggagagccagctgaaccagctgggggagtgctggctgagcaacaccaacaagatgagcaaggagctgcaccggctggagaccatcctgaagcactggacccgctaccagagcgagagcgctgacctgatccactggctgcagagcgccaaggaccggctggagttctggacccagcagagcgtgacagtgccccaggagctggagatggtgcgggaccacctgaatgccttcctggagttcagcaaggaggtggatgcccagagcagcctgaagagctctgtgctgagcactggaaaccagctgctgcggctgaagaaggtggacacagccaccctgcggtctgagctgagcagaattgacagccagtggacagacctgctgaccaacatcccagctgtgcaggagaagctgcaccagctgcagatggacaagctgcccagcagacatgccatcagcgaggtgatgtcctggatcagcctgatggagaatgtcatccagaaggatgaggacaacatcaagaacagcatcggctacaaggccatccacgagtacctgcagaagtacaagggcttcaagattgacatcaactgcaagcagctgactgtggactttgtgaaccagagcgtgctgcagatcagcagccaggatgtggagagcaagagaagtgacaagacagactttgctgagcagctgggcgccatgaacaagtcctggcagatcctgcagggcctggtgacagagaagatccagctgctggagggcctgctggagagctggagcgaatatgaaaataatgtgcagtgcctgaagacctggtttgagacccaggagaagaggctgaagcagcagcaccgcatcggggaccaggcctctgtgcagaatgccctgaaggactgccaggacctggaggacctgatcaaggccaaggagaaggaggtggagaagattgagcagaatggcctggccctgatccagaacaagaaggaggatgtgagcagcatcgtgatgagcaccctgcgggagctgggccagacctgggccaacctggaccacatggtgggccagctgaagatcctgctgaagtctgtgctggaccagtggagcagccacaaggtggcctttgacaagatcaacagctacctgatggaggcccgctacagcctgagccgcttccggctgctgaccggcagcctggaggccgtgcaggtgcaggtggacaacctgcagaacctgcaggatgacctggagaagcaggagaggagcctgcagaagtttggcagcatcaccaaccagctgctgaaggagtgccacccccctgtgacagagaccctgaccaacaccctgaaggaggtgaacatgcgctggaacaacctgctggaggagattgctgagcagctgcagagcagcaaggccctgctgcagctgtggcagcgctacaaggactacagcaagcagtgtgccagcacagtgcagcagcaggaggacaggaccaatgagctgctgaaggccgccaccaacaaggacattgctgatgatgaggtggccacctggatccaggactgcaatgacctgctgaagggcctgggcaccgtgaaggacagcctcttcttcctgcacgagctgggggagcagctgaagcagcaggtggatgccagcgctgccagcgccatccagagcgaccagctgagcctgagccagcacctgtgtgccctggagcaggccctgtgcaagcagcagaccagcctgcaggccggcgtgctggactatgagacctttgccaagagcctggaggccctggaggcctggatcgtggaggccgaggagatcctgcagggccaggaccccagccacagcagtgacctgagcaccatccaggagaggatggaggagctgaagggccagatgctgaagttcagctccatggccccagacctggaccggctgaatgagctgggctaccgcctgcccctgaatgacaaggagatcaagaggatgcagaacctgaacagacactggagcctcatcagcagccagaccacagagcgcttcagcaagctgcagagcttcctgctgcagcaccagaccttcctggagaagtgtgagacctggatggagttcctggtgcagacagagcagaagctggccgtggagatcagcggcaactaccagcacctgctggagcagcagagggcccacgagctgttccaggccgagatgttcagccggcagcagatcctgcacagcatcatcattgatggccagaggctgctggagcagggccaggtggatgacagagatgagttcaacctgaagctgaccctgctgagcaaccagtggcagggcgtcatccggcgggcccagcagaggcggggcatcatcgacagccagatccggcagtggcagcgctaccgggagatggccgagaagctgaggaagtggctggtggaggtgtcctacctgcccatgagcggcctgggctctgtgcccatccccctgcagcaggcccggaccctgtttgatgaggtgcagttcaaggagaaggtgttcctgcggcagcagggcagctacatcctgactgtggaggccggcaagcagctgctgctgtctgctgacagcggggctgaggccgccctgcaggccgagctggccgagatccaggagaagtggaagagcgcctccatgaggctggaggagcagaagaagaagctggccttcctgctgaaggactgggagaagtgtgagaagggcattgctgacagcctggagaagctgcggaccttcaagaagaagctgagccagagcctgcctgaccaccacgaggagctgcacgccgagcagatgcgctgcaaggagctggagaatgctgtgggctcctggacagatgacctgacccagctgagcctgctgaaggacaccctgagcgcctacatctctgcagatgacatcagcatcctgaatgaaagagtggagctgctgcagaggcagtgggaggagctgtgccaccagctgagcctgcggcggcagcagatcggggagcggctgaatgagtgggccgtgttttctgagaagaacaaggagctgtgtgagtggctgacccagatggagagcaaggtgtcccagaatggagacatcctgattgaggagatgattgagaagctgaagaaggactaccaggaggagatcgccatcgcccaggagaacaagatccagctgcagcagatgggagagcggctggccaaggccagccatgagagcaaggccagcgagattgagtacaagctgggcaaggtgaatgaccgctggcagcacctgctggacctgattgctgcccgggtgaagaagctgaaggagaccctggtggccgtgcagcagctggacaagaacatgagcagcctgcggacctggctggcccacattgaaagtgagctggccaagcccatcgtgtatgacagctgcaacagcgaggagatccagaggaagctgaatgagcagcaggagctgcagagggacatcgagaagcacagcactggagtggcctctgtgctgaacctgtgtgaggtgctgctgcatgactgtgatgcctgtgccacagatgctgaatgtgacagcatccagcaggccaccaggaacctggaccggcgctggaggaacatctgtgccatgtccatggagcggcggctgaagattgaggagacctggaggctgtggcagaagttcctggatgactacagcagatttgaggactggctgaagagcagcgagaggacagctgccttccccagcagcagtggagtcatctacacagtggccaaggaggagctgaagaagtttgaggccttccagaggcaggtgcatgagtgcctgacccagctggagctgatcaacaagcagtacagaaggctggcccgggagaacagaacagattctgcctgcagcctgaagcagatggtgcatgagggcaaccagcgctgggacaacctgcagaagagggtgaccagcatcctgcggcggctgaagcacttcatcggccagcgggaggagtttgaaacagcccgggacagcatcctggtgtggctgacagagatggacctgcagctgaccaacatcgagcacttctctgaatgtgatgtgcaggccaagatcaagcagctgaaggccttccagcaggagatcagcctgaaccacaacaagattgagcagatcatcgcccagggcgagcagctgattgagaagtctgagcccctggatgctgccatcatcgaggaggagctggatgagctgcggcgctactgccaggaggtgtttggccgggtggagcgctaccacaagaagctgatccggctgcccctgcctgatgatgaacatgacctgagtgaccgggagctggagctggaggacagcgctgccctgagtgacctgcactggcatgacagatctgctgacagcctgctgagcccccagcccagcagcaacctgagcctgagcctggcccagcccctgcggtctgagaggagcggccgggacaccccagcctctgtggacagcatccccctggagtgggaccatgactatgacctgagccgggacctggagagcgccatgagccgggccctgcccagtgaagatgaggagggccaggatgacaaggacttctacctgcggggagctgtgggcctgagtgatgtgatgatccctgagagccctgaggcctacgtgaagctgacagaaaatgccatcaagaacaccagcggggaccacagcgccctggagagccagatccggcagctgggcaaggccctggatgacagccgcttccagatccagcagacagagaacatcatccgcagcaagacccccaccggccctgagctggacaccagctacaagggctacatgaagctgctgggagaatgtagcagcagcattgacagcgtgaagaggctggagcacaagctgaaggaggaggaggagagcctgcccggctttgtgaacctgcacagcacagagacccagacagctggggtcatcgaccgctgggagctgctgcaggcccaggccctgagcaaggagctgaggatgaagcagaacctgcagaagtggcagcagttcaacagcgacctgaacagcatctgggcctggctgggggacacagaggaggagctggagcagctgcagaggctggagctgagcacagacatccagaccatcgagctgcagatcaagaagctgaaggagctgcagaaggctgtggaccacaggaaggccatcatcctgagcatcaacctgtgcagccctgagttcacccaggccgacagcaaggagagccgggacctgcaggaccggctgagccagatgaatggccgctgggacagagtgtgcagcctgctggaggagtggaggggcctgctgcaggatgccctgatgcagtgccagggcttccacgagatgagccacggcctgctgctgatgctggagaacatcgacaggaggaagaatgagatcgtgcccatcgacagcaacctggatgctgagatcctgcaggaccaccacaagcagctgatgcagatcaagcatgagctgctggagagccagctgcgggtggccagcctgcaggacatgagctgccagctgctggtgaatgctgagggcacagactgcctggaggccaaggagaaggtgcacgtgattggcaaccggctgaagctgctgctgaaggaggtgagccgccacatcaaggagctggagaagctgctggatgtgagcagcagccagcaggacctgagctcctggagcagcgcagatgagctggacaccagcggctctgtgagccccaccagcggccgcagcacccccaaccggcagaagaccccccggggcaagtgcagcctgagccagcccggccccagcgtgagcagcccccacagccgcagcaccaagggcggcagtgacagcagcctgtctgagcccggccctggccgcagcggccggggcttcctgttccgggtgctgcgggccgccctgcccctgcagctgctgctgctgctgctgattggcctggcctgcctggtgcccatgtctgaggaggactacagctgtgccctgagcaacaactttgcccgctccttccaccccatgctgcgctacaccaacggccccccacccctgtag

SEQ ID NO: 226976 - DNA, 26250 bp, Artificial Sequence
  derived and/or modified sequence
atggccaccagcagaggagccagccgctgcccccgggacatcgccaacgtgatgcagaggctgcaggatgagcaggagatcgtgcagaagaggaccttcaccaagtggatcaacagccacctggccaagaggaagccacccatggtggtggatgacctgtttgaggacatgaaggatggagtgaagctgctggccctgctggaggtgctgagcggccagaagctgccctgtgagcagggccgcaggatgaagagaattcatgctgtggccaacatcggcacagccctgaagttcctggagggcaggaagtccatgcaccggggcagccccatcaagctggtgaacatcaacagcacagacattgctgatggccggcccagcatcgtgctgggcctgatgtggaccatcatcctgtacttccagatcgaggagctgaccagcaacctgccccagctgcagagcctgagcagcagcgccagctctgtggacagcatcgtgagcagcgagacccccagcccccccagcaagaggaaggtgaccaccaagatccagggcaatgccaagaaggccctgctgaagtgggtgcagtacacagctgggaagcagacaggaattgaggtgaaggactttgggaagtcctggaggtctggagtggccttccacagcgtcatccacgccatccggcctgagctggtggacctggagaccgtgaagggccgcagcaaccgggagaacctggaggatgccttcaccatcgccgagacagagctgggcatcccccggctgctggaccctgaagatgtggatgtggacaagccagatgagaagagcatcatgacctacgtggcccagttcctgaagcactacccagacatccacaatgccagcacagatggccaggaggatgatgagatcctgcccggcttccccagctttgccaacagcgtgcagaacttcaagcgggaggacagagtcatcttcaaggagatgaaggtgtggattgagcagtttgagcgggacctgacccgggcccagatggtggagagcaacctgcaggacaagtaccagagcttcaagcacttccgggtgcagtatgagatgaagaggaagcagatcgagcacctgatccagcccctgcacagagatggcaagctgagcctggaccaggccctggtgaagcagagctgggacagagtgaccagccggctgtttgactggcacatccagctggacaagagcctgcctgcccccctgggcaccatcggggcctggctgtacagagctgaggtggccctgcgggaggagatcaccgtgcagcaggtgcatgaggagacagccaacaccatccagaggaagctggagcagcacaaggacctgctgcagaacacagatgcccacaagagggccttccacgagatctaccgcaccaggtctgtgaatggcatccctgtgcccccagaccagctggaggacatggccgagcgcttccactttgtgagcagcaccagcgagctgcacctgatgaagatggagttcctggagctgaagtaccgcctgctgagcctgctggtgctggccgagagcaagctgaagtcctggatcatcaagtatggaagaagagagagcgtggagcagctgctgcagaactacgtgtccttcatcgagaacagcaagttctttgagcagtatgaggtgacctaccagatcctgaagcagacagctgagatgtatgtgaaggcagatggctctgtggaggaggccgagaatgtgatgaagttcatgaatgagaccacagcccagtggaggaacctgtctgtggaggtgcgctctgtgcgctccatgctggaggaggtgatcagcaactgggacagatatggcaacacagtggccagcctgcaggcctggctggaggatgctgagaagatgctgaaccagagtgaaaatgccaagaaggacttcttcaggaacctgccccactggatccagcagcacacagccatgaatgatgctggcaacttcctgattgagacctgtgatgagatggtgtcccgggacctgaagcagcagctgctgctgctgaatggccgctggagggagctgttcatggaggtgaagcagtatgcccaggctgatgagatggacaggatgaagaaggagtacacagactgtgtggtgaccctgagcgcctttgccacagaggcccacaagaagctgtctgagcccctggaggtgtccttcatgaatgtgaagctgctgatccaggacctggaggacatcgagcagagggtgcctgtgatggatgcccagtacaagatcatcaccaagacagcccacctgatcaccaaggagagcccccaggaggagggcaaggagatgtttgccaccatgagcaagctgaaggagcagctgaccaaggtgaaggagtgctacagccccctgctgtatgagagccagcagctgctgatccccctggaggagctggagaagcagatgaccagcttctatgacagcctgggcaagatcaatgagatcatcaccgtgctggagcgggaggcccagagcagcgccctcttcaagcagaagcaccaggagctgctggcctgccaggagaactgcaagaagaccctgaccctgattgagaagggcagccagagcgtgcagaagtttgtgaccctgagcaatgtgctgaagcactttgaccagacccggctgcagaggcagattgctgacatccacgtggccttccagagcatggtgaagaagacaggagactggaagaagcacgtggagaccaacagccggctgatgaagaagtttgaggagagcagagctgagctggagaaggtgctgcgcatcgcccaggagggcctggaggagaagggggaccctgaggagctgctgcggcggcacacagagttcttcagccagctggaccagagggtgctgaatgccttcctgaaggcctgtgatgagctgacagacatcctgcctgagcaggagcagcagggcctgcaggaggccgtgaggaagctgcacaagcagtggaaggacctgcagggcgaggccccctaccacctgctgcacctgaagattgatgtggagaagaaccgcttcctggcctctgtggaggagtgcaggacagagctggaccgggagaccaagctgatgccccaggagggcagcgagaagatcatcaaggagcacagggtcttcttcagtgacaagggcccccaccacctgtgtgagaagaggctgcagctgattgaggagctgtgtgtgaagctgcctgtgcgggaccctgtgcgggacaccccaggcacctgccacgtgaccctgaaggagctgcgggccgccatcgacagcacctacaggaagctgatggaggaccctgacaagtggaaggactacaccagccgcttcagcgagttcagctcctggatcagcaccaatgagacccagctgaagggcatcaagggggaggccatcgacacagccaaccacggggaggtgaagagagctgtggaggagatcagaaatggagtgaccaagagaggagagaccctgtcctggctgaagagccggctgaaggtgctgacagaggtgtccagtgaaaatgaggcccagaagcagggagatgagctggccaagctgagcagcagcttcaaggccctggtgaccctgctgtctgaggtggagaagatgctgagcaactttggagactgtgtgcagtacaaggagatcgtgaagaacagcctggaggagctgatcagcggcagcaaggaggtgcaggagcaggccgagaagatcctggacacagagaacctgtttgaggcccagcagctgctgctgcaccaccagcagaagaccaagaggatcagcgccaagaagagagatgtgcagcagcagatcgcccaggcccagcagggcgagggcggcctgcctgaccggggccacgaggagctgaggaagctggagagcaccctggatggcctggagaggagccgggagcggcaggagcggcgcatccaggtgaccctgaggaagtgggagagatttgagaccaacaaggagaccgtggtgcgctacctgttccagacaggcagcagccatgagcgcttcctgtccttcagcagcctggagagcctgagcagcgagctggagcagaccaaggagttcagcaagaggacagagagcattgctgtgcaggccgagaacctggtgaaggaggccagcgagatccccctgggcccccagaacaagcagctgctgcagcagcaggccaagagcatcaaggagcaggtgaagaagctggaggacaccctggaggaggacatcaagaccatggagatggtgaagaccaagtgggaccacttcggcagcaactttgagaccctgtctgtgtggatcacagagaaggagaaggagctgaatgccctggagaccagcagcagcgccatggacatgcagatcagccagatcaaggtgaccatccaggagattgagagcaagctgagcagcatcgtgggcctggaggaggaggcccagagctttgcccagtttgtgaccactggagagagcgcccgcatcaaggccaagctgacccagatcagaagatatggagaggagctgcgggagcacgcccagtgcctggagggcaccatcctgggccacctgagccagcagcagaagtttgaggagaacctgaggaagatccagcagagcgtgtctgaatttgaggacaagctggccgtgcccatcaagatctgcagcagcgccacagagacctacaaggtgctgcaggagcacatggacctgtgccaggccctggagagcctgagcagcgccatcacagccttcagcgccagcgccaggaaggtggtgaacagagacagctgtgtgcaggaggccgccgccctgcagcagcagtatgaggacatcctgcggcgggccaaggagcggcagacagccctggagaacctgctggcccactggcagaggctggagaaggagctgagcagcttcctgacctggctggagcggggggaggccaaggccagcagccctgagatggacatctctgctgacagagtgaaggtggagggggagctgcagctgatccaggccagcagcaggaagtttgtgtcccaggccagcttctacagcaagctgctgcagctgaaggagagcctcttctctgtggccagcaaggatgatgtgaagatgatgaagctgcacctggagcagctggatgagcgctggagggacctgccccagatcatcaacaagaggatcaacttcctgcagagcgtggtggccgagcaccagcagtttgatgagctgctgctgtccttctctgtgtggatcaagctgttcctgtctgagctgcagaccaccagcgagatcagcatcatggaccaccaggtggccctgaccaggcacaaggaccatgctgctgaggtggagagcaagaagggggagctgcagagcctgcagggccacctggccaagctgggcagcctgggccgggcagaggacctgcacctgctgcagggcaaggccgaggactgcttccagctgtttgaggaggccagccaggtggtggagcggcggcagctggccctgagccacctggccgagttcctgcagagccacgccagcctgagcggcatcctgcggcagctgcggcagacagtggaggccaccaacagcatgaacaagaatgaaagtgacctgattgagaaggacctgaatgatgccctgcagaatgccaaggccctggagagcgctgctgtgtccctggatggcatcctgagcaaggcccagtaccacctgaagattggcagcagcgagcagaggaccagctgccgggccacagctgaccagctgtgtggggaggtggagcgcatccagaacctgctgggcaccaagcagagcgaggctgatgccctggccgtgctgaagaaggccttccaggaccagaaggaggagctgctgaagagcattgaggacatcgaggagaggacagacaaggagcggctgaaggagcccacccggcaggccctgcagcagaggctgcgggtcttcaaccagctggaggatgagctgaacagccatgagcacgagctgtgctggctgaaggacaaggccaagcagatcgcccagaaggatgtggcctttgcccctgaggtggaccgggagatcaaccggctggaggtgacctgggatgacaccaagaggctcatccacgagaaccagggccagtgctgcggcctgattgacctgatgagggagtaccagaacctgaagtctgctgtgtccaaggtgctggagaatgccagcagcgtcatcgtgaccaggaccaccatcaaggaccaggaggacctgaagtgggccttcagcaagcatgaaacagccaagaacaagatgaactacaagcagaaggacctggacaacttcaccagcaagggcaagcacctgctgtctgagctgaagaagatccacagcagtgacttcagcctggtgaagacagacatggagagcacagtggacaagtggctggatgtgtctgagaagctggaggagaacatggaccggctgcgggtgtccctgagcatctgggatgatgtgctgagcaccagagatgaaattgagggctggagcaacaactgtgtgccccagatggccgagaacatcagcaacctggacaaccacctgcgggcagaggagctgctgaaggagtttgaaagtgaggtgaagaacaaggccctgcggctggaggagctgcacagcaaggtgaatgacctgaaggagctgaccaagaacctggagaccccaccagacctgcagttcatcgaggccgacctgatgcagaagctggagcacgccaaggagatcacagaggtggccaagggcaccctgaaggacttcaccgcccagagcacccaggtggagaagttcatcaatgacatcaccacctggttcaccaaggtggaggagagcctgatgaactgtgcccagaatgagacctgtgaggccctgaagaaggtgaaggacatccagaaggagctgcagagccagcagagcaacatcagcagcacccaggagaacctgaacagcctgtgcaggaagtaccacagcgctgagctggagagcctgggccgggccatgacaggcctcatcaagaagcatgaggccgtgtcccagctgtgcagcaagacccaggccagcctgcaggagagcctggagaagcacttcagcgagagcatgcaggagttccaggagtggttcctgggcgccaaggctgctgccaaggagagcagtgacagaactggagacagcaaggtgctggaggccaagctgcatgacctgcagaacatcctggacagcgtgtctgatggccagagcaagctggatgctgtgacccaggagggccagaccctgtatgcccacctgagcaagcagatcgtgagcagcatccaggagcagatcaccaaggccaatgaggagttccaggccttcctgaagcagtgcctgaaggacaagcaggccctgcaggactgtgccagcgagctgggcagctttgaggaccagcacaggaagctgaacctgtggattcatgagatggaggagcgcttcaacacagagaacctgggggagagcaagcagcacatccctgagaagaagaatgaggtgcacaaggtggagatgttcctgggggagctgctggccgcccgggagagcctggacaagctgagccagaggggccagctgctgtctgaggagggccacggggccggccaggagggccgcctgtgcagccagctgctgaccagccaccagaacctgctgaggatgaccaaggagaagctgcggagctgccaggtggccctgcaggagcacgaggccctggaggaggccctgcagagcatgtggttctgggtgaaggccatccaggaccggctggcctgtgccgagagcaccctgggcagcaaggacaccctggagaagaggctgagccagatccaggacatcctgctgatgaagggggagggggaggtgaagctgaacatggccatcggcaagggggagcaggccctgcggagcagcaacaaggagggccagagggtcatccagacccagctggagaccctgaaggaggtgtgggccgacatcatgagcagctctgtgcacgcccagagcaccctggagagcgtcatcagccagtggaatgactatgtggagaggaagaaccagctggagcagtggatggagagcgtggaccagaagattgagcaccccctgcagccccagcccggcctgaaggagaagtttgtgctgctggaccacctgcagagcatcctgtctgaggccgaggaccacacccgggccctgcaccggctgattgccaagagccgggagctgtatgagaagacagaagatgagagcttcaaggacacagcccaggaggagctgaagacccagttcaatgacatcatgacagtggccaaggagaagatgaggaaggtggaggagatcgtgaaggaccacctgatgtacctggatgctgtgcatgagttcacagactggctgcacagcgccaaggaggagctgcaccgctggagcgacatgtctggggacagcagcgccacccagaagaagctgagcaagatcaaggagctgattgacagccgggagattggagccagccggctgagccgggtggagagcctggcccctgaggtgaagcagaacaccacagccagcggctgtgagctgatgcacacagagatgcaggccctgcgggctgactggaagcagtgggaggacagcgtcttccagacccagagctgcctggagaacctggtgtcccagatggccctgtctgagcaggagttcagcggccaggtggcccagctggagcaggccctggagcagttcagcgccctgctgaagacctgggcccagcagctgaccctgctggagggcaagaacacagatgaggagatcgtggagtgctggcacaagggccaggagatcctggatgccctgcagaaggccgagcccaggacagaggacctgaagagccagctgaatgagctgtgccgcttcagccgggacctgagcacctacagcggcaaggtgtctggcctcatcaaggagtacaactgcctgtgcctgcaggccagcaagggctgccagaacaaggagcagatcctgcagcagcgcttcaggaaggccttccgggacttccagcagtggctggtgaatgccaagatcaccacagccaagtgctttgacatcccccagaacatcagcgaggtgtccaccagcctgcagaagatccaggagttcctgtctgagagtgaaaatggccagcacaagctgaacatgatgctgagcaagggggagctgctgagcaccctgctgaccaaggagaaggccaagggcatccaggccaaggtgacagctgccaaggaggactggaagaacttccacagcaacctgcaccagaaggagagcgccctggagaacctgaagatccagatgaaggactttgaggtgtctgctgagcccatccaggactggctgagcaagacagagaagatggtgcatgagagcagcaaccggctgtatgacctgcctgccaagagaagagagcagcagaagctgcagagcgtgctggaggagatccactgctatgagccccagctgaaccggctgaaggagaaggcccagcagctgtgggagggccaggccgccagcaagagcttccgccaccgggtgtcccagctgagcagccagtacctggccctgagcaacctgaccaaggagaaggtgtcccggctggacagaattgtggccgagcacaaccagttcagcctgggcatcaaggagctgcaggactggatgacagatgccatccacatgctggacagctactgccaccccaccagtgacaagtctgtgctggacagcaggaccctgaagctggaggccctgctgtctgtgaagcaggagaaggagatccagatgaagatgattgtgaccagaggagagagcgtgctgcagaacaccagccctgagggcatccccaccatccagcagcagctgcagagcgtgaaggacatgtgggccagcctgctgtctgctggcatccgctgcaagagccagctggagggcgccctgagcaagtggaccagctaccaggatggagtgcggcagttcagcggctggatggacagcatggaggccaacctgaatgaaagtgagcggcagcacgccgagctgcgggacaagaccaccatgctgggcaaggccaagctgctgaatgaggaggtgctgagctacagcagcctgctggagaccatcgaggtgaagggagctggcatgacagagcactacgtgacccagctggagctgcaggacctgcaggagcgctaccgggccatccaggagcgggccaaggaggccgtgaccaagtctgagaagctggtgcggctgcaccaggagtaccagagggacctgaaggcctttgaggtgtggctgggccaggagcaggagaagctggaccagtacagcgtgctggagggagatgcccacacccatgagaccaccctgcgggacctgcaggagctgcaggtgcactgtgccgagggccaggccctgctgaacagcgtgctgcacacccgggaggatgtgatccccagcggcatcccccaggctgaagatcgggccctggagagcctgcggcaggactggcaggcctaccagcaccggctgtctgagaccaggacccagttcaacaacgtggtgaacaagctgcggctgatggagcagaagttccagcaggtggatgagtggctgaagacagctgaggagaagaagtggcatgaggaggtgacagcctacagagatgaggtggaggaggtgggcgcccgggcccaggagatcctggatgagagccacgtgaacagcaggatgggctgccaggccacccagctgaccagccgctaccaggccctgctgctgcaggtgctggagcagatcaagttcctggaggaggagatccagagcctggaggagagcgagagcagcctgagcagctacagcgactggtacggcagcacccacaagaacttcaagaatgtggccaccaagattgacaaggtggacacagtgatgatgggcaagaagctgaagaccctggaggtgctgctgaaggacatggagaagggccacagcctgctgaagagcgcccgggagaagggggagagagctgtgaagtacctggaggagggggaggccgagcggctgaggaaggagatccatgaccacatggagcagctgaaggagctgaccagcacagtgaggaaggagcacatgaccctggagaagggcctgcacctggccaaggagttcagtgacaagtgcaaggccctgacccagtggattgctgagtaccaggagatcctgcacgtgcctgaggagcccaagatggagctgtatgagaagaaggcccagctgagcaagtacaagagcctgcagcagacagtgctgagccatgagcccagcgtgaagtctgtgcgggagaagggggaggccctgctggagctggtgcaggatgtgaccctgaaggacaagattgaccagctgcagagcgactaccaggacctgtgcagcatcggcaaggccatgatggaggagattgctggctttgaggaccggctgaacaacctgcagatgaagggggacaccctcatcggccagtgtgccgaccacctgcaggccaagctgaagcagaatgtgcacgcccacctgcagggcaccaaggacagctacagcgccatctgcagcacagcccagaggatgtaccagagcctggagcacgagctgcagaagcacgtgtcccggcaggacaccctgcagcagtgccaggcctggctgtctgctgtgcagcctgacctggagcccagcccccagccccccctgagcagagctgaggccatcaagcaggtgaagcacttccgggccctgcaggagcaggcccggacctacctggacctgctgtgcagcatgtgtgacctgagcaatgcctctgtgaagaccacagccaaggacatccagcagacagagcagaccatcgagcagaagctggtgcaggcccagaacctgacccagggctgggaggagatcaagcacctgaagtctgagctgtggatctacctgcaggatgctgaccagcagctgcagaacatgaagagaagacacagcgagctggagctgaacatcgcccagaacatggtgtcccaggtgaaggactttgtgaagaagctgcagagcaagcaggcctctgtgaacaccatcatcgagaaggtgaacaagctgaccaagaaggaggagagccctgagcacaaggagatcaaccacctgaatgaccagtggctggacctgtgccggcagagcaacaacctgtgcctgcagcgggaggaggacctgcagaggacccgggactaccatgactgcatgaatgtggtggaggtgttcctggagaagttcaccacagagtgggacaacctggcccggagtgatgctgagagcacagctgtgcacctggaggccctgaagaagctggccctggccctgcaggagaggaaatatgccatcgaggacctgaaggaccagaagcagaagatgattgagcacctgaacctggatgacaaggagctggtgaaggagcagaccagccacctggagcagcgctggttccagctggaggacctgatcaagaggaagatccaggtgtctgtgaccaacctggaggagctgaatgtggtgcagagccgcttccaggagctgatggagtgggccgaggagcagcagcccaacattgctgaggccctgaagcagagccccccaccagacatggcccagaacctgctgatggaccacctggccatctgcagcgagctggaggccaagcagatgctgctgaagagcctcatcaaggatgctgacagagtgatggctgacctgggcctgaatgaaaggcaggtgatccagaaggccctgagtgatgcccagagccacgtgaactgcctgagtgacctggtgggccagaggaggaagtacctgaacaaggccctgtctgagaagacccagttcctgatggctgtgttccaggccaccagccagatccagcagcacgagaggaagatcatgttccgggagcacatctgcctgctgcctgatgatgtgtccaagcaggtgaagacctgcaagagcgcccaggccagcctgaagacctaccagaatgaggtgacaggcctgtgggcccagggccgggagctgatgaaggaggtgacagagcaggagaagtctgaggtgctgggcaagctgcaggagctgcagagcgtgtatgacagcgtgctgcagaagtgcagccaccggctgcaggagctggagaagaacctggtgtccaggaagcacttcaaggaggactttgacaaggcctgccactggctgaagcaggccgacatcgtgaccttccctgagatcaacctgatgaatgaatcttctgagctgcacacccagctggccaagtaccagaacatcctggagcagagcccagaatatgagaacctgctgctgaccctgcagaggacaggccagaccatcctgcccagcctgaatgaggtggaccacagctacctgtctgagaagctgaatgccctgccccggcagttcaacgtcatcgtggccctggccaaggacaagttctacaaggtgcaggaggccatcctggccaggaaggagtatgccagcctgattgagctgaccacccagagcctgtctgagctggaggcccagttcctgaggatgagcaaggtgcccacagacctggccgtggaggaggccctgagcctgcaggacggctgccgggccatcctggatgaggtggccggcctgggggaggccgtggatgagctgaaccagaagaaggagggcttccgcagcacaggccagccctggcagcctgacaagatgctgcacctggtgaccctgtaccaccggctgaagaggcagacagagcagagggtgtccctgctggaggacaccaccagcgcctaccaggagcacgagaagatgtgccagcagctggagcggcagctgaagtctgtgaaggaggagcagagcaaggtgaatgaggagaccctgcctgctgaggagaagctgaagatgtaccacagcctggccggcagcctgcaggacagcggcatcgtgctgaagagggtgaccatccacctggaggacctggccccccacctggaccccctggcctatgagaaggcccggcaccagatccagagctggcagggcgagctgaagctgctgaccagcgccatcggggagaccgtgacagaatgtgagagcaggatggtgcagagcattgacttccagacagagatgagccgcagcctggactggctgcggcgggtgaaggccgagctgagcggccctgtgtacctggacctgaacctgcaggacatccaggaggagatcaggaagatccagatccaccaggaggaggtgcagagcagcctgcgcatcatgaatgccctgagccacaaggagaaggagaagttcaccaaggccaaggagctgatctctgctgacctggagcacagcctggccgagctgtctgagctggatggagacatccaggaggccctgcggacccggcaggccaccctgacagagatctacagccagtgccagcgctactaccaggtgttccaggccgccaatgactggctggaggatgcccaggagctgctgcagctggccggaaatggcctggatgtggagagcgctgaggagaacctgaagagccacatggagttcttcagcacagaggaccagttccacagcaacctggaggagctgcacagcctggtggccaccctggaccccctcatcaagcccaccgggaaggaggacctggagcagaaggtggccagcctggagctgcggagccagaggatgagccgggacagcggggcccaggtggacctgctgcagcgctgcacagcccagtggcatgactaccagaaggcccgggaggaggtgattgagctgatgaatgacacagagaagaagctgtctgagttcagcctgctgaagaccagcagcagccatgaagctgaggagaagctgtctgagcacaaggccctggtgtctgtggtgaacagcttccacgagaagatcgtggccctggaggagaaggccagccagctggagaagacaggaaatgatgccagcaaggccaccctgagccgctccatgaccaccgtgtggcagcgctggacccggctgcgggctgtggcccaggaccaggagaagatcctggaggatgctgtggatgagtggacaggcttcaacaacaaggtgaagaaggccacagagatgattgaccagctgcaggacaagctgcccggcagcagcgctgagaaggccagcaaggccgagctgctgaccctgctggagtaccatgacacctttgtgctggagctggagcagcagcagagcgccctgggcatgctgcggcagcagaccctgtccatgctgcaggatggagctgcccccaccccaggagaggagccccccctgatgcaggagatcacagccatgcaggaccgctgcctgaacatgcaggagaaggtgaagaccaacgggaagctggtgaagcaggagctgaaggaccgggagatggtggagacccagatcaacagcgtgaagtgctgggtgcaggagaccaaggagtacctgggcaaccccaccatcgagattgatgcccagctggaggagctgcagatcctgctgacagaggccaccaaccaccggcagaacatcgagaagatggccgaggagcagaaggagaagtacctgggcctgtacaccatcctgcccagcgagctgagcctgcagctggccgaggtggccctggacctgaagatccgggaccagatccaggacaagatcaaggaggtggagcagagcaaggccaccagccaggagctgagccggcagatccagaagctggccaaggacctgaccaccatcctgaccaagctgaaggccaagacagacaacgtggtgcaggccaagacagaccagaaggtgctgggggaggagctggatggctgcaacagcaagctgatggagctggatgctgctgtgcagaagttcctggagcagaatggccagctgggcaagcccctggccaagaagattggcaagctgacagagctgcaccagcagaccatccggcaggctgaaaatcggctgagcaagctgaaccaggccgccagccacctggaggagtacaatgagatgctggagctgatcctgaagtggattgagaaggccaaggtgctggcccacggcaccatcgcctggaacagcgccagccagctgcgggagcagtacatcctgcaccagaccctgctggaggagagcaaggagattgacagcgagctggaggccatgacagagaagctgcagtacctgacctctgtgtactgcacagagaagatgagccagcaggtggccgagctgggccgggagacagaggagctgcggcagatgatcaagatccggctgcagaacctgcaggatgctgccaaggacatgaagaagtttgaggccgagctgaagaagctgcaggccgccctggagcaggcccaggccaccctgaccagccctgaggtgggccgcctgagcctgaaggagcagctgagccaccggcagcacctgctgtctgagatggagagcctgaagcccaaggtgcaggccgtgcagctgtgccagagcgccctgcgcatcccagaagatgtggtggccagcctgcccctgtgccacgccgccctgcggctgcaggaggaggccagccggctgcagcacacagccatccagcagtgcaacatcatgcaggccgctgtggtgcagtatgagcagtatgagcaggagatgaagcacctgcagcagctgattgaaggagcccaccgggagattgaggacaagcctgtggccaccagcaacatccaggagctgcaggcccagatcagcagacatgaggagctggcccagaagatcaagggctaccaggagcagatcgccagcctgaacagcaagtgcaagatgctgaccatgaaggccaagcacgccaccatgctgctgactgtgacagaggtggagggcctggccgagggcacagaggacctggatggagagctgctgcccaccccatctgcccaccccagcgtggtgatgatgacagctggccgctgccacaccctgctgagccctgtgacagaggagagcggggaggagggcaccaacagcgagatcagcagccccccagcctgccgcagccccagccctgtggccaacacagatgcctctgtgaaccaggacatcgcctactaccaggccctgtctgctgagcggctgcagacagatgctgccaagatccaccccagcaccagcgccagccaggagttctatgagcccggcctggagcccagcgccacagccaagctgggggacctgcagaggtcctgggagaccctgaagaatgtcatcagcgagaagcagaggaccctgtatgaggccctggagcggcagcagaagtaccaggacagcctgcagagcatcagcaccaagatggaggccatcgagctgaagctgtctgagagccctgagcccggccgcagccctgagagccagatggccgagcaccaggccctgatggatgagatcctgatgctgcaggatgagatcaatgagctgcagagcagcctggccgaggagctggtgtctgagagctgtgaggccgaccctgctgagcagctggccctgcagagcaccctgactgtgctggccgagaggatgagcaccatccgcatgaaggccagcggcaagaggcagctgctggaggagaagctgaatgaccagctggaggagcagaggcaggagcaggccctgcagcgctaccgctgtgaggctgatgagctggacagctggctgctgagcaccaaggccaccctggacacagccctgagcccccccaaggagcccatggacatggaggcccagctgatggactgccagaacatgctggtggagattgagcagaaggtggtggccctgtctgagctgtctgtgcacaatgaaaacctgctgctggagggcaaggcccacaccaaggatgaagctgagcagctggccggcaagctgcggcggctgaagggcagcctgctggagctgcagagggccctgcatgacaagcagctgaacatgcagggcacagcccaggagaaggaggagagtgatgtggacctgacagccacccagagccctggggtgcaggagtggctggcccaggcccggaccacctggacccagcagaggcagagcagcctgcagcagcagaaggagctggagcaggagctggccgagcagaagagcctgctgcggtctgtggccagcagaggagaggagatcctgatccagcacagcgctgctgagaccagcggagatgctggggagaagccagatgtgctgagccaggagctgggcatggagggggagaagagcagcgctgaggaccagatgaggatgaagtgggagagcctgcaccaggagttcagcaccaagcagaagctgctgcagaatgtgctggagcaggagcaggagcaggtgctgtacagccggcccaaccggctgctgtctggagtgcccctgtacaagggagatgtgcccacccaggacaagtctgctgtgaccagcctgctggatggcctgaaccaggcctttgaggaggtgagcagccagagcggcggggccaagaggcagagcatccacctggagcagaagctgtatgatggagtgtctgccaccagcacctggctggatgatgtggaggagcggctgtttgtggccacagccctgctgcctgaggagacagagacctgcctcttcaaccaggagatcctggccaaggacatcaaggagatgtctgaggagatggacaagaacaagaacctcttcagccaggccttcccagaaaatggagacaacagagatgtgattgaggacaccctgggctgcctgctgggccgcctgagcctgctggacagcgtggtgaaccagcgctgccaccagatgaaggagcggctgcagcagatcctgaacttccagaatgacctgaaggtgctcttcaccagcctggccgacaacaagtacatcatcctgcagaagctggccaacgtgtttgagcagcctgtggccgagcagatcgaggccatccagcaggctgaagatggcctgaaggagtttgatgctggcatcatcgagctgaagagaagaggagacaagctgcaggtggagcagcccagcatgcaggagctgagcaagctgcaggacatgtatgatgagctgatgatgatcatcggcagccgccgcagcggcctgaaccagaacctgaccctgaagagccagtatgaaagagccctgcaggacctggccgacctgctggagaccggccaggagaagatggccggggaccagaagatcatcgtgagcagcaaggaggagatccagcagctgctggacaagcacaaggagtacttccagggcctggagagccacatgatcctgacagagaccctcttcaggaagatcatcagctttgctgtgcagaaggagacccagttccacacagagctgatggcccaggccagcgctgtgctgaagagggcccacaagaggggcgtggagctggagtacatcctggagacctggagccacctggatgaggaccagcaggagctgagccggcagctggaggtggtggagagcagcatccccagcgtgggcctggtggaggagaatgaagatcggctgattgaccgcatcaccctgtaccagcacctgaagagcagcctgaatgagtaccagcccaagctgtaccaggtgctggatgatggcaagaggctgctgatcagcatcagctgcagcgacctggagagccagctgaaccagctgggggagtgctggctgagcaacaccaacaagatgagcaaggagctgcaccggctggagaccatcctgaagcactggacccgctaccagagcgagagcgctgacctgatccactggctgcagagcgccaaggaccggctggagttctggacccagcagagcgtgacagtgccccaggagctggagatggtgcgggaccacctgaatgccttcctggagttcagcaaggaggtggatgcccagagcagcctgaagagctctgtgctgagcactggaaaccagctgctgcggctgaagaaggtggacacagccaccctgcggtctgagctgagcagaattgacagccagtggacagacctgctgaccaacatcccagctgtgcaggagaagctgcaccagctgcagatggacaagctgcccagcagacatgccatcagcgaggtgatgtcctggatcagcctgatggagaatgtcatccagaaggatgaggacaacatcaagaacagcatcggctacaaggccatccacgagtacctgcagaagtacaagggcttcaagattgacatcaactgcaagcagctgactgtggactttgtgaaccagagcgtgctgcagatcagcagccaggatgtggagagcaagagaagtgacaagacagactttgctgagcagctgggcgccatgaacaagtcctggcagatcctgcagggcctggtgacagagaagatccagctgctggagggcctgctggagagctggagcgaatatgaaaataatgtgcagtgcctgaagacctggtttgagacccaggagaagaggctgaagcagcagcaccgcatcggggaccaggcctctgtgcagaatgccctgaaggactgccaggacctggaggacctgatcaaggccaaggagaaggaggtggagaagattgagcagaatggcctggccctgatccagaacaagaaggaggatgtgagcagcatcgtgatgagcaccctgcgggagctgggccagacctgggccaacctggaccacatggtgggccagctgaagatcctgctgaagtctgtgctggaccagtggagcagccacaaggtggcctttgacaagatcaacagctacctgatggaggcccgctacagcctgagccgcttccggctgctgaccggcagcctggaggccgtgcaggtgcaggtggacaacctgcagaacctgcaggatgacctggagaagcaggagaggagcctgcagaagtttggcagcatcaccaaccagctgctgaaggagtgccacccccctgtgacagagaccctgaccaacaccctgaaggaggtgaacatgcgctggaacaacctgctggaggagattgctgagcagctgcagagcagcaaggccctgctgcagctgtggcagcgctacaaggactacagcaagcagtgtgccagcacagtgcagcagcaggaggacaggaccaatgagctgctgaaggccgccaccaacaaggacattgctgatgatgaggtggccacctggatccaggactgcaatgacctgctgaagggcctgggcaccgtgaaggacagcctcttcttcctgcacgagctgggggagcagctgaagcagcaggtggatgccagcgctgccagcgccatccagagcgaccagctgagcctgagccagcacctgtgtgccctggagcaggccctgtgcaagcagcagaccagcctgcaggccggcgtgctggactatgagacctttgccaagagcctggaggccctggaggcctggatcgtggaggccgaggagatcctgcagggccaggaccccagccacagcagtgacctgagcaccatccaggagaggatggaggagctgaagggccagatgctgaagttcagctccatggccccagacctggaccggctgaatgagctgggctaccgcctgcccctgaatgacaaggagatcaagaggatgcagaacctgaacagacactggagcctcatcagcagccagaccacagagcgcttcagcaagctgcagagcttcctgctgcagcaccagaccttcctggagaagtgtgagacctggatggagttcctggtgcagacagagcagaagctggccgtggagatcagcggcaactaccagcacctgctggagcagcagagggcccacgagctgttccaggccgagatgttcagccggcagcagatcctgcacagcatcatcattgatggccagaggctgctggagcagggccaggtggatgacagagatgagttcaacctgaagctgaccctgctgagcaaccagtggcagggcgtcatccggcgggcccagcagaggcggggcatcatcgacagccagatccggcagtggcagcgctaccgggagatggccgagaagctgaggaagtggctggtggaggtgtcctacctgcccatgagcggcctgggctctgtgcccatccccctgcagcaggcccggaccctgtttgatgaggtgcagttcaaggagaaggtgttcctgcggcagcagggcagctacatcctgactgtggaggccggcaagcagctgctgctgtctgctgacagcggggctgaggccgccctgcaggccgagctggccgagatccaggagaagtggaagagcgcctccatgaggctggaggagcagaagaagaagctggccttcctgctgaaggactgggagaagtgtgagaagggcattgctgacagcctggagaagctgcggaccttcaagaagaagctgagccagagcctgcctgaccaccacgaggagctgcacgccgagcagatgcgctgcaaggagctggagaatgctgtgggctcctggacagatgacctgacccagctgagcctgctgaaggacaccctgagcgcctacatctctgcagatgacatcagcatcctgaatgaaagagtggagctgctgcagaggcagtgggaggagctgtgccaccagctgagcctgcggcggcagcagatcggggagcggctgaatgagtgggccgtgttttctgagaagaacaaggagctgtgtgagtggctgacccagatggagagcaaggtgtcccagaatggagacatcctgattgaggagatgattgagaagctgaagaaggactaccaggaggagatcgccatcgcccaggagaacaagatccagctgcagcagatgggagagcggctggccaaggccagccatgagagcaaggccagcgagattgagtacaagctgggcaaggtgaatgaccgctggcagcacctgctggacctgattgctgcccgggtgaagaagctgaaggagaccctggtggccgtgcagcagctggacaagaacatgagcagcctgcggacctggctggcccacattgaaagtgagctggccaagcccatcgtgtatgacagctgcaacagcgaggagatccagaggaagctgaatgagcagcaggagctgcagagggacatcgagaagcacagcactggagtggcctctgtgctgaacctgtgtgaggtgctgctgcatgactgtgatgcctgtgccacagatgctgaatgtgacagcatccagcaggccaccaggaacctggaccggcgctggaggaacatctgtgccatgtccatggagcggcggctgaagattgaggagacctggaggctgtggcagaagttcctggatgactacagcagatttgaggactggctgaagagcagcgagaggacagctgccttccccagcagcagtggagtcatctacacagtggccaaggaggagctgaagaagtttgaggccttccagaggcaggtgcatgagtgcctgacccagctggagctgatcaacaagcagtacagaaggctggcccgggagaacagaacagattctgcctgcagcctgaagcagatggtgcatgagggcaaccagcgctgggacaacctgcagaagagggtgaccagcatcctgcggcggctgaagcacttcatcggccagcgggaggagtttgaaacagcccgggacagcatcctggtgtggctgacagagatggacctgcagctgaccaacatcgagcacttctctgaatgtgatgtgcaggccaagatcaagcagctgaaggccttccagcaggagatcagcctgaaccacaacaagattgagcagatcatcgcccagggcgagcagctgattgagaagtctgagcccctggatgctgccatcatcgaggaggagctggatgagctgcggcgctactgccaggaggtgtttggccgggtggagcgctaccacaagaagctgatccggctgcccctgcctgatgatgaacatgacctgagtgaccgggagctggagctggaggacagcgctgccctgagtgacctgcactggcatgacagatctgctgacagcctgctgagcccccagcccagcagcaacctgagcctgagcctggcccagcccctgcggtctgagaggagcggccgggacaccccagcctctgtggacagcatccccctggagtgggaccatgactatgacctgagccgggacctggagagcgccatgagccgggccctgcccagtgaagatgaggagggccaggatgacaaggacttctacctgcggggagctgtgggcctgagtgatgtgatgatccctgagagccctgaggcctacgtgaagctgacagaaaatgccatcaagaacaccagcggggaccacagcgccctggagagccagatccggcagctgggcaaggccctggatgacagccgcttccagatccagcagacagagaacatcatccgcagcaagacccccaccggccctgagctggacaccagctacaagggctacatgaagctgctgggagaatgtagcagcagcattgacagcgtgaagaggctggagcacaagctgaaggaggaggaggagagcctgcccggctttgtgaacctgcacagcacagagacccagacagctggggtcatcgaccgctgggagctgctgcaggcccaggccctgagcaaggagctgaggatgaagcagaacctgcagaagtggcagcagttcaacagcgacctgaacagcatctgggcctggctgggggacacagaggaggagctggagcagctgcagaggctggagctgagcacagacatccagaccatcgagctgcagatcaagaagctgaaggagctgcagaaggctgtggaccacaggaaggccatcatcctgagcatcaacctgtgcagccctgagttcacccaggccgacagcaaggagagccgggacctgcaggaccggctgagccagatgaatggccgctgggacagagtgtgcagcctgctggaggagtggaggggcctgctgcaggatgccctgatgcagtgccagggcttccacgagatgagccacggcctgctgctgatgctggagaacatcgacaggaggaagaatgagatcgtgcccatcgacagcaacctggatgctgagatcctgcaggaccaccacaagcagctgatgcagatcaagcatgagctgctggagagccagctgcgggtggccagcctgcaggacatgagctgccagctgctggtgaatgctgagggcacagactgcctggaggccaaggagaaggtgcacgtgattggcaaccggctgaagctgctgctgaaggaggtgagccgccacatcaaggagctggagaagctgctggatgtgagcagcagccagcaggacctgagctcctggagcagcgcagatgagctggacaccagcggctctgtgagccccaccagcggccgcagcacccccaaccggcagaagaccccccggggcaagtgcagcctgagccagcccggccccagcgtgagcagcccccacagccgcagcaccaagggcggcagtgacagcagcctgtctgagcccggccctggccgcagcggccggggcttcctgttccgggtgctgcgggccgccctgcccctgcagctgctgctgctgctgctgattggcctggcctgcctggtgcccatgtctgaggaggactacagctgtgccctgagcaacaactttgcccgctccttccaccccatgctgcgctacaccaacggccccccacccctgtag

SEQ ID NO: 226977 - DNA, 26250 bp, Artificial Sequence
  derived and/or modified sequence
atggccaccagccggggcgccagccggtgcccccgggacatcgccaacgtcatgcagagattgcaggatgagcaggagatcgtgcaaaaaagaacattcaccaaatggatcaattcacatctagcaaagaggaagcctcctatggtcgtggatgacctgtttgaagatatgaaggatggcgttaagcttctcgcccttttagaggtgctatctggtcaaaagctgccatgtgaacagggtcgacgaatgaagcggattcacgcagtggccaacatcggaaccgccctgaaatttttagagggaaggaagtcaatgcaccgaggttcacctatcaagctcgtgaacattaacagtacagatatcgctgatgggcgaccttctatcgttctggggttaatgtggactatcattctgtatttccagattgaagaattaacgagcaacctgccccagctgcaatcattgagctccagtgcctctagcgtcgacagtattgtatctagcgagaccccctccccaccttctaagcgtaaagttaccactaagatccagggcaacgccaagaaagccctacttaaatgggtgcagtacactgccggaaagcagaccggcattgaggtcaaggactttggaaaaagctggagatccggagtagcatttcactctgtgatacacgccatcagacccgaactcgtggacttggaaactgtgaaaggtaggtctaacagagaaaaccttgaggacgcctttaccattgccgagacggagctcggaatccctaggttgctcgaccctgaggacgtggacgtggacaaaccggacgagaagtcaatcatgacatatgtggctcagttcctgaaacattaccccgacatccacaacgcctccactgatggtcaggaagatgacgaaattctacctggctttccctccttcgccaatagcgttcaaaattttaagcgcgaggatagggttatattcaaggagatgaaagtctggatagagcaatttgaacgtgatctgaccagagctcagatggtcgagagtaatttacaggacaagtatcaatctttcaaacattttcgagtccagtatgagatgaagaggaagcaaatcgagcacctcattcagcccctccaccgggatggcaaactgagtctcgaccaggccctggtgaagcagtcttgggatcgggtgacatctagactgttcgactggcacatccaactcgataagtctctgcccgcaccactgggaaccatcggtgcctggctgtaccgtgccgaggtcgctctgcgcgaagagatcacagtgcagcaggtccacgaagagaccgccaataccatccaacgcaaactggaacagcataaagacctgctccagaacactgatgcccacaagcgggccttccatgagatctacagaacacggtcagtaaacggaatccccgtgccccccgatcagctcgaggacatggcagaaagatttcacttcgtttcctcaacgtctgaactgcatctgatgaaaatggaattcctcgaactcaagtataggctgctgtcgctgctggtattagcagagagtaaacttaaatcctggattatcaagtacggccgtcgagaaagcgtggagcagttgttgcagaattacgtctcatttatcgaaaattccaaatttttcgaacagtatgaggtgacctatcagatactgaaacagaccgccgagatgtatgtgaaggccgacggatcggtcgaggaggccgagaacgtaatgaaattcatgaatgagactacagcccagtggcgcaatttgtctgttgaagtcagatcggtgcgatccatgcttgaagaggtgatatctaattgggatagatacggcaacaccgtagctagtctgcaggcatggctcgaggatgctgagaaaatgcttaaccagagcgagaacgctaaaaaggattttttccgcaatctgccccactggatccaacagcatactgcgatgaacgatgcaggaaattttttgatcgagacctgcgatgagatggtgtcccgggatctcaaacagcaacttttgttgctgaacggacggtggagggaattatttatggaagtgaagcagtatgcacaagcagacgaaatggacaggatgaaaaaggagtacacagattgtgttgtgaccctgtcagcgttcgctaccgaggctcacaaaaaactgtctgaacctttggaagtgagctttatgaatgtgaaattgctcattcaggacctagaggacattgaacagcgggtacctgtcatggatgcgcaatacaagattattaccaagacagcacatcttattactaaggagtccccccaggaggagggcaaagaaatgttcgcaacaatgtccaaactcaaagaacagttgaccaaggtgaaagagtgttatagcccactgctgtatgagtcacaacaactgcttattccgctcgaagaacttgaaaagcaaatgacttccttctacgactcattaggcaagattaacgagataatcaccgtgctggagagggaagcccagtccagtgctctgttcaaacagaaacaccaggagttgcttgcttgtcaagagaactgtaagaagactttgacactcattgaaaaagggagccaaagtgtgcagaagttcgtcacattatccaacgtcttgaaacacttcgatcagactaggcttcaaagacagatcgctgacattcacgttgcctttcagagtatggtcaaaaagacaggcgattggaagaagcatgtcgaaactaattccagactaatgaaaaagttcgaggagagcagagcagagttggaaaaggtgttaagaatcgcacaggaaggtttggaagagaaaggggacccagaggagttgcttaggaggcacacagagttcttcagtcagctagaccaaagggtgctgaacgcttttctaaaagcctgcgatgagctaactgacattttgcctgaacaggaacaacagggactgcaggaagcagtgaggaagttacacaaacagtggaaagatctccagggcgaagccccttaccatctcctccacctgaagatcgatgtagaaaaaaacagattcctcgcttccgttgaggaatgtaggacagagttggatcgggagacaaagttaatgccacaggaaggctcggagaaaatcattaaggaacacagagtttttttctcagataaaggacctcaccacctgtgtgagaagcgattgcagttaattgaagaactgtgtgtgaagctccccgtccgcgaccccgtcagggacacgcccggtacctgtcatgtgacactgaaggagctgagagccgccattgattcaacttacagaaaactgatggaagatccggacaaatggaaggactatacgagcaggttttctgaattctcaagttggatctccaccaacgagacacagcttaaaggaataaaaggggaggccattgatacagccaatcatggcgaagtcaaacgagcagtagaagaaatacgcaatggggtgaccaaaaggggcgagacattatcatggctcaagtcaaggctgaaagtcttgaccgaggtttctagcgaaaatgaggctcagaaacaaggcgacgagctggccaagctgtcttcctccttcaaggcgttagtgacacttctctctgaggtcgagaagatgctatctaacttcggtgattgtgtccaatacaaagaaattgtcaagaacagtctggaagagctgatatccggttctaaggaagtgcaggaacaggccgaaaagatcctggacaccgagaatttgttcgaagcccagcagctgctgctgcaccatcaacaaaagactaagcgaatttcggcaaagaagagggatgtccagcaacagatcgcccaggctcagcagggcgaaggcggcctccctgataggggccatgaagagctgaggaagcttgaaagcactttagacggtctcgagcggagccgggaaaggcaggagaggcggatccaggttactctgaggaagtgggaaagattcgaaactaataaagagaccgttgtgaggtacttattccagactgggagcagccatgagagattcctcagcttctcttctctagagtctctcagctcagagttggaacaaacaaaggagttctctaaacgcaccgaatctattgccgttcaggctgaaaacctagtgaaagaggccagcgagattcctttgggccctcagaacaaacaactgctccagcaacaagccaaaagtattaaggagcaggtcaaaaagttggaagataccctggaggaagacatcaagacaatggagatggtgaaaacgaagtgggaccatttcgggagtaactttgagactctgtccgtgtggattacagaaaaggagaaggagctcaatgcactcgaaacatcgtcctctgcaatggatatgcaaataagtcaaataaaagtaaccattcaggaaatcgagtcaaagctgagtagcattgtggggcttgaggaggaagcgcagtccttcgcccagtttgtgactactggcgagagtgcgaggatcaaggcgaagctaacacaaatcaggagatatggggaggaactgcgcgagcatgctcagtgtctggagggcacaattttggggcatctgtcgcagcagcagaagttcgaggaaaacttaagaaaaatacagcagtctgtgagcgagttcgaagataagcttgccgtcccgattaagatatgttccagtgcaaccgaaacatataaggtgttgcaggagcacatggacctctgccaggctctcgagtctttaagctccgctattacagctttcagcgcgtctgccaggaaggtggttaatcgcgactcctgtgtacaggaagcggccgctctgcaacaacaatacgaggatatactgcgccgtgcaaaggagcgccagacggctctagagaacctcctggctcattggcaacgtctggagaaggagttaagtagttttttgacatggctggaaagaggggaggcaaaggcctcttctcccgaaatggatatttccgcagacagggttaaggtggagggggagttacagctgatacaggcgctgcaaaacgaagtggtcagccaagcctccttttacagcaagttactacagctgaaagagtctctgtttagtgtcgcaagtaaagacgatgttaaaatgatgaagctgcatctcgaacagctggatgagcgctggcgggaccttccacagattattaataagcgcatcaacttcctgcaatcagttgtggctgagcatcagcagttcgatgagctactgctcagtttcagtgtgtggatcaagctcttcctctcagaactgcagacaacttctgagatctcaatcatggaccatcaggtggctctcacgcgccacaaagatcatgcagctgaagtggagtccaagaagggcgagttgcaaagtttgcagggccacctggcgaagttgggcagcctaggccgggcagaggacctgcatcttttacagggtaaggctgaggactgcttccagctattcgaggaggccagtcaagtggtcgagcgccgccagttggccctgagtcacctagctgagttcctgcagagccatgccagtctttccgggattcttcgacagctgagacaaaccgttgaggccaccaattcaatgaataagaacgagtccgatcttattgagaaggacctgaatgatgcactgcagaacgccaaggcgctggaaagcgccgctgtcagccttgacggcattctgagtaaagcccagtatcatctaaaaataggtagcagtgagcaaaggacctcttgccgggctacagctgaccagctttgtggagaagtggaacgtatccagaatctgctggggacaaagcagagcgaggcagacgcccttgccgtgctgaaaaaagcttttcaggaccagaaggaggaactcctaaagtcaattgaagatatcgaggagcgtactgataaagagcgactaaaagagcccacacgtcaagcactgcaacagaggttgcgggtgtttaatcaactagaggacgaactgaactcacatgaacatgaactgtgctggctgaaggacaaagcgaaacagatagcacagaaggatgttgcctttgcaccagaagtcgatcgcgaaatcaatcgcctcgaagtaacgtgggacgatactaaaaggcttatccacgaaaaccaaggacaatgctgcggcctgattgacctgatgcgtgaatatcaaaatctgaagagtgctgtgagcaaggtactggaaaatgcttctagcgtcatcgtaactagaacaaccattaaggatcaagaggatctgaagtgggcgttcagcaaacatgagaccgcaaagaataaaatgaactacaagcaaaaggacctagataactttacttcgaaggggaaacaccttttgtctgagctgaagaagatccactcttccgattttagcctggtgaagactgatatggaaagcactgtcgacaagtggctggacgtgagcgaaaagctagaagaaaacatggataggctgcgggtctccttgtcgatttgggacgatgttctctcaacaagggatgaaatagagggctggtcgaataactgcgttccacagatggccgagaatatctccaatctggacaatcacctaagagcagaagaactgctaaaagagtttgagagcgaggttaaaaacaaggcgcttcgactggaggagcttcacagcaaggtgaatgaccttaaagagctgacaaaaaacttggagactcctccagacttacagttcatcgaggcagatctgatgcagaagttggagcacgccaaagagattaccgaagttgcaaaaggtactctgaaggattttacagcgcagtcaacccaggttgagaaatttatcaatgatattaccacttggttcacaaaagtggaggagtctctgatgaactgtgctcagaatgagacatgtgaggccctgaaaaaagtaaaagatatccagaaggaactgcagagccaacagtctaatatttcttcaacccaggagaacttgaacagcctgtgtcgtaagtaccactcagcagaattggagtcgctggggcgcgctatgactggtcttatcaagaagcatgaggccgtctcacagctgtgcagtaagacacaagcaagcctgcaggagagtctggagaagcatttctctgagtcgatgcaggagttccaggagtggttcctaggagcaaaggctgcggcgaaagagagctctgaccgcaccggagacagcaaggtcttagaagcgaagctccacgacctgcagaatatcctggattccgtgagcgatggccagagcaagttggatgctgttactcaggagggccagacactgtacgcccacctgtccaaacagatcgtctcttctattcaggagcagattacaaaagccaacgaagagttccaagctttcctgaagcagtgccttaaggacaaacaggctctgcaggactgcgcatcagagctggggagcttcgaggatcagcaccggaagctgaacctgtggattcatgagatggaagaacggttcaacaccgagaacctaggcgagagtaagcagcacatccctgagaaaaagaacgaggtgcataaggtggaaatgttcttaggcgagctcctggccgctcgagagtccctcgataaactgtcacagcgaggccagttactgtctgaggaggggcacggtgctggtcaggaggggcggctatgttcccagctgttgacctcccaccagaatcttctgcgaatgactaaggagaagctaaggtcatgccaagtcgcgctgcaagaacatgaagccctcgaagaggccctccagagcatgtggttctgggttaaggcaatccaggacaggcttgcttgtgcagagagcactcttggatctaaggataccctggagaaacgattgtcgcagattcaggatatcctgctgatgaaaggggagggggaggtgaaattaaacatggcaatcggcaaaggcgaacaagcactgcgctctagcaacaaggaggggcagcgggtgatacagacccaattggagacgctcaaggaggtgtgggctgatattatgagctccagtgtgcatgcgcagtccacattagagagcgttattagtcagtggaatgactacgtggaaagaaagaatcagttggaacaatggatggagtcagttgatcagaagatcgaacatcccctccaaccccagcccggacttaaggaaaagttcgtgcttttggaccacctgcagagcatcctcagcgaagcggaagaccatacacgcgctctgcaccggctgatcgcgaaatcaagggaactctatgaaaagacagaagacgaatcttttaaagacactgcccaggaggagttaaagacgcagtttaatgacatcatgactgtggccaaggagaagatgcgtaaagtcgaagagattgtaaaggatcacctgatgtacctcgatgctgtacacgagtttaccgactggctccactccgcaaaagaggagctccacagatggtctgacatgagcggtgatagtagcgccacccaaaaaaagctgagcaagatcaaagagctgatcgactcacgcgaaattggagcatcaaggctaagccgagtcgaatccctcgccccagaggtcaagcagaacaccactgcaagtgggtgcgagctgatgcatacagaaatgcaagccctgcgggcagactggaagcagtgggaggattccgtctttcagacccagtcttgcttggaaaacttagtgtctcagatggctttatccgagcaagaatttagcggccaggttgcccaactggaacaggctctggagcagttctcagcactgctgaagacatgggctcagcaattgactcttttagaaggcaagaacacagatgaagaaatagtagagtgctggcataaggggcaagagatcctggatgccctgcagaaggctgaaccgcgcaccgaagacttgaaaagtcagcttaatgaactgtgtcgcttctcacgagatctcagcacctactctggcaaggtgtcgggcttaatcaaagagtataattgcttgtgccttcaggcttccaaaggctgccagaacaaagaacaaattctgcagcaaaggtttcgtaaggcctttagggacttccagcagtggctagtgaatgcgaaaatcaccacagctaagtgctttgacatccctcaaaacatatctgaggtgtcaacgtcattgcagaagattcaggaattcctgtcggaaagcgaaaatggccagcataaattgaatatgatgttgagtaagggagaacttctgtctacgctgttaacgaaggagaaggccaaaggcatccaagccaaagttacagccgctaaagaggattggaagaacttccacagcaatctccatcagaaagaaagcgccttggagaatctcaagatccagatgaaggactttgaggtgagtgctgagcctattcaagactggctctccaagaccgagaagatggtgcacgaatcttccaaccggctttacgatttgcctgcgaagcgcagggagcagcagaaactgcagagcgtgctagaggaaattcactgctacgagcctcaattgaacaggcttaaggagaaagcccagcagctgtgggagggccaggctgcctcgaagagttttcgccaccgagtctcacagctgtccagccagtaccttgcccttagcaacctgacgaaagagaaggtatcccgcctggataggattgtggccgagcacaatcaattttccctcgggatcaaggagttgcaagattggatgaccgatgcgatacacatgctggatagctattgccaccctacaagcgataagtccgtgttggatagcaggacactgaaactggaggccttactctctgtgaaacaggaaaaagaaatccagatgaagatgatagtgaccaggggagaaagcgttctccagaacacgtcacccgagggaatcccgactatccagcagcagctgcagtctgttaaggatatgtgggcaagcctgctgagcgcggggattcgttgcaaatcccaactggaaggcgccttgtccaaatggacgtcttatcaggatggcgtgcgccagttttccggctggatggacagcatggaggctaacttaaacgagtctgaacggcagcacgccgagctgagagataagactactatgctgggcaaggcaaaacttttgaacgaggaagttctctcttactctagtttgctggaaactatcgaggtgaagggggcagggatgaccgaacattatgtaactcagctcgaactgcaggatttgcaggaacggtaccgcgccatccaggagcgggcaaaagaggctgtgacgaaatctgagaagctcgtgaggctgcatcaagaatatcagcgagatctcaaggctttcgaggtgtggctggggcaggaacaagagaagctggatcagtactcagtattggagggagacgcccatacacacgaaacaacgcttcgagatttgcaggaactccaggtacactgcgctgagggtcaggcgctgctgaactccgtattgcatacacgggaggatgtgatcccttccgggatacctcaggccgaggaccgagcgcttgaatctcttcggcaggattggcaggcgtatcagcatcgactgtctgaaacccgtactcagtttaacaacgtcgtcaacaagctgagattgatggagcaaaagtttcagcaggtagatgaatggttaaagacagccgaagaaaagaagtggcatgaagaggtcactgcgtaccgcgacgaagtcgaagaagtcggcgccagggctcaggagatacttgacgagtcccatgtgaacagccgaatgggctgtcaagctactcaactgactagtcgttaccaggctttgcttcttcaggtcctggagcaaatcaaatttctggaagaagagatacaaagccttgaggagtcggagagttccctctctagctactccgactggtatggcagcacccacaaaaatttcaaaaatgtcgccacaaagattgacaaagtagacaccgtcatgatgggcaagaaattgaagacactggaggtgctgctgaaggacatggaaaagggccacagcctcctaaaatctgcgcgggagaagggtgagcgggccgtgaaatacctcgaagagggggaggctgaaagactcagaaaggagattcatgatcatatggagcagctgaaggaattgacaagcaccgtgcgaaaagagcatatgacattggagaaaggcctccatctcgccaaagagttcagtgataagtgtaaggctctgacacagtggattgccgagtatcaggaaattctacatgtgcctgaggaacccaagatggaactctatgagaagaaggcgcagttgtctaagtacaagtctctccagcagacagtcctctcgcacgaaccctccgtaaaaagcgtccgggaaaagggggaagcccttttggagctggtgcaagacgtgaccctgaaggataaaatcgatcagctgcagtctgattatcaggacctgtgctctatcggcaaggcaatgatggaagaaattgcaggtttcgaggataggctcaacaacctgcagatgaagggcgataccctgataggacagtgcgctgaccatcttcaggctaagctgaagcaaaacgtacacgctcatttacagggaacgaaggactcttatagtgccatttgtagcacagcgcagagaatgtaccagagtctagagcatgaactgcagaaacacgtgtccagacaggacactctgcaacagtgccaagcgtggctgagcgccgtccaacccgacctggagcccagcccccagcctccactgagcagagctgaggccattaagcaggtgaagcatttccgggcattacaggagcaggcccgcacctacctggacctcttatgtagcatgtgcgacttgtccaatgcgtctgttaagacaaccgcaaaagacatccaacagacagaacagactatcgaacagaagttagttcaggctcagaacctcacacagggctgggaagaaattaagcacctgaagagcgaactgtggatttacttgcaggatgccgatcagcagctccaaaatatgaaacgcaggcacagtgagctggaattgaacattgcacagaatatggtgtcccaagttaaggacttcgttaagaagctgcaatccaaacaagcttcagtgaataccataattgagaaagtaaacaaactgactaaaaaggaggaaagccctgagcacaaggagattaaccatctgaacgatcagtggcttgacctgtgcaggcagtccaataatctgtgccttcaacgcgaggaggacctgcaaaggactagagactaccacgactgcatgaatgtcgtggaggtttttctcgagaaattcaccaccgagtgggacaatctcgctcgatcggatgcggagtccaccgccgttcacctggaggctcttaaaaagttagcccttgccctacaggagcgtaagtacgccatagaggacctgaaggaccaaaagcagaaaatgatagagcacttaaacctggacgacaaggagctggtaaaggaacagacatcacaccttgagcagaggtggtttcagctggaagacctcatcaagcgaaagattcaggtctctgtgactaatctggaggagctgaatgttgtccagtccaggtttcaggaactgatggagtgggcggaggagcagcagcctaatatagccgaagcgctcaaacagagtcccccacctgacatggcccaaaatctgttaatggatcacctggcgatctgcagcgagctggaggccaagcaaatgctgttgaagtctttgatcaaggatgctgaccgggtgatggccgacctaggtctcaatgagcgccaggtcatccaaaaagcattaagtgatgcccagagccacgtgaattgcctcagtgacctggtgggccaacgccgaaagtatctgaataaggcactaagcgagaagacacaattcttgatggcggtgttccaagccacgtcacagattcagcaacacgagcggaagatcatgttccgggagcatatctgtctcctgcccgacgacgtatccaaacaagtgaaaacatgtaagtccgcccaggcatctctgaaaacgtaccagaatgaggttaccggtctctgggcacagggtcgcgaactcatgaaggaagttacggagcaggagaaaagcgaagtactggggaaattgcaggaactgcagtcggtatatgactcagtcctgcagaagtgtagtcaccggttgcaggagctagagaagaacctcgtgtcgagaaagcactttaaagaggattttgataaagcttgccattggctgaagcaggccgacatcgttaccttccctgaaatcaatttaatgaacgaatccagcgaactgcacacgcagcttgccaaataccagaatattcttgaacaaagtcctgagtatgagaacctccttcttaccctgcagcgaaccggacagacaattctaccgtccctgaatgaggtggatcactcttaccttagcgaaaaattaaacgcactgcctaggcaatttaacgtgatcgtggcactggctaaggataaattttacaaagtgcaagaagcaattttagcaagaaaagagtatgcaagtctcatagagcttactacccagtccctgagcgaactggaagcgcagttcctgaggatgagtaaggttcccacggatcttgccgtagaggaagcccttagtcttcaggacggctgccgggctatactcgacgaggtcgctggcctcggcgaagctgtggacgaattgaaccagaagaaagagggctttcggagcactggccagccttggcagcccgacaaaatgctgcacttggtcacattatatcacaggctgaaacggcaaactgagcaacgtgtatcactgctcgaggatacaaccagtgcataccaggaacacgaaaaaatgtgtcaacagctcgaaaggcaactgaagtctgtgaaagaggagcaatccaaagttaacgaggagaccctgcctgccgaggagaagttgaaaatgtatcacagcctggccggatccttgcaggactccggcattgtgctaaagagagttacaatccatcttgaggacctcgctcctcaccttgaccccctcgcatacgaaaaggctcggcaccaaattcagtcttggcagggggagctaaagctgctgaccagcgccatcggggagacagtcaccgaatgcgaaagcaggatggttcaatcaatcgacttccaaacggaaatgtcccgctctcttgactggctgaggagggttaaggcggaactaagtggaccagtgtacctggatctgaacctccaggatatacaggaggagatcaggaagattcagatccatcaagaggaagtgcagtcctcactacgaattatgaatgcactgagccacaaggagaaagaaaaattcacaaaggcaaaggagttgatctccgctgacctggaacactcgctggcagagctcagtgagctcgatggcgacatccaagaagcattgaggacacggcaggccaccttgaccgagatttactctcaatgtcaacgctattatcaggtctttcaggcagcaaacgactggcttgaggatgcccaggagttattgcagttggccggcaacggattggacgtggagtctgcagaggagaacttaaagtcgcatatggagtttttttctacagaggatcaattccacagtaaccttgaagaactgcatagtttggttgccactctggatcctttaatcaagcccacgggaaaagaggacctggaacagaaagtggcctccctggagctgagatcccagaggatgtccagggatagcggggcccaggttgatttgctccagcgatgtacagcccagtggcatgattaccagaaagcacgggaagaagtgatcgaactgatgaacgatacagagaaaaaactcagtgaattctccctgctgaagaccagctcttcccacgaagctgaagagaaactctcggagcataaggccctcgtgagcgtcgtgaattccttccatgagaagattgtggccttagaggagaaggcaagtcagttagagaagaccgggaacgatgctagcaaggctaccctctcccgttctatgactaccgtatggcagcgctggacccgtttacgagcggttgcccaggaccaggaaaagatcttagaggacgctgtggacgagtggacagggtttaataacaaggtcaagaaagccacagaaatgatcgaccagctccaggataaattacccggatcttctgccgagaaggcatctaaggcagaattactgaccctgttagagtaccacgacacttttgtcctcgagctggaacagcagcaatctgcacttggcatgcttcggcagcagacactgtccatgctgcaagacggggctgcacccacacccggggaggagccaccactgatgcaggagattacagctatgcaggaccgctgcctcaatatgcaggagaaggtgaaaaccaacggaaagctcgttaagcaagaattgaaggatcgggaaatggtggaaactcaaatcaattctgtaaaatgttgggtgcaggaaacaaaagaatacctgggtaatccgacaatcgaaatcgacgcccaattagaggaactacaaattctcctcacggaagcgaccaaccatcggcaaaatattgaaaaaatggctgaagagcaaaaagaaaagtacctgggtctgtacactatattaccgagtgagctgtccttgcagctagctgaggtggctctggacttgaagatccgggaccagatccaagataagattaaggaggtcgaacagagcaaagctaccagccaagagctgtctcgacaaattcaaaagctggcgaaggatctcaccaccatcctgactaagctgaaggctaagacagataacgttgtacaggctaaaaccgatcagaaggtgctaggagaggaactggatggctgcaactcaaagctgatggagctggatgcagcagtgcagaagtttttggaacaaaacgggcaactgggtaaacctttagctaaaaagatcggcaaactcactgagctccaccagcagacgatcaggcaggcggagaaccgcctgagtaaactgaatcaggcagcatctcatctggaagaatacaatgagatgctcgagctaatactgaaatggattgaaaaagcgaaggttctcgcccatggtaccatagcctggaacagcgcttctcagcttcgagagcagtacatccttcaccagacactgctggaagagtcaaaagaaattgactctgagcttgaagcaatgactgaaaaactgcaatacctgacctcagtgtattgtacagaaaagatgagccagcaagtcgccgagctcgggagggagacggaggaattgcgtcaaatgattaaaattcggctgcagaaccttcaggatgccgctaaggatatgaagaagtttgaagccgagctcaagaaactgcaagcagctctggagcaagctcaagctacgttaacgtcgcccgaagtgggtagattatccttgaaggaacaattgagccacaggcagcaccttttaagtgaaatggagagtctcaagcctaaggtgcaggccgtgcagctgtgtcagtctgccttacgcattccagaagacgtcgtggcttccttacccctgtgccatgcagcccttcggttgcaggaggaggcctctcgactccagcacaccgcaatccaacagtgcaatatcatgcaagctgctgtcgtccagtacgaacaatatgagcaggagatgaagcacttacagcagctgatcgaaggcgcccacagagaaattgaggataagcctgtggctacttcaaacattcaggagttacaggcacaaatttctagacatgaggagttggcccagaagatcaaaggctaccaagaacagatcgcttctttgaatagcaagtgcaaaatgttgacaatgaaggccaagcatgccaccatgctactcacagtcacggaagttgaaggattggctgagggcacagaggacctggacggggaactgctgcccaccccatccgcccaccctagcgtggtgatgatgactgcagggcgttgccacaccctgctcagcccagtgaccgaggaatccggggaggaaggtacaaacagtgagataagcagtcctcctgcttgcagaagcccctcacccgtggcaaacactgacgcatctgtgaaccaggatattgcctactaccaggcccttagcgctgagcggctgcagacagacgcagccaagatccacccttcaacctccgcttcccaggagttctatgagcccggactggagccatcggctaccgctaagcttggcgacttgcagcgatcctgggagactctgaagaacgttatcagcgagaaacagcgcaccttgtacgaggcgttggaacgccaacagaagtatcaagactccctccagtcgatcagcaccaaaatggaagctatcgagctgaagctttcagaatcaccagaaccagggagatcccccgaatcacaaatggccgagcaccaggcactgatggacgaaattctgatgttgcaagatgaaattaatgagctacagagttcgctcgccgaagaattagtctccgagtcttgtgaggccgaccctgccgaacagctggccctacagtccaccctcacggtgctggcagagagaatgtccaccatcaggatgaaagcctccggaaagaggcaattactggaggaaaagctgaacgaccaactggaggagcagaggcaggagcaagccctacaacggtatagatgcgaggccgacgaactagatagctggcttctttctacaaaggccactttggacacagcccttagccctcctaaggaacccatggacatggaggcccagctaatggattgccaaaatatgttggtggagatagagcagaaggtggtggccctgagcgagctcagtgtgcacaacgaaaatctgctcctggaaggcaaggcccacacaaaagacgaggccgagcagctcgccggcaaactccgccgtctcaagggctcactgttggaactgcagcgtgctctccacgataaacagctcaacatgcagggaaccgctcaggagaaagaggagagcgatgttgacctgaccgcgacccagtcacccggagtacaggaatggctggcccaggcccgaactacctggacgcagcagaggcagtcttccctacagcagcagaaagaactcgagcaggagcttgcggagcagaaatcactgttgaggagtgtggcaagcagaggcgaagagattttaatccaacacagtgccgcagagacctctggggatgcgggcgaaaagccagacgtgttgtcccaagagctgggaatggaaggagaaaagagctcagccgaagatcagatgagaatgaagtgggaatctttgcatcaggagtttagtactaaacagaagctgctgcagaacgtgctcgagcaggaacaagagcaggtcctatacagtcgcccgaataggttgttgtccggcgtgcctctttacaagggcgatgtgcctactcaagataaatcagccgtcacctctcttctggacgggctcaaccaggcattcgaggaagtgagctctcaatcgggtggggccaagaggcagtccattcacctagagcaaaaactctatgacggggtttcggcaactagtacctggcttgatgacgtggaagagcgactgtttgtggccacggctctgcttcctgaggagaccgagacttgtctgtttaatcaagagatactggctaaggacatcaaagagatgtctgaggagatggacaagaacaagaatctgtttagtcaggccttcccagagaacggcgacaacagagatgtaattgaagatacattaggatgcctgctgggacgcctaagccttctcgactcagtggtaaaccagcgatgtcatcagatgaaagaacgcctccagcagatcctcaatttccaaaatgacctgaaggtgctgttcacatccctagccgacaacaaatatattatccttcagaaactggcaaacgtgttcgaacaacctgttgccgaacaaatcgaggctatccagcaagcagaggatgggctcaaggaatttgacgcagggatcatcgagttgaaaagacgcggggataagcttcaggtggagcaaccaagtatgcaagaactgtccaagctgcaagacatgtacgacgaactgatgatgataatcgggtccagaaggagtggactcaatcagaatttgactctcaaatcccagtatgagcgagctttgcaggacttggccgatcttctggaaaccggacaggagaagatggcgggcgatcagaaaattatcgttagtagcaaagaagaaatccaacagcttctggataaacacaaagaatattttcaggggttggaatcccacatgatcctgaccgagacattgttccgaaagatcatttcatttgcagtgcagaaagagacgcaattccacaccgagctaatggctcaagcgtctgccgtcttaaagcgcgcacacaagaggggggtggaactggaatacatcctggaaacatggtctcatcttgacgaggatcagcaggaattgtcaagacaactggaggtagtggagtctagcatcccatctgttggcctagtagaggaaaatgaagatagactcattgacaggatcacattataccagcacctcaaatcttctctgaacgaataccagcccaaattgtatcaggtccttgatgacggtaagagattgctgattagtatctcatgctcagatctggaatcccagttgaaccagttaggggaatgttggcttagcaatactaacaaaatgagtaaagaacttcacagacttgagaccattcttaaacactggaccagataccagtcagagagtgccgacctgatccattggttacaatccgcaaaggatagattggagttctggacccagcagtcggtgaccgtgccacaggaacttgagatggtgagagaccacctgaacgcttttctcgaattttccaaagaggtggacgcgcagtcatcattgaagagttccgtcctgtctaccggtaatcagctcctcaggttaaagaaggtagacacagccactctgaggagtgaactgtcccgaatcgattctcaatggacagaccttctgaccaacataccggcagtccaggaaaaactccatcagctgcagatggataaactgccctcacggcacgcaattagtgaagtgatgtcctggatttcattaatggaaaacgttattcagaaggacgaggacaatatcaagaacagcatcggttacaaagcaattcacgaatacctgcagaagtataagggattcaagatcgatataaactgtaaacagctgacggtcgacttcgttaaccagtctgtactgcagatctcttctcaggacgtggagagtaaacgctcagacaaaaccgattttgccgaacaactcggagccatgaataagagttggcaaatcctgcaggggctagtcactgaaaaaatacagctccttgagggcctgcttgagagttggtctgagtacgaaaacaacgtgcaatgtctgaagacatggtttgaaactcaagagaaacgcttgaagcagcagcacaggatcggggatcaggctagtgtgcaaaacgccctgaaagactgccaggatctcgaggacctcattaaagccaaggagaaagaggtggagaagatcgaacagaacgggctggctttaatccagaacaaaaaggaagatgtgagttcaatcgtaatgagtactttgcgggagttaggccaaacttgggctaatcttgaccacatggtggggcaactcaaaatcctgctcaagtccgttcttgaccaatggtccagccacaaggtggcatttgacaagattaactcttatctgatggaggcccggtactctctgagcagatttcgcctgctcacaggtagtcttgaagccgtacaggtccaggtggataatctacagaatctccaagacgacctcgagaagcaggaaaggtccttacagaaattcggcagcattacgaaccagctgctaaaagagtgtcacccacctgtaacagagaccctgactaacactttgaaggaagtaaacatgcgctggaataacctactagaggagatcgctgaacagcttcaatcttcaaaggccctgctgcagctctggcagcggtataaagattatagcaaacagtgtgcatccaccgtgcagcaacaggaggacaggactaatgagcttcttaaggcagccacaaacaaggacatcgctgacgatgaagtcgctacctggatccaggattgcaacgacctcctcaaagggcttggcacagtgaaagactccctcttcttcttgcatgagctaggcgaacagcttaagcagcaggtcgacgcttccgccgccagcgcaatccaatctgaccagctatccctgtcccagcatctctgtgcccttgaacaggccctgtgcaaacaacagacaagcctgcaggccggagttctcgattatgagacatttgccaaatcgctggaggcactggaagcgtggattgtggaagccgaagaaatactccaaggccaggacccatcccactcttccgaccttagcacgatccaagagcgcatggaagagctaaaggggcagatgttgaagttcagtagtatggctccagatctcgatagattgaatgagctcggctaccgcctgccattaaatgacaaggaaatcaaacgaatgcagaacttaaaccgccattggagcctcatctccagccagactaccgagaggttttccaaattgcagagctttttacttcagcatcaaacattccttgaaaagtgcgagacctggatggaatttcttgttcagactgagcaaaagcttgcggtggagatctctggaaactaccagcatttgctcgagcagcagagagcccatgagttgtttcaggccgagatgttctcccgtcagcagattctacactctatcatcatcgatggccagagacttttggaacagggccaggtcgacgaccgagacgagttcaatttgaagctgacgttactttccaaccagtggcagggggtcattcgaagggcgcagcagcgccggggcattattgactcccagatcaggcagtggcagcgctatagggaaatggccgagaaactgcgtaagtggcttgtagaggtttcatatctccctatgtctggtctcggaagtgtgcctatcccattgcagcaggcacggaccctattcgatgaagtccagtttaaggagaaggtcttcctcaggcaacagggatcctatatcctcacggtcgaggccggcaaacagctgttgttatcagccgattcaggagcagaggcagcccttcaggccgagttagcggagatccaagagaagtggaagagcgcatcaatgaggcttgaagagcagaagaaaaaacttgcctttctcttgaaagactgggagaaatgcgagaaagggatcgcagacagcctggagaagctgcgtacattcaaaaaaaagctgagccagtcacttccggatcatcacgaggagctgcacgctgagcagatgcggtgcaaagaacttgagaacgcagtggggtcttggacggacgacctcacccagctgagtctccttaaggatactctctcagcctacatatccgctgacgatatcagtatacttaacgaaagagtggagctgttacaaagacagtgggaggagttatgccatcagctttcattgaggcgacagcagatcggagaaagactcaacgaatgggctgtgttttctgagaagaacaaagagctgtgtgaatggctgactcagatggaatccaaagtgtcacagaatggagatatacttatcgaggaaatgattgaaaaactcaagaaagattatcaagaagagatcgcaatagcccaggagaacaagattcagctccaacagatgggggaacgactggcgaaagcctctcatgagagcaaagcctcagaaatcgagtataaactgggcaaggttaatgacaggtggcaacacctactggatcttatcgctgcacgggttaaaaaactgaaggaaaccctcgtcgctgttcaacagcttgataagaatatgagcagtctgcggacctggcttgctcatattgagagcgaattggccaaaccaatagtgtacgacagctgtaattctgaggaaatacagcgcaagctcaacgagcaacaggagttacaaagggatatcgaaaaacatagcactggcgtggcgagcgtgctgaacctgtgcgaagtcctcctgcatgactgtgacgcttgtgctacggatgctgaatgcgattccatccagcaggctactagaaacttagacaggagatggcgaaacatttgtgctatgtcaatggaacgcaggttaaagatcgaggaaacatggagactgtggcagaaatttcttgacgactacagccgtttcgaggattggttgaaatctagcgagaggactgccgcttttcccagcagttctggggtgatctataccgttgcaaaagaagagctgaagaagttcgaggcattccagaggcaggtgcatgagtgtctgacccagctagaactgatcaataagcagtacagacgcctcgcacgcgagaatcggacggactccgcttgctccttgaagcagatggtgcatgaaggcaaccagagatgggataaccttcaaaagcgagtgacaagtattctgcgcagactgaaacacttcatcgggcagagggaagagttcgagacagcccgcgatagcatcttggtgtggttgactgagatggaccttcagttgactaatatcgaacatttctcggagtgcgacgtgcaggcaaagattaaacagctgaaagcttttcagcaggaaatctccctgaaccacaataaaattgaacaaataatcgcccagggggaacagctaatcgaaaagagtgagcctttggacgccgcaattatagaggaagaactcgatgagttacgtcggtactgccaggaggtattcgggcgggttgagaggtatcacaagaagctgattagactcccacttcccgatgatgaacacgacctgtctgatagagagctcgagctggaagattcggccgcattatcagacctgcactggcacgaccgctctgcagactccctgctctctccccaaccttcctctaacctgtccctgtccctggcccagcctctgaggagcgaaaggtctgggagagacaccccggcatccgttgatagcattccactcgagtgggaccatgactacgacctgtccagggatctggaatcagccatgagcagggcactgccaagcgaagacgaggagggccaagacgacaaagatttctacctgcgaggcgcagtgggactgtctgatgttatgattccagagtcccctgaagcctatgtaaaactgacagagaacgcaattaaaaacacctctggcgatcactcagctctggagtctcagataagacagctggggaaagccctggatgactctcggttccaaattcagcaaactgagaatatcattcgaagcaaaacgcccaccggacccgagcttgacacttcctacaaaggatacatgaagctgttaggtgagtgctccagctcgatcgatagtgtgaagagactggagcacaaactgaaagaagaggaggaatcactgccaggtttcgtcaatctgcattccactgagacacagacggccggcgtgatcgaccgctgggagctgttgcaggctcaggccttaagtaaagagctgaggatgaaacagaatctgcagaagtggcaacagttcaacagcgacctgaatagcatctgggcctggttgggagatacagaggaagagctggagcaattgcagcgtttggagctcagtacagatatacagacaattgagttacaaatcaaaaaactcaaggagctgcaaaaggcggttgatcatagaaaggccatcatcctgagcattaatctgtgctcaccagagtttacccaggcagactctaaagagagcagggacctacaagatagactgagtcagatgaatggaaggtgggatagagtgtgtagcctcttagaagagtggcgtgggcttttgcaggatgcactgatgcagtgccagggctttcacgagatgtcccatgggctattactcatgctcgagaatattgaccggcggaagaatgagatagtacctatcgactctaacctggacgctgagatactccaggatcaccacaagcagctgatgcaaatcaaacatgaactacttgagagccagttgcgcgtggcgagcctacaggacatgtcttgtcaactgttggtcaatgccgagggtactgactgtctggaagcaaaagagaaagtccatgtaatcggcaaccgtctcaagctgctgctgaaagaggtgtccagacacatcaaggagctcgaaaaactgctggacgtgtcatcatcccagcaggatctgtctagttggagttccgccgatgaattggatactagcggctctgtaagccctaccagcggaaggtctaccccaaatcggcagaagactcctcgcgggaagtgctccctctctcagcctggaccatctgtaagttcaccgcattcaagatcaacaaaggggggctcagattcctccctaagcgagccaggtcccggtcgctcagggaggggttttttgtttcgggtgctgagggccgccctccccctacagctgcttctcttgctattaatcggactcgcgtgcctggtcccaatgagtgaggaggattacagttgcgccctgtccaataacttcgctaggtcgtttcacccaatgttgagatacactaatggcccccccccactctag

SEQ ID NO: 226978 - DNA, 26250 bp, Artificial Sequence
  derived and/or modified sequence
atggccaccagccggggcgccagccggtgcccccgggacatcgccaacgtcatgcagagactgcaggatgaacaagagatcgtccagaagagaacattcaccaagtggatcaatagccatctggcaaagcgtaagcccccgatggtagtagatgatctgttcgaagatatgaaggatggagtaaaactgttggcccttctggaagtgctttctggacagaaactcccttgcgaacagggtcgtcgaatgaaacggatccacgcagtggctaatatagggacggcactcaaatttctggagggaagaaaaagtatgcatcgcggctcacccatcaagctcgtgaatattaactctacggacatcgccgacgggcggcctagcatcgtgctgggactgatgtggacaatcatcctgtacttccagatcgaagaactaacaagcaacctgcctcaactccagtctttgtcttcgtccgcttcctctgttgactcaattgtgtccagcgaaaccccttctccaccctcaaaacggaaggtcaccactaagattcaaggcaatgccaagaaggcattgctgaagtgggtccagtatacagcgggcaagcagaccggtattgaagtaaaggactttggcaaatcttggagaagtggcgtcgcattccattccgtaattcacgcaattagaccagagttggtggacctggagacagttaaggggagatctaatcgggagaatctcgaggacgcctttacaattgccgagaccgaactgggcatacccaggcttctagatccggaagatgtggacgtggacaaacccgatgaaaagtcaattatgacatacgtggctcaattcctcaaacactatcccgacatacataacgcatctaccgatggtcaggaagatgacgagatcctgccgggttttccctcattcgctaactccgttcagaatttcaagcgtgaggatcgggtcatcttcaaggaaatgaaggtgtggattgagcaatttgaacgagatctcacccgcgcacaaatggtcgagtcaaatttgcaggataagtaccagagcttcaaacatttcagggtgcagtatgaaatgaagcgcaagcagattgaacatctgatccagcccctccatcgcgacgggaaactgtccttggaccaagctctagtgaagcaatcatgggatagggttacctccaggttattcgattggcacattcagctggataaaagccttccagctcctctgggtaccatcggcgcctggctgtaccgcgctgaggttgcactcagagaggagatcactgtgcagcaggttcacgaagaaacggccaataccatccaacgcaaattggaacagcataaggacctgctgcaaaacactgatgcacacaagcgggcttttcacgagatctatcgcacacggagcgtcaatgggatccccgtgcctcccgatcagttagaggatatggccgagaggtttcacttcgttagctcgacttcagagctgcacttaatgaaaatggagtttttggagctgaagtaccgtctcctctccttgctggtgctcgcagaatccaaactgaaaagttggattatcaaatatggacgccgagagtctgtggagcagctcttgcagaactacgtgtcatttattgagaatagtaagttctttgaacaatacgaagtcacttaccaaatcttaaaacagaccgccgaaatgtatgtgaaagccgacggatccgtagaagaggccgagaatgtgatgaagttcatgaacgagactactgcccaatggcggaacctgtccgttgaggttagatctgtgagatcaatgctggaggaggttatctctaactgggaccgctatggtaacaccgtcgctagtctgcaggcctggctggaggacgctgaaaagatgttaaaccaatcagagaatgcaaaaaaagactttttccgcaacctgccacactggatccagcaacacactgcgatgaacgacgccggcaactttctgattgaaacatgcgacgagatggtttcccgggacttaaagcaacaactgttgctgttgaatggtcgctggagagaattgtttatggaggtaaaacaatatgcccaggcggacgagatggaccgcatgaagaaagagtataccgattgtgttgtaacgctctcagccttcgcgacagaagctcacaaaaagctctcggaacctctagaggtgagctttatgaatgtgaagcttctgattcaggaccttgaagacattgaacaaagagtccccgtgatggacgcccagtacaagatcattaccaaaactgctcacctcatcaccaaagagtctccacaagaggagggaaaggagatgttcgcaacgatgagcaaactcaaggaacagttaaccaaagtgaaagagtgctactctcctctcctctatgaatcgcagcaactactcattcccctggaagaattggagaaacagatgacctctttctacgatagcctcggaaagattaacgagataatcacagtgctggagcgagaggcccagagcagtgctttgttcaaacagaaacatcaagaactgctggcatgccaggagaactgcaagaagacgctcacgctcatcgagaagggatcccagagtgtgcagaagttcgttaccctcagcaacgtcctgaaacactttgatcagactagactgcaacgccaaatcgctgacatccacgttgcatttcagagcatggtgaaaaaaactggggactggaaaaaacatgttgagaccaatagccggctgatgaagaaattcgaagaatctcgagccgaactcgagaaggtgctgcggatcgcacaggaagggttagaagagaaaggggacccggaggagctcctgcgcaggcataccgaattcttctcccaattagatcagcgagtgctgaatgcattcttgaaggcatgcgatgagctgaccgatatcctgcccgagcaggaacagcagggtctgcaagaagccgtgcgaaagctgcacaagcagtggaaggaccttcaaggcgaggccccataccaccttcttcatctaaagatcgatgtcgaaaagaaccgattcctggccagcgttgaggaatgcaggacagagctcgatcgggaaacgaaactcatgccgcaggagggctctgaaaagattatcaaggaacatagagtgtttttcagcgacaagggaccacatcacctctgtgagaaaaggcttcagcttattgaggagctctgcgtcaaacttccagtgcgggatcctgttagggatactccaggaacctgccatgtcactctaaaagagctgagggctgccatagacagcacataccgcaagctcatggaagatcctgataaatggaaggactataccagccgctttagtgaattttcctcctggatttccaccaacgagacccaactgaaggggatcaaaggagaagctatagacaccgccaaccacggtgaggtaaagcgtgccgtagaggagatcaggaatggggttactaagaggggggaaactttgagctggcttaagagtagacttaaggtccttaccgaggtgtccagtgagaacgaagcccagaaacagggcgacgaattggcaaagctttcctcatcattcaaagccctggtgaccctgctgagcgaggtggagaagatgttatccaacttcggcgactgtgtacagtacaaggagattgtcaagaacagtctcgaggaactgatttccggatctaaggaggtccaggagcaggccgagaaaattttggatactgagaacctctttgaggctcagcagctgttgctccatcatcaacaaaagacaaagcggataagtgccaagaagcgggacgtgcagcagcaaatcgcacaggcacaacagggcgagggcgggttgcctgatcgtgggcacgaggagctgcgcaaactcgagtcgacactcgatggcctggaacgcagtcgggagcggcaggaacgaagaatacaagtgaccctaagaaaatgggagcgttttgagacaaacaaggagactgttgtgcgctacctctttcaaaccggctcttcgcatgagaggttccttagtttcagtagtttggagtccctgtctagcgaattagagcagacaaaggaattctcaaagcgtactgagagcatcgcagtgcaagccgaaaacctggtcaaggaagcatccgagatcccgctaggacctcaaaataagcagctgctacagcagcaggccaagtctatcaaagagcaggtgaaaaagctcgaggataccttggaagaagatataaaaacaatggagatggtgaagacgaagtgggaccacttcgggagcaactttgagacactgtctgtgtggattaccgaaaaagagaaggaactgaatgctttggagacatcctcttctgccatggatatgcagatctcacaaatcaaggtcaccattcaggagatcgagagtaagctctcgtctatcgtcggacttgaagaggaagcccagagctttgcccagttcgttactactggagagtctgcacggatcaaggcaaaattaacacaaatcagacgctatggcgaagaactgagagagcatgcccagtgcctcgagggaacaatcctgggccacttgagccagcagcagaaattcgaagagaatctgcgcaaaatccagcagagcgtaagtgaattcgaggacaagctggctgtacccatcaagatctgttcttccgcgaccgaaacatacaaggtgctgcaggagcatatggatctttgtcaggccctcgagagcctgtctagtgccatcactgccttctcggcgtcggctaggaaggtcgtgaaccgagattcttgcgttcaggaggccgcggccctgcaacaacaatatgaggacatccttagaagagctaaggaaaggcagaccgctctagaaaatctcttggcacattggcagcggctggagaaggaactctcctccttcttaacatggctcgagcggggggaggctaaagccagctccccagagatggatatatcagccgaccgcgtgaaggtggaaggcgagctgcagctcatacaggcctcgtccaggaagtttgtgagccaggctagcttttatagcaaacttctgcagctgaaagagtcactcttctccgtcgcctctaaggacgacgtgaagatgatgaagctgcacctggagcaacttgatgaaagatggcgcgaccttccccagatcatcaataaacgcatcaattttcttcagtctgttgttgccgaacaccagcaattcgacgagttgctgctttccttttcagtgtggatcaaattatttctctccgaattgcagacaaccagcgagattagcattatggaccaccaggtggccctgactaggcataaagaccatgctgcagaggtcgagagcaaaaagggagagctgcaatctctgcaaggtcatctggccaagctaggaagccttggacgcgcagaagacctccatctgctgcaagggaaagccgaagactgcttccagctctttgaagaggcctctcaggtggtcgaaaggcggcagctggcgctgagccacctcgcagagtttctgcagtctcacgcttcgctatctggcatattaaggcagctgcgtcagaccgtcgaggctactaactccatgaataagaatgagagtgacctcatcgagaaggatttaaatgatgctttgcaaaacgccaaagcgctggaatcagctgccgttagcctggatgggatactatctaaagctcagtaccacctgaaaataggcagttccgaacaacggacttcatgccgtgccacggctgaccaactctgtggcgaggtggagaggattcaaaacctgttagggaccaaacaaagcgaagccgatgccctggcagtgctgaaaaaagcattccaggatcagaaagaggagctgcttaagtctattgaggacatcgaggaacgaaccgacaaagagcgcttaaaggaacccaccagacaggctctgcaacagagattgcgggtgtttaaccagctggaggacgagcttaattctcacgaacacgagctgtgttggctgaaagataaggccaagcaaattgcacaaaaggatgtcgccttcgctccagaagtggacagagagatcaatagactagaagtgacttgggatgacacaaagcgactgatacacgaaaatcagggccaatgctgcggcctgatcgatttgatgagggaataccagaatctcaaatcagccgttagtaaggtgctggagaacgcctcatccgtgattgtgacccgcacaacaattaaggaccaggaggacctcaaatgggcattttctaagcacgagaccgcaaaaaataaaatgaactataagcagaaggacctggacaactttacctctaagggtaagcatctgctgagcgagctgaagaagattcacagcagtgacttttccctcgtaaaaacagatatggaatcaacagtcgacaagtggcttgatgtgagtgaaaaattggaggaaaacatggaccgcctgcgggtgagtctgtcgatttgggacgacgtcctgtcaacaagggatgagatcgagggttggtctaacaattgcgttcctcaaatggccgagaacatcagtaacctcgataaccacttgagggcagaggagttgttgaaagaatttgaatcggaggtcaagaataaggctctgaggctggaggaactgcacagcaaagtgaatgatctcaaggaactgacaaaaaatctcgaaaccccccccgacctgcagtttattgaggcagatctgatgcaaaaactggaacacgccaaggagattaccgaagtggctaagggaaccctgaaggacttcactgctcagtcgacacaggtggagaaatttataaatgatatcaccacgtggtttacgaaagtcgaagagagcctgatgaattgcgcacagaacgaaacatgcgaagccctgaaaaaagttaaagatattcagaaagaattacagtctcagcagagcaacattagcagcactcaggaaaacctgaactccctgtgtcgaaagtatcactcagcagagctcgaatcattaggtcgggcgatgactgggctgatcaaaaaacacgaggctgtgagccagctatgttcaaaaacacaggctagccttcaggaatcactcgaaaaacatttcagcgaatctatgcaggaatttcaggaatggttcctgggcgcgaaggcagcagcgaaagagtccagcgaccggaccggagacagcaaggtgctggaggctaagctgcacgatctacaaaatatcctggactcagtttccgatggacagagcaaactggacgcggtgacgcaagaagggcagaccttgtatgcccatctttccaagcagatagtgtcaagcatccaagagcagatcaccaaggctaatgaggaattccaagcattcctcaaacagtgcctcaaggataagcaggccttgcaggattgcgcaagcgaactcgggtcatttgaggaccaacataggaagttgaatctgtggatccacgaaatggaggaacgattcaacacagagaacctgggcgaaagcaagcagcacattcccgagaaaaagaacgaggttcacaaggttgagatgtttctaggcgagttgctcgccgcaagagagagtctggacaagctttcccagagaggtcagttactgtctgaggaaggacacggggccggccaagaggggaggctgtgctcccaattgttgacgtctcatcagaacttattgagaatgaccaaggaaaagctgcgctcctgtcaagtggcactacaggaacacgaggccttagaggaggcattacagagcatgtggttctgggttaaagctatccaggacagactggcttgcgctgagtctacgcttggctcgaaagacaccctggagaaacgtctgagccagattcaggatatacttctcatgaagggcgaaggggaggtaaagttaaacatggccattgggaaaggagaacaggcactgaggtcatccaacaaggagggccagcgtgtcattcaaacccagctggagactttgaaagaagtttgggccgatattatgtcatcatctgtacatgcacagtcaacactcgagtctgtcatctctcaatggaacgactacgtggaacggaagaaccagctggaacagtggatggaaagcgtagatcagaaaattgagcaccccctgcagccccagcctggcctcaaggaaaaatttgtactcctcgatcatctacagtcaatccttagcgaggcagaagatcatacgagggccctccaccggcttatcgccaaatcccgtgagctttacgagaagaccgaggacgagtccttcaaggatacggcccaggaagaactcaagacccaattcaacgatataatgacagtggcaaaggagaaaatgcgcaaggtggaggaaattgtgaaagatcatctgatgtatcttgacgccgtccatgaattcacagactggctccactctgccaaagaagagttacatagatggtctgacatgagtggagatagttctgcaacgcagaaaaaactcagcaaaataaaagaattaattgattcccgggaaatcggagcatcaaggctgagcagagtggagtccttggctccggaggtcaaacaaaatacgacggcttctggatgtgaactgatgcacacagaaatgcaggctcttagagctgattggaaacaatgggaagacagtgtgtttcagacacaaagctgccttgagaatttggtgagtcagatggcattgtctgagcaggagttctcgggacaggtagcacagctggagcaggcccttgagcagttctctgcattgctaaaaacttgggcccaacagttgaccctgcttgagggcaagaatacggatgaagagatcgtcgagtgctggcacaagggccaggagattctggatgccttgcagaaagcagagccacggaccgaagacctgaaatcccagctgaacgaattatgccggttttctagagacttatctacctacagcggaaaggtgtctggactgatcaaggagtataactgtctctgtctgcaggctagcaaaggctgccaaaacaaagagcagattctccagcagcgctttagaaaggccttccgggacttccagcagtggctcgtcaatgcaaaaattaccaccgccaagtgttttgacatccctcagaatatatccgaggtttccacatccctacagaaaatccaggaattcttgagcgagtccgagaacggccaacataagcttaatatgatgcttagtaaaggggagctgctttcaaccctcctgactaaagagaaagccaaggggattcaggccaaagtcacagccgcaaaggaagattggaaaaacttccattccaacttgcaccagaaagagtctgcactagagaatttaaaaattcagatgaaagactttgaagtctctgccgaacctatccaggattggctgtccaagacggaaaagatggtccatgaatcgtcaaataggctctacgacctccctgccaaaagaagggaacaacagaaattacagagtgtcttggaggagattcactgttatgagccccagctcaatcggctcaaggaaaaggcacaacagctgtgggaaggccaggctgcatccaagtcctttagacaccgcgtctctcagctcagcagccagtatctggcactctccaatttaacaaaggaaaaagtgtcacggcttgaccgtattgtcgctgagcacaatcagtttagcttaggaataaaggaactacaggactggatgactgacgcgatccacatgctagactcctactgccacccaacatcagacaaatctgtgctggatagcaggacactgaaactggaggcgttattgagtgttaaacaggagaaagaaatccagatgaagatgatagtgacaagaggcgaatctgttctgcagaatacttcacccgaaggaattccgaccattcagcagcaactgcaatccgttaaggacatgtgggcttccctgctgagtgcaggcatcagatgtaaatctcaactggaaggggccctgagcaaatggacaagctaccaggatggtgttcgccaattttcggggtggatggactccatggaagcgaatctgaatgaatccgagcggcagcacgcagagttacgtgacaagacgactatgctagggaaagccaagcttcttaacgaggaagtcctaagttattcctctctgttagagaccattgaagttaagggggcagggatgacggaacactacgtaacgcaactcgaactgcaggatcttcaggagaggtatcgcgctatccaggaaagggccaaggaggcggttacgaaatcagaaaaacttgtgcgactccaccaggaatatcagagagatctgaaagctttcgaagtttggctgggccaggaacaggaaaagctggatcagtattctgtgctagaaggcgacgcccatacccacgagacgactctgcgggatttgcaagagctgcaggtccactgtgcagaaggccaagcccttctgaactctgtgctgcataccagggaagatgtgatcccctccggtatacctcaggccgaggacagggccctggagagccttcggcaagactggcaggcataccagcaccgcctgtcggaaacacgaactcaattcaataatgtcgttaacaaattacgtttgatggaacagaaattccagcaggtggacgaatggctcaaaacagctgaagaaaaaaagtggcacgaagaggtgactgcataccgggacgaagttgaggaggtgggggccagggctcaggaaatactcgatgagtcccacgttaacagtaggatgggatgtcaagctactcagctgacttcccgataccaggcactactactccaggtgttggaacagatcaagtttctggaggaggagattcaatcgctcgaggagagcgaaagcagtctgtcctcctactctgattggtatggcagcacacataaaaatttcaagaacgttgctactaagatcgataaggttgacacagttatgatgggtaagaagcttaagacattagaggtgctcctgaaagacatggagaagggccacagtctgctgaagagcgcccgcgagaagggggaacgagccgtcaagtatctcgaagaaggcgaagccgagcgactgaggaaggagatacatgatcacatggaacagttgaaggaactcacaagcacagtccggaaggagcacatgaccttggagaaaggtctgcacctggcaaaagagttttctgataagtgtaaggccctgacacagtggattgctgagtaccaggaaatcctgcacgtaccagaagaaccgaaaatggaactctacgaaaagaaagcacagctcagcaaatacaaaagtctccagcagacggtactcagtcatgaaccctctgtgaaaagcgtcagagagaagggtgaggcacttctggaattggtccaggatgtgactctgaaggacaaaatcgaccaattacagtctgattatcaagacctttgctctatcggaaaagctatgatggaggagatcgccgggttcgaagaccggcttaataaccttcagatgaagggagataccctcataggacagtgtgccgatcacttgcaggctaaactgaaacagaatgtgcacgctcatctccagggcacaaaagactcctactccgcaatctgctcaacagcccagcgcatgtaccagagccttgaacacgagctgcaaaaacacgtgagccgccaggatactttgcagcaatgccaagcctggctctcagccgtacagcccgacttggagccgtctccccaacctccgctgagccgcgccgaagcaatcaaacaggttaaacacttccgagctttgcaggagcaggcaagaacctacctggacctcctgtgctctatgtgcgatcttagtaacgccagtgtcaagactacggcaaaggatatccagcagaccgagcaaaccatcgaacagaagctggtccaggcacagaacttaacccagggctgggaagaaattaagcatctgaaatccgagctctggatatacctgcaggatgcagaccagcaactgcagaatatgaaacgaagacacagcgaactggagctgaatatcgctcaaaacatggtgagccaggtaaaagactttgtcaagaagttgcaatcaaagcaagccagcgtcaacactatcatcgaaaaagtgaacaaactgaccaaaaaagaggagtcacctgaacataaggagataaatcatctgaacgatcagtggcttgacctttgcagacagagcaacaacctgtgcctccaaagggaagaagatttacaacggacccgagattaccatgactgcatgaacgttgtggaagtattcctggagaagtttacaactgagtgggataacctcgcgaggtccgacgcggagagcacagcagtccacttagaagctctgaaaaaactcgccctcgccctccaggagcggaaatatgcaatcgaagatctcaaggatcagaagcagaagatgattgaacacctaaatctggatgataaagagctggtgaaggagcaaacttcccacctagagcagcggtggtttcaactggaggacctgatcaaaagaaaaattcaagtgagtgtgaccaacctggaagagctgaacgtggtgcagagccggttccaggaattaatggaatgggctgaagagcagcagcccaacatcgcagaggccctcaagcaatccccgcctcccgacatggcacagaacctactgatggatcacctggccatctgtagcgaactggaagctaaacagatgctactgaaatctctgataaaggatgcagacagagtcatggcagacttgggccttaacgaaaggcaggtgattcagaaggctctcagcgacgcccaaagccatgtgaattgtctgtccgaccttgtgggccagagacggaagtacttaaacaaagcactgagcgaaaagacccagttcttgatggcagtgttccaagccacgtcacaaatccagcaacacgaacgcaaaatcatgttcagagagcacatttgtctactcccagatgatgtttcaaagcaggtgaagacatgtaagtccgcacaggcaagcctcaagacctaccagaatgaggtcactggattgtgggcgcaggggcgcgaattgatgaaagaagttaccgaacaggagaaatctgaggttctcgggaagctgcaggaacttcaatctgtttatgactcagtgctgcagaaatgttcgcatagactgcaagagctcgagaaaaacttggtttccagaaaacattttaaagaagacttcgacaaggcttgccactggcttaaacaggcggacattgtgacttttcccgagattaacctgatgaacgagtcctccgaattacacacacagttggccaaataccagaacatcttagagcagtctcctgaatacgaaaatttactactaacactacagaggaccggacagaccatactgccatcactaaatgaggtggatcattcatacctgtctgagaaactgaacgctttgcctcggcagttcaacgtaattgtcgcactagctaaagacaagttctacaaggtccaggaggctatactggcacgtaaagagtacgcctctcttatcgaactgacaactcagagcctctctgagctggaggcgcaattccttaggatgagcaaagtgcccaccgatctagcagtggaggaggctttgagcctccaagatggatgcagagccatcctggacgaggtagcagggctgggcgaagctgtcgatgaattgaatcagaagaaagaggggttccgttcaaccggccagccctggcaacccgacaaaatgctgcacctcgtaaccctatatcaccgcctgaaaagacagacagagcagcgcgttagtctcttggaagatacgacaagcgcttatcaggagcatgaaaaaatgtgccagcagctggagagacaactgaaatccgtcaaagaggagcaaagcaaagtgaacgaggagacactgcccgctgaagagaaactcaaaatgtaccacagtttggctggaagtctgcaagatagtggtattgtgcttaaaagggtgaccatccatttggaagacctggccccgcatctggacccgctggcgtacgagaaggccagacatcagattcaaagttggcagggcgaactcaagctgctaactagtgctatcggtgagactgtcaccgagtgtgaatccagaatggtgcagagcatcgatttccaaacggagatgtcccggtctctggattggctccgaagggtgaaagccgaattgagcggacccgtctacttagacctgaacctccaagatatacaagaggagattcgtaaaatccagatccaccaagaggaagttcagagctccctgcgaataatgaacgccttgtcacacaaggaaaaggaaaaatttaccaaggccaaagaactaatatccgcggatctggaacactcgctggccgagttaagtgaactcgatggagatatacaggaggccctgcggaccaggcaggcaaccctgacagaaatatactctcaatgccagaggtactaccaggtgtttcaggccgccaacgattggctggaagatgctcaggaactcctgcaattagcgggaaacgggttagacgtcgagagcgccgaggagaacctcaagtctcatatggaattcttttcaaccgaagaccagttccacagcaacctggaagaactgcacagcttagtggccacattagatccactcatcaagcccactggaaaagaggacctggagcagaaggtggcatctctcgagctgagaagccagaggatgtccagggatagtggcgcccaggtggacctgcttcagcgctgcactgcccagtggcatgattatcagaaagcgcgcgaggaagtaattgagctcatgaatgatacagaaaagaaactgagcgagttttccctgctgaagacttcttctagccatgaggccgaggagaaactttcagaacacaaggccctggtaagcgtggtgaacagctttcatgagaaaatcgttgccctggaggaaaaagccagtcagttggaaaaaactggcaatgatgcatcaaaagccacactgtcacggagcatgacgaccgtctggcagcggtggacaaggctacgagctgtcgcacaggaccaggagaagatcctcgaggacgcagtggacgagtggactgggtttaacaataaggttaagaaagctaccgagatgattgaccagctgcaggataagctgcccgggagctccgccgaaaaggcttctaaggcggagttgctgacgctgcttgaatatcacgacacattcgtgctggaactagagcagcagcagtctgctctcggcatgttaagacagcagaccctctccatgctccaggacggcgccgcacccactccgggcgaagaaccgccattgatgcaagagatcacagccatgcaggataggtgtctaaatatgcaggaaaaagtaaaaactaacgggaaactcgtaaaacaggaactgaaggatcgtgagatggtagaaacccagattaactcagtgaagtgctgggtgcaagagacgaaagagtacctcgggaaccctacgatcgagattgacgcacagctggaggagctccagatactgctgaccgaagccaccaaccaccgacagaacattgagaaaatggctgaggagcagaaagaaaagtatctcgggctctataccatccttcccagtgagctgagcctgcagctggccgaggtggctctcgatcttaagattcgtgatcagatccaggacaaaattaaagaagtggaacagtccaaggctacctctcaagagttgtcccgccagatccagaagctagcaaaagacctgacgaccatcttgactaaactcaaagccaagaccgataacgtagtgcaagccaagaccgatcagaaagttctcggggaagaactggatggctgcaactccaagctgatggagctggatgccgcagtacagaagttcctggagcagaacggacagctgggaaaaccgcttgccaagaagatcgggaaattaaccgagctgcatcagcaaactattcggcaagcagagaaccggctgagtaaactgaaccaggccgcaagccacctcgaagagtacaacgagatgcttgagttaatcctgaagtggatcgagaaggccaaggtgctggcccatggaacaatcgcatggaacagcgccagtcagttaagggagcagtacatcctccaccagacactattagaggagtctaaggagatagactcagaattagaggccatgaccgaaaagctgcaatatcttacttccgtgtactgtaccgaaaaaatgtcacagcaggtagccgaactaggacgcgagaccgaagaattacgccaaatgatcaaaattcgacttcaaaatctgcaagacgcggctaaagacatgaaaaaatttgaggccgagctgaaaaagctgcaagccgcactggagcaagcccaggcgaccctgacatccccggaagtggggaggctgagcctaaaagagcagctgtcacacaggcaacacctgctgtccgagatggaatccctgaagccgaaggttcaggccgttcagctgtgccaatccgcgttgagaattcccgaggacgttgtggcttccctgccgctgtgtcacgctgcacttaggcttcaggaggaggcctctagactccagcacaccgctatacagcaatgcaacattatgcaggccgccgtggtgcagtatgaacagtatgaacaggagatgaaacacctgcagcagctcattgaaggtgcgcatcgggagattgaagacaaacctgtggcaacatctaatatacaggaactgcaggctcagatctctaggcatgaggagcttgctcaaaagataaagggctaccaggagcagatcgcaagcctcaacagcaagtgtaaaatgcttactatgaaagccaagcatgccacaatgcttcttaccgtgaccgaggtcgaggggctggctgagggcaccgaagacctagatggggaactgctgcccacaccttccgcgcacccttccgtggtgatgatgacagcagggcgctgccacactcttctgtctccagtgacagaagagagcggggaggaaggcaccaacagtgaaattagcagccctcccgcctgcagaagcccatccccagtggctaacacagatgctagcgtcaatcaggacattgcctattaccaggccttatctgcggagcgactccagaccgatgcggccaagatccatccaagtacctctgcctctcaagagttctatgaaccaggtttggagccgagtgcaactgcaaagctgggggacctccagcggtcttgggagacactgaaaaatgtgatatctgagaaacagcgcacgctttacgaagctctcgaacgacagcagaaataccaggactcgttacaatcaatttcgacaaaaatggaagcaatcgaattgaagctgagtgaatcccccgagcccggtaggtctcctgaaagccaaatggcagagcatcaggcccttatggacgagatcctcatgctccaggatgaaatcaacgagctgcaatcctctctggcggaagaattggtcagcgaaagctgcgaggccgatcccgctgagcagctggccttacaatcaaccctgacagttttggcagaaagaatgtccacaatccgtatgaaggcaagtgggaagaggcagctgctggaagaaaaactgaacgatcagcttgaggaacaaagacaggagcaggcactccaacgctaccggtgcgaagccgatgagctggacagctggctgttaagcaccaaggccactcttgacacagccctctcgccacccaaggagcccatggatatggaggcacaattgatggactgccagaacatgctggttgaaatcgaacagaaagtggtggctttatccgagctatcagtgcacaacgagaatctgctgttagagggcaaggcacacacaaaggatgaagctgagcaactagctgggaaattacgtcgcttgaaagggagcttgttggagctgcagagagccctccatgacaagcagctcaatatgcaggggactgcgcaggaaaaggaagagtctgacgtagacctgaccgcgacacagtctccaggcgttcaggagtggctggcccaagctcggacaacatggacgcaacagaggcagtcttcccttcagcagcaaaaagaactggagcaggaattggccgaacagaaaagtctcctcaggagcgtggcaagccgaggggaggaaatcctcatccagcactctgcagccgaaaccagtggagatgctggagagaaacctgatgtgctgagccaggaactgggtatggagggcgagaaatccagtgctgaggaccagatgagaatgaagtgggaaagcctacaccaggaattcagcactaagcagaagttactgcaaaacgtactggaacaggaacaggagcaggtgctgtacagcaggcctaaccggttgctgtctggcgtcccactgtacaagggagacgtccctactcaggataaaagcgccgttacttctctactcgacggcctgaaccaggcttttgaggaagtcagttcccagagtggtggtgccaaacgccagtccatacacttggaacaaaaattgtatgatggggtgtcagctacgtccacctggctggatgatgtggaagagcgcctcttcgtggccaccgctctgctccctgaggagactgagacatgtctcttcaatcaggagattctcgccaaggacattaaagagatgagtgaggagatggacaagaacaagaatctcttttcccaggccttccccgaaaatggcgataatcgcgacgtcatcgaggataccctgggatgtctgctgggacgcctgtctttgctggattcagtcgtcaatcaacgctgtcatcagatgaaggaaaggctgcagcagattctcaacttccagaacgacctgaaggttcttttcactagtctggcagataacaagtacatcatactgcaaaaactcgcgaacgtattcgagcaacccgtggctgagcagatcgaggcaattcagcaagcagaagatggtctgaaggagttcgacgccgggattatcgaattaaagcgtagaggagacaagttacaggtcgaacagccttcaatgcaggagctctcaaagctacaggatatgtacgatgagttaatgatgatcataggctcgagacgaagtggtctgaatcaaaatctgaccctcaagtcgcagtatgaaagggcgctgcaggacctcgctgacctgctggagaccggacaggaaaagatggcgggggatcaaaagatcatcgttagttctaaggaggagatacagcagttgctggataaacataaagaatattttcagggattggagtctcacatgatcctgactgagacgctgttcagaaagataataagctttgctgtccagaaggagacccagtttcacaccgaactcatggcccaggctagtgctgtgttaaaacgagcccacaaaaggggcgtcgaactcgaatatattttagagacatggagccacctcgacgaggatcagcaggagctttcccgtcagctagaggtggtggagagcagcattccctccgtcggactcgtggaggagaacgaggatcgcctgatcgatagaataacactctaccagcacctgaagtcgtccctcaatgaataccagccaaaactgtatcaggttctggacgacggtaagcgcttgcttatcagcatttcctgctcggaccttgagagccagctaaatcagcttggggaatgctggctctccaataccaataaaatgtccaaagaactgcaccgcctcgaaaccattctgaagcactggacacggtaccagtcagagtcagccgacctaatacactggcttcagtccgctaaggaccggctggagttctggacacagcaatcagtgaccgttccccaagaactcgaaatggtccgagaccatctgaacgcgtttcttgagttttcaaaagaggtggacgcccagtcgagtctaaagtcttccgtcctgtcgactggcaatcagctactaaggcttaagaaagtggataccgccaccctccggtctgaactctctcgtatcgactcccagtggactgacctcctgaccaacatccctgcagtccaggagaaactgcaccagctgcagatggataaactgccaagtaggcacgccatatccgaggtaatgtcctggatttcgttgatggaaaacgtaatacagaaagatgaagataatattaaaaactccatcgggtacaaggccatccatgagtatcttcagaaatacaaaggtttcaagatcgatataaactgcaagcagctcactgttgattttgttaaccagagtgttctacagatcagtagccaagatgtggagtctaagagatctgataaaaccgattttgcagagcaattaggcgcaatgaacaagtcgtggcagattctgcaggggctggtgactgaaaaaattcagctgctggaaggcctccttgaaagttggagtgagtacgagaacaacgtgcagtgcctcaagacctggtttgagacacaagagaagcgtctgaagcagcaacacagaatcggcgatcaggcctctgtgcagaacgccctcaaagactgtcaggaccttgaggacctgatcaaagctaaagaaaaagaagtggaaaaaattgaacaaaacgggctggcacttattcagaataagaaggaagatgtctcttccattgtcatgagcacactgagggagcttgggcagacctgggctaacctggaccacatggttgggcagctaaagattttattaaagtcagttttggaccagtggagcagccataaggtggcctttgacaaaataaattcttaccttatggaagcgagatattcactgtcacgctttcgcctactaactggttcccttgaagcagtgcaggtccaggtcgacaatcttcagaatttgcaggatgatctggagaagcaagagcgtagccttcaaaaatttggctccattaccaatcaactgctgaaagagtgccatccgcccgtcacggaaacacttaccaacacactgaaggaggtaaatatgagatggaataaccttctggaagagatagccgagcagctgcaatcatccaaggccctgctgcagctctggcagagatacaaggactatagtaagcagtgtgccagcacagtgcagcaacaggaggacagaactaacgaattattgaaggccgccactaataaagatatcgccgacgatgaggtcgctacatggatacaagactgcaacgatctgctcaagggacttggtacagtaaaggacagcctgtttttcctgcatgagctgggtgaacagcttaagcagcaggtcgacgcatctgctgcttccgcgatccagagcgatcaactctctttgtctcagcacctctgcgcacttgagcaggcgctgtgtaaacagcagacgtccctgcaagcgggagtgttggactatgaaacattcgctaagtctctggaagctctggaggcatggatagtggaggccgaagagattctgcagggccaggatcccagtcattcgagtgatctatcaactattcaggagcggatggaggagctgaaaggtcagatgcttaagttcagttcgatggcacctgatctcgatcggctgaacgaattaggctaccggctgccccttaatgataaagaaattaagaggatgcagaacctgaaccgccattggtccctgatttcaagccagaccacagaaagattttctaaactgcagtccttcttgctgcaacaccagaccttcctggaaaaatgtgagacatggatggaatttctggtacagactgagcagaagctggcagttgagatctctgggaactaccagcacttacttgagcagcagcgggctcatgaactgttccaagccgagatgtttagccgacagcagatactgcattccattattatcgatgggcagaggctcctggaacaaggacaggtggacgatagagatgagttcaacctgaagctgacattactcagcaaccagtggcagggagtgattcgccgcgcccaacagagaagggggatcattgattctcagatacgccagtggcaacgctaccgtgaaatggcggagaagctgagaaagtggctggtagaagtttcttacctacccatgagcggcctgggtagtgttcctatccctttgcagcaggctaggaccctctttgatgaagtgcagttcaaggaaaaggtgtttctgcgacagcagggaagctacatcctgaccgtcgaagctggcaaacagctccttctatcggcagacagcggagccgaggcagccctgcaggccgaactggcggaaattcaagaaaagtggaagtcagcctcgatgagactggaagaacaaaagaaaaaactcgccttcctgctgaaggattgggagaagtgtgaaaaaggcatcgccgacagcttagaaaagctaagaacatttaagaagaagttatcccagagtttaccagatcaccacgaagaattgcacgctgagcagatgcgctgcaaagaactggaaaatgctgtggggtcctggactgacgatctgacccagctgagcctcctcaaggatacactgtccgcgtacatttctgccgacgacattagcatcctgaatgagcgggtggagcttctgcagcgccaatgggaagaactctgccaccagctttcactgcgaaggcagcagataggggaaaggctgaatgagtgggccgtttttagtgagaaaaataaagagctttgtgagtggctcacacaaatggaatcgaaggtctctcaaaatggggacattctcatcgaagaaatgattgagaagctcaagaaagactaccaggaggaaatcgctatcgcgcaggagaataagatccaactgcagcagatgggggaacggctcgctaaagccagtcatgaaagcaaggcgtccgaaatcgagtacaagctcggcaaggtcaacgatcggtggcagcacctgctagaccttattgctgcgcgagtgaagaagctaaaggagactttggtggctgtccagcagttagacaaaaatatgtcgtctctgcggacttggctggcccacatcgaaagcgagctggccaaaccgatcgtctatgacagctgtaactcagaggaaattcagcggaagctgaacgaacagcaggaactgcagcgggacattgaaaagcattcgacaggggtggcatctgtcctgaacctatgcgaggtgctgctgcatgactgcgacgcctgcgcaactgacgctgagtgtgactccattcagcaggcaactcgaaatctggataggcgctggagaaacatctgcgcaatgtccatggaacgcaggctgaaaatagaggagacttggcggctttggcagaaatttctggacgactatagccggttcgaggactggcttaagtcatcggagcggactgctgcatttccaagtagcagcggagtgatctataccgtggcaaaggaggagctcaaaaagttcgaggccttccaacgccaagtgcatgagtgcttgacacagctggaactgatcaacaaacagtaccgcagactggctagagagaatcgcacggactcagcgtgttctctgaaacaaatggttcacgaaggcaatcaacgctgggacaatcttcaaaagagagtgaccagcattctgaggaggctgaagcactttattggccagcgggaagagttcgagacagccagggattcaatcttagtgtggcttactgaaatggaccttcaactgaccaacatcgagcacttctcagagtgcgatgtgcaggcaaagataaagcagttgaaagccttccagcaggagattagcctcaatcacaacaagatcgagcagatcatcgctcaaggggaacaactgatcgaaaaatcagaacccttggacgctgccatcatcgaagaggaattggacgaacttcgcaggtactgccaggaagtgttcggacgagtggagaggtatcataaaaaattaataaggctcccactgccagatgatgaacacgatttaagtgacagagagctcgaactggaagatagtgccgcactgtcagatctccactggcatgaccggtctgccgattccctgctctctccccaaccgtccagcaacctgagtttatcgttggctcagccacttcgttccgagcggagcggacgcgatactccagctagcgtcgattccatccccttagagtgggatcatgactacgatctttccagagatctggagtctgcaatgagccgtgctcttccctccgaagacgaagaaggccaggacgacaaggatttctatcttaggggagccgtgggtctctctgacgtgatgatccctgaaagcccggaagcatacgtgaagctgacggagaatgccattaaaaacacatcgggagatcacagcgccctggagagtcagatcaggcagctggggaaagcactggacgatagtcgctttcaaatccagcagacagagaacatcatcaggtctaagacacctacaggccctgagcttgacacctcttacaagggctatatgaagctgttgggcgagtgcagcagcagcattgacagcgtgaagcgcctggaacacaagttaaaggaagaagaagagtccttgccaggcttcgttaacctccactcgaccgaaacacagaccgccggggttatcgacagatgggagctcctccaggcccaagcccttagtaaagaactgagaatgaagcagaaccttcagaaatggcagcaatttaatagcgatcttaattctatttgggcgtggctgggcgataccgaggaggaactggagcagctccagcggctcgaacttagtacagatatacagacgatcgaattacagattaaaaaactgaaggaattgcagaaagccgtggaccaccgaaaagccataatcctttctataaacctctgctctcctgaatttacgcaggccgactcaaaggaaagtcgggatcttcaggacagattgagccagatgaatggaaggtgggatagagtatgttcactgctggaagaatggaggggccttctgcaagatgccctaatgcagtgccagggatttcacgaaatgtcacacggcttgctgctgatgcttgaaaacattgaccgccgaaagaacgagatcgtaccgattgacagtaacctggatgcggaaatattgcaggaccaccataagcagttgatgcagatcaaacacgagttgctcgagagtcagttgcgggttgcatctctgcaggacatgtcttgtcagctccttgttaatgctgaaggcaccgactgtctggaggcaaaggaaaaggttcacgtgattggcaacagattgaagctcctgcttaaggaagtgtctagacatatcaaggaacttgagaagctgctggatgtctcatcatcgcagcaagacctgtcttcctggagctcagccgatgagctggacacttctggcagcgtaagccccacaagcggtcggagcaccccaaatcgccagaagacgccaaggggtaagtgctccttgtctcagcccgggccatcagtaagcagcccacactccaggagtaccaagggcgggagcgatagttccctgagtgagccaggcccgggccggagcgggaggggctttctgtttcgagttctgcgggcggcactgccactgcagttgctactccttttgttgatcggcctggcatgtctggtgccaatgtccgaggaagactattcttgtgctctgagcaataatttcgcccggagttttcatcccatgctcagatacacaaacgggccgccaccactgtag

SEQ ID NO: 226979 - DNA, 26250 bp, Artificial Sequence
  derived and/or modified sequence
atggcaacaagtagaggagcatcgcggtgccctcgggatattgccaacgttatgcagcgcctccaagacgagcaagaaattgtgcagaaaagaacattcacgaaatggataaatagtcatctcgccaagcggaagccacccatggtggtggatgatcttttcgaggatatgaaagacggcgtgaagctgttagctttactggaagtccttagtggacagaagctaccatgcgagcagggccgtaggatgaaaaggatccacgctgttgcgaatatcgggacagcactgaagttcttagagggcagaaaatctatgcatcggggtagccccatcaagctcgtgaacattaatagtacagacatcgccgacgggaggccctccatagttctcggtcttatgtggactataattttgtattttcagattgaagagttaacgtctaaccttcctcagctgcagtccctgtctagctccgccagttccgttgattctatcgtgtccagcgaaacaccatcgcctccaagtaaacgtaaggtgactacaaaaatacaaggaaatgcaaaaaaagctctgcttaaatgggtccagtataccgccggaaaacaaaccggcatagaagtaaaagacttcggtaagtcctggaggtccggcgtagcttttcactccgtaattcatgctatccgtcccgagctcgtagacctcgaaaccgtcaaaggcagatctaatagggaaaacttggaggacgcttttaccattgcagaaactgagctgggtattccacggctgctggatcccgaggacgtggatgtggacaagcccgatgagaagtccatcatgacctacgtggctcagttcctcaagcattatcccgatattcacaatgcctccacagacggccaagaggacgacgagatccttcccggatttccgagctttgcaaactcggtgcagaatttcaagcgcgaggatcgcgtgatatttaaagagatgaaagtctggatcgagcaattcgagcgtgatttgacacgcgcacaaatggttgagagtaacctccaagacaagtaccagagctttaagcacttcagggtacagtacgagatgaaacggaagcagatcgagcacctgattcagcctctccacagggatggcaagctgtctctcgatcaggcactggttaaacagtcatgggaccgcgtgacttctagattgttcgactggcacattcagctcgacaagtccctgcctgcacccctgggcacaattggcgcatggctctaccgggcagaggttgccctgcgcgaggaaattactgtccagcaggtgcacgaggagaccgctaacaccatacaacggaagctcgaacagcataaggacctcctgcaaaatacggatgcccacaagagggcgtttcacgagatttatcgaactagaagcgtcaacgggatcccagttcctcctgaccagctggaagatatggccgagagatttcatttcgttagtagtacctccgagctgcaccttatgaagatggaatttttagaactgaaataccgtctccttagcctgttagtgttagccgagtctaagctcaaaagctggatcatcaagtatggccgtagagagtccgttgaacagttgcttcaaaactacgtatcattcatagaaaactcaaaattcttcgagcagtacgaggtgacttaccagattctcaaacagactgcagagatgtatgttaaggctgatggatctgtagaggaggcagagaacgtaatgaagtttatgaacgaaaccacagctcagtggagaaatctgtcagtggaagtgcgtagtgtccggtctatgctggaggaggtgataagcaactgggacaggtatggcaatactgtggcaagtctccaggcatggctggaggatgccgagaaaatgctgaaccagagtgaaaatgccaagaaggatttcttccgcaacctcccacattggatccagcagcataccgcaatgaatgatgctggtaactttctgattgagacgtgtgatgaaatggtgagccgcgacctgaagcagcaactgctgcttcttaatgggcgttggcgcgagctgtttatggaggtgaaacagtatgcgcaggccgatgaaatggacagaatgaaaaaagaatacactgactgtgtcgtaacacttagcgcttttgctactgaagcccacaaaaaattgagcgaacccctcgaagtatctttcatgaacgtcaagttgctcatccaggatctggaagacattgagcagcgtgttccagttatggatgcacaatacaaaatcataacgaagaccgctcacctgattaccaaagaatcaccacaggaggaaggcaaagagatgtttgcaacaatgtccaagctgaaagagcagctcaccaaagttaaggagtgttactccccgctgctatatgaatcacaacaactgttgatcccgctcgaagagttagagaagcagatgacctccttctatgacagcctgggcaagatcaacgagatcattactgtactcgagcgggaggcccaaagcagcgcccttttcaagcagaaacatcaggagctcctggcctgtcaggaaaattgtaaaaaaaccctgacactgattgagaagggtagccagtcagtgcagaagtttgttactttgtccaatgtgttgaagcattttgatcagaccaggctgcagaggcagattgccgatatccatgtggccttccagtccatggtgaagaagacaggggactggaaaaaacacgtggagacaaattctcgactgatgaaaaaatttgaggaaagccgcgctgaattagagaaggtattaaggatcgcgcaagagggcctggaggagaagggagacccggaggaactgttaaggaggcataccgaatttttcagccagctcgatcagagggtccttaatgcatttctcaaggcttgtgacgaactcacagacattctccccgagcaagaacagcagggactccaggaggcggtgagaaagctgcacaagcagtggaaggatctccagggcgaggccccttaccacctgctgcaccttaaaatcgatgtggagaaaaatcggtttctggcttccgtggaagagtgcaggaccgaactcgatcgagagactaaacttatgcctcaagagggatccgaaaaaataattaaggagcaccgggtctttttttcggacaagggtcctcaccacttgtgtgagaagcgtctacagctcattgaggaactgtgtgtgaagttgccagtgcgggatcctgttagggacacacctggcacttgtcatgtcacccttaaagaactccgggcagctattgacagcacatatcggaagctgatggaagatccagataagtggaaagactatacttcgaggtttagcgagtttagcagctggatcagcactaatgagacccagctgaaggggattaaaggcgaagcaatagatacagctaatcacggggaggtcaaacgagccgtcgaagaaataaggaatggcgttacaaagagaggggagactctgtcctggcttaaatcaaggcttaaggtgctgacggaagtgagtagcgagaacgaggctcagaagcagggcgacgagctggccaaattatcctcctcctttaaagccctggtcacacttctatctgaggtcgaaaagatgctgtctaattttggagactgcgttcagtacaaggaaattgttaagaattccctggaggagctgatatccggcagcaaagaggttcaggagcaggctgaaaagattctggacaccgaaaatctcttcgaggctcagcagctcctcctccatcatcaacaaaagactaagaggatttcagcgaaaaaaagagacgttcaacagcagattgctcaggcacagcaaggtgaaggtgggctcccagatcgaggccatgaagagctaagaaaactcgaaagtaccctggacggcctggaaagatcacgcgagagacaggagaggaggattcaggtcacactcagaaagtgggagcggtttgagacgaacaaggaaacagtggtacgatacctttttcagacaggctcttcccacgagagatttttatcttttagttccttggagtcactgtcatccgagcttgaacaaacaaaggaattctcgaaacggactgagtcaatcgctgtgcaggctgagaacctggtgaaagaagccagtgaaatcccgctggggcctcagaacaagcagctcctgcaacagcaagcgaaatcaatcaaggaacaggtgaagaagttagaagacacccttgaggaagacattaaaactatggagatggtgaaaaccaaatgggaccattttggctctaacttcgagaccctgtcagtgtggattacagagaaagagaaggagctaaacgcattagaaacctcctctagcgccatggatatgcagatctctcagattaaagtgaccattcaggagatcgaatccaaactttctagcatcgtggggctagaggaagaggctcagagctttgcgcaattcgtgacaacaggtgaatccgcaaggatcaaggccaaattgacgcagattcgtcgctacggcgaggagcttcgagaacacgcacagtgtctggagggaacaatcctggggcaccttagccagcagcagaaatttgaagagaatctcaggaagatccagcagtccgttagtgaattcgaagataaacttgcagtacctattaagatatgctcatctgccactgagacatataaagtacttcaggaacacatggatctatgccaggctctggagtctctgagcagcgcaattactgccttttccgcctctgcgaggaaggtggtaaaccgtgatagctgcgtccaagaggccgctgccctccagcagcagtatgaggacatcctgcgccgtgcgaaggagaggcagactgctctcgaaaaccttctggcccactggcagcgcctcgaaaaagagctctcctctttcctgacctggctggagcggggagaggctaaggcaagttcccccgaaatggacattagcgcggacagagtaaaagtggagggagaactgcagttgatccaggccttgcagaacgaagtggtgtcccaggcctctttttactcaaaactgttgcagctcaaggagagtctgttttctgtagcttcaaaagacgacgttaaaatgatgaaacttcatctcgagcagctggacgagagatggcgggacctgccccaaatcatcaacaagagaatcaatttcctacaatccgttgtcgcagagcaccagcagttcgatgaactccttttatcattctcagtctggataaagcttttcctctctgagctccagacaacaagcgagatctctatcatggatcatcaggttgcactcacacgtcacaaagaccacgctgctgaagtggaatctaagaaaggcgagctgcaatctctgcagggccatctggccaaattgggctctttaggacgagcagaagacttacacctgctccaggggaaagccgaagactgtttccagttatttgaagaggcgagccaagtcgtggagcggcgtcagctggctctgtctcacttagccgagtttttgcagtcgcacgccagtctttccggtattctgagacagttaagacaaacagtggaggcaaccaattcaatgaataaaaacgagtcagatctgatcgagaaagacttaaacgacgccctccaaaatgctaaggccctggaatcagccgcagtgtccctggacggcatcctttccaaggcccagtaccacttgaaaatcggctcatcagaacagcgaacctcttgcagagccaccgccgatcagctttgcggggaggtcgagcgcattcaaaacctgttggggacaaagcagagcgaggctgatgccttagctgtacttaaaaaagccttccaggatcagaaggaggagctgttgaagagtattgaggacatcgaagagcgcacagacaaagaacgcctaaaggagccaaccagacaggcccttcagcagcgcctgcgcgtgtttaatcagctggaagatgaactcaacagccacgaacacgaactgtgttggctcaaggacaaggccaagcagattgcccagaaggatgtagcttttgctcctgaggtcgacagagaaatcaaccgacttgaggtgacctgggatgatacaaaacgtctaattcatgagaaccagggacaatgttgcgggctcatcgatttgatgcgggaataccagaatctgaagtctgctgtgtccaaagtcctagagaatgccagctccgtgattgtgacccggactacgattaaagatcaggaggatcttaagtgggcgttcagtaaacacgagacagccaaaaacaaaatgaattacaaacagaaggacctggataactttacaagcaaggggaagcatctcctctcagagctgaagaagatccatagttctgattttagcctggtcaaaacagatatggagagcacagttgataagtggcttgatgtgtccgagaagcttgaggagaatatggaccgattgagagtgtccctgtcaatttgggatgacgtcctgagtacgcgcgacgaaatcgaaggctggtcaaacaattgtgtgccacagatggctgaaaacatttctaacctggataatcacctccgcgcagaggagcttttgaaagaattcgaatccgaagtcaaaaataaagcactgcgactcgaggaactccacagcaaggtcaacgacctcaaggaactcaccaagaatttagaaacacctcctgacttacagttcatcgaagcggatctcatgcaaaagctggagcatgccaaggaaatcacagaagtggcaaaggggaccctcaaagacttcaccgcccagtccacccaagtcgaaaagtttattaacgacatcacgacgtggttcacgaaggttgaggaatctttaatgaattgcgcccagaatgagacttgcgaagccctgaagaaggtgaaggacatccaaaaagaactgcagagccaacaatccaatataagctccactcaggaaaacttgaactccctctgtcgtaagtatcacagcgctgagttagagagcctgggaagagcaatgactggcctgatcaagaagcacgaggcggtgtctcagctgtgctccaagactcaagcatccctgcaggagagcctcgagaaacacttcagcgaatcgatgcaggagtttcaggaatggttcctgggtgccaaggccgctgccaaggagagcagcgaccgtactggggactctaaggtgctcgaagccaagctgcacgatctacaaaatattctggacagcgtgtctgatggccagtctaagctggacgcggttacacaagagggtcaaacgctgtacgcccacctctcaaagcagattgtgtcatccattcaggaacagattacaaaggctaacgaagagtttcaggccttcctgaagcagtgcctgaaggacaaacaggccctgcaggactgtgcctctgaactgggtagttttgaggaccagcaccgcaaacttaacctttggattcacgaaatggaagaacgatttaacaccgaaaacctgggcgagtccaagcagcatattcctgagaagaagaacgaagtgcacaaggtggagatgttcctgggcgagcttttagctgcaagagaaagtcttgataagctgtcacaaaggggtcagcttctgagtgaggagggtcacggggctggccaagaagggcgactctgctctcagctgcttacctcccaccaaaacttattacgaatgaccaaagaaaagctgcggagctgtcaggtcgctcttcaggaacatgaggccctggaggaggcgctgcaatcaatgtggttttgggtgaaggctattcaggatcggctggcctgcgctgagtcaacactaggcagcaaggataccctggagaaacgcctcagtcagatccaggatattctattgatgaaaggtgaaggtgaagtgaaactaaacatggcgatcgggaagggggagcaagccctgaggtcctccaacaaagaaggtcaaagagttattcaaacgcagctggagactctcaaggaagtctgggccgacatcatgagctcttccgtgcatgctcagtccactctggaaagcgtcatcagccaatggaatgactacgtcgagagaaaaaatcaactcgagcagtggatggaatccgtggaccagaagatcgagcaccctctccagcctcaacccggactaaaagagaagtttgtccttctggaccatttgcagtccatcttgtcggaggctgaagatcacactagagccctgcatcgactgatcgcaaaatcacgggaactttacgagaaaaccgaagatgagtccttcaaggataccgcgcaggaggaactaaagacccagtttaacgacatcatgactgttgcaaaggagaaaatgcgcaaggttgaggagatcgtaaaagaccacctgatgtatctcgatgcagtgcatgagtttaccgattggctgcacagcgccaaggaagaactgcacagatggtccgacatgtcaggcgactcctcggccacacagaaaaaactgtcgaaaatcaaagagctgattgattccagagagatcggggcaagcaggttgagcagagtggaatccctggcccctgaggtcaaacagaatacaactgcctccggatgtgaactcatgcataccgaaatgcaggcactccgggcagactggaaacaatgggaagacagtgtttttcagactcaaagctgcctggagaatctcgtctctcaaatggctcttagcgagcaggagttttctggccaggttgctcagctagaacaggctctggaacaattctctgccctcctgaagacatgggcacagcagctgaccctcctggaagggaagaacacggatgaggagatcgtggagtgttggcataaaggacaagaaattctagatgctctacaaaaggctgagccccgtacagaggacctcaaaagccagctcaatgaattgtgcagattttcaagagatctgtccacttatagtggtaaggtatccggtctcatcaaggaatataactgcctgtgtttacaggcctcgaaggggtgccagaataaagagcagattctgcaacagcggttccgaaaggcctttcgggacttccagcagtggcttgtgaatgcaaaaattaccaccgcaaaatgttttgatatccctcaaaacatcagcgaagtttcgacgtcattgcagaagatccaggagtttctcagtgagtccgaaaatggacagcataaactgaacatgatgttgtcaaagggggagctgctctcaacgcttttaactaaggagaaggccaaagggatccaagctaaggtaactgccgcaaaagaggattggaaaaacttccacagcaatttacaccagaaggagtctgcactcgaaaatctgaagattcagatgaaggactttgaagtttccgctgagccaatccaggactggctcagcaaaaccgaaaaaatggttcacgagagcagcaatagactctacgacctgcccgcaaagagacgagagcagcagaagctgcaatctgtgctggaggagattcattgctatgaaccccagctcaacaggctgaaggagaaggcccagcagctctgggaaggccaagccgcttctaagtcatttagacatcgggtcagtcaattgtcgtctcagtatctcgcactgagcaacctgacgaaggagaaggtcagcagactggatcgaatcgtggctgagcataaccagttctcattaggcataaaagaactgcaggactggatgacggatgcaattcatatgttagactcttattgtcatcctactagcgacaagtcagtgctggacagcaggactctgaagctggaagcccttctctcggtcaaacaggaaaaagaaattcagatgaagatgattgtgacgcgtggcgagagcgttctccagaacaccagtcccgagggcatcccaacaattcagcagcagctgcaaagcgtaaaagacatgtgggccagcctgctcagcgcaggaattagatgcaaaagccagctggagggcgctctgagcaaatggacgagttaccaggatggcgttcggcaattcagcgggtggatggattctatggaagccaacctgaacgaaagcgaaagacaacacgccgagctcagggacaagacaacaatgcttggtaaagccaaacttctgaatgaagaggttcttagttatagctccctacttgaaacaattgaggtgaagggggctgggatgaccgaacactacgtgacccagttggaattgcaggacctgcaggaacggtacagagctattcaggagcgagctaaagaagcagtcactaagagcgaaaaactggtcaggcttcatcaagagtaccagagggacttgaaagcatttgaagtctggctgggccaggagcaggaaaagctcgaccagtactctgtgctggaaggcgatgcgcacacacacgagacaacccttcgggaccttcaggagctgcaagtacattgcgccgagggccaggccctgctgaacagtgtgcttcataccagagaggacgtcatcccgtcaggaatccctcaggctgaggaccgcgcattggagtccctccggcaggactggcaggcctaccaacaccgtctctccgaaactcgaactcagttcaacaatgtagtgaataaactaagactgatggagcagaagtttcagcaagtggatgaatggcttaaaacagcagaggagaaaaaatggcacgaggaagtcaccgcgtatcgcgatgaggtggaggaagtgggtgccagagctcaggaaatattggacgaatcccacgtgaattcgcgcatggggtgccaggccacgcagctcacaagtcgatatcaagccctgctgctgcaggtgctagaacaaattaagttcctggaggaggaaattcagtccctggaagagtctgaaagctccttgtcttcctattctgactggtacggtagcacacacaaaaactttaagaatgttgccaccaagatagataaagttgacaccgtcatgatgggaaaaaaactgaaaacccttgaggtcctcctgaaggatatggagaaggggcatagcctgctcaagtccgcaagagaaaaaggcgagcgggcagttaaataccttgaggaaggcgaggcggagcggctgcgcaaagaaatccatgaccacatggaacagctgaaggagttgactagcaccgttagaaaagaacacatgacgctggagaagggcctccatttagccaaggagttcagcgataagtgcaaagccctgacccagtggatcgcagagtatcaagagattttgcacgtgcccgaggaacctaagatggagctgtacgaaaagaaagcgcagctctctaaatataaaagtctccagcagacagttctttcgcacgagcctagcgtgaaaagtgttcgcgagaagggagaggctttactagaactcgttcaggacgttactctcaaggacaagattgaccagctacagtccgattatcaggatctctgtagtatcggcaaagccatgatggaagagatcgctgggttcgaggaccgtttgaataatcttcagatgaagggcgacactctgatcggccagtgcgctgaccacctgcaggctaagctgaagcagaacgtgcacgcgcatctgcaggggactaaggatagttatagtgcgatctgtagcaccgcacagaggatgtatcagagtctggaacacgagctgcagaagcacgtatccaggcaggacacgctgcaacagtgtcaagcatggctttcagccgtgcaacctgatttggagcctagcccccagccaccgttgagccgggcagaagctattaaacaagtgaagcactttagagcgctgcaggagcaggccagaacttatcttgacttactctgctccatgtgcgatctgagtaatgcctctgtgaagaccaccgccaaggatatccaacagacagagcagactattgaacaaaagctcgtgcaggcgcagaacttaacacaaggttgggaggagataaagcatttaaagagcgaactgtggatttacttacaggacgctgatcagcaactgcagaacatgaaacgacggcattctgaactcgaacttaacatagcgcagaatatggtttcgcaggttaaagacttcgtgaagaagcttcagtccaaacaagccagtgtgaataccattattgagaaagtgaataagctgactaagaaggaagaaagcccagagcataaggaaatcaatcacctgaacgatcagtggttggatctgtgccgccagagcaacaacctgtgtcttcagagagaggaggatttgcaaaggacgagagattatcatgattgtatgaacgtggttgaggtcttccttgagaagttcacaactgagtgggataacctcgcccgatcggatgccgaaagtactgccgtacacctggaagccttgaaaaagctggcactcgccttacaagagcgcaagtacgcaattgaagatcttaaggaccaaaaacaaaagatgattgagcacctgaacctggacgataaagagctcgtgaaggagcaaacgtctcatttggagcaacgctggttccagctcgaagacctcatcaagcgcaaaatacaggtttctgtgactaacctagaggagcttaatgtcgtccagtcgaggttccaggagctgatggagtgggcagaggaacaacaacccaacatagccgaagcattgaagcaatcaccaccaccagatatggcacaaaatctgcttatggaccaccttgccatctgttccgagttggaggcaaaacagatgctgcttaagagtctcatcaaggacgcggaccgagtcatggcagacttgggacttaatgaacggcaagtgatccagaaggctctgagcgatgcccagtctcacgtgaattgcctgagtgatctggtcggacagcgcagaaagtatcttaataaggccctcagcgaaaagacccagttcctcatggccgtgtttcaggctacgagccaaatccagcagcacgaaagaaagatcatgttccgagagcatatatgtctgttgcccgatgacgtgtccaaacaggttaagacctgtaaaagcgcccaggccagtctgaagacatatcagaatgaagtgaccggactttgggctcaaggcagagaactgatgaaggaagtcactgaacaggaaaagtctgaagtgctgggcaagttgcaggagctccagtccgtgtatgactccgtgctccagaagtgtagccatcgcctgcaggagctggaaaaaaatttggtttcaaggaaacatttcaaagaagattttgataaagcgtgccattggctcaaacaggctgatattgtgacctttcccgagattaatcttatgaacgagagctcagaattgcatacccagctggcgaaatatcaaaatattttggagcagagcccagaatacgagaacttgctcttgacactgcagcgaaccggccagaccatcctgcctagcttgaacgaagtagaccattcctacctgtcagagaagctgaacgcactgcctcggcaatttaacgtgattgtggcactcgccaaagacaagttctataaggtgcaagaagctatcctggcccgtaaggagtacgcatctcttatagagcttaccactcagtctcttagtgaattggaagctcagttcctcaggatgagcaaagtgcccaccgatctcgctgtcgaggaagctctgagtcttcaggatggctgtcgggcaatattagacgaagtggcgggactgggagaggccgtcgatgagttgaatcagaaaaaggaaggattccgctccacgggacaaccatggcagcccgacaaaatgttgcatctggtcaccctataccaccgactgaaacgtcagactgagcaacgggtttcactcctggaggacactacatcggcttatcaggaacacgagaaaatgtgccagcaacttgagagacagctcaagagtgttaaagaggagcagagcaaagtgaacgaggaaaccctgcccgctgaggaaaagctcaaaatgtatcacagtttggccggtagtttgcaagatagcggtatcgtcttgaagcgggtgactatccatttggaggacttggcccctcacctggatcctctggcctacgaaaaggctcgtcatcagatacaaagttggcaaggagaactgaagctgctgaccagtgccataggtgagacagtgactgaatgtgagagccggatggtgcagagcatcgatttccagaccgagatgtccagatcacttgattggctacgtcgcgtgaaagccgagttgtccggccctgtgtatctggacttgaatttgcaggatattcaggaagaaattcggaagatacagatccatcaggaagaagtccagagtagtctgcggatcatgaatgcactgtctcacaaggagaaggaaaagtttacaaaagccaaagaattgattagtgcggacttggaacactcactggcggagctcagcgaactagatggcgacattcaggaggcactgaggaccagacaagccaccctgacagaaatttactcccaatgtcagaggtattaccaggtattccaggcagcaaatgattggctggaagacgcacaggaattactgcaactcgctggaaacggcctggacgtggaaagcgccgaagagaacttgaagagccacatggaattcttttcgaccgaggaccagttccactcgaatctggaggaactccactccctggttgcaacactcgatcccctgatcaaaccaaccggaaaggaggaccttgagcagaaagtggcatcgttggagctgcgttcccaaagaatgtcccgagatagtggggcacaagtggacctacttcagcgttgtactgcacagtggcacgactaccaaaaagccagggaggaagtcatcgagctgatgaacgacaccgaaaagaagttgtcagaattcagtcttcttaaaacctcttcttctcatgaggcagaagagaagctctcagagcacaaagccctagtatcagtcgttaactccttccatgagaagatcgtggccctggaggagaaggcatcacagcttgagaagaccggcaacgatgcctctaaagcaacactcagccgctcaatgaccacggtttggcagcgttggacccgactaagggctgtggcccaggatcaagagaagatcttggaggatgctgtggatgagtggaccggcttcaacaacaaggtcaaaaaggccacagagatgatagatcagctgcaggacaagctgcccggttcttccgctgagaaggcttctaaagccgagctgctcaccctccttgaatatcatgatacattcgtactcgagctcgagcagcagcaatccgccctgggcatgttaagacagcaaactttgtctatgctgcaggatggcgctgctcccactcccggagaggagcctccgctgatgcaggagataacagccatgcaggacaggtgcttgaacatgcaggaaaaagtcaaaacgaatggaaaactggtgaagcaggagctcaaggatcgggagatggtggagactcaaataaatagcgtcaagtgttgggttcaggagaccaaagaatacctgggtaatcccactatagagatcgatgctcaactggaggaactccagatcctgttaaccgaggccacaaatcacagacagaatattgaaaaaatggcggaagagcagaaagagaagtacctgggactctacacaatcctcccttcagagttgtctctgcagctggccgaagtggctctcgatctgaaaattcgcgatcaaattcaggacaaaatcaaggaggtggaacagtccaaggccacatctcaggaactgtccaggcagatccagaaactggccaaggacctcaccacaatacttactaagcttaaagccaagactgacaacgtggtgcaggctaagaccgaccagaaggtgttgggtgaagagctggacgggtgcaactccaagctgatggaattggatgccgctgtgcagaagtttctcgaacagaacggacagctgggaaaacccctggcgaagaagattggaaaactcacagaactgcatcagcagacaattcgccaggcggaaaaccgactgtcaaaacttaaccaggcggcttcccatcttgaagaatacaacgagatgctagaactgatcctgaagtggatagagaaggccaaagtgttggctcatgggaccatcgcctggaatagcgcaagtcaacttcgagagcagtatattctgcaccagactctactagaagaatctaaagagatcgacagcgagctcgaagccatgactgagaagctgcagtatctgacctcagtgtactgcacagaaaagatgagccagcaggtcgctgaactgggcagggaaactgaggagctgaggcagatgattaaaatcagattgcagaacctgcaggatgctgctaaagatatgaagaagttcgaagccgagctaaagaaactgcaggcagcactggaacaggcacaggcgaccctgacatctcccgaagtgggcaggctctctctcaaggaacagctcagccaccgccagcatctactgagcgagatggagtccctgaagccgaaggtgcaggccgtccagctgtgccaatctgctctccggatcccagaagatgtagtggcttcactgcctctatgtcatgcagcgctccgcctgcaggaggaggccagcagactgcagcataccgcgattcaacaatgtaatatcatgcaggcagctgtggtccaatatgagcagtacgaacaggagatgaaacatctgcagcaactgatcgaaggcgctcaccgggaaatcgaggataagcccgtggcaacgtcgaatatccaggagctgcaggcgcagatatcgaggcacgaagaactggcgcagaaaatcaagggctaccaagaacaaatcgcaagcctcaacagcaaatgtaagatgctcaccatgaaggccaaacacgccaccatgctccttactgtcacagaggtggaaggtttagccgaaggcacggaggacctggatggtgagctgctccccacccccagtgcacacccttcagtggtgatgatgacggccggacgatgccacacgctgctgagccctgtgactgaggaatcaggagaagaagggacaaactccgaaatttccagcccacctgcctgccgttccccctcacccgtggccaacaccgatgcaagcgtcaatcaagacatcgcctactaccaggctctcagtgcagagcgcttgcagaccgatgctgccaagatccacccatctacaagcgcgtctcaggagttctacgagcctggcctggagccttccgccactgccaagttaggggacctgcagcggtcttgggaaactctgaaaaacgtgatttctgaaaaacagcgcactctctacgaagccttggaacgccagcaaaaatatcaagacagtcttcagtctatctctaccaagatggaagccatcgaactaaaactttccgaatcccctgaaccgggacgatctcctgagtcccaaatggctgaacaccaagctttgatggatgagatacttatgctccaggacgagattaacgaactgcagtcctcgctggcagaagagctggttagcgagtcttgcgaggcggaccccgctgaacagctggccctgcagtcgacactcacggtgcttgccgagcggatgagcacaatccgcatgaaagcctccgggaagcgccaactgttagaggagaagcttaacgaccagcttgaggagcagagacaagagcaggccttacaacggtaccgatgtgaggccgacgaactggactcttggttattgagcactaaagccacccttgacaccgccttatcacctcctaaggaacctatggacatggaagcacagctcatggattgccaaaacatgctagtcgaaatcgaacaaaaagtggtcgcactctccgagttaagtgtacataatgaaaatctgctactggagggaaaagcccacacaaaggacgaagcagagcagctggccggaaagttacggaggttgaaggggtctctcctggagctgcagcgcgctctacacgataagcagctgaatatgcagggcacagctcaggagaaagaggagagcgatgttgatctaaccgccactcagagccctggcgtccaggaatggctggctcaggcacgcacaacttggacacagcagcgccagtctagcctgcagcagcagaaggagctggaacaagagttagctgagcagaagagcctcctgcggtcggtcgccagtaggggagaagaaatccttatacagcactctgcggctgagacttctggcgacgctggggagaaaccggacgtcctcagtcaggaactaggcatggagggcgagaagtcttctgcggaagatcagatgcgcatgaagtgggaatcgctgcatcaggagttctcaacaaagcagaagttgctacaaaatgtgcttgagcaggaacaggagcaggtcttatacagccggccaaacagactgttatcaggcgtacctctgtacaagggcgatgtacctacgcaggataaaagcgctgtgacttccctgttggacggcttgaaccaggcattcgaggaagtatcatcacaatctggcggtgccaaaagacagagtattcacctggagcagaaattatatgacggggtgagtgcaacctcaacctggctggacgacgtcgaagagcgactgttcgtcgccaccgcacttttgcccgaggagaccgagacctgtctgttcaaccaggaaatcttagccaaagatattaaagagatgtcagaagagatggacaagaacaaaaacctatttagccaggcctttcctgagaacggcgacaaccgtgatgtaatcgaagacactttgggctgtctactgggcagactatccctcctggactccgtggtcaatcagcggtgccatcaaatgaaggaaaggttgcagcagattttgaacttccagaatgacctaaaagttttattcacttccctagctgataacaagtatatcattttgcagaagctggcgaacgtgttcgaacaaccagtggcagagcaaatcgaggctatccaacaggccgaggatgggctgaaagagttcgacgcagggattatcgagctgaagagacgcggagataagctgcaggtcgaacagcccagtatgcaggagctgagcaagctgcaggacatgtacgatgagcttatgatgattatcggatccagaaggtcaggtctgaaccagaacctgacactcaagagccagtacgaaagggctctgcaggacctggcggatctgttagaaactggccaggagaaaatggcaggcgaccagaagattattgtgtcctccaaggaagagatccaacagttactggacaaacacaaagagtattttcaggggctcgagagccacatgattttgactgaaacattatttaggaaaatcatatcttttgcagttcagaaagaaacccagttccacactgagctgatggctcaagcgagcgcggtgctgaaacgtgcacacaaaagaggtgtggagctggaatatatactggaaacatggagtcacctggatgaggaccagcaggagctcagcaggcaactggaagtcgtagagagttccatcccgagcgttgggctggtggaagaaaatgaagataggttgatcgatcgaatcacgctgtaccagcaccttaagtcttctctcaacgagtaccagccaaagctgtatcaggtcttggacgatggaaagagactcctcatcagcatctcatgcagcgacttggaatcccagctgaaccaacttggggaatgttggctgtcgaacaccaataagatgtcaaaggagttgcaccggctcgaaacaatccttaagcactggacccggtaccagagcgagagcgcggacctgatacattggctgcagagtgccaaggatagacttgagttctggacccagcagtccgtcactgtgccccaagaacttgagatggtgcgcgaccacttgaacgcatttttggagtttagcaaggaggtggacgctcaaagctccctgaagagctccgtcctctccacagggaaccagctactacgattgaagaaagtagacactgctaccttacgctctgaactatcccggattgattctcaatggacggacctcctgaccaacatcccagctgtccaggagaagctgcatcagctccagatggacaaattgccaagccgtcatgccatatccgaggtgatgtcctggatatccctgatggaaaatgttatccagaaagatgaggataatatcaaaaacagtatcggttataaggccatccatgagtatctgcagaaatacaaggggtttaagatagatatcaactgcaaacagttaacagtcgacttcgtgaaccagtcagtgctccagatctcaagccaggatgtggagagcaaacgaagcgacaagacagacttcgccgaacagcttggcgctatgaataaaagctggcagattctgcagggcctagtcaccgaaaaaattcagttattagagggactgttagagagctggtccgagtatgagaacaatgtacagtgcctcaaaacctggtttgaaacccaggagaagcggctgaagcaacagcatcgcataggagaccaagcttcagtgcagaacgcactgaaggactgtcaagatctggaggatttaataaaggccaaggagaaggaggtggaaaaaattgaacaaaatggactggcacttatccagaacaagaaggaggatgtgtctagcatcgtcatgagtacacttagagagctgggccagacctgggctaatttggaccacatggtggggcaactgaaaatcctgctgaagagcgtactggaccaatggtctagccacaaggttgcttttgataaaatcaattcttacttgatggaggccagatatagtctgtcaagatttagactactcacaggtagccttgaggccgtgcaggtgcaggtggacaacctccaaaacctgcaagacgatttggaaaaacaggagaggagcctgcaaaaattcggatctataactaatcagctgctcaaagaatgtcatcctcctgttacagaaactctcactaatacactcaaagaggtgaatatgcgctggaacaacttactggaggagatcgccgagcaattacagtcttccaaggccttgctccagttgtggcaacgatacaaggactactccaagcagtgcgcgtctaccgtgcagcaacaagaggaccgcactaacgagttactcaaggctgccacgaataaagacatcgcagacgatgaagtggccacttggattcaggactgcaatgatcttctgaagggactcggaacagtaaaagatagcctttttttcctgcatgagctgggtgagcagttgaaacagcaagtggacgccagcgctgcaagcgcaatacagagtgaccagcttagccttagccagcacctgtgtgccttggagcaggccctatgcaagcaacagacctcactacaggccggagtgcttgattatgaaactttcgcaaagtccctggaagctcttgaggcctggatagttgaggcggaggaaatcctccagggacaggatccttctcattctagcgacctctcaacgattcaggaacgaatggaagaactgaagggccagatgttaaaatttagctctatggctccggacctggacaggcttaatgagttgggctatagactgcccctcaatgataaagaaattaagcgtatgcagaatctaaatcggcattggtctttgatatcttcccagacaacagaacggttctctaaactccagagcttcttgctacaacaccaaacattcctggagaagtgcgaaacatggatggaatttcttgtgcagaccgagcagaaactggctgttgagataagcggcaattaccagcaccttctggagcaacagagggcccacgaactcttccaagcggaaatgttttcccggcagcagattttgcactccattatcatcgacggccagcgattgctagaacaaggccaggtcgacgacagggatgaatttaatctcaaactcactttactctccaatcagtggcagggcgttatcagacgggctcagcagcggcgagggataatcgacagccagattcggcagtggcagagataccgggagatggctgaaaaactaagaaaatggctggttgaggtcagttatctccccatgtctgggctggggtcagtgccaatacctctgcaacaggccaggacattatttgacgaggtgcagttcaaggagaaagtgtttctgcgacagcagggatcctatatcctgacagtggaggccggaaaacagctgctgttgagcgctgacagtggcgctgaagccgctctgcaggctgagctggcagagattcaggagaagtggaagtcagcatctatgaggttggaggaacagaaaaagaaactggcctttctactgaaggactgggaaaagtgtgagaaggggattgccgactcgctggagaagctgagaaccttcaagaaaaagctgtcgcagtccctccccgaccatcatgaagaactgcatgcagagcaaatgcgttgcaaggaactggagaacgccgtgggatcatggacagatgacctaacccaactgtctctgctgaaagacacactttccgcctatatttctgctgatgatatcagcatattgaacgagcgtgtggaactcctgcagcggcaatgggaggaattgtgccatcagttgtccctcagacggcagcagattggcgaacgcttgaacgaatgggccgtattcagtgaaaagaacaaggaactgtgcgaatggctgacacagatggaaagcaaggtgtctcagaacggggacatcttaatagaggagatgatcgaaaaactgaagaaggactaccaagaggagatcgcaattgcacaagagaataaaattcagctccagcagatgggcgaacggctggcgaaagctagtcatgagtctaaggccagcgagatcgagtacaagctcggaaaggtgaatgacagatggcagcatttgctcgatcttattgctgccagggtgaaaaagttaaaggaaacactggttgcagtccagcagctggacaagaatatgagcagcctgcgaacatggctggcccatattgaatcagaacttgcaaagccaatcgtgtatgacagttgtaatagcgaggaaatccagcgcaaactgaacgagcagcaggagttgcagcgggatatcgagaagcactcaacaggggtagcctcagtattgaacctctgcgaggtgttattgcacgactgcgacgcctgtgcaaccgatgccgagtgtgacagtatacagcaggccacgaggaacttggatagaaggtggaggaacatctgtgccatgtcgatggaacgaaggctgaagattgaagagacatggagactgtggcaaaagttcctcgacgattactcccgcttcgaagattggctgaagtccagtgagagaaccgcagcttttccatccagttcaggtgtaatttacaccgtcgcaaaggaagaactaaagaaatttgaggcttttcaacggcaggttcatgaatgtctgactcagctcgaactgattaacaaacagtataggcgccttgcaagggagaataggactgacagcgcctgttctctaaaacaaatggtgcacgaaggcaaccagcgctgggataatctgcagaaacgggtcaccagcatcctgcggagactaaagcattttattggccagagggaagagtttgagactgccagggattctatcctcgtctggctgaccgagatggacctgcagctgaccaacatcgaacacttttcagagtgcgacgtacaagccaagattaagcagttgaaggcatttcagcaggaaatcagcctaaaccataataagatcgagcaaatcatcgcccagggcgaacagcttattgagaagtcagagcctctggatgcagcaataattgaggaagagctagacgagctcagacgctactgccaggaggtcttcgggagggtggagcgttaccacaaaaagctcattcgcttgcccctgccagacgacgaacacgacctgtctgatcgcgagcttgaactggaggatagtgcggcactctcagatctccactggcacgatcgatctgcagatagcctcctctccccacagccgagctcgaacttgagtctcagccttgcacagcccctccggagcgagcggtcaggccgtgatacacccgctagtgtggacagcattcccctcgagtgggaccacgattacgatttgagtcgagaccttgaatccgcaatgtccagggccttgcctagtgaggatgaagaagggcaggatgacaaagacttctatcttcgtggcgcagtgggcctgtctgacgtgatgattcctgaaagcccagaggcgtatgtcaagttaactgagaacgcaataaaaaataccagtggagaccattccgccctggaatctcaaatccggcagcttgggaaagcactcgatgactctcggtttcaaatccaacagactgaaaatatcatacggtccaaaacacccacaggacccgagctcgacacgtcatacaagggctacatgaagctcctgggtgagtgcagttccagtatcgattccgtgaagaggctggaacataagctgaaggaagaagaggaaagcctccccggtttcgttaatctgcattcaactgaaactcaaaccgctggcgtgatagaccggtgggaacttctgcaagctcaggctctgtccaaggagctccgcatgaagcagaacctgcagaaatggcagcagttcaactccgacttgaattccatctgggcctggctgggagatacagaagaggaactggagcaactccaaagactggaactctctactgatatacagactattgagctccagatcaaaaaattaaaggagttgcaaaaagctgttgaccataggaaggccatcatcttgagcattaacctatgctcaccagagttcacccaggccgatagcaaggagtctcgggatcttcaagatcggctgagccaaatgaacggcagatgggatcgcgtgtgctctctgttggaggaatggcgagggttactacaggatgctcttatgcaatgccagggctttcatgaaatgagccacgggctgcttctaatgctggagaatatcgatcggcgaaagaatgagattgtgcctatcgattcaaatctggacgctgagattctccaggaccaccacaaacagctgatgcagatcaaacacgagctgctggaaagccagctccgagtggcaagtttgcaggacatgagctgccagctgcttgtgaacgccgagggtacagactgtctagaggcaaaggagaaggtccacgttatcggaaatcgactcaagttacttctcaaagaagtgtcacggcacataaaagaactggaaaaactacttgatgtttcaagtagccagcaagatctctcatcctggagtagcgcagatgagctcgacacgagcggctccgtctctccaacttccggtagaagcaccccgaacaggcagaaaacgcccagaggaaagtgctcgctctctcagcccggaccctccgtcagttcaccccacagccgatctactaagggaggcagtgattcgagcctctccgaacccggacctggcaggagcggccgagggttcttgtttcgcgtgctgcgcgctgcactccctttacaacttctgttactgctgttaatcggcctggcctgcttagtgcccatgtctgaggaggactatagctgcgcactgtctaataactttgctcgcagctttcatcctatgttgagatacacgaacggtccccctcctctatac

SEQ ID NO: 226980 - DNA, 26249 bp, Artificial Sequence
  derived and/or modified sequence
atggccacgtctcgcggagcctcccggtgcccacgagacattgctaacgttatgcagaggctgcaggatgagcaggaaattgttcagaaaaggacgttcacgaagtggattaactctcatttagcgaagcgaaaacctcccatggtggtcgacgacctgttcgaggacatgaaggatggggtcaagctgctggcacttctggaggtgttaagcggccagaaactgccctgtgaacagggtagacgcatgaagcggatccacgcagtggccaacattggtacagccttgaaatttttggagggaagaaagtcaatgcacaggggcagccctattaagctcgtgaacatcaattctaccgacattgccgacgggcgaccttccattgtgctaggtttgatgtggactattatcctgtacttccaaatcgaagaattgacaagcaatttaccccagctccagtccctgtcctcctcagcatcatctgttgacagcatcgtctcgagtgaaaccccctcaccaccctctaagagaaaggtcacgaccaaaattcaggggaatgccaagaaggctttgttaaaatgggtacagtacactgcaggaaaacagacgggaatagaagttaaagattttgggaaatcctggaggagcggcgttgcctttcactccgttatccacgccatcagaccagaactcgtggacttagaaaccgtgaagggtagatcgaaccgtgaaaacctggaagatgcatttacgattgccgaaaccgaactcggaatcccaaggttactggatcctgaagacgtcgacgtggataagcccgatgagaagtccatcatgacttatgtggcccaatttctgaagcactatccagacattcataatgcctctactgacggacaggaggacgatgagatactcccgggattcccttcgtttgcaaattctgtgcagaactttaagagggaagaccgcgtgatctttaaagagatgaaggtgtggattgagcagttcgagagagacctgacgcgggctcagatggtagagtctaaccttcaggacaaatatcagagtttcaagcactttcgcgttcagtatgaaatgaagcgaaaacagatagaacacctgatccagccccttcaccgagacggtaagttatccctggaccaagccttagtgaaacagagttgggacagagttacgagccgcctctttgactggcatatacagctggacaaatcccttccagctcccctgggcacaatcggcgcatggctctatcgcgcagaggtggcgctgcgtgaagagattacagtccagcaggtgcatgaggagacagctaacaccattcagcgtaaactcgagcagcataaggacctgctgcagaatacggatgcccataaacgggcatttcatgagatatatcgcacccgttctgtcaacgggatacctgtccctcccgatcaactggaagacatggccgaacgctttcacttcgtgagtagcaccagtgaactacaccttatgaagatggagtttctggagctcaagtatcgactcctttccctcctcgtgctggcagagtccaaactgaagagctggattattaaatatggaaggagagagtctgttgaacaactgctgcagaattatgtaagttttatcgaaaattctaagttcttcgagcagtacgaagtgacataccagatccttaaacagaccgccgaaatgtatgtgaaggctgacgggagcgttgaggaagctgagaacgtcatgaagtttatgaacgagaccaccgctcaatggaggaacctctcagtggaagtgagatccgtgcggagtatgctggaagaagtgatctcgaattgggacagatacggaaacaccgtagcttcactgcaagcctggctggaggatgccgaaaaaatgctcaatcagagcgaaaatgccaaaaaggacttctttcgaaatctgccccactggatccagcagcacacggctatgaacgatgcaggaaattttttgatcgagacatgcgacgagatggtcagtcgggatttgaagcagcagttgctgctgctcaacggtcgctggcgagaactgttcatggaagtgaagcagtacgcacaggccgacgaaatggacaggatgaaaaaggagtacacagattgcgtggtcaccctgtccgccttcgccaccgaagcccataagaagctttccgagccccttgaagtatcattcatgaacgttaagctgctcatacaggacctcgaggacatcgagcagagggtgcccgtgatggacgcacagtacaagatcatcaccaaaactgcgcacctcatcaccaaagaaagtcctcaggaagagggcaaagagatgttcgcaaccatgtcgaagcttaaggagcaactcacgaaggtgaaggagtgctattctccactgctctacgaaagccagcagctcctgatccccctagaagaactcgagaaacagatgacctcgttttacgatagcctgggaaagattaacgaaatcataacagtgctggagagggaagctcaaagcagcgctctctttaagcaaaaacaccaggagctcttagcatgtcaggagaattgtaaaaagactctgacactaattgaaaagggatctcaaagtgtccagaagttcgtgacactctcaaacgtgctcaagcatttcgaccagacacggcttcagcgccagatagcagatatccatgtcgccttccagtctatggtgaagaaaacgggagattggaagaaacatgtagaaacaaattcccgactcatgaaaaagttcgaggagagtagagccgagctggagaaagtcctgcgcatcgctcaggagggtcttgaagagaagggcgatcccgaggagctcctgaggcggcacactgagtttttttcccaacttgaccagagggtcctaaatgccttcctgaaggcctgcgacgagctaactgacatcttgccagagcaggagcagcagggactgcaggaagcggttcggaaattgcacaaacagtggaaagacctccagggggaggccccttaccacttgcttcatctgaagatcgatgtcgagaaaaacagattcctggcctccgtggaggagtgtagaactgaactcgaccgcgagacaaagcttatgccccaagaaggctcggaaaagattatcaaggaacatcgcgtgttttttagcgataaggggcctcaccatttgtgtgagaagaggcttcagctgatcgaggaactgtgcgtaaagctgcctgtccgtgatcccgtccgcgatacaccaggaacgtgccacgtcactctcaaagaattgcgagccgctattgacagcacttaccggaagcttatggaggaccccgacaagtggaaggactatacctcccgtttcagtgaattcagtagttggatctctaccaatgagactcagctgaagggcatcaaaggagaagcgatagataccgcgaatcacggcgaagtgaaacgcgctgtcgaggaaattaggaacggggtgaccaaaaggggtgaaacattatcttggctcaaatctcgtctgaaagtgctgacagaagtatcttccgaaaacgaggctcaaaagcagggagatgagcttgccaaactgagctccagcttcaaggctctcgtaacgctgctgtctgaagtagagaagatgctatcaaattttggtgattgtgtacagtacaaggagattgtcaaaaacagcttggaagaacttatctccggaagtaaagaagtgcaggagcaagcggaaaaaattctggataccgagaacctattcgaggcacaacaactgctgcttcaccaccaacagaaaactaagcggatctctgccaaaaagagggatgtacagcagcaaatcgcacaggcccagcagggagaggggggtcttccagataggggtcacgaggaactgcggaaactggaaagcaccctggatggcctggagcgttcgagggagaggcaggaacgacgcatacaggtgactctgagaaaatgggagcgttttgaaactaacaaagagacggtcgtaaggtatctgttccagactggaagcagtcatgaacggtttctttcattctccagcttggaatcactcagcagtgaattggaacagaccaaagagttctccaaacgcaccgagagcatcgcggttcaagcagagaacctggtaaaggaggcttcagaaatccctctgggtcctcaaaacaagcaactgctgcagcagcaggccaaatccatcaaggagcaggtcaagaaactggaggacacgctcgaagaggatattaaaactatggagatggtgaagacaaagtgggaccactttggatccaatttcgagacgctgagtgtgtggattacagaaaaggaaaaggaactgaacgcgctggaaacttcctcttccgcgatggatatgcaaatttcccaaatcaaagtgactatacaggagattgagagcaagttgtcgtccatagtgggacttgaggaggaagcacagtccttcgcacaattcgttaccactggggaaagcgccaggataaaggccaagcttacacagattcggcgttacggcgaggagctccgcgagcatgctcagtgcctagaagggacgattctaggacacctttctcagcagcagaagttcgaagagaatctccgcaagatccagcagagtgttagcgagttcgaggacaagctggccgtccccattaagatttgctcttcagcgaccgagacctacaaggtattgcaggaacacatggatctgtgccaggcattggaatccctctcatccgccatcacagcatttagcgctagcgcgagaaaagtcgtcaaccgcgactcgtgcgtgcaggaggccgcagcattacagcagcagtatgaagatatattgcgccgagctaaagagcggcaaaccgctctggaaaatttgctggcacactggcaacgcctggagaaagagctgtcctcctttcttacttggttagaacgtggcgaggccaaagctagtagcccagagatggatatctcggccgacagggtaaaagtcgagggcgaactgcagctgattcaggcaagcagcagaaaatttgttagtcaggcctccttctacagcaagctcttgcagcttaaggagtccctgttttcagtcgcctcgaaagatgacgtgaagatgatgaaattgcacctggagcaactggacgagcgttggagagatttacctcaaatcattaataagaggattaacttcttgcagagcgttgtcgctgagcatcagcagtttgatgagctgcttctgtccttctcagtctggataaaattgttcctgagtgagctacagacgacatcggaaatcagcatcatggatcaccaggtggctctcacccgccacaaagaccatgcagctgaggtggagagcaagaagggagagctccagtctctgcagggacatctggccaagctgggcagtttgggaagggctgaggacttgcacctgttgcaggggaaggcagaggattgtttccaactgtttgaggaggcttctcaggtggtggaacggagacaactcgccctgtcccacttggcggagtttctgcagtcgcacgcctcgctgagcggaattttacggcaattaaggcagactgttgaagccaccaattctatgaacaaaaacgagtctgacttgattgaaaaagatcttaatgatgctttacagaacgcaaaagccctggaatcggctgccgtgtctctcgacgggatcctctctaaggcccaatatcatctgaagatcggcagctctgagcaaagaacaagttgtcgagccactgcagaccagctgtgcggggaagtggagcgcattcagaatttacttggtactaaacaatctgaagccgatgctttagcagtacttaaaaaagctttccaggaccagaaagaagagctgctaaagagcatcgaggacattgaggagcgcactgataaggagaggctcaaggagcccactcgccaggcactgcagcagcgactccgcgtttttaatcagctggaggacgagctgaattcccatgagcacgagctgtgctggctgaaagataaggcaaaacagatcgcccagaaggatgtggcatttgcgccagaggttgacagagaaatcaaccgcctcgaagtaacatgggatgacaccaaaagactgattcacgaaaatcagggccaatgctgtgggctgatcgatctgatgagagagtaccaaaatctcaagtccgctgtctccaaggtgctggagaatgcaagctctgtgatcgtcacgcggacaactattaaggaccaagaagacctgaagtgggccttcagcaagcacgagaccgccaagaataagatgaactacaagcaaaaagacttggataatttcacaagtaaaggaaagcatttgttaagtgaactaaaaaaaatccacagctcagatttttcacttgttaaaactgacatggaatcgaccgtggacaagtggttggatgtcagtgagaagctagaggagaatatggatagactgagagtctcactctctatttgggatgacgtgctgtccacacgggacgaaatagaggggtggagcaacaattgcgtgcctcaaatggcagagaacatatccaatctggacaatcacctccgagcagaggagctgctaaaagaattcgagagcgaggtgaagaacaaggccctgaggctcgaggaactacactcaaaggtaaacgacctcaaggagctgactaagaatctcgagactccacctgacctccagttcatagaagccgaccttatgcaaaagctcgaacacgctaaggagattactgaggtagccaaaggcactttgaaggactttactgcacaaagtacacaggtggagaagttcattaatgacataacaacttggttcacgaaggtggaagagtctctgatgaactgcgcccagaacgaaacgtgcgaagccctcaagaaggtgaaagatatccagaaggagttgcagagtcaacagtccaatataagctctactcaggagaatctcaactctctgtgccggaaatatcacagcgccgagctggagtcactgggaagggcaatgacagggctgataaaaaagcatgaagccgtcagccagctgtgctcaaaaacgcaggcttcactgcaggagagcttggagaagcatttcagtgagagcatgcaagagtttcaggaatggtttctcggggctaaagcagccgctaaggaatcaagcgatcggactggagactctaaagtgttggaggctaaactgcacgatctccaaaacattctggactcggtatctgacggccagagtaaactcgatgcagttacacaggaggggcagactttatatgcccatctgagcaaacagattgtgagctcaattcaggagcagattaccaaggctaatgaagagttccaagcatttcttaagcaatgcttgaaggacaagcaagccctccaagattgtgcttccgaactggggtcctttgaggatcagcacaggaaactcaatctgtggattcatgaaatggaagagcgattcaatacggagaatttaggagaaagcaaacagcacattcctgagaagaaaaatgaagtgcataaagttgagatgttcttaggagagctgttggccgcaagagagtcgctggataagctgagtcaacgtggtcaactactttcagaggaggggcacggtgcgggacaggagggtcgcctctgctcccagctcctcacaagccaccagaacctgctcagaatgactaaggagaaactcaggtcttgccaggtggcactgcaggaacacgaggcactggaggaggctctgcaatcaatgtggttttgggtcaaagctatccaggaccggctggcatgcgccgaaagtactttagggtccaaggatacgctggagaaacgcttatctcaaattcaggacatcctgcttatgaaaggcgagggggaagttaagctgaacatggctattgggaagggagagcaggccctaaggagcagcaacaaggagggtcagcgggttatacagacacagctggaaactctgaaggaagtgtgggcagacataatgtcctcatccgttcacgcacagtctaccttagagtctgtgattagtcagtggaatgactacgtcgagcgcaagaaccagctggagcagtggatggagtcagtggaccaaaagatagagcatcccctgcagccccagcccggtctgaaggagaaattcgtgctgctggatcatctccagtccattttgagcgaagcggaagaccacaccagggccctacaccgattaatcgccaagtctagagagttgtacgagaagacagaagatgaatcctttaaggacactgctcaagaggaactgaaaactcagtttaacgacatcatgaccgtcgcaaaggaaaagatgcgaaaggtggaggaaatcgtgaaagatcacctgatgtacctcgacgctgtacacgagttcactgattggctccatagcgctaaggaagaacttcaccgatggtctgatatgagcggcgatagtagcgccactcagaagaagctgtcgaagataaaagaactgatcgactcccgggaaataggtgcatctagactatccagagttgagtctctggcccctgaggttaagcagaatactaccgcaagcggttgtgagttgatgcacaccgagatgcaagcactgcgcgctgattggaaacagtgggaggactccgtctttcagacacagtcctgcctggaaaatcttgtgagtcagatggcactcagcgaacaagaattttctggccaggtggcccaactcgagcaggcacttgaacagtttagtgccttgctgaaaacatgggcacaacagctcactttactagagggcaagaataccgacgaagaaatcgtggagtgttggcacaaaggacaggaaattctggacgctttacagaaggctgaaccgcgaacggaggatcttaaatcccagctcaacgagctttgcaggtttagccgcgacttgagcacttatagcggaaaagtgagcggcttgataaaggagtataattgcctttgtctgcaggcctcaaaaggttgtcagaataaggagcaaatcttgcagcagaggttccgtaaggccttccgagattttcagcagtggctcgttaacgcaaagatcacaaccgctaagtgcttcgatataccccagaatataagtgaggtgagcacctccctgcaaaaaatccaggagttccttagcgagtccgagaacggtcagcacaaactgaatatgatgttgtccaagggggaactattgtcaaccttattgacaaaagaaaaggccaagggcatacaggccaaggtgactgcggcaaaggaggattggaagaacttccactcaaaccttcaccagaaggaaagtgctctggagaacctcaagattcagatgaaggatttcgaagtgagcgcagagccaatccaggattggctgtccaagaccgagaagatggtccatgaatccagcaacagactttacgatctgcccgctaaaaggcgcgaacagcaaaagctgcaaagcgttctcgaagaaatccactgttatgagccccagctgaatcgtctgaaggaaaaggcccagcagctctgggaaggtcaagccgctagcaaaagttttaggcaccgggtgtcccagctgtcgtctcagtacttggccctgagtaacctgacaaaagaaaaggtgagccggctcgacagaatcgtcgcagagcataatcagttcagtctgggaatcaaagagcttcaggattggatgacagacgcaatccatatgctcgactcttattgtcacccaacctccgacaagtccgtcttagacagccggacgctgaaattggaggccctcctcagcgtcaaacaagagaaggaaatccagatgaagatgattgttacccgtggagaaagcgtgctgcagaacacttctccagaaggaatccccactatacagcaacaattacagtctgttaaggatatgtgggctagtcttttgagtgctgggattagatgcaagtctcagctggaaggagcactgtcaaagtggaccagctaccaggacggtgtgaggcagttctcgggatggatggactccatggaagcaaatctgaacgaatccgagcggcagcacgctgagctccgcgataagacaaccatgctcggaaaagccaagctcctgaatgaagaggtcctgagctactcttctttgctggagaccatcgaggttaagggcgctggcatgacagaacactatgttactcaactggagctacaagatcttcaggagagatacagagctattcaagagcgtgccaaagaggcggtgaccaaatctgagaagctggtgaggctgcaccaggagtaccagagggatctgaaagcctttgaggtgtggttgggacaggagcaggaaaagctggatcagtattccgtcctcgagggggacgcacatactcatgagacaaccctgagggacctccaggaattgcaggtgcattgcgccgaaggccaggccctgcttaacagtgtcctacatacacgggaagatgtgatcccgtctgggatccctcaagccgaagacagggctctggagtccctgcgtcaggattggcaggcatatcagcaccgactgagcgagacccggacccagttcaacaatgtagtgaataaacttcggctgatggaacagaagttccagcaggtggatgaatggctgaagacggctgaagagaaaaaatggcatgaggaggtaactgcctatcgcgacgaggttgaagaagttggagccagggcccaggaaattcttgatgagagccacgtcaactctcgtatgggatgccaggccactcagcttacctccagataccaagccctcttactgcaagtcctggagcagatcaagttcctcgaagaggagatccaatccctggaggaatctgagagctcgctgtccagctattctgactggtacgggagcacacataagaattttaaaaacgtcgcgaccaagatcgacaaagtggatacggtgatgatggggaagaagctaaagaccctggaagtcctgctgaaggatatggagaagggacacagcctgctgaagagcgcgagggagaagggcgagagagcagtgaagtatctggaggagggagaagccgaaaggctccgaaaggagatccacgaccacatggagcagcttaaagagttaacttcaactgttaggaaggagcacatgactctcgagaaaggcttgcacttagctaaagaattctctgataaatgtaaagccctaactcaatggattgctgagtatcaagaaatcctgcatgtcccagaggagcccaaaatggaactttatgagaagaaagcacagctgtccaagtacaaaagcctgcaacagacagtcctgtcgcacgagccttccgtgaaaagcgtacgagagaagggggaggccctgttagagctagtccaggacgtcacgctcaaagacaagattgaccagctgcagtctgattatcaggatctgtgtagcatcggtaaggcaatgatggaggagatagctgggttcgaagatcgactaaacaacttgcagatgaaaggcgacacccttattggacaatgtgccgaccacctgcaggccaaactaaaacagaacgtccacgctcatctccaagggacgaaagattcatattcagccatttgtagcaccgcccagaggatgtaccaatcactagaacacgagctgcagaaacatgtaagtaggcaggacaccttgcaacagtgtcaggcctggctgtctgccgtacagcctgacctggagccgagccctcagccccctttgtcacgggcagaggctatcaaacaagtgaaacacttccgggctcttcaggaacaagccagaacatatctggacttgctttgcagcatgtgcgacctgtcgaacgcttcagtcaagaccacagctaaggacatccaacaaacagaacagacgattgaacagaaactggtccaggcacagaacttgacacaggggtgggaggagatcaagcatctcaagagcgaactgtggatttatttgcaggatgctgatcagcagctgcagaacatgaagcgccgtcactccgaattggagcttaatatcgcccagaacatggtgtctcaggtaaaggatttcgtgaaaaagctgcagagcaaacaagcaagtgtgaacaccataattgagaaagtgaacaaattgaccaagaaagaggagtctcctgagcacaaggagattaaccacctgaacgatcagtggctggacctgtgtcgacagtcaaacaacctgtgcctgcagagagaagaggacctgcagcgcacaagagactaccacgactgtatgaacgttgtggaagtgtttctggaaaagtttacaacggagtgggacaacttggcacggtccgacgccgaatcgacagccgtccatctcgaagcccttaagaaactcgcccttgcccttcaagagcgcaaatacgcaattgaggatctgaaggatcagaagcagaagatgatagaacaccttaatcttgacgacaaggagcttgtgaaggagcaaaccagccacctggagcagagatggttccagctcgaggaccttattaagagaaaaatccaagtgagcgtaaccaatctggaggagctgaacgtggttcaatctcgtttccaggagctgatggagtgggctgaggaacaacagcccaacattgccgaagctctgaaacagtcacctccgcctgatatggcccagaatctgctgatggatcacctagctatctgcagcgagctagaggcaaagcaaatgctgctgaagtccctgataaaggacgcagacagagtgatggccgacctggggctgaacgaacgccaggtgatacagaaggctctgtcagacgcccagagccacgtgaattgtttatccgacctggttggtcagaggcggaagtatcttaataaggcactgtctgaaaagactcagtttttgatggcggtttttcaggcaacatcacagatccagcagcacgagaggaagatcatgtttagggaacacatctgcctgttaccagatgatgtgtccaaacaggtcaaaacgtgtaagagtgcccaggcgtctttaaaaacataccaaaatgaagttacaggcctctgggcccaaggccgtgagctgatgaaagaggtgacagagcaggagaagtccgaagtgttgggcaagctgcaggagctacagtcagtctatgattcagtcttgcagaaatgctcacaccgcctgcaggaattagaaaagaacctggtcagtaggaagcacttcaaagaggactttgacaaagcttgccattggcttaagcaggcagatatcgtgaccttccctgagattaacctgatgaatgagtcatcagagctgcatacgcagttggcaaagtaccagaacattcttgaacagtctcctgagtacgagaacttgctcctgactctgcagaggacgggtcagacaatacttccttccctcaatgaagtcgatcattcatacctgtctgagaagcttaacgcactccctcgtcagttcaatgtgattgtggcactggctaaagataagttctataaggtccaggaagccatcttagccagaaaagagtatgcctctcttatcgagttaaccactcagtcgcttagcgagctggaggctcagttcctgcgaatgagcaaggttcccaccgaccttgccgtggaggaggccctctccttacaggacggctgcagggctatcctagacgaagtagccggattaggcgaagccgtcgatgaactgaaccaaaagaaggagggtttccgatcgaccggacagccatggcagcccgacaagatgctgcaccttgtaaccctctaccatcgattaaagaggcagactgaacaacgggtgtcactgctggaggatacgacttccgcttaccaagaacatgagaagatgtgccaacagcttgagagacagttgaagtccgtgaaggaggaacagagcaaagtcaacgaggaaacactgcccgcagaggagaaactcaagatgtaccattctctggctggaagtttgcaggactctggcatagtcttgaagcgcgtcactattcatctcgaggacctggctccacatctggacccgctagcatatgagaaggcccgtcatcagatccaatcttggcagggggaactgaagctactcacttcagccataggggagaccgttacagagtgcgagtcccggatggtgcagtcgattgatttccagacagagatgagtcgctcgctggactggctccggagagtgaaggccgaactcagtggcccagtctatctcgacttaaacttgcaggacatccaggaggaaatcaggaaaatccaaatccaccaagaggaggtgcagagctctctcagaataatgaacgctctgtctcataaagagaaggagaaatttacaaaggctaaggagctgatcagcgcggacctcgagcattcactggccgagctctcagaattagacggcgacatccaggaagccctgcggactcggcaagctaccttgacagagatttattcccagtgtcaacgatattaccaagttttccaggccgctaatgattggctggaggatgcccaagagctcctgcagctagctggaaacggtttggacgtcgaatcagcagaagaaaatctgaaatcccatatggagttcttctctactgaggatcagtttcatagtaacctggaagaactccattcactggtggctacattggacccactgatcaagccgaccggtaaggaagacctggaacagaaggtggcttcactggagctgcgctctcaacgcatgagcagagatagcggggctcaggttgacctgctgcagagatgcactgcacaatggcacgactaccagaaggctcgcgaagaggtgatcgaactcatgaatgacactgagaagaaattaagcgagttctccttgctgaagacttcttctagccacgaagcagaggagaagctaagtgagcataaagcccttgtaagcgtggtgaacagcttccacgagaaaatagtcgccctggaagaaaaagcctctcaactggagaagactggcaatgacgcatctaaggccaccctgtcacggtctatgaccaccgtatggcagaggtggactcggctgcgggctgtcgcacaagatcaggaaaagatcctggaggatgccgttgacgaatggaccggcttcaacaataaagtgaagaaggcaaccgaaatgattgatcagctacaggacaaactcccaggcagctctgcagagaaggcatcgaaagcggaattactcactctactcgagtatcacgatacgtttgtgcttgagcttgaacagcaacagtccgccctgggaatgctccggcagcagactctttcgatgctccaggatggcgcagctcccacgccaggcgaagagccgccactgatgcaagaaatcactgcaatgcaggatcgctgcctgaacatgcaagaaaaagtgaaaaccaacggaaaactggtcaaacaggagctgaaagaccgggagatggtggagacccagatcaatagcgtgaagtgctgggtgcaggaaacgaaagaatacctcggaaacccaaccatagaaatcgatgcccagcttgaggagttacagatacttctaacagaggcgacaaatcatcgtcagaacattgaaaaaatggctgaagagcaaaaggagaaatacctcggtctgtacacaatcctacctagcgaactttctctacagctggccgaagtggccttggacttgaaaatcagagaccaaatccaggataaaataaaagaggtagagcagtccaaggccaccagccaagagctttctaggcagattcagaaactggctaaggaccttacaaccatccttactaagctgaaggctaagactgataacgtggtacaggccaagacagaccagaaagtgctgggggaggagctggatgggtgcaattccaaactgatggagctcgacgccgctgttcaaaaatttttagagcagaacggccagctgggcaaaccacttgcaaaaaagatcggaaagctcacagaactccaccaacagaccatccggcaggcggagaaccggctcagtaaactgaatcaggccgcttcacacttggaggaatataatgaaatgctggaattaattcttaagtggatagaaaaagctaaggttctagcgcacggcaccatcgcttggaactcagcttcacaactgcgcgagcagtatatacttcaccaaactttgctcgaggaatctaaggaaatcgattctgagctcgaggcgatgacagaaaaactgcagtacctgacaagtgtgtattgcacagagaaaatgagtcagcaggtcgcagaactcgggcgagagacagaggaactgcggcagatgattaagattcggctgcagaatctccaggacgccgctaaagatatgaaaaagttcgaggccgaactgaaaaaattgcaggccgcattagagcaagctcaggctacactgacaagccctgaggtgggcaggttgtctctcaaagaacaactgagccaccggcagcacctactgtccgagatggagtccttgaagcccaaggttcaggccgtgcaactttgtcagagcgcactacgaatcccggaggacgtggttgccagtctgccactgtgccatgctgcgctcagactgcaggaagaggccagtcgcttgcagcacactgctatacaacagtgtaatatcatgcaggccgctgtggtacagtatgagcaatatgaacaggaaatgaaacatcttcagcagctcatagagggcgctcatagagaaatagaagacaaaccagtagcaacctcgaacatccaagagctgcaagcccagatctcacgccacgaagaattggcccaaaagattaagggttaccaggagcagattgcaagtcttaactccaaatgcaagatgctgactatgaaagccaaacacgcaactatgctgctgactgtgacagaggtagaggggttagccgagggcacagaagatctcgacggcgagctgttgcctacaccaagcgcccaccctagcgtcgtcatgatgaccgccggtagatgtcacactcttctatcacctgtgacagaggagtccggcgaggaggggaccaactctgaaatcagcagcccaccggcttgtagaagtcccagcccggtagccaatacagatgcctctgtgaaccaggacattgcatactatcaagctttatctgccgagaggttgcagactgacgcggcaaagatccatccaagcacatcagcctcacaagagttctatgagcctggactggagccaagcgccacagcaaagctgggagacctgcaacgttcatgggagaccctcaagaatgttatcagcgaaaagcaacgtacgctgtacgaggcgctcgaacgtcagcagaaataccaagattctctccagtccatcagcactaagatggaggcaattgaattaaagctgtccgaaagccccgaacctggacggagcccagagagccaaatggccgagcaccaggcacttatggatgagatcctcatgctgcaggacgaaattaatgagctgcagtctagtcttgctgaagagctagtctcagagtcatgtgaggctgaccccgcagaacagctggcattacagtctacccttacagtactcgcagagaggatgtctaccattcggatgaaggcctcaggtaaaaggcagctgctggaggagaaactgaacgatcagttggaggagcaacgacaggagcaagcactgcagcgctaccgatgtgaggccgacgagctagacagctggttgttgagcacaaaggccactttagacactgctctaagtccccctaaggaaccaatggacatggaagcgcaactcatggattgtcagaacatgttggtggagatcgagcaaaaggttgtggcattgtcagaactatccgtccacaatgaaaatctgctgctggagggcaaagcacacactaaggatgaagcggaacagctggcaggaaagttgaggagactgaaggggtctctgctggaactccagcgggctctgcatgacaagcaactcaacatgcaggggacagcacaggagaaggaggaatccgatgtagatttgaccgccacccagagccccggtgttcaggagtggctcgctcaggcacgaaccacttggactcagcagagacagagcagccttcagcagcaaaaagaactggaacaagagctcgccgagcaaaaatccctcctccgcagcgtggcatcccgaggggaggagattctgatacagcactcggccgcagaaactagtggtgacgcaggcgagaagcccgacgtcttatctcaggaattggggatggagggcgaaaagagtagcgccgaagatcagatgagaatgaagtgggagtccctgcatcaagagttttccacaaaacagaagttgcttcaaaacgtcctggaacaggagcaagagcaggttttgtattcgagacccaaccggctgctttccggcgttccgctgtataaaggtgacgtgcctactcaagacaaaagcgctgtgacatctctactggatgggctcaaccaagcctttgaggaggttagttctcaatctggcggtgctaagaggcaatccattcatcttgaacaaaagctatatgacggagttagcgcgaccagtacatggctcgacgacgttgaagagcgactatttgtcgctaccgcattgctgcctgaagagactgagacttgcctatttaaccaagagatccttgccaaagacataaaagagatgtctgaagaaatggacaaaaacaaaaacctgttcagccaggcgttccctgaaaatggtgacaacagggatgtgatcgaggacactcttggatgtcttctgggccgtctgagcctgctggattccgtcgtcaatcaaagatgtcatcagatgaaggagcggctgcagcaaatactgaactttcaaaatgacttgaaggtcttgttcaccagcctcgcagacaacaagtacatcatcttacaaaagctggccaacgttttcgaacagccagtagcggaacagatcgaagccattcagcaggccgaggatggtttgaaagagttcgatgccggtataatcgagctcaagcgtcgaggagacaagctccaggtggaacaaccctcaatgcaggaactcagtaagctgcaggatatgtacgacgaactgatgatgatcatcggaagtcggaggagcggcctgaatcagaacttaactctgaaatcccagtatgaacgggcactgcaagatcttgcagacctcctggagactgggcaggagaagatggctggggatcagaagattattgtgagcagcaaggaagaaatccaacaactactcgataagcataaggaatactttcaggggcttgaaagccatatgatcctgacagaaacacttttcaggaaaattatctcttttgcggtccagaaagaaactcagtttcacaccgagctcatggcgcaagcttcagccgtactgaaacgggctcacaagaggggtgttgagctggagtacatactggagacctggagtcacctcgatgaagaccagcaggaacttagccggcagctggaggtagttgagagcagcattccaagcgtaggcctggtggaggagaacgaggataggctgattgaccgaattaccctataccagcacctgaagagtagtctcaacgaataccagccaaagctttatcaggtgctggacgatggaaaacgactattgattagcatctcctgctctgatcttgaaagccagctcaaccagctcggagagtgctggttaagtaacacaaacaagatgtccaaggaacttcatcgacttgaaacaattctcaagcactggactcggtaccagagtgaaagcgcagatctgattcactggctgcagtccgctaaagaccgacttgaattttggacccagcagtcagtgacggtgcctcaagaactcgaaatggtacgggatcaccttaatgcctttttggaattcagcaaggaagtggacgcccaatcttccctgaagtcctcagtgctgagtacaggaaaccaattacttcggctcaaaaaagtggacacggccaccctgagaagtgagctatcccgaatcgatagccagtggaccgacttgttgaccaacatccctgcggtccaggagaagctgcatcagttgcaaatggataagctgccttcacggcacgctattagtgaggtgatgagttggatttctctgatggagaacgttatccaaaaggacgaggataacattaagaattccattggctacaaagccatccatgaatacttacagaagtataagggattcaaaatcgacattaactgcaagcaacttaccgttgattttgtgaaccagtcagtactacaaatctcaagccaggacgtggagtccaagcgaagtgacaaaactgatttcgcagaacaattaggcgcaatgaataagagttggcagatactgcaggggttggtgacggaaaaaattcagctactcgaagggctcttagagagctggtctgagtacgagaacaatgttcagtgcctgaagacatggtttgagacccaggagaaaagactcaagcaacaacatcgcatcggcgaccaagcttcggtgcagaatgctttgaaggactgccaggaccttgaggacctgatcaaggctaaggagaaggaggtcgaaaaaatcgaacaaaacggcctcgctctgattcaaaataagaaagaagacgtgagtagcatcgttatgtcaaccctgcgggaactcgggcaaacatgggccaacctggatcatatggtgggacaactgaagatcctgctcaaaagtgtgttagaccagtggtctagccataaggtggcatttgacaagataaatagttacctgatggaggctagatattctctgagccggtttcgtcttctaactggctctctcgaggctgtgcaggttcaagtggacaatctgcagaacctccaggacgacctcgagaaacaagagcgaagcttgcaaaagttcggaagcataaccaatcaactgcttaaagaatgtcacccccctgtgacagaaacactgacaaacacgctgaaagaagtaaatatgcgctggaacaatctgctagaagagattgccgagcagctgcaaagttcgaaagcactcctgcagctgtggcagcggtacaaggactacagtaaacaatgtgctagcaccgtgcagcaacaagaggatagaacaaatgagttgctcaaagcggctacaaacaaggatatcgctgatgatgaggtcgccacttggatccaggattgcaacgatctgcttaagggactagggactgtgaaagattcactgttcttcctccacgaactcggtgaacagctgaagcagcaggtggacgcttccgccgcaagtgcgatccaaagcgaccagctttccctcagtcagcacttgtgcgccctcgagcaagctctttgtaagcagcagaccagcctacaggctggggtgctggactacgaaacattcgctaaaagcctggaagcccttgaggcttggattgttgaggctgaggaaatcctgcagggccaggaccccagccatagtagcgatctatcaacaattcaggagcgtatggaggagctgaaagggcaaatgctgaagttctcaagcatggcacccgacctggacaggcttaacgagctggggtaccgcctgcccctgaatgataaggagataaaacggatgcaaaatttaaaccggcattggtcactgatttcttcgcagaccaccgagcgcttttccaaacttcagtctttcttgcttcagcaccagacatttcttgaaaaatgcgaaacatggatggagttcctggtgcaaaccgagcagaaactggccgttgagatcagcgggaattaccaacacctacttgagcagcagcgggctcacgaactctttcaggccgagatgttctcccgccagcaaatcttgcattcgataattattgatggtcagcggctgcttgagcagggccaggtggacgatcgcgatgaattcaatctgaagttgactcttttgagcaatcaatggcaaggagtgatccggcgagcacaacagaggcgtggcattatcgatagccagatccgacagtggcagagatatcgggagatggccgagaagctacggaagtggttggttgaagtgtcatacctccccatgtcaggactcggctccgtacccattccactccagcaggcacgcactttatttgatgaggtccagttcaaggagaaggttttcctccgtcagcagggatcttatatcttaactgtggaagcgggtaagcaattgttattgtctgccgattccggggctgaggcggctctgcaggcggagctggctgaaattcaggaaaagtggaaatcggcctcaatgcgactcgaggagcagaaaaagaagctggcattccttcttaaagattgggagaaatgcgagaagggcattgctgacagcctagaaaagctgagaacctttaaaaaaaaactgagccagtccctccccgatcaccacgaggaactgcacgcagagcagatgcggtgtaaggagctggagaacgcagtgggtagctggactgatgacctgacacagctgagcctgctgaaggacacactttctgcttatattagtgcagacgatatctctattctgaacgagcgggtggagctgctacagaggcagtgggaggagctgtgccatcaactgtcacttaggcggcagcaaattggagaaagattgaatgagtgggcggtattctctgaaaaaaacaaggaactctgcgagtggctgacccagatggaatctaaggtctcacagaacggcgacatcctaatagaggagatgattgagaagctgaaaaaagattatcaggaggaaatcgcaattgcccaggaaaataagattcagctccagcagatgggcgaaaggctagcgaaggcatcccatgagtctaaggcctccgaaattgagtacaagttgggcaaggttaatgatcggtggcagcacctgctggacctgatcgcagctcgcgtgaaaaaactcaaagaaacgctggttgcggtccagcagctagacaagaatatgtcttccctgcggacctggttggcccacattgaaagtgagcttgctaaacctatcgtttatgacagttgcaatagcgaggagattcaaagaaagttaaacgaacagcaggaactccagagagacattgaaaagcattcaaccggtgtggcctctgtgcttaacctgtgcgaagtattactgcatgactgcgatgcctgtgctactgacgcggaatgtgacagtatacaacaagcaacccgaaatctggatcgacgttggcgcaatatctgcgctatgtccatggagcggagactgaaaattgaggagacatggaggctgtggcagaagtttctcgatgactatagccggtttgaggactggctgaaatctagtgaacgcaccgcggcatttccaagcagtagtggggtcatttacaccgtggctaaggaagaacttaagaaatttgaggccttccagcgccaggtccacgagtgcctgacacagttagaactcatcaataagcagtacaggcgtcttgctcgcgaaaaccgaacagactccgcttgcagtctgaaacagatggttcacgagggcaaccagagatgggataatctgcagaagagagttacaagcattctcagaaggcttaagcatttcatcggacagcgagaagagttcgaaaccgcccgagactccatactggtttggcttaccgaaatggacttgcaacttacgaatattgagcacttcagtgagtgcgatgttcaagcgaaaattaaacagctgaaggccttccagcaggagatttccttgaatcataataagatcgagcagatcattgctcagggagagcagctgatcgagaaatccgagccactggatgctgcaatcatagaagaagagctggatgagctgaggcgttactgccaggaggtgtttgggagggtcgagaggtatcacaagaaacttattcggttgcctctgcctgatgacgagcatgatctgtccgatcgcgagttagagctggaagatagcgccgcacttagtgatcttcattggcatgacaggagtgccgattctctgctgtcacctcagccgagctccaacctctcactctctctggcccaacctctgagatcagaacgctcaggtcgagatacacccgctagcgttgacagcatcccattggaatgggatcacgattacgacctaagccgcgacctggagagtgccatgtctagggctctgccaagcgaggacgaagagggacaagacgataaagacttttacctgaggggcgcagtgggacttagcgacgtgatgattccagagtctccagaagcctacgtcaaactaactgagaatgccattaagaacacaagtggggatcatagtgccctggaaagccagattagacagcttggaaaggccctggatgattccagattccagatccagcaaaccgaaaatattatccgctctaagaccccaaccggacctgaacttgatacctcatataagggctatatgaaacttctgggcgagtgcagtagttccatcgattctgtgaaacgactggaacacaagttgaaggaggaggaggaaagccttccaggctttgtaaacctacatagcaccgaaacccagacagccggtgtgatcgatcgctgggaactccttcaggctcaggccttaagtaaggagcttcggatgaagcaaaacttgcaaaagtggcagcagtttaacagcgacctgaattccatttgggcctggttaggtgacaccgaagaggaactcgaacagcttcagcgcctcgaactctccacagatatccaaactatcgaactgcagatcaagaagctgaaggaactgcagaaagcagtggaccacagaaaagctattatactaagcatcaacctttgttcaccagaatttacacaggccgattccaaggagtctagagatcttcaggaccgattgtcccagatgaatggtcggtgggatcgagtctgctccctgctggaagagtggagaggtcttctgcaagacgcactgatgcagtgtcaaggatttcacgagatgtctcacggcttactgttgatgctggaaaacattgaccgcagaaaaaacgaaatcgtgccaattgactcaaacttggacgctgaaattctgcaggatcaccacaagcaactgatgcagatcaaacatgaactcctcgaaagtcaactgcgggtggccagcctgcaggatatgtcctgccagctcctggtgaacgcagaggggacagattgcttggaggctaaggagaaggtccatgtgataggtaacaggcttaaactgcttctgaaggaagtgtcaagacacatcaaggaactagagaagcttctggatgtgtcttccagtcagcaggacctgagctcctggagtagcgctgacgagctcgacacttccggctctgtcagcccaacttcgggtcgttcaacgccgaataggcagaaaacacctagaggtaaatgtagcctgtcccagcccggtccttctgtgtcatcgccacatagcaggagcacaaaaggtggcagcgactctagtctgtctgaacccggtcctggacgctccggtagaggattcctgtttcgagtgctacgagccgctttaccattgcagcttctgctcctgctgttgattggcctcgcttgtctggtgcccatgagcgaagaggactattcttgtgctctgtcaaacaacttcgcacgttcattccaccctatgctgcgatatacaaacggcccaccgccacttta

SEQ ID NO: 226981 - DNA, 27436 bp, Artificial Sequence
  derived and/or modified sequence
cggccgccggccgcagcgggctgagattgttgtcctctgtcaccagggcggctgggctcccgcagtcctgcagaccgcgcccgatcccggcgacagggcgggcggacagccgcgcatccccggggtcccgccgagcctgggcgcagagagccgggaggaagcgttcgctcgcttcgccttgctgctgggaaactgaacgaggccgagagagaaggttcttgagttcatgtaagaggacagtcttaaaacggaagaagaaaaagaagcagttcagtctttgggagagctgcctccttgttgagtgctgcaaaggcctggaattcatttatgacagaatagatctagaaaagtccaagcatgttttctagagtggtgtagccctgtgctgcctccagtgaagagtctcttggtgttggcttcgtgcttccggagggaccatggcaacctccagaggggcctcccggtgtcctcgggatatcgccaatgtgatgcagaggctgcaagatgagcaagagatagtacaaaaacgaactttcacaaaatggatcaactctcatctggccaagcggaaacctccaatggtggtggacgatctttttgaagacatgaaagatggtgttaaactgcttgcccttctggaggtcctgtctgggcagaaactgccttgtgaacaaggacgccggatgaagcgaatccatgctgtggctaacattggcacggcactcaagttcctcgaaggaagaaagtccatgcacagaggatcaccgattaaattagtcaacattaactccaccgatatagctgatggccgaccctcaatagttcttggattgatgtggaccattattctatatttccagattgaagagttgaccagcaacctgccccagctccagtctttgtccagcagcgcatcctccgtggacagcatagttagctctgagactcccagcccaccaagtaaacggaaggtgaccaccaagatccaaggaaatgctaagaaggctttattaaagtgggttcagtacacagctggcaagcagactggaatagaagtaaaagattttgggaagagttggagaagcggggttgcctttcattcagttattcatgccattcgaccggaattggtggacttggagacagtgaaaggcagatccaaccgagaaaatttggaggatgctttcactatcgccgaaacagaactggggatcccaagactgctagatcctgaagacgttgatgtggataaaccagatgagaaatctattatgacctatgtagcccagtttctgaaacattatcctgacatccacaatgcaagcactgatgggcaagaggatgatgaaatacttccaggtttcccatcttttgcaaattctgtacaaaattttaagagagaagacagagtaatttttaaggaaatgaaagtttggatagaacaatttgagagagatttgacaagagcacagatggtggaatcaaatttacaggataaatatcagtcatttaagcacttcagagttcaatatgaaatgaagaggaaacagattgaacatttaatacaaccattacacagagacggtaaattgtcacttgaccaagcattggtaaaacaatcttgggatagagtgacctccaggctctttgactggcatatacagcttgataaatctcttcctgcacctctgggcaccataggtgcctggctgtacagagcggaggtggccctgagagaggaaataaccgttcaacaggtccacgaggaaacagcaaacacgatacaacggaaacttgagcaacataaggatctgcttcaaaacacggatgcccacaaaagagcattccatgaaatctaccggaccaggtctgttaacgggattccagtgccacctgatcaattagaggacatggccgagaggtttcattttgtttcctccacatcagagctacacctaatgaaaatggaatttttagaattaaagtaccgtctgctctcactgctggttcttgcagagtcaaagctgaagtcttggatcattaagtacgggaggagagagtcagtggagcagcttctacaaaactacgtgtcttttatagaaaatagcaagttctttgaacaatatgaggtgacataccagatcttgaaacagacagctgagatgtatgtcaaagcagatggttcagtggaagaagctgagaatgtgatgaaattcatgaatgaaaccaccgctcagtggaggaatctctcagtagaagtgaggagtgtgaggagcatgctggaagaagtgatctctaactgggatcgctatggcaatacagtggctagtctgcaagcctggctagaggatgctgaaaaaatgctcaatcaatcagaaaatgccaaaaaggatttttttcgaaatttacctcattggattcagcagcatactgccatgaacgatgctggcaattttctaattgaaacctgtgatgagatggtttcccgtgacctgaagcagcaattactgttgctaaatgggcggtggagggagttgtttatggaagtcaagcaatatgctcaagctgatgagatggacagaatgaagaaggaatacacagactgtgttgttaccctgtctgcttttgcaacggaagcccataagaaactttctgaacccttagaagtctcttttatgaatgtcaagctattaattcaagacttggaggatattgagcagagggtgcctgtgatggatgcccaatacaagataattacaaagacagcacacctcattaccaaagaaagcccccaagaagaaggaaaagaaatgtttgcgaccatgtcaaagctcaaagagcagctaaccaaggtcaaagaatgttactccccactcctttatgagtctcagcagctgttgattccgttggaggaattagaaaagcagatgacgtccttttatgactcacttgggaaaatcaatgaaattatcacagttcttgagcgtgaggcacaatcgagtgccctttttaaacaaaaacatcaggaactgttagcttgtcaagaaaactgtaagaaaaccttgacacttattgagaaaggcagtcaaagtgttcaaaagtttgtgaccttgagcaacgtgttaaagcattttgatcagacgaggctacaaagacagattgcagatattcatgttgcttttcagagtatggtaaagaaaactggagattggaagaagcatgtggaaaccaacagtcgcttgatgaagaagtttgaggagtctcgagcagagttggagaaggtactgcggattgctcaggagggcctggaggaaaagggggatccagaggagctcctgcggagacacactgagtttttcagtcagctggatcagagggtgctcaatgctttcctgaaagcttgtgatgaactcaccgacatccttccagagcaggagcagcaggggctgcaggaagctgttcgaaagctccacaaacaatggaaggatcttcaaggagaagccccttatcatttgcttcatctgaagattgatgtggagaagaataggttcttagcctctgtagaagaatgcagaactgagctggatcgagagaccaagctgatgccccaggaaggcagtgaaaagataattaaagagcacagggttttcttcagtgacaaaggtcctcatcatctctgtgagaaaaggttacagctcatcgaggaactctgtgtgaaactcccagtgcgggacccagtaagggacacacctggaacctgtcacgtgactctcaaagagctcagagctgccattgacagcacctacaggaagctcatggaagacccagacaagtggaaggactacactagcagattctctgagttctcatcttggatatctacaaatgagacacaattaaaggggatcaagggtgaggccatcgatactgccaaccacggagaggttaaacgtgccgttgaagagatcagaaatggtgttaccaaaaggggtgagaccctcagctggctgaaatccaggctgaaagttttgacagaagtttcttctgagaatgaagcccaaaagcagggagatgagctggcaaaattatccagctctttcaaggctcttgtgacgctgctgtcagaggttgaaaagatgctaagcaattttggggactgtgtccagtacaaagaaatagtcaaaaattctctcgaagaattaatttctggctctaaagaagtccaggaacaagctgagaagatcttggatactgaaaatctgtttgaagcacagcagttacttcttcatcaccagcaaaagacaaagcggatctcagcaaagaagagagatgtgcagcagcagatcgcgcaggcgcagcagggagaaggggggctgcctgaccgaggccacgaggagctgcggaagctggagagcacactggatggcctggagcgcagccgggagaggcaggaacgccgcatccaggtcacattaagaaaatgggagcgatttgaaacaaacaaagaaacagtagtaagatacctttttcaaacaggttccagtcatgaacgcttcttgagttttagcagtttggaaagtttatcttcagaactggaacaaacaaaggagttttctaaacggacagaaagtattgcagtccaggctgagaaccttgtaaaggaagcttcagagataccgcttgggccccaaaataagcagctgcttcaacagcaggccaagtcaatcaaagaacaagtcaaaaaattagaagacacgcttgaagaagatattaaaaccatggaaatggtgaaaaccaagtgggatcattttggcagtaattttgagactctgtccgtctggataactgagaaagaaaaagaactcaatgccttggaaacttcgtcatctgccatggacatgcaaatcagccaaattaaggtcacaattcaggaaatagaaagtaagctcagcagcattgtaggattagaagaagaagcccagtcttttgctcagtttgttaccactggagaatctgctcgaattaaagccaagttgacacaaataagaagatacggggaagagcttcgagagcatgcacagtgtctggaaggaacaatcctgggacatttatctcagcagcaaaagtttgaagagaaccttagaaagatccagcaatctgtgtctgaatttgaagataaacttgctgttccaattaaaatatgttcttcagctacagaaacatacaaagttcttcaagaacatatggatctctgccaggccctggagtcactgagcagcgcgatcactgccttctcagccagtgccaggaaggttgtgaacagagattcctgtgttcaggaggctgcggctctacagcagcaatacgaggacatcctaaggagggcgaaggagagacagacggcgctggagaatctgctggcccactggcagaggctagagaaagaactatcatcctttttgacctggttagagcggggtgaagctaaagccagttccccagaaatggacatttctgcagacagagtcaaagtggaaggtgaacttcagttaatacaggcactgcaaaatgaagttgtatcccaggcctcattctatagcaaacttttgcaattgaaggaatcattgttctcagtagcctccaaagatgatgtgaaaatgatgaaactacatttggagcagttggatgagagatggagagatttaccacagatcattaacaaaaggattaattttcttcagtctgtggttgctgaacaccagcaatttgatgagctgctgctttccttttctgtctggattaaactgtttctcagtgaattacaaactacctctgagattagcataatggaccatcaagtagcccttactcggcataaggaccacgcagcagaagtagagagcaaaaagggcgaattgcagagtctgcagggtcacttagcaaagttgggttctctgggccgtgctgaggacctccacctcctgcagggaaaggctgaggactgcttccagctgtttgaggaggccagccaggttgtggagaggcggcagcttgccctgtcccatttggcagaattcctccagagccatgcctctctgtccggcattctccgccagctgaggcaaacagtggaagcaaccaacagtatgaataagaacgagtctgatttgatagaaaaggacctcaatgatgctcttcaaaatgctaaagcattagaatctgctgccgtcagtctggatggcattctttccaaagcccaataccatctgaaaatcgggagctctgagcaaaggacttcctgcagagccacggctgatcagctctgtggagaggtagagaggatccagaaccttctgggaaccaagcagagtgaggcagatgctctggcagtgttgaaaaaagcattccaagaccagaaagaggagcttctgaaaagcattgaggacattgaagaaaggactgacaaagagcgattgaaagaacctacccgccaagctcttcagcagaggttaagagtgtttaatcagctagaagatgaattgaattctcacgagcatgaactatgttggttgaaagacaaagccaagcaaattgcccagaaagatgtagcttttgcacctgaagttgacagggagataaaccgcttagaggtcacctgggatgataccaaaagactaattcatgaaaatcagggtcagtgctgtggacttattgacttaatgagagaatatcagaacctgaaatcagctgtatctaaagtcttagaaaatgccagcagtgtgattgtaaccagaactaccataaaagatcaggaggatcttaaatgggctttttccaagcatgaaactgccaagaacaaaatgaattacaaacagaaagacttggataactttaccagcaaaggaaaacacttgttatctgagctgaagaaaattcacagtagtgatttcagcttggtgaaaacagacatggagagcaccgtggacaaatggctggatgtatcagagaaacttgaagaaaacatggataggctgagagtaagcctgtccatttgggatgatgtactgtcaactagagatgagattgagggatggtcaaacaactgcgttccacagatggcagaaaacatcagcaacctggataaccacctcagagctgaagaactgcttaaagaatttgagtctgaagttaaaaacaaagcattgagattggaagaactgcattccaaagttaatgatctgaaagaattaactaaaaatctagaaacaccgccagaccttcagtttatagaagcagacttaatgcagaaactggagcatgccaaagaaataactgaagtagcaaaaggaaccctgaaggatttcacggctcaaagtacacaagtggagaagtttattaatgacataacaacatggttcacaaaagtggaagaatcgttgatgaactgtgcccaaaatgagacttgtgaagcattgaaaaaagtcaaggatatacaaaaagaacttcaaagtcaacaaagcaacatcagctctacccaagaaaatctcaatagcttgtgccgcaagtaccactcagctgagttggagagcctgggccgtgcaatgactggtctgataaagaaacatgaagccgtgagccagttgtgctccaaaacccaggccagcctgcaggaatctctggaaaaacacttcagtgagtctatgcaggaattccaagaatggtttttgggagcaaaggcagcagcaaaagaatcatcagatcgcaccggtgacagcaaagttctagaagcaaagctccatgatcttcagaacattttggactcagtcagtgatgggcagagcaaacttgatgcagtgactcaagaaggacaaactttgtatgcacatttgtctaaacaaattgtcagtagcattcaagaacaaatcacaaaggccaatgaagagtttcaagcatttctgaaacaatgccttaaagataagcaggctcttcaagactgtgcttcagaacttggaagctttgaagatcagcacagaaaactgaacttatggatccatgaaatggaagaaaggttcaatacggaaaacttgggagagagtaaacagcacattcctgagaagaaaaatgaagttcataaagttgaaatgtttttgggagaactgctggctgcaagagagtctcttgataagctttcccagagagggcagcttctgagtgaagaaggccacggtgctgggcaggagggccgcctgtgttcccagctcctcacaagccaccagaacctacttagaatgaccaaagagaaactccggagctgccaggtggcccttcaggagcacgaagccctggaggaagcactgcaaagcatgtggttctgggtgaaggccattcaggacagactggcctgtgcagagagcactcttgggagcaaagacaccctggagaaacggctgtcacaaatacaggatattctcctgatgaaaggtgaaggggaagttaagttgaatatggccattggcaagggggaacaggccttgagaagtagcaacaaagaaggtcagagggtgattcagactcagttagagacccttaaagaagtgtgggctgacatcatgagctcctccgtccacgctcaaagcactttagagtctgtgattagccaatggaatgactatgtagagaggaaaaaccagttggagcagtggatggaatcagtggatcaaaaaatagaacatcccttacaaccacagccaggtctgaaagagaagttcgtcctgcttgaccacctccagtccatcctgtctgaggcagaagatcacacgagagcccttcaccgtctaattgcgaagtccagggagctctacgaaaagacagaggatgagtctttcaaggacacagctcaagaggagctgaaaacacagtttaatgatataatgactgttgccaaggaaaaaatgaggaaagtggaagagattgtgaaagatcatctaatgtatttagatgcggtccacgagttcacagattggctccattcagcaaaggaagaacttcaccggtggtcagatatgtctggagattcatcagccacccagaaaaagttatcaaaaattaaggagctgatagattccagagagattggtgcaagccgtctcagcagagtggagtcgctggctcccgaagtgaaacagaacacaactgccagtgggtgtgagctcatgcacacggagatgcaggccctgcgtgccgactggaagcagtgggaagacagtgtattccaaacgcagagctgtttggagaacctggtcagccagatggccctttcggagcaggaattctcaggccaagtggctcaactggagcaggccctggaacagttcagtgcccttctgaaaacctgggctcagcagttaaccctcctggaaggcaagaacacggatgaggagatagtggaatgctggcacaaaggacaagagatactggatgctttgcaaaaagcagagcctagaacagaggatctcaagtctcagctgaatgaactttgtcgattttccagagacctgagtacctacagtggaaaagtttctggcttgattaaagagtataattgtctttgtttgcaagcatccaagggctgccagaataaagaacagattttacagcaaagatttcgaaaggccttcagggatttccagcagtggttggttaatgcaaaaatcactaccgccaagtgttttgatatacctcaaaatataagtgaagtttcaactagtcttcagaaaatacaggagtttttgtcagaaagtgaaaatggacagcacaagctaaacatgatgctgtctaaaggggaacttctgagtaccctgctgaccaaagagaaagcgaaagggatccaggccaaagttacagctgcaaaagaagattggaaaaattttcattcaaatctccaccaaaaagaatctgctctagagaatctaaagatccaaatgaaggactttgaagtaagtgctgagcctatccaggactggctgagtaaaactgagaagatggtccatgaaagcagcaatcgcctctatgatctgccagcaaagaggagggagcagcagaagctccagtctgtccttgaggaaatacactgctacgagcctcagctcaacaggctgaaagagaaagctcagcagctgtgggaaggacaagctgccagcaagagctttaggcacagagtgtcgcagctgtcttctcagtatctagcgctaagcaatttaacaaaggagaaagtgtcaagactggatagaatcgttgcagaacacaatcagttctctcttgggattaaagaattacaagactggatgacggatgcgattcacatgctggattcatactgccacccgacatccgacaaaagtgtgctggacagcaggacgctcaagctcgaggctctattatcagtcaaacaggaaaaagagattcagatgaaaatgatagtgaccaggggagaatctgtccttcagaatacttctccagaaggcattcccactattcagcagcagctgcagagtgtgaaggatatgtgggcatcccttttgtctgcagggattcgttgtaaaagccaactcgaaggagctctctccaagtggacaagttatcaggatggcgttcgacagttctccggttggatggatagtatggaagccaacctgaatgaatcagaaaggcagcatgcggagctgcgggataaaacaacgatgctcggaaaagccaagttattaaatgaagaagtgctgagttacagcagcttgctggagaccatcgaagtcaaaggggctggcatgacagaacactatgtcacccagctagaactccaggatctacaggaacgatacagagccatccaagagagggccaaggaagccgtaaccaagtctgaaaaacttgtccgcctgcaccaagagtatcagagagacctaaaggcatttgaagtttggttggggcaagaacaagaaaagctcgaccagtattcagttcttgaaggtgatgcccacactcatgagacaacattgcgtgatcttcaggagctacaggtacactgtgcagaggggcaggccctgttgaactcagtgctgcacaccagagaggatgtgatcccatcaggtatcccacaggcagaggaccgggctttagagtctctccggcaagactggcaggcttaccagcacaggctgtccgagactcgaactcagttcaataacgtggtgaacaaattgaggctaatggagcaaaagtttcagcaagtagatgaatggctcaaaacagcagaggagaaaaagtggcacgaagaagtgactgcatacagagatgaagttgaggaagtgggagctagagctcaggagatactggacgagagccacgtgaacagcagaatgggttgccaggccacccagctgacttccagataccaggccctgcttctccaagtgctggaacaaataaaattcctggaggaggagattcagagtttggaggaatcagaatcatccctcagttcctattctgattggtatggctctactcataaaaacttcaagaatgtggctaccaagattgacaaagtagatacagtaatgatggggaagaaattgaagacgttggaggttttgctcaaagacatggagaaaggtcacagtttgctgaaatcagcccgggagaaaggagagagggctgttaaatacttggaggaaggcgaggcagagaggttaagaaaggagattcatgatcacatggagcagttgaaggaactgaccagcactgtccggaaagaacacatgacgctggaaaaaggtcttcatttagcaaaggaattctcagataaatgcaaagcactgacacagtggatagcagaataccaggaaattctacatgttcctgaagaacccaaaatggaattatatgagaaaaaagctcagttatctaaatacaagtcacttcaacaaacggtgctgtcccatgaaccatcagtaaagtcagtgagagagaagggtgaagctcttttggaactggtgcaggacgtcactttaaaggacaaaatagatcaacttcaaagtgattaccaggacctgtgcagcataggaaaggcaatgatggaagaaattgctggttttgaagaccgtttgaacaatcttcaaatgaaaggtgatactttgattggccaatgtgcagaccacctgcaagcgaaacttaaacaaaacgtgcatgctcatctgcagggcacaaaggacagctactcagcgatctgcagcacagctcagaggatgtaccagagtttggaacacgaacttcagaagcacgtcagccgacaagacaccctgcagcagtgccaggcctggctttctgcagtccagccggatttagagccaagtcctcaaccacctcttagtagggcagaagccattaagcaggtcaaacacttcagagctttgcaagagcaggcaaggacctacctagatctcctttgctccatgtgtgacctgtcaaatgcttcggtgaaaaccacagcaaaagacattcaacaaacagagcaaacgattgaacaaaagcttgtccaggcccagaacttaactcagggctgggaagagatcaagcacctgaagtctgagctctggatttacctgcaagatgctgatcagcaactgcagaacatgaagaggaggcactctgagctggagctgaacattgcacagaacatggtttcacaagttaaggattttgttaagaaactacagagcaaacaggcatccgtgaacaccataatagaaaaggtgaataagttaacaaagaaggaggaatcgcctgaacacaaggaaataaatcatttaaatgatcagtggctcgatttgtgccgtcagtctaacaacctgtgcttgcaaagggaagaggatcttcagagaacaagagattaccatgactgtatgaatgttgttgaagtgttcctagaaaaatttactacagaatgggataacttggccagatctgatgcagagagtacagctgtccacctggaagctttgaaaaagttagcattggcattgcaggagagaaagtatgctattgaagatctgaaagatcaaaagcagaaaatgatagagcatctgaatttagatgacaaggagttagtcaaagaacagacgagtcatttagagcaacgttggtttcagcttgaggacctcattaaaaggaaaatccaagtgtcagtcaccaacttggaggagttaaatgtggtgcagtccagatttcaggagctaatggagtgggcagaagagcaacaacccaacatcgccgaggcccttaagcagagccctcctccagatatggctcagaaccttctcatggatcacctggccatctgcagtgaactggaggccaagcagatgctcctgaaatcgcttataaaggacgcagacagggtcatggcagatcttggtctcaatgagcgacaggtcatccagaaggctctctctgatgcacaaagccacgtgaattgtctcagtgacttagtgggccagcgaagaaagtacttaaacaaagccttgtccgagaaaacccagtttctcatggcagtgttccaggccaccagccaaattcagcaacatgagcgaaagataatgttccgtgaacacatctgtctgttaccagatgatgtgagcaaacaagtcaaaacatgtaagagtgcacaagccagcctcaagacttaccaaaatgaagtcactggactttgggcccagggtcgcgaactaatgaaggaagtcacagagcaggaaaagagtgaagtgctggggaagcttcaggaattgcagagtgtctatgacagtgttttacaaaagtgcagtcaccggttacaagaactagagaagaatttggtttctaggaagcattttaaggaagattttgataaagcttgccactggctaaaacaagcagatattgttacatttcctgaaatcaacctaatgaatgagagttctgagcttcatacacaactggctaaataccaaaacattcttgaacaatctccagaatatgaaaatcttctacttacgctgcagagaactgggcagaccatattaccatcgctgaatgaagtcgatcattcctacctcagtgaaaagctaaatgctttgcctcgacaatttaatgtaattgttgccttggctaaagacaagttctataaagtccaggaagcaattcttgctcggaaggaatatgcttccttgattgagttgacaacccagtctctgagtgaacttgaagcccaattcttgaggatgagcaaagttcccaccgacctggccgttgaggaggctctttctctgcaagatggttgcagagccattctggacgaggtggcgggccttggggaggcggtggatgaactgaaccagaaaaaagaaggttttcgcagcacaggtcagccttggcagccagacaagatgctgcaccttgtcaccttatatcacaggctgaagcgacaaacagaacagagggttagcttattagaagacaccaccagtgcttaccaagaacacgagaagatgtgccaacagctggagagacaactgaagtctgtaaaagaggagcagtccaaagtgaatgaggaaacgctgcctgcagaggagaagctcaaaatgtatcactccctggcaggaagtctccaggactcagggattgtactgaaacgagtaaccatacatcttgaagatcttgccccacaccttgaccccttggcttatgagaaagccaggcatcagatccagtcctggcaaggggagttaaaactgttgacttctgccattggtgagacggtgacagaatgtgagagccgaatggtgcagagtatagacttccagactgagatgagtcgctccctggactggctgaggagagtgaaggcagagctcagtgggccggtgtacctagacctcaacctgcaggacatccaagaggaaatcagaaaaatccaaattcatcaggaagaggtccagtccagcttgagaatcatgaatgcgctgagtcacaaggaaaaggagaagttcacaaaggccaaggagctgatttctgcggatttagaacacagcctcgctgagctctcagagctggatggagacatccaggaagccttacgcaccagacaggctaccttgactgaaatatatagccagtgtcaaaggtattatcaggtatttcaagcagccaatgactggcttgaggatgcccaagaattgttacagctggcaggcaatggcctagacgtggagagcgcagaggaaaatctcaaaagccacatggaatttttcagtacagaggatcagttccatagtaacctggaggagctccacagcctggtagccaccctggacccactcatcaagccaaccggcaaagaagacctagaacagaaagtggcttctctggaactcaggagccagaggatgagccgggactctggtgcccaagtggatctcttgcagagatgcacagctcaatggcacgattaccagaaagcaagggaagaggttattgaattgatgaatgatacagaaaagaaattgtctgagttttctttgttgaagacttcgtctagtcatgaagcggaagaaaaattgtcagaacacaaggctttagtgtcagtggttaactctttccatgagaaaattgtggcccttgaggaaaaagcttcacaactggagaaaaccggaaatgatgccagcaaagccaccctgagcaggtcaatgaccaccgtctggcagcgctggacacgccttcgagctgtggcccaggaccaggagaagatcctggaagatgcagtggatgagtggacgggctttaacaacaaggttaaaaaggccactgaaatgattgatcagctgcaagataagttacctggaagttcagcagagaaagcatcgaaagcagagctcttaactcttcttgaataccacgacacgttcgttctggagctggagcagcagcagtcggccttgggcatgctgcggcagcaaaccctgagcatgctccaggatggagccgccccaacccctggggaagagcctccgctcatgcaggaaatcaccgccatgcaagatcggtgcctgaacatgcaggagaaagtgaagactaatggaaagttggtgaagcaagagctgaaggaccgagaaatggtggagactcagatcaattctgtgaaatgttgggttcaggaaacgaaagaatatttagggaatccaacaatagaaatagatgctcaacttgaagaacttcagattctcctaacagaagccacaaatcaccgacagaacattgaaaaaatggcagaagaacagaaggagaagtacttaggtctttataccatattaccttctgaactctcccttcagttggctgaagtggcgttagatctaaagatccgagatcagatccaagacaaaataaaagaagttgagcagagcaaggccacgagccaggaactcagccggcaaattcagaagttagctaaagacctcacaactattctaactaagctgaaagcgaagacagataatgtagttcaagctaaaactgaccaaaaggtgctgggagaggaattagatggctgtaattcaaagttaatggaattagatgcagcagtacagaaattcttggaacagaatggccaactgggtaagccactggccaagaagataggaaaactgactgaacttcaccagcagaccattagacaagctgagaatcggctctccaagctcaatcaggcagcatcacatttagaagaatacaatgaaatgcttgaattaattttgaagtggattgaaaaagctaaagtcttggctcatggaactattgcatggaattctgcaagccagcttcgggaacaatatattttgcatcagaccctgctagaagaatccaaagaaattgacagtgagctggaagcaatgactgagaaattacagtacctcactagcgtgtactgtacagaaaaaatgtctcagcaagtggcagaactgggacgggagactgaggagttgcgacagatgatcaaaattcgtttgcagaacctccaagatgcagctaaggatatgaaaaaatttgaagcagagttgaaaaagttacaagctgccttggagcaagcccaggcaacactgacttctccagaagttggacgtctcagtctcaaggagcagctctctcatcggcagcatttgttgtctgagatggagtcactgaagccgaaggtgcaagcagtgcagctctgccagagtgccctccggatccccgaggatgtggttgccagcttacctctctgtcatgctgctctgcggctgcaggaagaggccagccggctgcagcacaccgccatccagcagtgtaacatcatgcaggcagctgtggtacaatatgaacaatatgagcaagaaatgaaacatctccagcaactgatagaaggagctcacagagagattgaggataaacctgttgccaccagtaacatacaggagctgcaggctcagatttctcggcatgaggagctggcgcagaaaattaagggctaccaggagcagatcgcttctttgaattccaagtgcaagatgctgacgatgaaagccaagcacgccaccatgctgctgacggtgaccgaggtcgaggggctggcggaagggacagaggacctggatggggagctcctccccacgccttcggcccacccctctgtggtcatgatgactgcaggtcgctgtcacactttgctgtcaccggtcactgaggagtctggggaggagggaaccaacagtgagatttcctctccacctgcctgtcgctccccttcacctgtggctaatacagatgcttctgttaaccaggacattgcatattaccaagccttgtctgctgagaggttgcagacagatgctgcaaaaattcaccccagcacatccgcatcccaggagttctatgaaccgggattggagccatccgctactgccaaactgggtgatttgcagcgttcttgggaaaccttaaagaatgtgatcagtgagaagcagcgcacactctatgaagctttggaacgccagcagaagtaccaggactccctccagtccatctctacgaagatggaggccattgagctgaaactcagtgagagcccagagcctggcaggagtccagaaagccagatggctgaacatcaggcattgatggatgagattctcatgctccaggatgaaatcaatgagctccagtcctctctcgcagaggagctggtatccgagtcttgtgaggccgaccctgcggagcagctggccttgcagtccacgctcactgtcttagccgagcgaatgtccaccatcaggatgaaagcctcggggaaacggcagcttttggaggagaagttgaatgatcagctggaggaacaaaggcaggaacaggccctgcagaggtatcgctgtgaagccgatgagctggacagctggctcttgagtaccaaggccactctggacactgcgctgagtccacccaaggagcccatggacatggaggcccagcttatggactgccagaatatgctggtggaaatagagcagaaggtggtggctttatcagaactgtcagtccacaatgagaacctgctgctggagggcaaagctcacaccaaggacgaggccgagcagctggctggaaagctgagaaggctcaaggggagcctgctggagctgcagagagccctgcatgataagcagctcaacatgcagggaacagcacaggagaaggaggagagcgatgttgacctaacagccacgcagagccccggcgtccaggaatggctggcccaagctcgcaccacatggacccagcagcggcagagcagtctccagcaacaaaaagagttagaacaggaattagccgagcagaagagtctccttcgctcagtagccagtcgtggagaggagattctaattcaacattcggcggcagagacctctggtgatgctggcgaaaaacctgatgtgttatcccaggagttggggatggaaggggagaaatcatccgctgaagaccagatgagaatgaaatgggaaagcctacatcaagaatttagtaccaagcagaaactactacagaatgttctggaacaggaacaagagcaagtgctttatagcaggccaaatcgactcttgtctggtgtgccactgtacaaaggggacgtgccaacccaagataaatctgcagttacatctttgctggatggactgaaccaagccttcgaggaggtttcatcccagagtggaggggcaaagaggcagagtatacacttggagcagaagttgtatgatggagtctcagccacctctacttggttggatgacgttgaagaacgtttatttgttgccacagcacttttaccagaagaaacagagacttgtctcttcaaccaagagattcttgccaaagacattaaggaaatgtctgaagaaatggataagaacaaaaacttgttttcccaagcttttccagagaatggtgataatcgagatgttattgaagatactttgggttgtcttttgggcaggttatccttgctagactcagtagtgaatcaacgatgtcatcagatgaaagaaagacttcagcaaatactaaatttccagaatgatctgaaagtgctgtttacatcactggctgacaacaaatacatcattctgcaaaaactggcaaatgtgtttgaacagcccgtagcagaacaaatagaggcaatacaacaggctgaagatggactcaaagaatttgatgcaggaatcattgaattaaagaggcgtggtgacaagctacaggtcgagcagccgtccatgcaagaactctccaagctccaggacatgtatgatgagctgatgatgatcattggctcccggaggagtggtctgaatcagaaccttacactcaagagtcagtatgagagggccctacaagatctggctgacctgctagaaactggtcaggagaagatggcaggagaccagaaaatcatcgtgtcttccaaagaggaaatccagcaactacttgacaaacataaggaatactttcagggcctggaatctcatatgatcttgactgaaacactcttcagaaagataatcagctttgcagtccaaaaggaaacccagttccatacagagctgatggctcaggcttctgctgtactgaaacgggctcacaagaggggtgtggagctggagtacattctagagacgtggtcccatctggatgaggaccagcaggagctcagcagacagctggaggtggtggaaagcagcatcccaagcgtgggtctggtggaggagaacgaggacaggcttattgaccgcataacactctaccagcatttaaaatctagccttaatgaataccagcccaaattatatcaagtattagatgatgggaaacgacttctgatatccatcagctgctcagatctagaaagccaactaaatcaacttggagagtgctggctaagtaacaccaataaaatgtctaaggaacttcacagactggaaacaatattgaaacactggaccagatatcaaagtgaatctgcagatctaattcactggttacaatctgcaaaagaccggctagaattttggactcagcaatctgtgacagtcccacaagagctggaaatggtccgtgatcatctaaatgctttcctggagttttctaaagaagtggatgcccaatcttccctgaaatcatctgttctgagtactggaaatcagctccttcgactaaaaaaggtggacacagccacgctgcgctctgagctgtcgcgcattgatagccagtggactgacctgctaaccaatatcccagccgtccaggagaagctccaccagctccagatggataaactgccttcccgccatgccatttctgaagtcatgagttggatttctctaatggaaaatgttattcagaaggatgaagataatattaaaaattccataggttacaaggcaattcatgaataccttcagaaatataagggttttaagatagacattaactgtaaacagctgacagtggattttgtgaaccagtccgtgctacaaatcagcagtcaggatgtggaaagtaagcgtagtgataagactgattttgctgagcaacttggagcaatgaataaaagttggcaaattctgcaaggtctagtaactgagaagatccagctgttggaaggcttattggaatcttggtcagaatatgaaaataatgtacaatgtctgaaaacatggtttgaaacccaggaaaagagactaaaacaacagcatcgaattggagatcaggcttctgttcaaaatgcactgaaagactgtcaggatctggaagatttgattaaagcaaaagaaaaagaagtagagaaaattgagcagaatggacttgctttgattcagaacaagaaagaagacgtctctagcattgtcatgagcacactgcgagagctcggccaaacctgggcaaatttagatcacatggttggacaattaaagatactgctgaaatcagtgcttgaccaatggagtagtcacaaagtggcctttgacaagataaacagttacctcatggaggccagatactctctttcccgattccgtctgctgactggctccttagaagctgtgcaagttcaggtggacaatcttcagaatctccaagatgatctggaaaaacaggaaaggagcttacagaaatttggctctatcaccaaccaattattaaaagagtgtcacccacccgtgacagaaactcttaccaatacactgaaagaagtcaacatgagatggaataacttgctggaagagattgctgagcagctacagtccagcaaggccctacttcagctttggcaaagatacaaggactactccaaacagtgtgcttcgacagttcagcagcaggaggatcgaaccaatgagctgttgaaggcagccacaaacaaggacattgccgatgatgaggttgccacatggattcaagattgcaacgacctcctcaaaggactgggcacagttaaagattccctcttttttctccatgagctgggagagcaactgaagcaacaagtggatgcttccgcagcatcagctattcaatcggatcaactctctttgagtcaacacttgtgtgccctggagcaagctctctgcaaacagcagacttcattacaggctggagttcttgattatgaaacctttgccaagagtttagaagctttggaggcctggatagtggaagctgaagaaatactacaagggcaggaccctagccactcatctgacctctccacaatccaggaaaggatggaagaacttaagggacagatgttaaaattcagcagcatggctccagatttagaccgtctaaatgagcttggatataggttacccttgaatgataaggaaatcaaaagaatgcagaatctgaaccgccattggtctctgatctcctctcagactacagaaagattcagcaagttgcagtcatttttgctacaacatcagactttcttggaaaaatgtgaaacatggatggaattcctagttcagacagaacaaaagttagcagtagagatttcaggaaattatcagcaccttttggaacagcagagagcacacgagttgtttcaagccgagatgttcagtcgtcagcagattttgcactcaatcattattgatgggcaacgtcttctagaacaaggtcaagttgatgacagggatgaattcaacctgaaattgacactcctcagtaatcaatggcagggagtgattcgcagggcccagcagaggcgggggatcattgacagccagattcgccagtggcagcgctatagggagatggcagaaaagcttcgtaaatggttggttgaagtgtcctacctccccatgagtggtctcggaagtgttcctataccactgcaacaagcaaggaccctctttgatgaagtgcagttcaaagaaaaagtgtttctgcggcaacaaggcagctacatcctgactgtggaggctggcaagcaactccttctctcggcggacagtggcgctgaggccgccttgcaggccgaactcgctgaaatccaagagaaatggaaatcagccagcatgcggctggaagaacagaagaaaaaactagccttcttgttgaaagactgggaaaaatgtgagaaaggaatagcagattccctggagaaactacgaactttcaaaaagaagctttcgcagtctctcccggatcaccatgaagagctccatgcagaacaaatgcgttgcaaggaattagaaaatgcagttgggagctggacagatgacttgacccagttgagcctgctgaaggacaccctctctgcctatatcagtgctgatgatatctccattcttaatgaacgcgtagagcttctgcaaaggcagtgggaagaactatgccaccagctctccttaaggcggcagcaaataggtgaaagattgaatgaatgggcagtcttcagtgaaaagaacaaggaactctgtgagtggttgactcaaatggaaagcaaagtttctcagaatggagacattctcattgaagaaatgatagagaagctcaagaaggattatcaagaggaaattgctattgctcaagagaacaaaatacagctccaacaaatgggagaacgacttgctaaagccagccatgaaagcaaagcatctgagattgaatacaagctgggaaaggtcaacgaccggtggcagcatctcctggacctcattgcagccagggtgaagaagctgaaggagaccctggtagccgtgcagcagcttgataagaacatgagcagcctgaggacctggctcgctcacatcgagtcagagctggccaagccaatagtctacgattcctgtaactcggaagaaatacagagaaagcttaatgagcagcaggagcttcagagagacatagagaagcacagtacaggtgttgcatctgtcctcaacctgtgtgaagtcctgctgcacgactgtgacgcctgtgccactgatgccgagtgtgactctatacagcaggctacgagaaacctggaccggcggtggagaaacatttgtgctatgtccatggaaaggaggctgaaaatcgaagagacgtggcgattgtggcagaaatttctggatgactattcacgttttgaagattggctgaagtcttcagaaaggacagctgcttttcccagctcttctggggtgatctatacagttgccaaggaagaactaaagaaatttgaggctttccagcgacaggtccacgagtgcctgacgcagctggaactgatcaacaagcagtaccgccgcctggccagggagaaccgcactgattcagcatgtagcctcaaacagatggttcacgaaggcaaccagagatgggacaacctgcaaaagcgtgtcacctccatcttgcgcagactcaagcattttattggccagcgtgaggagtttgagactgcgcgggacagcattctggtctggctcacagagatggatctgcagctcactaatattgaacatttttctgagtgtgatgttcaagctaaaataaagcaactcaaggccttccagcaggaaatttcactgaaccacaataagattgagcagataattgcccaaggagaacagctgatagaaaagagtgagcccttggatgcagcgatcatcgaggaggaactagatgagctccgacggtactgccaggaggtcttcgggcgtgtggaaagataccataagaaactgatccgcctgcctctcccagacgatgagcacgacctctcagacagggagctggagctggaagactctgcagctctgtcggacctgcactggcacgaccgctctgcagacagcctgctttctccacagccttcctccaatctctccctctcgctcgctcagcccctccggagcgagcggtcaggacgagacaccccggctagtgtggactccatccccctggagtgggatcacgactatgacctcagtcgggacctggagtctgcaatgtccagagctctgccctctgaggatgaagaaggtcaggatgacaaagatttctacctccggggagctgttggcttatcagatgtaatgatccccgaaagccctgaggcctatgtaaaactcacagaaaatgcaatcaaaaatacctccggggaccacagtgccctagagtcacagatccgacaactgggcaaagccctggatgatagccgttttcagatacagcaaaccgaaaatatcattcgcagcaaaactcccacggggccggagctagacaccagctacaaaggctacatgaaactgctgggcgaatgcagtagcagtatagactccgtgaagagactggagcacaaactgaaggaggaagaggagagccttcctggctttgttaacctgcatagtaccgaaacccaaacggctggtgtgattgaccgatgggagcttctccaggcccaggcattgagcaaggagttgaggatgaagcagaacctccagaagtggcagcagtttaactcagacttgaacagcatctgggcctggctgggggacacggaggaggagttggaacagctccagcgtctggaactcagcactgacatccagaccatcgagctccagatcaaaaagctcaaggagctccagaaagctgtggaccaccgcaaagccatcatcctctccatcaatctctgcagccctgagttcacccaggctgacagcaaggagagccgggacctgcaggatcgcttgtcgcagatgaatgggcgctgggaccgagtgtgctctctgctggaggagtggcggggcctgctgcaggatgccctgatgcagtgccagggtttccatgaaatgagccatggtttgcttcttatgctggagaacattgacagaaggaaaaatgaaattgtccctattgattctaaccttgatgcagagatacttcaggaccatcacaaacagcttatgcaaataaagcatgagctgttggaatcccaactcagagtagcctctttgcaagacatgtcttgccaactactggtgaatgctgaaggaacagactgtttagaagccaaagaaaaagtccatgttattggaaatcggctcaaacttctcttgaaggaggtcagtcgtcatatcaaggaactggagaagttattagacgtgtcaagtagtcagcaggatttgtcttcctggtcttctgctgatgaactggacacctcagggtctgtgagtcccacatcaggaaggagcaccccaaacagacagaaaacgccacgaggcaagtgtagtctctcacagcctggaccctctgtcagcagtccacatagcaggtccacaaaaggtggctccgattcctccctttctgagccagggccaggtcggtccggccgcggcttcctgttcagagtcctccgagcagctcttccccttcagcttctcctgctcctcctcatcgggcttgcctgccttgtaccaatgtcagaggaagactacagctgtgccctctccaacaactttgcccggtcattccaccccatgctcagatacacgaatggccctcctccactctgaactaagcagatgccatctgcagaagtgctggtagcataaggaggatcgggtcataagcaatcccaaactaccaacaagaggaccttgatcttggcgaaagccctcggtgtggcagctttagccctcctccagatcacatgtgtgcaaattatggcttcagaggtggaagataaacagtgacgggggaacaaacagacaacaagaaggtttggaagaaatctggtttgagactctgaaccttagcactaaggagattgagtaaggacctccaaagttccccggactcatgaattctgggcccttggcccattctgtgcacagccaaggacttcagtagaccatctgggcagctttcccatggtgctgctccaaccatcagataaatgaccctcccaagcaccatgtcagtgtcgtacaatctaccaaccaaccagtgctgaagagattttagaaccttgtaacatacaatttttaagagcttatatggcagcttcctttttaccttgttttcctttggggcatgatgttttaacctttgctttagaagcacaagctgtaaatctaaaaggcacttttttttagaggtataaagaaaaactagatgtaataaataagatcatggaaggctttatgtgaaaaaagttgaatgttatagtaaaaaaaaaaagatatttatgtatgtacagtttgctaaagccaagttttgtttgtattgatttctttgcatttattatagatattataaaata

SEQ ID NO: 226982 - DNA, 27601 bp, Artificial Sequence
  derived and/or modified sequence
cccgggcagtggaaaccgtgggcaaaagttagctggcaggacagcgcagctcctccaggcagcggaggcagcgcgtcccggctctcagggacatttccttcccacctcgacccccgggaggtggtcccggtataaaggctcgctgagcgggtgggtcacagcacagctttgcagctgcggagaaacgcccaaggccgtgcatctccaggagggcggctgggctcccgcagtcctgcagaccgcgcccgatcccggcgacagggcgggcggacagccgcgcatccccggggtcccgccgagcctgggcgcagagagccgggaggaagcgttcgctcgcttcgccttgctgctgggaaactgaacgaggccgagagagaaggttcttgagttcatgtaagaggacagtcttaaaacggaagaagaaaaagaagcagttcagtctttgggagagctgcctccttgttgagtgctgcaaaggcctggaattcatttatgacagaatagatctagaaaagtccaagcatgttttctagagtggtgtagccctgtgctgcctccagtgaagagtctcttggtgttggcttcgtgcttccggagggaccatggcaacctccagaggggcctcccggtgtcctcgggatatcgccaatgtgatgcagaggctgcaagatgagcaagagatagtacaaaaacgaactttcacaaaatggatcaactctcatctggccaagcggaaacctccaatggtggtggacgatctttttgaagacatgaaagatggtgttaaactgcttgcccttctggaggtcctgtctgggcagaaactgccttgtgaacaaggacgccggatgaagcgaatccatgctgtggctaacattggcacggcactcaagttcctcgaaggaagaaagtccatgcacagaggatcaccgattaaattagtcaacattaactccaccgatatagctgatggccgaccctcaatagttcttggattgatgtggaccattattctatatttccagattgaagagttgaccagcaacctgccccagctccagtctttgtccagcagcgcatcctccgtggacagcatagttagctctgagactcccagcccaccaagtaaacggaaggtgaccaccaagatccaaggaaatgctaagaaggctttattaaagtgggttcagtacacagctggcaagcagactggaatagaagtaaaagattttgggaagagttggagaagcggggttgcctttcattcagttattcatgccattcgaccggaattggtggacttggagacagtgaaaggcagatccaaccgagaaaatttggaggatgctttcactatcgccgaaacagaactggggatcccaagactgctagatcctgaagacgttgatgtggataaaccagatgagaaatctattatgacctatgtagcccagtttctgaaacattatcctgacatccacaatgcaagcactgatgggcaagaggatgatgaaatacttccaggtttcccatcttttgcaaattctgtacaaaattttaagagagaagacagagtaatttttaaggaaatgaaagtttggatagaacaatttgagagagatttgacaagagcacagatggtggaatcaaatttacaggataaatatcagtcatttaagcacttcagagttcaatatgaaatgaagaggaaacagattgaacatttaatacaaccattacacagagacggtaaattgtcacttgaccaagcattggtaaaacaatcttgggatagagtgacctccaggctctttgactggcatatacagcttgataaatctcttcctgcacctctgggcaccataggtgcctggctgtacagagcggaggtggccctgagagaggaaataaccgttcaacaggtccacgaggaaacagcaaacacgatacaacggaaacttgagcaacataaggatctgcttcaaaacacggatgcccacaaaagagcattccatgaaatctaccggaccaggtctgttaacgggattccagtgccacctgatcaattagaggacatggccgagaggtttcattttgtttcctccacatcagagctacacctaatgaaaatggaatttttagaattaaagtaccgtctgctctcactgctggttcttgcagagtcaaagctgaagtcttggatcattaagtacgggaggagagagtcagtggagcagcttctacaaaactacgtgtcttttatagaaaatagcaagttctttgaacaatatgaggtgacataccagatcttgaaacagacagctgagatgtatgtcaaagcagatggttcagtggaagaagctgagaatgtgatgaaattcatgaatgaaaccaccgctcagtggaggaatctctcagtagaagtgaggagtgtgaggagcatgctggaagaagtgatctctaactgggatcgctatggcaatacagtggctagtctgcaagcctggctagaggatgctgaaaaaatgctcaatcaatcagaaaatgccaaaaaggatttttttcgaaatttacctcattggattcagcagcatactgccatgaacgatgctggcaattttctaattgaaacctgtgatgagatggtttcccgtgacctgaagcagcaattactgttgctaaatgggcggtggagggagttgtttatggaagtcaagcaatatgctcaagctgatgagatggacagaatgaagaaggaatacacagactgtgttgttaccctgtctgcttttgcaacggaagcccataagaaactttctgaacccttagaagtctcttttatgaatgtcaagctattaattcaagacttggaggatattgagcagagggtgcctgtgatggatgcccaatacaagataattacaaagacagcacacctcattaccaaagaaagcccccaagaagaaggaaaagaaatgtttgcgaccatgtcaaagctcaaagagcagctaaccaaggtcaaagaatgttactccccactcctttatgagtctcagcagctgttgattccgttggaggaattagaaaagcagatgacgtccttttatgactcacttgggaaaatcaatgaaattatcacagttcttgagcgtgaggcacaatcgagtgccctttttaaacaaaaacatcaggaactgttagcttgtcaagaaaactgtaagaaaaccttgacacttattgagaaaggcagtcaaagtgttcaaaagtttgtgaccttgagcaacgtgttaaagcattttgatcagacgaggctacaaagacagattgcagatattcatgttgcttttcagagtatggtaaagaaaactggagattggaagaagcatgtggaaaccaacagtcgcttgatgaagaagtttgaggagtctcgagcagagttggagaaggtactgcggattgctcaggagggcctggaggaaaagggggatccagaggagctcctgcggagacacactgagtttttcagtcagctggatcagagggtgctcaatgctttcctgaaagcttgtgatgaactcaccgacatccttccagagcaggagcagcaggggctgcaggaagctgttcgaaagctccacaaacaatggaaggatcttcaaggagaagccccttatcatttgcttcatctgaagattgatgtggagaagaataggttcttagcctctgtagaagaatgcagaactgagctggatcgagagaccaagctgatgccccaggaaggcagtgaaaagataattaaagagcacagggttttcttcagtgacaaaggtcctcatcatctctgtgagaaaaggttacagctcatcgaggaactctgtgtgaaactcccagtgcgggacccagtaagggacacacctggaacctgtcacgtgactctcaaagagctcagagctgccattgacagcacctacaggaagctcatggaagacccagacaagtggaaggactacactagcagattctctgagttctcatcttggatatctacaaatgagacacaattaaaggggatcaagggtgaggccatcgatactgccaaccacggagaggttaaacgtgccgttgaagagatcagaaatggtgttaccaaaaggggtgagaccctcagctggctgaaatccaggctgaaagttttgacagaagtttcttctgagaatgaagcccaaaagcagggagatgagctggcaaaattatccagctctttcaaggctcttgtgacgctgctgtcagaggttgaaaagatgctaagcaattttggggactgtgtccagtacaaagaaatagtcaaaaattctctcgaagaattaatttctggctctaaagaagtccaggaacaagctgagaagatcttggatactgaaaatctgtttgaagcacagcagttacttcttcatcaccagcaaaagacaaagcggatctcagcaaagaagagagatgtgcagcagcagatcgcgcaggcgcagcagggagaaggggggctgcctgaccgaggccacgaggagctgcggaagctggagagcacactggatggcctggagcgcagccgggagaggcaggaacgccgcatccaggtcacattaagaaaatgggagcgatttgaaacaaacaaagaaacagtagtaagatacctttttcaaacaggttccagtcatgaacgcttcttgagttttagcagtttggaaagtttatcttcagaactggaacaaacaaaggagttttctaaacggacagaaagtattgcagtccaggctgagaaccttgtaaaggaagcttcagagataccgcttgggccccaaaataagcagctgcttcaacagcaggccaagtcaatcaaagaacaagtcaaaaaattagaagacacgcttgaagaagatattaaaaccatggaaatggtgaaaaccaagtgggatcattttggcagtaattttgagactctgtccgtctggataactgagaaagaaaaagaactcaatgccttggaaacttcgtcatctgccatggacatgcaaatcagccaaattaaggtcacaattcaggaaatagaaagtaagctcagcagcattgtaggattagaagaagaagcccagtcttttgctcagtttgttaccactggagaatctgctcgaattaaagccaagttgacacaaataagaagatacggggaagagcttcgagagcatgcacagtgtctggaaggaacaatcctgggacatttatctcagcagcaaaagtttgaagagaaccttagaaagatccagcaatctgtgtctgaatttgaagataaacttgctgttccaattaaaatatgttcttcagctacagaaacatacaaagttcttcaagaacatatggatctctgccaggccctggagtcactgagcagcgcgatcactgccttctcagccagtgccaggaaggttgtgaacagagattcctgtgttcaggaggctgcggctctacagcagcaatacgaggacatcctaaggagggcgaaggagagacagacggcgctggagaatctgctggcccactggcagaggctagagaaagaactatcatcctttttgacctggttagagcggggtgaagctaaagccagttccccagaaatggacatttctgcagacagagtcaaagtggaaggtgaacttcagttaatacaggcaagttcaaggaagtttgtatcccaggcctcattctatagcaaacttttgcaattgaaggaatcattgttctcagtagcctccaaagatgatgtgaaaatgatgaaactacatttggagcagttggatgagagatggagagatttaccacagatcattaacaaaaggattaattttcttcagtctgtggttgctgaacaccagcaatttgatgagctgctgctttccttttctgtctggattaaactgtttctcagtgaattacaaactacctctgagattagcataatggaccatcaagtagcccttactcggcataaggaccacgcagcagaagtagagagcaaaaagggcgaattgcagagtctgcagggtcacttagcaaagttgggttctctgggccgtgctgaggacctccacctcctgcagggaaaggctgaggactgcttccagctgtttgaggaggccagccaggttgtggagaggcggcagcttgccctgtcccatttggcagaattcctccagagccatgcctctctgtccggcattctccgccagctgaggcaaacagtggaagcaaccaacagtatgaataagaacgagtctgatttgatagaaaaggacctcaatgatgctcttcaaaatgctaaagcattagaatctgctgccgtcagtctggatggcattctttccaaagcccaataccatctgaaaatcgggagctctgagcaaaggacttcctgcagagccacggctgatcagctctgtggagaggtagagaggatccagaaccttctgggaaccaagcagagtgaggcagatgctctggcagtgttgaaaaaagcattccaagaccagaaagaggagcttctgaaaagcattgaggacattgaagaaaggactgacaaagagcgattgaaagaacctacccgccaagctcttcagcagaggttaagagtgtttaatcagctagaagatgaattgaattctcacgagcatgaactatgttggttgaaagacaaagccaagcaaattgcccagaaagatgtagcttttgcacctgaagttgacagggagataaaccgcttagaggtcacctgggatgataccaaaagactaattcatgaaaatcagggtcagtgctgtggacttattgacttaatgagagaatatcagaacctgaaatcagctgtatctaaagtcttagaaaatgccagcagtgtgattgtaaccagaactaccataaaagatcaggaggatcttaaatgggctttttccaagcatgaaactgccaagaacaaaatgaattacaaacagaaagacttggataactttaccagcaaaggaaaacacttgttatctgagctgaagaaaattcacagtagtgatttcagcttggtgaaaacagacatggagagcaccgtggacaaatggctggatgtatcagagaaacttgaagaaaacatggataggctgagagtaagcctgtccatttgggatgatgtactgtcaactagagatgagattgagggatggtcaaacaactgcgttccacagatggcagaaaacatcagcaacctggataaccacctcagagctgaagaactgcttaaagaatttgagtctgaagttaaaaacaaagcattgagattggaagaactgcattccaaagttaatgatctgaaagaattaactaaaaatctagaaacaccgccagaccttcagtttatagaagcagacttaatgcagaaactggagcatgccaaagaaataactgaagtagcaaaaggaaccctgaaggatttcacggctcaaagtacacaagtggagaagtttattaatgacataacaacatggttcacaaaagtggaagaatcgttgatgaactgtgcccaaaatgagacttgtgaagcattgaaaaaagtcaaggatatacaaaaagaacttcaaagtcaacaaagcaacatcagctctacccaagaaaatctcaatagcttgtgccgcaagtaccactcagctgagttggagagcctgggccgtgcaatgactggtctgataaagaaacatgaagccgtgagccagttgtgctccaaaacccaggccagcctgcaggaatctctggaaaaacacttcagtgagtctatgcaggaattccaagaatggtttttgggagcaaaggcagcagcaaaagaatcatcagatcgcaccggtgacagcaaagttctagaagcaaagctccatgatcttcagaacattttggactcagtcagtgatgggcagagcaaacttgatgcagtgactcaagaaggacaaactttgtatgcacatttgtctaaacaaattgtcagtagcattcaagaacaaatcacaaaggccaatgaagagtttcaagcatttctgaaacaatgccttaaagataagcaggctcttcaagactgtgcttcagaacttggaagctttgaagatcagcacagaaaactgaacttatggatccatgaaatggaagaaaggttcaatacggaaaacttgggagagagtaaacagcacattcctgagaagaaaaatgaagttcataaagttgaaatgtttttgggagaactgctggctgcaagagagtctcttgataagctttcccagagagggcagcttctgagtgaagaaggccacggtgctgggcaggagggccgcctgtgttcccagctcctcacaagccaccagaacctacttagaatgaccaaagagaaactccggagctgccaggtggcccttcaggagcacgaagccctggaggaagcactgcaaagcatgtggttctgggtgaaggccattcaggacagactggcctgtgcagagagcactcttgggagcaaagacaccctggagaaacggctgtcacaaatacaggatattctcctgatgaaaggtgaaggggaagttaagttgaatatggccattggcaagggggaacaggccttgagaagtagcaacaaagaaggtcagagggtgattcagactcagttagagacccttaaagaagtgtgggctgacatcatgagctcctccgtccacgctcaaagcactttagagtctgtgattagccaatggaatgactatgtagagaggaaaaaccagttggagcagtggatggaatcagtggatcaaaaaatagaacatcccttacaaccacagccaggtctgaaagagaagttcgtcctgcttgaccacctccagtccatcctgtctgaggcagaagatcacacgagagcccttcaccgtctaattgcgaagtccagggagctctacgaaaagacagaggatgagtctttcaaggacacagctcaagaggagctgaaaacacagtttaatgatataatgactgttgccaaggaaaaaatgaggaaagtggaagagattgtgaaagatcatctaatgtatttagatgcggtccacgagttcacagattggctccattcagcaaaggaagaacttcaccggtggtcagatatgtctggagattcatcagccacccagaaaaagttatcaaaaattaaggagctgatagattccagagagattggtgcaagccgtctcagcagagtggagtcgctggctcccgaagtgaaacagaacacaactgccagtgggtgtgagctcatgcacacggagatgcaggccctgcgtgccgactggaagcagtgggaagacagtgtattccaaacgcagagctgtttggagaacctggtcagccagatggccctttcggagcaggaattctcaggccaagtggctcaactggagcaggccctggaacagttcagtgcccttctgaaaacctgggctcagcagttaaccctcctggaaggcaagaacacggatgaggagatagtggaatgctggcacaaaggacaagagatactggatgctttgcaaaaagcagagcctagaacagaggatctcaagtctcagctgaatgaactttgtcgattttccagagacctgagtacctacagtggaaaagtttctggcttgattaaagagtataattgtctttgtttgcaagcatccaagggctgccagaataaagaacagattttacagcaaagatttcgaaaggccttcagggatttccagcagtggttggttaatgcaaaaatcactaccgccaagtgttttgatatacctcaaaatataagtgaagtttcaactagtcttcagaaaatacaggagtttttgtcagaaagtgaaaatggacagcacaagctaaacatgatgctgtctaaaggggaacttctgagtaccctgctgaccaaagagaaagcgaaagggatccaggccaaagttacagctgcaaaagaagattggaaaaattttcattcaaatctccaccaaaaagaatctgctctagagaatctaaagatccaaatgaaggactttgaagtaagtgctgagcctatccaggactggctgagtaaaactgagaagatggtccatgaaagcagcaatcgcctctatgatctgccagcaaagaggagggagcagcagaagctccagtctgtccttgaggaaatacactgctacgagcctcagctcaacaggctgaaagagaaagctcagcagctgtgggaaggacaagctgccagcaagagctttaggcacagagtgtcgcagctgtcttctcagtatctagcgctaagcaatttaacaaaggagaaagtgtcaagactggatagaatcgttgcagaacacaatcagttctctcttgggattaaagaattacaagactggatgacggatgcgattcacatgctggattcatactgccacccgacatccgacaaaagtgtgctggacagcaggacgctcaagctcgaggctctattatcagtcaaacaggaaaaagagattcagatgaaaatgatagtgaccaggggagaatctgtccttcagaatacttctccagaaggcattcccactattcagcagcagctgcagagtgtgaaggatatgtgggcatcccttttgtctgcagggattcgttgtaaaagccaactcgaaggagctctctccaagtggacaagttatcaggatggcgttcgacagttctccggttggatggatagtatggaagccaacctgaatgaatcagaaaggcagcatgcggagctgcgggataaaacaacgatgctcggaaaagccaagttattaaatgaagaagtgctgagttacagcagcttgctggagaccatcgaagtcaaaggggctggcatgacagaacactatgtcacccagctagaactccaggatctacaggaacgatacagagccatccaagagagggccaaggaagccgtaaccaagtctgaaaaacttgtccgcctgcaccaagagtatcagagagacctaaaggcatttgaagtttggttggggcaagaacaagaaaagctcgaccagtattcagttcttgaaggtgatgcccacactcatgagacaacattgcgtgatcttcaggagctacaggtacactgtgcagaggggcaggccctgttgaactcagtgctgcacaccagagaggatgtgatcccatcaggtatcccacaggcagaggaccgggctttagagtctctccggcaagactggcaggcttaccagcacaggctgtccgagactcgaactcagttcaataacgtggtgaacaaattgaggctaatggagcaaaagtttcagcaagtagatgaatggctcaaaacagcagaggagaaaaagtggcacgaagaagtgactgcatacagagatgaagttgaggaagtgggagctagagctcaggagatactggacgagagccacgtgaacagcagaatgggttgccaggccacccagctgacttccagataccaggccctgcttctccaagtgctggaacaaataaaattcctggaggaggagattcagagtttggaggaatcagaatcatccctcagttcctattctgattggtatggctctactcataaaaacttcaagaatgtggctaccaagattgacaaagtagatacagtaatgatggggaagaaattgaagacgttggaggttttgctcaaagacatggagaaaggtcacagtttgctgaaatcagcccgggagaaaggagagagggctgttaaatacttggaggaaggcgaggcagagaggttaagaaaggagattcatgatcacatggagcagttgaaggaactgaccagcactgtccggaaagaacacatgacgctggaaaaaggtcttcatttagcaaaggaattctcagataaatgcaaagcactgacacagtggatagcagaataccaggaaattctacatgttcctgaagaacccaaaatggaattatatgagaaaaaagctcagttatctaaatacaagtcacttcaacaaacggtgctgtcccatgaaccatcagtaaagtcagtgagagagaagggtgaagctcttttggaactggtgcaggacgtcactttaaaggacaaaatagatcaacttcaaagtgattaccaggacctgtgcagcataggaaaggcaatgatggaagaaattgctggttttgaagaccgtttgaacaatcttcaaatgaaaggtgatactttgattggccaatgtgcagaccacctgcaagcgaaacttaaacaaaacgtgcatgctcatctgcagggcacaaaggacagctactcagcgatctgcagcacagctcagaggatgtaccagagtttggaacacgaacttcagaagcacgtcagccgacaagacaccctgcagcagtgccaggcctggctttctgcagtccagccggatttagagccaagtcctcaaccacctcttagtagggcagaagccattaagcaggtcaaacacttcagagctttgcaagagcaggcaaggacctacctagatctcctttgctccatgtgtgacctgtcaaatgcttcggtgaaaaccacagcaaaagacattcaacaaacagagcaaacgattgaacaaaagcttgtccaggcccagaacttaactcagggctgggaagagatcaagcacctgaagtctgagctctggatttacctgcaagatgctgatcagcaactgcagaacatgaagaggaggcactctgagctggagctgaacattgcacagaacatggtttcacaagttaaggattttgttaagaaactacagagcaaacaggcatccgtgaacaccataatagaaaaggtgaataagttaacaaagaaggaggaatcgcctgaacacaaggaaataaatcatttaaatgatcagtggctcgatttgtgccgtcagtctaacaacctgtgcttgcaaagggaagaggatcttcagagaacaagagattaccatgactgtatgaatgttgttgaagtgttcctagaaaaatttactacagaatgggataacttggccagatctgatgcagagagtacagctgtccacctggaagctttgaaaaagttagcattggcattgcaggagagaaagtatgctattgaagatctgaaagatcaaaagcagaaaatgatagagcatctgaatttagatgacaaggagttagtcaaagaacagacgagtcatttagagcaacgttggtttcagcttgaggacctcattaaaaggaaaatccaagtgtcagtcaccaacttggaggagttaaatgtggtgcagtccagatttcaggagctaatggagtgggcagaagagcaacaacccaacatcgccgaggcccttaagcagagccctcctccagatatggctcagaaccttctcatggatcacctggccatctgcagtgaactggaggccaagcagatgctcctgaaatcgcttataaaggacgcagacagggtcatggcagatcttggtctcaatgagcgacaggtcatccagaaggctctctctgatgcacaaagccacgtgaattgtctcagtgacttagtgggccagcgaagaaagtacttaaacaaagccttgtccgagaaaacccagtttctcatggcagtgttccaggccaccagccaaattcagcaacatgagcgaaagataatgttccgtgaacacatctgtctgttaccagatgatgtgagcaaacaagtcaaaacatgtaagagtgcacaagccagcctcaagacttaccaaaatgaagtcactggactttgggcccagggtcgcgaactaatgaaggaagtcacagagcaggaaaagagtgaagtgctggggaagcttcaggaattgcagagtgtctatgacagtgttttacaaaagtgcagtcaccggttacaagaactagagaagaatttggtttctaggaagcattttaaggaagattttgataaagcttgccactggctaaaacaagcagatattgttacatttcctgaaatcaacctaatgaatgagagttctgagcttcatacacaactggctaaataccaaaacattcttgaacaatctccagaatatgaaaatcttctacttacgctgcagagaactgggcagaccatattaccatcgctgaatgaagtcgatcattcctacctcagtgaaaagctaaatgctttgcctcgacaatttaatgtaattgttgccttggctaaagacaagttctataaagtccaggaagcaattcttgctcggaaggaatatgcttccttgattgagttgacaacccagtctctgagtgaacttgaagcccaattcttgaggatgagcaaagttcccaccgacctggccgttgaggaggctctttctctgcaagatggttgcagagccattctggacgaggtggcgggccttggggaggcggtggatgaactgaaccagaaaaaagaaggttttcgcagcacaggtcagccttggcagccagacaagatgctgcaccttgtcaccttatatcacaggctgaagcgacaaacagaacagagggttagcttattagaagacaccaccagtgcttaccaagaacacgagaagatgtgccaacagctggagagacaactgaagtctgtaaaagaggagcagtccaaagtgaatgaggaaacgctgcctgcagaggagaagctcaaaatgtatcactccctggcaggaagtctccaggactcagggattgtactgaaacgagtaaccatacatcttgaagatcttgccccacaccttgaccccttggcttatgagaaagccaggcatcagatccagtcctggcaaggggagttaaaactgttgacttctgccattggtgagacggtgacagaatgtgagagccgaatggtgcagagtatagacttccagactgagatgagtcgctccctggactggctgaggagagtgaaggcagagctcagtgggccggtgtacctagacctcaacctgcaggacatccaagaggaaatcagaaaaatccaaattcatcaggaagaggtccagtccagcttgagaatcatgaatgcgctgagtcacaaggaaaaggagaagttcacaaaggccaaggagctgatttctgcggatttagaacacagcctcgctgagctctcagagctggatggagacatccaggaagccttacgcaccagacaggctaccttgactgaaatatatagccagtgtcaaaggtattatcaggtatttcaagcagccaatgactggcttgaggatgcccaagaattgttacagctggcaggcaatggcctagacgtggagagcgcagaggaaaatctcaaaagccacatggaatttttcagtacagaggatcagttccatagtaacctggaggagctccacagcctggtagccaccctggacccactcatcaagccaaccggcaaagaagacctagaacagaaagtggcttctctggaactcaggagccagaggatgagccgggactctggtgcccaagtggatctcttgcagagatgcacagctcaatggcacgattaccagaaagcaagggaagaggttattgaattgatgaatgatacagaaaagaaattgtctgagttttctttgttgaagacttcgtctagtcatgaagcggaagaaaaattgtcagaacacaaggctttagtgtcagtggttaactctttccatgagaaaattgtggcccttgaggaaaaagcttcacaactggagaaaaccggaaatgatgccagcaaagccaccctgagcaggtcaatgaccaccgtctggcagcgctggacacgccttcgagctgtggcccaggaccaggagaagatcctggaagatgcagtggatgagtggacgggctttaacaacaaggttaaaaaggccactgaaatgattgatcagctgcaagataagttacctggaagttcagcagagaaagcatcgaaagcagagctcttaactcttcttgaataccacgacacgttcgttctggagctggagcagcagcagtcggccttgggcatgctgcggcagcaaaccctgagcatgctccaggatggagccgccccaacccctggggaagagcctccgctcatgcaggaaatcaccgccatgcaagatcggtgcctgaacatgcaggagaaagtgaagactaatggaaagttggtgaagcaagagctgaaggaccgagaaatggtggagactcagatcaattctgtgaaatgttgggttcaggaaacgaaagaatatttagggaatccaacaatagaaatagatgctcaacttgaagaacttcagattctcctaacagaagccacaaatcaccgacagaacattgaaaaaatggcagaagaacagaaggagaagtacttaggtctttataccatattaccttctgaactctcccttcagttggctgaagtggcgttagatctaaagatccgagatcagatccaagacaaaataaaagaagttgagcagagcaaggccacgagccaggaactcagccggcaaattcagaagttagctaaagacctcacaactattctaactaagctgaaagcgaagacagataatgtagttcaagctaaaactgaccaaaaggtgctgggagaggaattagatggctgtaattcaaagttaatggaattagatgcagcagtacagaaattcttggaacagaatggccaactgggtaagccactggccaagaagataggaaaactgactgaacttcaccagcagaccattagacaagctgagaatcggctctccaagctcaatcaggcagcatcacatttagaagaatacaatgaaatgcttgaattaattttgaagtggattgaaaaagctaaagtcttggctcatggaactattgcatggaattctgcaagccagcttcgggaacaatatattttgcatcagaccctgctagaagaatccaaagaaattgacagtgagctggaagcaatgactgagaaattacagtacctcactagcgtgtactgtacagaaaaaatgtctcagcaagtggcagaactgggacgggagactgaggagttgcgacagatgatcaaaattcgtttgcagaacctccaagatgcagctaaggatatgaaaaaatttgaagcagagttgaaaaagttacaagctgccttggagcaagcccaggcaacactgacttctccagaagttggacgtctcagtctcaaggagcagctctctcatcggcagcatttgttgtctgagatggagtcactgaagccgaaggtgcaagcagtgcagctctgccagagtgccctccggatccccgaggatgtggttgccagcttacctctctgtcatgctgctctgcggctgcaggaagaggccagccggctgcagcacaccgccatccagcagtgtaacatcatgcaggcagctgtggtacaatatgaacaatatgagcaagaaatgaaacatctccagcaactgatagaaggagctcacagagagattgaggataaacctgttgccaccagtaacatacaggagctgcaggctcagatttctcggcatgaggagctggcgcagaaaattaagggctaccaggagcagatcgcttctttgaattccaagtgcaagatgctgacgatgaaagccaagcacgccaccatgctgctgacggtgaccgaggtcgaggggctggcggaagggacagaggacctggatggggagctcctccccacgccttcggcccacccctctgtggtcatgatgactgcaggtcgctgtcacactttgctgtcaccggtcactgaggagtctggggaggagggaaccaacagtgagatttcctctccacctgcctgtcgctccccttcacctgtggctaatacagatgcttctgttaaccaggacattgcatattaccaagccttgtctgctgagaggttgcagacagatgctgcaaaaattcaccccagcacatccgcatcccaggagttctatgaaccgggattggagccatccgctactgccaaactgggtgatttgcagcgttcttgggaaaccttaaagaatgtgatcagtgagaagcagcgcacactctatgaagctttggaacgccagcagaagtaccaggactccctccagtccatctctacgaagatggaggccattgagctgaaactcagtgagagcccagagcctggcaggagtccagaaagccagatggctgaacatcaggcattgatggatgagattctcatgctccaggatgaaatcaatgagctccagtcctctctcgcagaggagctggtatccgagtcttgtgaggccgaccctgcggagcagctggccttgcagtccacgctcactgtcttagccgagcgaatgtccaccatcaggatgaaagcctcggggaaacggcagcttttggaggagaagttgaatgatcagctggaggaacaaaggcaggaacaggccctgcagaggtatcgctgtgaagccgatgagctggacagctggctcttgagtaccaaggccactctggacactgcgctgagtccacccaaggagcccatggacatggaggcccagcttatggactgccagaatatgctggtggaaatagagcagaaggtggtggctttatcagaactgtcagtccacaatgagaacctgctgctggagggcaaagctcacaccaaggacgaggccgagcagctggctggaaagctgagaaggctcaaggggagcctgctggagctgcagagagccctgcatgataagcagctcaacatgcagggaacagcacaggagaaggaggagagcgatgttgacctaacagccacgcagagccccggcgtccaggaatggctggcccaagctcgcaccacatggacccagcagcggcagagcagtctccagcaacaaaaagagttagaacaggaattagccgagcagaagagtctccttcgctcagtagccagtcgtggagaggagattctaattcaacattcggcggcagagacctctggtgatgctggcgaaaaacctgatgtgttatcccaggagttggggatggaaggggagaaatcatccgctgaagaccagatgagaatgaaatgggaaagcctacatcaagaatttagtaccaagcagaaactactacagaatgttctggaacaggaacaagagcaagtgctttatagcaggccaaatcgactcttgtctggtgtgccactgtacaaaggggacgtgccaacccaagataaatctgcagttacatctttgctggatggactgaaccaagccttcgaggaggtttcatcccagagtggaggggcaaagaggcagagtatacacttggagcagaagttgtatgatggagtctcagccacctctacttggttggatgacgttgaagaacgtttatttgttgccacagcacttttaccagaagaaacagagacttgtctcttcaaccaagagattcttgccaaagacattaaggaaatgtctgaagaaatggataagaacaaaaacttgttttcccaagcttttccagagaatggtgataatcgagatgttattgaagatactttgggttgtcttttgggcaggttatccttgctagactcagtagtgaatcaacgatgtcatcagatgaaagaaagacttcagcaaatactaaatttccagaatgatctgaaagtgctgtttacatcactggctgacaacaaatacatcattctgcaaaaactggcaaatgtgtttgaacagcccgtagcagaacaaatagaggcaatacaacaggctgaagatggactcaaagaatttgatgcaggaatcattgaattaaagaggcgtggtgacaagctacaggtcgagcagccgtccatgcaagaactctccaagctccaggacatgtatgatgagctgatgatgatcattggctcccggaggagtggtctgaatcagaaccttacactcaagagtcagtatgagagggccctacaagatctggctgacctgctagaaactggtcaggagaagatggcaggagaccagaaaatcatcgtgtcttccaaagaggaaatccagcaactacttgacaaacataaggaatactttcagggcctggaatctcatatgatcttgactgaaacactcttcagaaagataatcagctttgcagtccaaaaggaaacccagttccatacagagctgatggctcaggcttctgctgtactgaaacgggctcacaagaggggtgtggagctggagtacattctagagacgtggtcccatctggatgaggaccagcaggagctcagcagacagctggaggtggtggaaagcagcatcccaagcgtgggtctggtggaggagaacgaggacaggcttattgaccgcataacactctaccagcatttaaaatctagccttaatgaataccagcccaaattatatcaagtattagatgatgggaaacgacttctgatatccatcagctgctcagatctagaaagccaactaaatcaacttggagagtgctggctaagtaacaccaataaaatgtctaaggaacttcacagactggaaacaatattgaaacactggaccagatatcaaagtgaatctgcagatctaattcactggttacaatctgcaaaagaccggctagaattttggactcagcaatctgtgacagtcccacaagagctggaaatggtccgtgatcatctaaatgctttcctggagttttctaaagaagtggatgcccaatcttccctgaaatcatctgttctgagtactggaaatcagctccttcgactaaaaaaggtggacacagccacgctgcgctctgagctgtcgcgcattgatagccagtggactgacctgctaaccaatatcccagccgtccaggagaagctccaccagctccagatggataaactgccttcccgccatgccatttctgaagtcatgagttggatttctctaatggaaaatgttattcagaaggatgaagataatattaaaaattccataggttacaaggcaattcatgaataccttcagaaatataagggttttaagatagacattaactgtaaacagctgacagtggattttgtgaaccagtccgtgctacaaatcagcagtcaggatgtggaaagtaagcgtagtgataagactgattttgctgagcaacttggagcaatgaataaaagttggcaaattctgcaaggtctagtaactgagaagatccagctgttggaaggcttattggaatcttggtcagaatatgaaaataatgtacaatgtctgaaaacatggtttgaaacccaggaaaagagactaaaacaacagcatcgaattggagatcaggcttctgttcaaaatgcactgaaagactgtcaggatctggaagatttgattaaagcaaaagaaaaagaagtagagaaaattgagcagaatggacttgctttgattcagaacaagaaagaagacgtctctagcattgtcatgagcacactgcgagagctcggccaaacctgggcaaatttagatcacatggttggacaattaaagatactgctgaaatcagtgcttgaccaatggagtagtcacaaagtggcctttgacaagataaacagttacctcatggaggccagatactctctttcccgattccgtctgctgactggctccttagaagctgtgcaagttcaggtggacaatcttcagaatctccaagatgatctggaaaaacaggaaaggagcttacagaaatttggctctatcaccaaccaattattaaaagagtgtcacccacccgtgacagaaactcttaccaatacactgaaagaagtcaacatgagatggaataacttgctggaagagattgctgagcagctacagtccagcaaggccctacttcagctttggcaaagatacaaggactactccaaacagtgtgcttcgacagttcagcagcaggaggatcgaaccaatgagctgttgaaggcagccacaaacaaggacattgccgatgatgaggttgccacatggattcaagattgcaacgacctcctcaaaggactgggcacagttaaagattccctcttttttctccatgagctgggagagcaactgaagcaacaagtggatgcttccgcagcatcagctattcaatcggatcaactctctttgagtcaacacttgtgtgccctggagcaagctctctgcaaacagcagacttcattacaggctggagttcttgattatgaaacctttgccaagagtttagaagctttggaggcctggatagtggaagctgaagaaatactacaagggcaggaccctagccactcatctgacctctccacaatccaggaaaggatggaagaacttaagggacagatgttaaaattcagcagcatggctccagatttagaccgtctaaatgagcttggatataggttacccttgaatgataaggaaatcaaaagaatgcagaatctgaaccgccattggtctctgatctcctctcagactacagaaagattcagcaagttgcagtcatttttgctacaacatcagactttcttggaaaaatgtgaaacatggatggaattcctagttcagacagaacaaaagttagcagtagagatttcaggaaattatcagcaccttttggaacagcagagagcacacgagttgtttcaagccgagatgttcagtcgtcagcagattttgcactcaatcattattgatgggcaacgtcttctagaacaaggtcaagttgatgacagggatgaattcaacctgaaattgacactcctcagtaatcaatggcagggagtgattcgcagggcccagcagaggcgggggatcattgacagccagattcgccagtggcagcgctatagggagatggcagaaaagcttcgtaaatggttggttgaagtgtcctacctccccatgagtggtctcggaagtgttcctataccactgcaacaagcaaggaccctctttgatgaagtgcagttcaaagaaaaagtgtttctgcggcaacaaggcagctacatcctgactgtggaggctggcaagcaactccttctctcggcggacagtggcgctgaggccgccttgcaggccgaactcgctgaaatccaagagaaatggaaatcagccagcatgcggctggaagaacagaagaaaaaactagccttcttgttgaaagactgggaaaaatgtgagaaaggaatagcagattccctggagaaactacgaactttcaaaaagaagctttcgcagtctctcccggatcaccatgaagagctccatgcagaacaaatgcgttgcaaggaattagaaaatgcagttgggagctggacagatgacttgacccagttgagcctgctgaaggacaccctctctgcctatatcagtgctgatgatatctccattcttaatgaacgcgtagagcttctgcaaaggcagtgggaagaactatgccaccagctctccttaaggcggcagcaaataggtgaaagattgaatgaatgggcagtcttcagtgaaaagaacaaggaactctgtgagtggttgactcaaatggaaagcaaagtttctcagaatggagacattctcattgaagaaatgatagagaagctcaagaaggattatcaagaggaaattgctattgctcaagagaacaaaatacagctccaacaaatgggagaacgacttgctaaagccagccatgaaagcaaagcatctgagattgaatacaagctgggaaaggtcaacgaccggtggcagcatctcctggacctcattgcagccagggtgaagaagctgaaggagaccctggtagccgtgcagcagcttgataagaacatgagcagcctgaggacctggctcgctcacatcgagtcagagctggccaagccaatagtctacgattcctgtaactcggaagaaatacagagaaagcttaatgagcagcaggagcttcagagagacatagagaagcacagtacaggtgttgcatctgtcctcaacctgtgtgaagtcctgctgcacgactgtgacgcctgtgccactgatgccgagtgtgactctatacagcaggctacgagaaacctggaccggcggtggagaaacatttgtgctatgtccatggaaaggaggctgaaaatcgaagagacgtggcgattgtggcagaaatttctggatgactattcacgttttgaagattggctgaagtcttcagaaaggacagctgcttttcccagctcttctggggtgatctatacagttgccaaggaagaactaaagaaatttgaggctttccagcgacaggtccacgagtgcctgacgcagctggaactgatcaacaagcagtaccgccgcctggccagggagaaccgcactgattcagcatgtagcctcaaacagatggttcacgaaggcaaccagagatgggacaacctgcaaaagcgtgtcacctccatcttgcgcagactcaagcattttattggccagcgtgaggagtttgagactgcgcgggacagcattctggtctggctcacagagatggatctgcagctcactaatattgaacatttttctgagtgtgatgttcaagctaaaataaagcaactcaaggccttccagcaggaaatttcactgaaccacaataagattgagcagataattgcccaaggagaacagctgatagaaaagagtgagcccttggatgcagcgatcatcgaggaggaactagatgagctccgacggtactgccaggaggtcttcgggcgtgtggaaagataccataagaaactgatccgcctgcctctcccagacgatgagcacgacctctcagacagggagctggagctggaagactctgcagctctgtcggacctgcactggcacgaccgctctgcagacagcctgctttctccacagccttcctccaatctctccctctcgctcgctcagcccctccggagcgagcggtcaggacgagacaccccggctagtgtggactccatccccctggagtgggatcacgactatgacctcagtcgggacctggagtctgcaatgtccagagctctgccctctgaggatgaagaaggtcaggatgacaaagatttctacctccggggagctgttggcttatcagatgtaatgatccccgaaagccctgaggcctatgtaaaactcacagaaaatgcaatcaaaaatacctccggggaccacagtgccctagagtcacagatccgacaactgggcaaagccctggatgatagccgttttcagatacagcaaaccgaaaatatcattcgcagcaaaactcccacggggccggagctagacaccagctacaaaggctacatgaaactgctgggcgaatgcagtagcagtatagactccgtgaagagactggagcacaaactgaaggaggaagaggagagccttcctggctttgttaacctgcatagtaccgaaacccaaacggctggtgtgattgaccgatgggagcttctccaggcccaggcattgagcaaggagttgaggatgaagcagaacctccagaagtggcagcagtttaactcagacttgaacagcatctgggcctggctgggggacacggaggaggagttggaacagctccagcgtctggaactcagcactgacatccagaccatcgagctccagatcaaaaagctcaaggagctccagaaagctgtggaccaccgcaaagccatcatcctctccatcaatctctgcagccctgagttcacccaggctgacagcaaggagagccgggacctgcaggatcgcttgtcgcagatgaatgggcgctgggaccgagtgtgctctctgctggaggagtggcggggcctgctgcaggatgccctgatgcagtgccagggtttccatgaaatgagccatggtttgcttcttatgctggagaacattgacagaaggaaaaatgaaattgtccctattgattctaaccttgatgcagagatacttcaggaccatcacaaacagcttatgcaaataaagcatgagctgttggaatcccaactcagagtagcctctttgcaagacatgtcttgccaactactggtgaatgctgaaggaacagactgtttagaagccaaagaaaaagtccatgttattggaaatcggctcaaacttctcttgaaggaggtcagtcgtcatatcaaggaactggagaagttattagacgtgtcaagtagtcagcaggatttgtcttcctggtcttctgctgatgaactggacacctcagggtctgtgagtcccacatcaggaaggagcaccccaaacagacagaaaacgccacgaggcaagtgtagtctctcacagcctggaccctctgtcagcagtccacatagcaggtccacaaaaggtggctccgattcctccctttctgagccagggccaggtcggtccggccgcggcttcctgttcagagtcctccgagcagctcttccccttcagcttctcctgctcctcctcatcgggcttgcctgccttgtaccaatgtcagaggaagactacagctgtgccctctccaacaactttgcccggtcattccaccccatgctcagatacacgaatggccctcctccactctgaactaagcagatgccatctgcagaagtgctggtagcataaggaggatcgggtcataagcaatcccaaactaccaacaagaggaccttgatcttggcgaaagccctcggtgtggcagctttagccctcctccagatcacatgtgtgcaaattatggcttcagaggtggaagataaacagtgacgggggaacaaacagacaacaagaaggtttggaagaaatctggtttgagactctgaaccttagcactaaggagattgagtaaggacctccaaagttccccggactcatgaattctgggcccttggcccattctgtgcacagccaaggacttcagtagaccatctgggcagctttcccatggtgctgctccaaccatcagataaatgaccctcccaagcaccatgtcagtgtcgtacaatctaccaaccaaccagtgctgaagagattttagaaccttgtaacatacaatttttaagagcttatatggcagcttcctttttaccttgttttcctttggggcatgatgttttaacctttgctttagaagcacaagctgtaaatctaaaaggcacttttttttagaggtataaagaaaaactagatgtaataaataagatcatggaaggctttatgtgaaaaaagttgaatgttatagtaaaaaaaaaaagatatttatgtatgtacagtttgctaaagccaagttttgtttgtattgatttctttgcatttattatagatattataaaata

SEQ ID NO: 226983 - protein, 2240 aa, Artificial Sequence
  derived and/or modified sequence
MDDKGDPSNEEAPKAIKPTSKEFRKTWGFRRTTIAKREGAGDAEADPLEPPPPQQQLGLSLRRSGRQPKRTERVEQFLTIARRRGRRSMPVSLEDSGEPTSCPATDAETASEGSVESASETRSGPQSASTAVKERPASSEKVKGGDDHDDTSDSDSDGLTLKELQNRLRRKREQEPTERPLKGIQSRLRKKRREEGPAETVGSEASDTVEGVLPSKQEPENDQGVVSQAGKDDRESKLEGKAAQDIKDEEPGDLGRPKPECEGYDPNALYCICRQPHNNRFMICCDRCEEWFHGDCVGISEARGRLLERNGEDYICPNCTILQVQDETHSETADQQEAKWRPGDADGTDCTSIGTIEQKSSEDQGIKGRIEKAANPSGKKKLKIFQPVIEAPGASKCIGPGCCHVAQPDSVYCSNDCILKHAAATMKFLSSGKEQKPKPKEKMKMKPEKPSLPKCGAQAGIKISSVHKRPAPEKKETTVKKAVVVPARSEALGKEAACESSTPSWASDHNYNAVKPEKTAAPSPSLLYKSTKEDRRSEEKAAAMAASKKTAPPGSAVGKQPAPRNLVPKKSSFANVAAATPAIKKPPSGFKGTIPKRPWLSATPSSGASAARQAGPAPAAATAASKKFPGSAALVGAVRKPVVPSVPMASPAPGRLGAMSAAPSQPNSQIRQNIRRSLKEILWKRVNDSDDLIMTENEVGKIALHIEKEMFNLFQVTDNRYKSKYRSIMFNLKDPKNQGLFHRVLREEISLAKLVRLKPEELVSKELSTWKERPARSVMESRTKLHNESKKTAPRQEAIPDLEDSPPVSDSEEQQESARAVPEKSTAPLLDVFSSMLKDTTSQHRAHLFDLNCKICTGQVPSAEDEPAPKKQKLSASVKKEDLKSKHDSSAPDPAPDSADEVMPEAVPEVASEPGLESASHPNVDRTYFPGPPGDGHPEPSPLEDLSPCPASCGSGVVTTVTVSGRDPRTAPSSSCTAVASAASRPDSTHMVEARQDVPKPVLTSVMVPKSILAKPSSSPDPRYLSVPPSPNISTSESRSPPEGDTTLFLSRLSTIWKGFINMQSVAKFVTKAYPVSGCFDYLSEDLPDTIHIGGRIAPKTVWDYVGKLKSSVSKELCLIRFHPATEEEEVAYISLYSYFSSRGRFGVVANNNRHVKDLYLIPLSAQDPVPSKLLPFEGPGLESPRPNIILGLVICQKIKRPANSGELDKMDEKRTRLQPEEADVPAYPKVATVPQSEKKPSKYPLCSADAAVSTTPPGSPPPPPPLPEPPVLKVLSSLKPAAPSPATAATTAAAASTAASSTASSASKTASPLEHILQTLFGKKKSFDPSAREPPGSTAGLPQEPKTTAEDGVPAPPLLDPIVQQFGQFSKDKALEEEEDDRPYDPEEEYDPERAFDTQLVERGRRHEVERAPEAAAAEREEVAYDPEDETILEEAKVTVDDLPNRMCADVRRNSVERPAEPVAGAATPSLVEQQKMLEELNKQIEEQKRQLEEQEEALRQQRAAVGVSMAHFSVSDALMSPPPKSSLPKAELFQQEQQSADKPASLPPASQASNHRDPRQARRLATETGEGEGEPLSRLSARGAQGALPERDASRGGLVGQAPMPVPEEKEPASSPWASGEKPPAGSEQDGWKAEPGEGTRPATVGDSSARPARRVLLPTPPCGALQPGFPLQHDGERDPFTCPGFASQDKALGSAQYEDPRNLHSAGRSSSPAGETEGDREPQARPGEGTAPLPPPGQKVGGSQPPFQGQREPGPHALGMSGLHGPNFPGPRGPAPPFPEENIASNDGPRGPPPARFGAQKGPIPSLFSGQHGPPPYGDSRGPSPSYLGGPRGVAPSQFEERKDPHGEKREFQDAPYNEVTGAPAQFEGTEQAPFLGSRGGAPFQFGGQRRPLLSQLKGPRGGPPPSQFGGQRGPPPGHFVGPRGPHPSQFETARGPHPNQFEGPRGQAPNFMPGPRGIQPQQFEDQRVHSPPRFTNQRAPAPLQFGGLRGSAPFSEKNEQTPSRFHFQGQAPQVMKPGPRPLLELPSHPPQHRKDRWEEAGPPSALSSSAPGQGPEADGQWASADFREGKGHEYRNQTFEGRQRERFDVGPKEKPLEEPDAQGRASEDRRRERERGRNWSRERDWDRPREWDRHRDKDSSRDWDRNRERSANRDREREADRGKEWDRSRERSRNRERERDRRRDRDRSRSRERDRDKARDRERGRDRKDRSKSKESARDPKPEASRASDAGTASQA

SEQ ID NO: 226984 - protein, 81 aa, Artificial Sequence
  derived and/or modified sequence
MDPGKGHCHCGGHGHPPGHCGPPPGHGPGPCGPPPHHGPGPCGPPPGHGPGPCGPPPHHGPGPCGPPPGHGPGHPPPGPHH

SEQ ID NO: 226985 - DNA, 6723 bp, Artificial Sequence
  derived and/or modified sequence
atggatgacaaaggcgaccccagcaacgaagaggcccccaaagccattaaacccacatcaaaggaattcagaaagacttgggggttcaggagaaccacaattgcaaagcgggagggtgccggcgatgccgaagcagatcccctggaacctcccccacctcagcaacagttgggtttgtcactgcgaagatctggcaggcaacccaagaggactgagcgggtagagcaatttctgactatagctcggagacgggggaggagatccatgccagtaagcttagaagactccggagagccaactagctgccccgcgaccgacgctgaaactgcctccgagggaagcgttgaaagcgccagtgagactcgatcaggaccgcagagcgcctccacagccgtgaaagagagacccgcatctagtgaaaaagtgaaaggcggtgatgatcacgacgacactagtgattccgatagcgacggcctgaccctgaaggaactgcaaaaccgtctgcggcggaaacgcgagcaagagcccacagaaaggccgctgaagggcatccaaagcaggctacggaaaaaaagaagagaagagggtccagccgagaccgtgggatcagaggcgagcgataccgtggagggagtgctgcccagcaaacaagaaccagaaaacgaccagggtgtggtttcacaagccggcaaggatgaccgggagtccaagcttgaaggtaaggctgcccaggatatcaaagatgaagagcccggtgacttaggccgcccaaaacccgagtgcgaaggatatgaccccaatgctctgtactgtatctgccgccaaccacacaacaaccgcttcatgatatgctgtgatcgctgtgaagagtggtttcacggcgactgcgtgggtatatccgaggctagaggccggctgttggagagaaatggggaggactacatctgtccaaattgcacgatcctgcaagtgcaggacgagacccacagtgaaacagccgatcaacaagaggctaagtggagaccgggtgacgccgacggcacagactgcacatcaattggcactattgagcagaagtccagcgaggatcagggcatcaaaggaagaatcgagaaagcggctaaccccagcggcaaaaagaaactgaaaatcttccagcccgtgatcgaggcccccggagcatccaaatgtatcggccccggttgctgtcacgtcgcccagcccgactccgtctattgttccaacgactgcatcctgaaacatgccgccgctacaatgaaatttttatcttctgggaaagagcagaaacccaagcccaaggaaaagatgaaaatgaagcccgagaagcccagcctgcccaaatgcggagctcaggcaggtattaaaattagctcggtacacaaacggccagctccagaaaaaaaagagactacagtgaagaaggctgtcgttgtccccgcccgcagcgaggccctcggcaaagaggctgcatgtgagagtagcacaccctcctgggcctcagaccataactataatgccgtgaagccagaaaagacagcagccccgtcaccatctctcctctacaagtccaccaaagaagatcggagatccgaagagaaggcagcagctatggcagccagcaaaaaaactgctcctccagggtcagctgtgggaaagcagccagctcccaggaacttggtacccaagaagtctagcttcgctaacgttgcagccgctacccccgctatcaagaagcccccgagcggctttaaagggactattccaaagcggccatggctttccgcgactccaagttccggagcttcagccgccagacaggccggaccagctccagctgccgcaacagccgcttcaaaaaaattccccggatcggcagcactagtaggtgccgtgaggaaacctgtggtaccctccgttcctatggcctccccggcacccggcagactgggcgcaatgtctgccgccccctcacaacccaacagtcagattcggcagaatatcagaagaagtctgaaagagatcctgtggaagagggtaaacgactctgatgacctgattatgacagaaaacgaagtgggtaagattgccctgcacattgaaaaagaaatgttcaacttgttccaggtgacagacaatcgctacaaatctaagtatcgcagtattatgttcaatctcaaggaccctaaaaaccaaggcctgttccatagggtgcttagggaagaaatatctctagcgaaactagtgcggcttaagcctgaggagctggtgtctaaagaacttagcacttggaaggagagaccagctagatctgtaatggagtcccgtacaaagctgcacaatgagtctaagaagaccgccccccggcaggaagctatcccagatctggaggacagcccccccgtgtctgactccgaagaacagcaggaatccgcccgtgccgttcccgagaaaagcaccgccccattgctagacgttttttcctcgatgctaaaagacaccacatcacagcacagggcccatttattcgacttgaactgtaagatttgtacaggccaggttccctcggctgaagacgagccggctcctaagaagcagaagctttcagccagcgtaaaaaaagaggatctcaagtccaaacacgattctagtgctcccgatcccgctccagattcagctgatgaagtaatgcctgaggctgtccccgaagtcgcatcggagcctggccttgaatcagccagccatccaaatgtcgatcgcacatatttccctggcccgccaggggatgggcatcctgagccatcccctctggaagacctgtccccctgccctgcttcctgtgggtctggcgtggtgaccaccgtaaccgtgtctgggagagacccgcgcactgctccgagctcttcctgcacggccgtcgcctcggccgctagccgaccagatagcacccatatggtcgaggctcggcaagatgtcccaaaaccagtgttgacctctgtgatggtgccgaagtccatccttgcgaagccttcctcaagccctgatcccagatacctgtccgtgcctccatcacctaatatttcaactagtgaatctcgaagtcccccagagggcgatactacactgttcctcagcagactcagcacgatttggaagggcttcatcaatatgcagtcagtagcaaagttcgtgaccaaggcatatcccgtctcaggatgcttcgattatctgagcgaggacttgcctgacacgattcacataggcggaaggatagcccccaaaacagtttgggactatgttggaaagcttaagagctcagtgtcaaaagagctttgtttgataagatttcaccctgctactgaagaagaggaagtcgcgtacatctcattatatagctatttttcttcgagaggcagatttggcgtcgttgcaaacaataacagacatgttaaagacctctatctgatccccctgtcggcccaggatcctgtgcctagtaagctgctgcccttcgaaggccccggactggaaagtccacggcctaatataatattgggcctcgtcatttgtcagaagataaaacgccccgccaatagcggcgagttggataagatggacgagaaacgtaccagactccagccagaggaggctgacgttcctgcttaccccaaggtcgcaacggtgccacaatccgaaaagaaaccctcgaaatatccgttatgttccgcggacgcggcggttagcacaaccccaccaggaagccccccgccacccccacccctccccgagcctccagtgctcaaggtccttagttcactcaagccagcggccccttcccctgcaaccgccgccaccaccgctgcggctgcctcaaccgccgccagttcaactgcaagtagcgcctcaaaaaccgctagcccacttgagcatatcctgcagacgttgttcggaaaaaaaaaaagcttcgaccctagtgcgcgtgagcctccaggctctactgccgggctgccacaagaacccaagaccactgcagaagatggggtccctgcccctccgctcttggaccctatcgttcagcaatttgggcagttcagcaaagacaaggcccttgaggaggaggaggacgatagaccctacgacccggaggaggagtatgacccggagagagccttcgacactcagttagttgaaagaggacgaagacacgaggtagagagagcccctgaagcagcagccgctgagcgtgaagaagtcgcgtacgatcccgaggacgagacgatcctggaggaagccaaggttactgtagatgaccttcccaaccggatgtgtgcagatgttcgaaggaactctgtggaaaggccggcggaacctgtcgccggcgcggccaccccaagcctggtggagcagcagaaaatgctcgaggaacttaacaagcagattgaagaacagaaacgtcagctcgaggagcaagaagaggcactcagacagcagcgagcagccgtgggcgtgtcgatggctcacttttcagtgtctgacgccctcatgagccctcctcctaagagcagcctccccaaggcggaacttttccagcaggaacaacagagtgccgacaagcccgcatccctgcccccagcttctcaggcttcaaaccacagagatcctagacaggctcggagactggccaccgagaccggggagggagagggagagcctctgagccgactgtctgcgcgcggcgcacagggcgccctccccgagcgcgatgcatctcgaggtggcctagttggtcaggcccctatgccagtcccagaggagaaggagccagcgagcagtccatgggcttctggtgagaagccccccgccggttccgagcaggacggctggaaggccgaaccgggagaggggacccgtccagcaaccgtgggcgattcatccgcacgtccagcccgcagagtgcttttaccaactccaccttgcggcgcgctgcagccaggattcccacttcagcacgacggagagcgggatccttttacttgtcccgggttcgccagccaggataaagccttgggatctgcacagtacgaggatccacggaatctgcactctgctggtagatcttctagccctgctggggagacggagggcgaccgcgaaccacaggctaggcccggcgagggtacagcaccactccccccaccaggacagaaagtcggagggagccagccaccctttcaggggcagcgggaacctggtccccatgcactggggatgagcggcctgcacggtccaaacttcccaggtccacgggggcccgccccccctttcccagaggagaatatcgcttcgaatgacgggccgcgcggtccacctcctgcaaggttcggagcacagaagggacccataccttcattgttcagtgggcaacacggaccacctccctacggcgactcacgaggaccttcccctagttaccttggaggtccccgcggcgtggccccctcccagttcgaagagaggaaggatccccatggtgagaagcgggagttccaagacgccccatacaacgaagtgactggagcccccgctcagttcgaagggaccgaacaagcccccttcctggggtctagaggtggagccccctttcaattcggcggacaaagacgtcctctgttaagtcagttgaaaggtccccggggaggaccaccccctagtcaattcggcggacagcggggtccacctcccgggcattttgtcggaccccggggcccacatccctcccagtttgaaacggccagaggaccccaccccaatcaatttgaaggtcctcgaggccaagctcccaattttatgccgggacctaggggaatccaaccccagcagtttgaggatcagcgagtccacagcccacccaggttcaccaatcagagagcgcccgctccccttcagttcgggggccttcgcggctccgcaccattcagtgagaagaatgagcagacacctagtcgttttcatttccaagggcaggcaccacaagtcatgaaacccggacctaggcccctgctcgaactgccttctcacccgccacagcaccgcaaagaccgttgggaggaagccggccccccctcagccctcagtagcagtgcccccgggcagggcccagaggccgacggccaatgggcatccgccgatttcagggagggcaaaggtcacgagtaccggaatcagacctttgaaggccggcagcgcgagcggtttgatgtgggccctaaggaaaagcctctggaggaacccgatgcacagggaagagcctcagaggatcggcggcgggaaagagagcggggaaggaactggtccagagagagagattgggacagacccagagaatgggatcgacacagggacaaggactccagcagggactgggaccgcaatcgcgagcgctccgcgaaccgtgaccgggaacgggaagcagaccgaggtaaagaatgggaccgttcacgcgaaaggtcccgcaaccgggaaagggagcgggaccgtagacgggatcgggatagatcacggtctagagaacgagacagggacaaagcaagagaccgggagcgggggcgcgaccggaaggatcgctccaagtctaaggaaagcgcccgggatccaaaacctgaggccagtcgcgcttccgacgccggtaccgcctcccaggcctag

SEQ ID NO: 226986 - DNA, 6723 bp, Artificial Sequence
  derived and/or modified sequence
atggatgacaagggtgatccttctaacgaggaagcgccgaaagccatcaagccaaccagcaaggaattccggaagacttggggctttagacggactacaatcgcaaagcgagagggcgcaggcgacgccgaggccgatcctctagaaccgcctcccccccaacagcagctcggtctctccctccgcagaagtggaagacagcccaaacgcaccgaacgcgtggaacagttcttgaccattgctcgtcgcagaggacgtagaagcatgccggtgagtctcgaggattctggggagccaaccagttgtcctgctaccgacgcagagaccgctagcgaaggctccgtcgaaagtgcatccgagacaagaagtggccctcagagtgcgtctaccgccgtgaaagaaagacctgcgagctccgaaaaggtgaagggcggggacgaccacgacgacacgtctgattccgactcggatgggctgactctgaaggaactgcagaatcggctgcgccggaagcgagagcaggaacccactgaaagacctctcaaagggattcagagcaggctgcgaaaaaaaaggcgcgaagagggacccgccgagacggtcgggtctgaagcctccgacactgtggagggcgtgctgccctccaagcaggagcccgaaaatgatcaaggcgtcgtttcccaggctggaaaagacgaccgagaaagtaagttagaaggcaaggctgcccaagatatcaaggacgaggagcctggggaccttgggcgacctaaaccagagtgtgaggggtacgaccccaacgctctctattgcatttgtaggcaaccccataacaatagattcatgatctgctgtgataggtgcgaggagtggtttcacggcgactgtgtgggaatctcagaggctaggggtcggctgttggagcggaacggagaagactacatctgcccgaattgcaccatactgcaggtgcaggacgagacacactctgaaacagcagaccagcaagaggcaaagtggaggcccggagatgctgatggtactgactgtaccagtatcggcactattgagcagaagtcgagtgaagatcagggaatcaagggaaggatcgagaaagccgctaacccatctggtaagaagaagctgaaaatatttcagcctgtgatcgaagcacccggggcaagcaagtgcattgggcctggttgctgtcatgttgctcagccagactccgtgtattgcagtaatgattgcattctgaaacatgccgcagccaccatgaaatttctatcttccggcaaagagcaaaagcccaaaccaaaggaaaagatgaaaatgaaacctgaaaaaccctccctgcctaaatgcggagcccaggccggtatcaagattagttctgtgcataagcggcccgctcctgaaaaaaaagaaactaccgttaagaaggccgtggtcgtcccggcccgaagcgaggcactgggaaaggaagccgcatgcgaatcctctaccccatcctgggcaagcgatcacaactacaacgcagtaaagcccgaaaagactgcagcgcccagccctagcctcctgtacaaaagcactaaagaggacagacggagtgaagaaaaggcggcagccatggccgcgtcaaagaagacagccccaccgggtagtgctgtggggaagcaaccggcaccccgaaatcttgtccctaaaaagtcgtctttcgccaatgttgcagccgcaactccagctataaagaaacctcctagcggcttcaaaggtaccatccccaagcgcccttggctgtcagcgacccccagcagtggtgcttccgccgcaaggcaggctggtcctgcaccagccgccgcaaccgccgcctctaaaaagttcccggggtcagctgccctggtcggcgctgtgcggaaacccgtagtcccgtctgtgccaatggcctcacctgcccctggccgcctcggggcaatgtctgctgctccaagtcagcctaacagtcagattcggcagaatattcgacgcagtctgaaagagattttatggaagcgggtcaatgattcagatgacctcataatgaccgagaatgaggtgggcaagattgcactgcacatcgagaaagagatgtttaatctgttccaggttacagataatagatataagagtaagtataggtccattatgtttaacctgaaggacccaaagaaccagggcctgtttcatcgcgtcttacgagaagagattagcttggctaagcttgttagactcaaacccgaggaactggtgtccaaagagttgagcacatggaaggagcgaccggcgaggagcgtgatggaatcaagaactaaactgcacaatgagtcaaaaaagaccgccccccggcaggaagctatccccgacctggaagattctcccccagtttctgactcagaggagcagcaggagtctgcaagagcagtacccgaaaaatccactgctcccctgctggatgtattctcgagcatgttgaaggatacaacgtctcagcacagggctcacttgtttgaccttaattgtaagatttgtacaggccaggttccaagcgctgaggacgagccagctcccaaaaagcaaaagctctctgcctctgtgaagaaggaggacctaaaaagcaagcacgattcaagtgcacctgaccctgctcccgattctgccgacgaagttatgcccgaggccgtccctgaagttgcctccgaacccgggctggaaagcgccagccaccccaatgtggatcgtacttatttccctggtcctcccggcgatgggcaccccgaacccagtcccttagaggatttgtctccttgcccagctagttgtggctccggggttgtcacgaccgtcaccgtgtctggccgcgatcctaggactgccccatcttctagttgcactgcagtggccagtgctgccagcagacctgacagtacccacatggtagaagctcgccaagacgtgcccaaacccgttctcaccagcgtgatggtgcctaaatcaatcctagccaaacctagctcaagcccagaccctcggtacctgtccgttccaccatctcccaacataagcacatctgagtcgcgatctcctcccgagggcgacaccaccttattcctgagtcggctctcgactatttggaaaggattcataaatatgcagagcgtggccaaatttgtgaccaaggcgtaccccgtgtccgggtgcttcgattatctcagcgaggatctgccagacaccatccacattgggggcagaatcgctcccaaaacagtgtgggactatgtcgggaaattaaaaagttctgtgagtaaggaactgtgcttgattcggtttcatcctgccactgaagaagaggaagtggcctacatcagcctttatagttatttctcatccagggggagatttggagtggtggccaacaataaccgccatgtcaaggatttgtatctgattcccctgagtgctcaggaccctgttccaagtaagttgctgccttttgaagggcccgggctcgaaagtccccgcccgaatataattttaggtctcgtaatttgtcaaaaaatcaaaagacccgcaaacagcggagaactcgataagatggatgaaaaaagaaccagactgcagccagaggaagccgacgtgccagcctaccccaaagttgcgactgtgccccagtccgagaagaaaccctcgaagtatcccctgtgttcagctgacgcagcagttagcacaactcccccaggctcaccacctccaccccccccgctcccagaaccgcctgtgctgaaggtcctgagctccctcaaaccagcagccccttctccagccacggcggcgacgaccgcggccgccgcctccaccgcagcctcatccaccgcaagctctgctagcaagacagccagtcccctggaacatattctgcaaactctctttggcaaaaaaaagtccttcgacccatccgctcgcgaacctccaggaagtaccgctgggttgccacaggagccaaaaaccactgccgaagatggcgttccagctcctcccctgcttgaccccatcgtgcagcagttcgggcagttctctaaagacaaagctctggaggaggaagaagacgatcggccttacgatccggaggaggagtatgatcccgaacgggcgttcgatactcaactggtggagaggggcaggcgacacgaggtggagagggctccagaagccgcggccgccgagagggaggaagtcgcgtatgatccagaggatgagaccatcttggaagaagcaaaggtaaccgtcgatgacctcccaaataggatgtgcgccgacgtacggcggaattccgtggaaagaccagccgagcctgtggctggtgccgcgaccccctctcttgtggaacagcaaaagatgttagaggagctgaacaagcagatcgaggaacagaaaaggcaactggaggagcaggaggaggccctccgccagcaacgggccgccgtgggagtcagtatggcccacttttcagtcagtgacgcacttatgagcccaccaccaaagtctagcttgcccaaggcagaattatttcaacaggaacagcaatccgcggacaaaccagcatctctgccccctgcttctcaagcaagtaaccatagggaccctcggcaggccagacgcctagctactgaaacaggagagggtgagggagaacccctgtcccgattatcagcccgcggcgcccagggtgccctgccagagcgggatgcatcacggggaggcctcgtggggcaggcccccatgccagtgccagaggaaaaagagcctgcttctagcccatgggcttccggagagaagcctcccgcaggttccgagcaggatggatggaaggccgaaccaggtgaaggcacacgtccagctacggtcggtgacagtagcgcgcgcccagccaggcgtgtcctgctgccaacccccccatgtggtgccttacaacctgggttccccctccaacatgacggggaaagggatcctttcacatgcccaggatttgccagtcaggacaaagcacttggcagcgcccagtacgaagacccacgcaacctgcacagtgcaggtcgaagttctagtcccgcgggagagaccgagggtgatcgagagccccaggcacggccaggagaggggaccgcccccttacctccacccggccagaaagtggggggctctcaaccgccttttcaagggcagcgagagcccgggccccatgcccttggtatgtcaggtctccatggccctaattttcccggaccccgaggaccagcgccaccatttccagaggaaaatatcgcgagtaacgatggaccgagaggaccacctccggccaggtttggagcacagaaaggcccaatccccagtctgttctcgggccaacatggacctcccccatatggcgatagcagaggcccctcacccagctacctcggggggccgcggggtgtcgcgcccagtcagtttgaagaaaggaaggaccctcacggcgaaaagcgggagttccaagatgctccctataacgaagtcactggagccccagcacagtttgaaggaacagagcaggctccattcctgggatcccggggtggagcccccttccagttcggtggccagaggagacccttgctgagccagcttaaaggacctcgcggcggcccccctccatctcagttcggcgggcagaggggccccccaccaggtcactttgtcggtcctagaggcccgcatcctagccaatttgaaactgctagagggccccacccgaaccagttcgaaggtcctcgaggccaggcgcccaactttatgcctggccctaggggaatccaacctcagcagtttgaagatcaaagggtgcactcgccaccacgattcaccaatcaacgtgcacccgcaccgttacagttcggcggcctgcgcgggagcgccccatttagtgaaaaaaacgaacagaccccttcgaggttccattttcagggacaagctcctcaggtgatgaaacccggcccccggcccctgctggaactgccgagtcatcctcctcagcaccggaaagatcgatgggaggaggccgggccaccttcggccctgagctcatccgctccaggccagggccccgaagccgacggacagtgggccagtgcggacttccgggagggaaaaggccatgagtatcgcaaccagactttcgagggacgccagcgcgagcgcttcgatgttggaccgaaggagaaaccactggaggaacctgacgcccagggtagagcatcagaggacaggcggcgcgagcgggaaaggggccgcaactggagccgcgaacgagattgggacaggccacgcgaatgggaccgccatcgggacaaggattcctctcgcgattgggaccgcaatagagaacgctctgccaatagggatagagaacgcgaggccgacagaggcaaggaatgggatagatccagagaaagatccagaaacagagagcgcgaacgcgatcgcaggcgagatcgcgacagaagccggtcacgcgagagggatcgcgataaggctcgagatcgagaaaggggacgagatagaaaagaccggtcaaagtctaaggagtctgcgagggatccgaaacccgaggcctcccgggcaagcgacgcagggaccgctagccaggcctag

SEQ ID NO: 226987 - DNA, 6723 bp, Artificial Sequence
  derived and/or modified sequence
atggatgacaagggggaccccagcaatgaggaggcccccaaggccatcaagcccaccagcaaggagttcaggaagacctggggcttccggaggaccaccatcgccaagcgggagggcgctggagatgctgaggccgaccccctggagcccccaccaccccagcagcagctgggcctgagcctgcggcgcagcggccggcagcccaagaggacagagcgggtggagcagttcctgaccatcgccaggagaagaggccgccgctccatgcctgtgtccctggaggacagcggggagcccaccagctgcccagccacagatgctgagacagccagcgagggctctgtggagagcgccagcgagaccaggagcggcccccagagcgccagcacagctgtgaaggagaggcctgccagcagcgagaaggtgaagggaggagatgaccatgatgacaccagtgacagcgacagtgatggcctgaccctgaaggagctgcagaaccggctgcggaggaagcgggagcaggagcccacagagcggcccctgaagggcatccagagccggctgaggaagaagaggcgggaggagggccctgctgagaccgtgggcagcgaggccagtgacacagtggagggcgtgctgcccagcaagcaggagccagaaaatgaccagggcgtggtgtcccaggccggcaaggatgaccgggagagcaagctggagggcaaggccgcccaggacatcaaggatgaggagcccggggacctgggccggcccaagccagaatgtgagggctatgaccccaatgccctgtactgcatctgccggcagccccacaacaaccgcttcatgatctgctgtgacagatgtgaggagtggttccatggagactgtgtgggcatcagcgaggcccggggccgcctgctggagagaaatggagaggactacatctgccccaactgcaccatcctgcaggtgcaggatgagacccacagcgagacagctgaccagcaggaggccaagtggaggcctggagatgctgatggaacagactgcaccagcatcggcaccatcgagcagaagagcagcgaggaccagggcatcaagggccgcatcgagaaggccgccaaccccagcggcaagaagaagctgaagatcttccagcctgtgattgaggcccctggggccagcaagtgcatcggccctggctgctgccacgtggcccagcctgacagcgtgtactgcagcaatgactgcatcctgaagcacgccgccgccaccatgaagttcctgagcagcggcaaggagcagaagcccaagcccaaggagaagatgaagatgaagccagagaagcccagcctgcccaagtgtggggcccaggccggcatcaagatcagctctgtgcacaagaggcctgcccctgagaagaaggagaccaccgtgaagaaggctgtggtggtgcctgcccggtctgaggccctgggcaaggaggccgcctgtgagagcagcacccccagctgggccagtgaccacaactacaatgctgtgaagccagagaagacagctgcccccagccccagcctgctgtacaagagcaccaaggaggacagaagaagtgaggagaaggccgccgccatggccgccagcaagaagacagcccctcctggcagcgctgtgggcaagcagcctgcccccaggaacctggtgcccaagaagagcagctttgccaacgtggccgccgccaccccagccatcaagaagccacccagcggcttcaagggcaccatccccaagaggccctggctgagcgccacccccagcagcggggccagcgctgcccggcaggccggccctgccccagctgctgccacagctgccagcaagaagtttcctggcagcgctgccctggtgggcgctgtgaggaagcctgtggtgcccagcgtgcccatggccagccctgcccctggccgcctgggcgccatgtctgctgcccccagccagcccaacagccagatccggcagaacatcagaagaagcctgaaggagatcctgtggaagagggtgaatgacagtgatgacctgatcatgacagaaaatgaggtgggcaagatcgccctgcacatcgagaaggagatgttcaacctcttccaggtgacagacaaccgctacaagagcaagtaccgcagcatcatgttcaacctgaaggaccccaagaaccagggcctcttccaccgggtgctgcgggaggagatcagcctggccaagctggtgcggctgaagccagaggagctggtgtccaaggagctgagcacctggaaggagaggcctgcccggtctgtgatggagagcaggaccaagctgcacaatgaaagcaagaagacagccccccggcaggaggccatcccagacctggaggacagcccccctgtgtctgattctgaggagcagcaggagagcgcccgggctgtgcctgagaagagcacagcccccctgctggatgtgttcagctccatgctgaaggacaccaccagccagcaccgggcccacctgtttgacctgaactgcaagatctgcaccggccaggtgcccagcgcagaagatgagcccgcccccaagaagcagaagctgagcgcctctgtgaagaaggaggacctgaagagcaagcatgacagcagcgccccagaccctgccccagacagcgcagatgaggtgatgcctgaggccgtgcctgaggtggccagcgagcccggcctggagagcgccagccaccccaacgtggacaggacctacttccctggccccccaggagatggccaccctgagcccagccccctggaggacctgagcccctgcccagccagctgtggcagcggcgtggtgaccaccgtgacagtgtctggccgggaccccaggacagcccccagcagcagctgcacagctgtggccagcgctgccagcaggccagacagcacccacatggtggaggcccggcaggatgtgcccaagcctgtgctgacctctgtgatggtgcccaagagcatcctggccaagcccagcagcagcccagacccccgctacctgtctgtgccccccagccccaacatcagcaccagcgagagccgcagccccccagagggggacaccaccctcttcctgagccggctgagcaccatctggaagggcttcatcaacatgcagagcgtggccaagtttgtgaccaaggcctaccctgtgtctggctgctttgactacctgtctgaggacctgcctgacaccatccacatcggcggcagaattgcccccaagacagtgtgggactatgtgggcaagctgaagagctctgtgtccaaggagctgtgcctgatccgcttccacccagccacagaggaggaggaggtggcctacatcagcctgtacagctacttcagcagccggggccgcttcggcgtggtggccaacaacaacagacatgtgaaggacctgtacctgatccccctgagcgcccaggaccctgtgcccagcaagctgctgccctttgagggccctggcctggagagcccccggcccaacatcatcctgggcctggtgatctgccagaagatcaagaggcctgccaacagcggggagctggacaagatggatgagaagaggacccggctgcagcctgaggaggctgatgtgcctgcctaccccaaggtggccaccgtgccccagagcgagaagaagcccagcaagtaccccctgtgcagcgcagatgctgctgtgtccaccaccccacctggcagccccccacctcctccacccctgcctgagccccctgtgctgaaggtgctgagcagcctgaagccagctgcccccagccctgccacagctgccaccacagctgctgctgccagcacagctgccagcagcacagccagcagcgccagcaagacagccagccccctggagcacatcctgcagaccctgtttgggaagaagaagagctttgaccccagcgcccgggagcccccaggcagcacagctggcctgccccaggagcccaagaccacagcagaagatggagtgcctgccccacccctgctggaccccatcgtgcagcagtttggccagttcagcaaggacaaggccctggaggaggaggaggatgaccggccctatgaccctgaggaggagtatgaccctgagcgggcctttgacacccagctggtggagcggggcagaagacatgaggtggagcgggcccctgaggccgctgctgctgagcgggaggaggtggcctatgaccctgaagatgagaccatcctggaggaggccaaggtgacagtggatgacctgcccaacaggatgtgtgctgatgtgagaagaaacagcgtggagaggcctgctgagcctgtggccggggccgccacccccagcctggtggagcagcagaagatgctggaggagctgaacaagcagatcgaggagcagaagaggcagctggaggagcaggaggaggccctgcggcagcagagagctgctgtgggcgtgtccatggcccacttctctgtgtctgatgccctgatgagccccccacccaagagcagcctgcccaaggccgagctgttccagcaggagcagcagagcgctgacaagccagccagcctgcccccagccagccaggccagcaaccaccgggacccccggcaggcccggcggctggccacagagaccggggagggggagggggagcccctgagccggctgagcgcccggggggcccagggcgccctgcctgagagagatgccagccggggcggcctggtgggccaggcccccatgcctgtgcctgaggagaaggagcccgccagcagcccctgggccagcggggagaagcccccagctggcagcgagcaggacggctggaaggccgagcccggggagggcaccaggcctgccaccgtgggggacagcagcgcccggcctgcccggcgggtgctgctgcccaccccaccctgtggggccctgcagcccggcttccccctgcagcatgatggagagcgggaccccttcacctgccccggctttgccagccaggacaaggccctgggcagcgcccagtatgaggaccccaggaacctgcacagcgctggccgcagcagcagccctgctggggagacagaaggagaccgggagccccaggcccggcctggagagggcacagcccccctgcccccacctggccagaaggtgggcggcagccagccccccttccagggccagcgggagcccggcccccacgccctgggcatgagcggcctgcacggccccaacttccctggcccccggggccctgccccacccttccctgaggagaacatcgccagcaatgatggcccccggggccccccaccagccaggtttggagcccagaagggccccatccccagcctcttcagcggccagcacggccccccaccctacggggacagccggggccccagccccagctacctgggcggcccccggggcgtggcccccagccagtttgaggagaggaaggacccccatggagagaagcgggagttccaggatgccccctacaatgaggtgactggagccccagcccagtttgagggcacagagcaggcccccttcctgggcagcagaggaggagcccccttccagtttggaggccagaggcggcccctgctgagccagctgaagggcccccggggcggccccccacccagccagtttggaggccagaggggccccccacctggccactttgtgggcccccggggcccccaccccagccagtttgaaacagcccggggcccccaccccaaccagtttgagggcccccggggccaggcccccaacttcatgcctggcccccggggcatccagccccagcagtttgaggaccagagggtgcacagccccccacgcttcaccaaccagagggccccagcccccctgcagtttggaggcctgcggggcagcgcccccttcagcgagaagaatgagcagacccccagccgcttccacttccagggccaggccccccaggtgatgaagccaggcccccggcccctgctggagctgcccagccaccccccccagcacaggaaggaccgctgggaggaggccggcccccccagcgccctgagcagcagcgcccctggccagggccctgaggctgatggccagtgggccagcgctgacttccgggagggcaagggccacgagtacagaaaccagacctttgagggccggcagcgggagagatttgatgtgggccccaaggagaagcccctggaggagccagatgcccagggccgggcctctgaagatagaagaagagagcgggagcggggcaggaactggagccgggagcgggactgggaccggccccgggagtgggacagacaccgggacaaggacagcagccgggactgggacaggaaccgggagaggtctgccaacagagaccgggagcgggaggccgaccggggcaaggagtgggacaggagccgggagaggagcaggaaccgggagcgggagcgggacagaagaagagaccgggacaggagccgcagccgggagcgggaccgggacaaggcccgggaccgggagcggggccgggacaggaaggacaggagcaagagcaaggagagcgcccgggaccccaagccagaggccagccgggccagtgatgctggaacagccagccaggcctag

SEQ ID NO: 226988 - DNA, 6723 bp, Artificial Sequence
  derived and/or modified sequence
atggacgacaagggcgaccccagcaacgaggaggcccccaaggccattaagcccaccagtaaggagtttcgcaagacatggggattcaggcggacaacgatagccaagcgcgagggagcgggggatgccgaagcagaccctctcgagccccccccaccacagcagcagctgggactgtctctccgccgcagtggacgccagcctaaacggactgagagagtagagcaattcctgactatcgcaaggcgacgcggtagacgctcaatgcccgtgtcacttgaagacagcggagagccgacgtcctgccccgccaccgacgccgagacggccagcgaaggctctgtcgagtctgcaagtgaaaccaggagcggtccgcagtccgcctctacagcggtgaaagaacgccccgcttcgtcagagaaagtgaaagggggtgatgatcacgacgatacttctgactctgacagcgacggacttaccctgaaggaactacagaacagattaagacgcaagagggagcaggagcccaccgaacggccactgaaaggcattcagagtaggctgcggaaaaaacgcagagaggaaggtccggcggagactgtcggaagcgaagcctccgacaccgtggagggagtgctcccaagtaagcaggaacctgaaaatgaccaaggcgtagttagccaggccgggaaagatgaccgcgagagtaagcttgaaggtaaggcagcccaggatattaaggacgaggaacctggagaccttggcaggcccaagccagaatgtgaagggtatgatccaaatgcgctgtattgcatctgccgtcagccccacaataatcgattcatgatttgctgcgaccggtgcgaggagtggttccacggggattgtgtcggtatcagtgaggcacgcggcagactgttggagagaaatggcgaagattacatatgtcctaactgtaccatccttcaagtccaggatgagacgcatagcgaaaccgcagatcaacaggaagccaagtggagaccgggcgatgccgacggtaccgactgcacaagtatcggtacaatcgaacagaaatcctctgaggaccagggaatcaagggacggatcgagaaagccgcaaacccatcaggtaagaagaaactgaaaatcttccagcctgttattgaggcacctggggcatcgaaatgcatcggcccggggtgttgccatgttgcccaacctgactccgtgtactgttcaaacgattgtatcttgaagcatgctgcagccacaatgaagttcctttcctccggcaaggagcaaaagcccaagccaaaagaaaaaatgaaaatgaagcctgaaaagccatccttaccaaaatgtggggcacaggcagggataaaaatatcatccgtccataagcgaccagctcctgagaagaaggaaacaaccgtgaagaaagccgtggtcgttcccgcccgttccgaggccctgggaaaagaggcggcttgtgagagcagcaccccttcatgggcctcagaccacaactataatgcagtaaagcctgagaagactgccgcgccctcaccctctttgctctataaaagcaccaaagaggatcggaggtctgaagagaaggctgcagcgatggcagcctccaagaagactgcaccacctggctcggcagtcggaaaacagcccgccccacggaacctggtgcctaagaaaagttcattcgctaacgtcgcagccgccacacccgccatcaaaaaacctccgtccggattcaaaggcacaattccaaagagaccttggctgtcagctacacccagctcaggggcctcagccgctcggcaggccggtccggctccggctgctgctacagcagcctcaaaaaagttccctggctccgccgcgcttgtcggcgccgtgagaaaacctgttgtcccaagcgtgcccatggcaagcccagcccctggcagactcggcgcgatgtcagctgcgccgtcacaaccaaacagccagattcggcagaacatcagacgctccttgaaggagatcttgtggaagcgggtcaatgattcagatgacctaatcatgaccgaaaacgaagtagggaagatcgccttgcacatcgaaaaagagatgttcaatctatttcaggtcacagacaataggtacaagagcaagtaccggagcatcatgtttaacttgaaggaccccaagaaccagggactgtttcacagggtgcttcgggaagagatctcgcttgcaaagctggtgaggctcaagcccgaggagctggtgagtaaggagctttcaacttggaaggaaaggcccgcacggtcggtcatggagtctcggaccaagcttcataacgaatctaaaaagactgcgccgagacaggaggctatcccagacctagaggactcccctcctgtttctgacagcgaggaacagcaagaatcagctagggccgttccggaaaagtccaccgcccccttattggatgtgttctctagcatgttgaaggataccacttcccaacatcgcgcacacttattcgatctgaactgtaaaatttgcactggacaggtaccctccgctgaagacgagcccgcccctaagaaacagaagctcagtgcttctgtgaagaaggaagatctgaagtccaagcacgattcttcagccccagatccagctcctgacagtgcagacgaggttatgcccgaagccgtgccagaagttgcctcagaaccagggctggagagcgcatctcatccaaatgttgaccgaacctacttcccagggcctcccggggacggtcacccagaaccttctcctctggaggatctctcaccctgccccgcttcctgcggatctggggttgtcaccaccgtgaccgtttccggaagggatccccgaacggctccatccagttcatgcaccgccgtggcctcagctgcatcaaggcccgacagtacccatatggtggaagctcgacaagatgttccgaagcccgtgctgacaagcgtcatggtcccaaaaagcattttggctaagccaagttcttctccagacccacgatacctcagcgtgcccccgtctcccaacatctccaccagcgagtctagatctccaccggagggcgacactactttgtttctaagcagactcagcacaatttggaagggcttcataaatatgcaaagcgttgcaaagttcgtgacaaaggcttatcctgttagtggttgttttgactacctgagcgaggacctccctgatactatccacatcggcggacgtatcgccccaaaaaccgtgtgggactacgtgggcaagctcaagtcctcagtgtcaaaggaattgtgcctgatacggtttcatcctgctaccgaggaagaggaagttgcatacatttctctctactcttatttcagttcccgtggtcgttttggcgtggtagctaataataaccgccatgtaaaggatctttacctaatacccctgtcggcacaggacccggtcccgagtaaattgcttccgttcgaagggcccggattggagtcacccaggcccaatatcattctgggacttgtgatctgtcagaaaatcaaaagacccgccaactctggggaactagataaaatggatgaaaagcgcacccggctgcagcccgaggaagccgatgtgccggcctacccaaaggttgcaacagtgcctcagtccgaaaagaagcccagcaagtaccccttgtgcagtgccgacgcggccgtcagcactactccgccaggcagcccgcccccacctccaccgttacccgaacctcccgtcctgaaggttctctcttccctgaaacccgccgccccctcacctgcaaccgctgctactaccgctgccgcggcatctaccgcggcatctagcaccgctagtagcgcgagtaaaacagccagtccgctggagcacatcctgcagacactctttggaaaaaaaaaatcctttgacccctcagccagagagcccccaggctcaacagctggactgcctcaggagccaaagacaacagccgaagacggggttccggccccacccctcctcgatcctatagtgcagcagttcggacaattcagtaaggataaggcacttgaggaagaggaagatgaccgcccttacgatcccgaggaggaatatgacccggagagagccttcgatacgcagctcgtggaacgggggcggagacacgaggtggaaagagcccctgaagcagccgcagccgagagggaggaggttgcttatgatccggaggacgagaccatccttgaagaggccaaagtgacagtcgatgacctacccaatcgaatgtgtgccgacgtgcgtcggaactccgtagaaaggccggccgagcccgtcgccggggccgctaccccctcactggtcgaacagcagaagatgcttgaagagctaaataagcaaattgaggagcagaaacgacagcttgaagagcaagaggaggcactgcgacagcagagagcggccgtgggagtttctatggcacacttctctgtgtccgatgcgctgatgtctccccccccgaaaagctctttacccaaggctgagctctttcaacaggagcagcagtccgccgacaaaccagcctccctgccccctgcgtctcaagcctctaaccaccgagatccgcggcaggcacggcgcttggcaactgagacaggggagggagagggggagcctttgagtcgactgagcgcccgtggcgctcagggcgccctaccggagcgggatgccagtcgcggtggtttggtcggacaggcgcctatgcccgtgcctgaggaaaaagagcctgcctccagcccttgggcatctggagaaaagccccctgcgggaagtgagcaggatggctggaaggctgagcccggagaaggcacacgccccgccactgtgggagactccagcgcccgaccggcaaggagggttctgctgccaaccccaccatgcggagctctccagcctgggtttccactgcagcatgacggagaaagggatccgtttacctgtcctgggttcgcatcgcaagacaaagctttgggaagtgcccagtacgaggatcctaggaacctacactctgcgggacgaagttcgtcacccgctggggagaccgaaggagatcgggaaccccaagcccgccctggcgaaggcactgcacctctgcctcctcccgggcagaaggtgggggggagtcagcctccgtttcaggggcagcgagaaccgggtccgcacgctcttggaatgtccggcttgcacggaccaaactttccaggccctcgcggtccggcccccccattccctgaggaaaatatcgccagcaacgatggcccccgcggaccgccaccagcccgatttggcgcacagaagggaccgataccatcgctgtttagcggccaacacggaccgcccccgtatggagattcgaggggcccatcaccgagttacctaggagggcctcgaggagtggccccatctcagttcgaagaacgcaaggacccccatggcgagaaacgagaattccaggacgccccatataacgaggtgacaggagctcctgcccagtttgagggtaccgagcaggctccatttctcggatcccgcggcggtgctcccttccaattcggagggcagcgtagaccccttctgtctcagctgaaagggccccggggtggcccacccccctcacaattcgggggacagaggggtcctcctccaggccatttcgttgggcctaggggccctcacccgagtcagtttgaaacagccagaggcccgcatcctaaccagtttgaaggcccaagggggcaggccccaaacttcatgccaggccctagagggattcagcctcaacagttcgaagatcagcgagtgcactctcctcccagattcaccaatcagagagcgcctgctcccctgcagtttggcggacttcgagggtcagcgccattctctgagaagaacgagcaaacaccctcgcgttttcactttcagggccaggctccacaggtcatgaaaccaggaccgagacctcttctggagttgcccagtcacccacctcagcataggaaagaccgatgggaggaagccggtccaccatccgctctttcttcgtctgctcctggccaggggccggaggctgatggccagtgggcgtcagccgacttcagagaaggaaaagggcatgagtacaggaaccagacgttcgaagggagacagagagagcgatttgacgttggacctaaggagaagcctctggaagaacccgacgcccagggcagggcctccgaggatcggaggcgtgagagagagcggggacggaattggtcacgagaaagagactgggatcgcccaagagagtgggaccgacatagggataaggattcaagtcgagactgggataggaacagagagaggtccgccaatcgggatcgtgaacgagaggccgatcggggcaaagagtgggaccgtagtcgggagagatcccgtaacagggaaagagagcgcgacaggcggagagaccgtgatcgatctagatccagagagcgcgacagagacaaggcacgcgaccgggaacggggcagggacagaaaagatagaagcaagtctaaggagagtgctagggacccgaaacccgaagcctcacgggcttccgacgccgggaccgcaagccaggcatag

SEQ ID NO: 226989 - DNA, 8477 bp, Artificial Sequence
  derived and/or modified sequence
ctcggtggccgtccgcccactccgcggcgttcggggaaatggctgcgagaccctagaggcctgcggagcttactccacgggaacagcctctagataatctgagttgttgaaaatacgaagcctgttactcgtgaacagtggctgacaacagtgttgttgtgagcctggctgtctgcttggacccagaggtttcgtctgccagggtttttggttgtatttaggatttcagggaaaagtgtccaagctttcagtgttggagcaggtatggacgacaaaggcgacccgagcaatgaggaggcacctaaggccatcaaacccaccagcaaagagttcaggaaaacatggggttttcgaaggaccactatcgccaagcgagagggcgcaggggacgcggaggctgacccactggagccgccacccccacagcagcagctgggcctgtccctgcggcgcagtgggaggcagcccaagcgcactgagcgcgtggagcagttcctgaccattgcgcggcgccgcggcaggaggagcatgcctgtctccctggaggattctggtgagcccacgtcctgccccgccacagacgccgagacagcctccgagggcagcgtggaaagcgcttctgagaccagaagcggcccccagtctgcttccacagctgtgaaggaacgaccagcctcttctgaaaaggtgaaaggaggggatgaccacgatgacacctccgatagtgacagcgatggcctgaccttgaaagagcttcagaatcgccttcgcaggaagcgggaacaggagcccactgagaggcccctgaaagggatccagagtcgcctgcggaagaagcgccgggaggagggtcccgccgagactgtgggctccgaggccagtgacactgtggagggcgtcctgcccagtaagcaggagcccgagaacgatcagggggttgtgtcccaggctgggaaagatgacagagagagtaagttggagggaaaggcggctcaggacatcaaagatgaggagcctggagacttgggccgaccgaagcctgaatgtgagggttacgaccccaacgccctgtattgcatttgccgccagcctcacaacaacaggtttatgatttgctgtgaccgctgtgaagaatggtttcatggcgattgtgtgggcatttctgaggctcgagggaggcttttggaaaggaatggggaagactatatctgcccaaactgcaccattctgcaagtgcaggatgagactcattcagaaacggcagatcagcaggaagctaaatggagacctggagatgctgatggcaccgattgtacaagtataggaacaatagagcagaagtctagcgaagaccaagggataaagggtagaattgagaaagctgcaaatccaagtggcaagaagaaactcaagatcttccagcctgtgatagaggcgcctggtgcctcaaaatgtattggccccgggtgctgtcacgtggcgcagcccgactcggtgtactgcagtaatgactgtatcctcaaacacgccgcagcgacaatgaagtttctaagctcaggtaaagaacagaagccaaagcctaaagaaaagatgaagatgaagccagagaagcccagtcttccgaaatgcggtgctcaggcaggtattaaaatctcttctgtgcacaagagaccagctccagaaaaaaaagagaccacagtgaagaaggcagtggtggtccctgcgcggagtgaagcactcgggaaggaagcagcttgtgagagcagcacgccgtcgtgggcgagcgatcacaattacaatgcagtaaagccagaaaagactgctgctccctcgccgtcactgttgtataaatccacgaaggaagacaggaggtccgaggagaaagcggcagccatggcagcctcaaagaaaacagcccctccaggctccgcggtgggcaagcagcctgcacctagaaacctcgtgccaaagaagtcttcttttgctaatgtggcagcagccacaccagccattaaaaagccaccctcaggtttcaagggcaccatccccaagaggccatggctctccgctaccccatcgagtggtgcttcagctgccaggcaggccggaccggcacctgcagcggcaacggctgcctccaagaagttccctggctccgctgctttggtgggagccgtaaggaagccagtggtaccttctgttccaatggcctcgccagccccaggacgccttggggctatgagtgctgcaccatcgcagccaaattcacaaattcggcaaaatatcagacgctccttaaaagagattttgtggaaaagagtcaatgacagcgatgacttaatcatgacagaaaacgaagtaggaaaaattgccctccatattgagaaggagatgtttaacttgtttcaagttacagataatcgctacaagagtaaatatcgcagcatcatgttcaacctgaaggaccctaaaaatcagggactcttccatcgtgttctgcgtgaggaaatctctttggcgaaacttgtgagactgaagccagaagaacttgtatctaaagagctttccacgtggaaagagaggccagcgagatctgtgatggagtccagaactaaactgcacaatgaaagcaagaagacggcccccaggcaggaggccatccccgatctggaggactctccgccagtgtcggattcagaggaacagcaagagtcagcacgtgctgtccctgagaagagcacagcgccgcttctcgacgtcttcagcagcatgttgaaagacaccaccagtcagcaccgcgcacacctcttcgatctcaactgtaaaatttgcacaggccaggttccctccgcagaagatgagccagctccgaaaaaacaaaaattgtcagcttctgttaagaaagaagacttaaaatcaaagcatgacagctctgcacctgacccagctccggattcagctgatgaggtgatgccggaggctgtgcctgaagttgcctctgagccaggcctagaaagtgcttctcatccaaatgtggacagaacgtatttccctgggcctccaggagatggccatcccgagccctccccgctggaagacctgtccccctgcccagcctcctgtgggagcggggtggtcaccaccgtcacagtgtccggccgggaccccaggaccgctccaagcagttcatgcacagccgtggcctccgcagcatcccgcccagacagcacccacatggtggaagccagacaggatgtgccgaagcctgtcttgacttctgtgatggtgcccaagtccatactagctaagccatcctcatctcctgacccaagatacctgtcagttcctccgtcaccaaatatcagcacttcagaatcacgttcccctccagagggagacacgaccctctttttgtctcgactcagcaccatttggaaaggatttattaacatgcagagtgtggcaaaatttgtcactaaggcgtatcctgtctctgggtgttttgattacctcagtgaggatttgcctgacacaattcacattggtgggaggatcgcaccgaagacagtttgggattatgttggcaaactcaagtcttctgtgtctaaggagctctgtctgatccgcttccaccccgccacagaggaagaggaggtcgcctatatctctctctactcctatttcagcagccgtggccgctttggtgttgtagctaataacaacaggcacgtcaaggacctctacctgatcccgctgagcgcccaggaccctgttccatccaaactcttgccctttgagggaccaggtcttgagtcaccacgtccgaatataattcttgggttagtaatctgccaaaaaatcaaacgtcccgcaaacagtggagagttagacaagatggacgaaaagcggacccgacttcaaccggaagaagcggacgttccggcctatccaaaagtagccacagtcccgcagtcggaaaagaagccctccaagtatccactctgctctgcagacgcggctgtcagcaccacacctcctgggtcgccgccgcctccgccccctcttccagaaccaccggtgctaaaagtgctgtcatccctcaaacctgcagcccccagcccagccacagcagccacaacagcagcggcagcctccacggcagcttcctccaccgcttcgtctgcttccaaaacagcatcaccgctggagcacatcctgcagactctctttggaaagaagaaatcattcgacccgtccgccagagagcctcccgggtccaccgcaggtctcccccaggagcccaaaaccacagcagaggacggggtgccggcacctccgttgttagatccgatcgtccagcagttcggtcagttctcaaaagataaggctctagaggaagaggaggacgacaggccatacgaccctgaggaggagtacgacccggagagggccttcgacactcagcttgtggagcgagggcggcgccacgaggtggaaagggctcctgaagcagctgcagccgagcgggaagaggtggcctatgaccccgaggatgagaccatcttagaagaagcgaaagtgactgttgatgacctgcccaacaggatgtgtgccgacgtgagaaggaactccgtggagaggcctgccgagccggtggccggggctgcgacgccctccctggtggagcaacagaagatgctagaagagctgaacaaacagatcgaggagcagaagagacagctggaggagcaagaagaagctctcaggcagcagagggccgccgtcggggtctccatggcccacttctcggtgtcggacgccttgatgtctccaccaccaaagtcgtccttgcccaaggcagagctgttccagcaagagcagcagtctgcagacaagcccgcctcactgccccccgccagccaggcgtcaaaccacagggacccccggcaggcgaggcgcctggccactgagaccggtgagggggagggggagcctctctccaggctctcggcacgtggtgcccagggtgccctgcccgagagagatgcttccaggggtggcctcgtgggccaggcgcccatgccagtcccggaggaaaaagagccagcctcttccccctgggcttcgggcgaaaagcccccagcggggtccgagcaggacggctggaaggcagagcctggggagggcacccgccccgccacggttggagacagctcggccaggcctgcccggagggtgctgctgcccacaccgccttgcggcgccctgcagcccggcttcccgctgcagcacgacggtgagagggaccctttcacctgcccggggttcgcgtcgcaggacaaggctctcggctcagcccagtatgaggacccaagaaatcttcattctgctggaaggagcagcagccctgcaggtgaaacagagggggacagagagccacaggccagacccggcgagggcaccgccccgctccccccaccaggacagaaagtggggggctctcagcccccgtttcagggtcagcgggaacctggacctcatgctttggggatgtcagggcttcacggccccaatttcccgggaccaagggggccagcccctccgtttccagaagagaatatcgcttctaacgatgggccacgagggcctccgccagccagattcggagcccagaaggggcccatcccttccttattctcggggcaacatgggccacctccttatggggacagcagaggcccctcaccctcttaccttggtggaccacgaggagtggcaccatcccaatttgaagaacgcaaggatccccatggggagaagagggagttccaggacgccccgtataacgaggtgacgggcgcccccgcccagtttgaagggacagagcaagccccatttctgggaagcagaggcggcgcgcctttccagttcggaggccagagaaggccactgctgtctcagctgaaaggcccccgaggcggcccccctccctctcagtttggaggtcagagaggaccaccccctggtcatttcgtgggcccaagagggccccatcctagtcagtttgaaactgcccggggccctcatcccaaccagtttgaaggacccagaggccaagcgcctaactttatgccaggtcccaggggcattcagcctcagcagttcgaagaccagagggtccattcaccaccaagattcacaaaccaaagggcgcctgcacccctgcagtttggtggactacgggggtccgcacccttttctgaaaaaaatgagcagaccccttcgcgatttcacttccagggccaggccccgcaggtgatgaagccgggccccaggcccctgctggagcttcccagccaccccccgcagcaccggaaggaccgctgggaggaggccgggccgccctccgcgctctcctccagtgcgcccggacagggccccgaggccgacggacagtgggcatcggccgacttccgagaggggaaaggccacgaatacagaaaccagactttcgaagggaggcagagagagcggtttgacgtggggcccaaagagaagccgctggaggagcccgacgcccagggccgggcgtccgaggacaggaggagagagcgcgagcgcggccgaaactggagccgagagcgggactgggaccggccccgggagtgggaccgacaccgggacaaggactccagccgggactgggacagaaaccgggagaggagcgccaaccgcgaccgagagcgcgaggccgaccggggcaaggagtgggaccgcagccgggagcggagcaggaaccgagagcgcgagcgagaccggaggcgcgaccgggaccggtcccggagcagagagcgggaccgagacaaggccagggacagggagcggggccgcgaccgcaaggaccggagcaagagcaaagagagcgctcgggacccgaagcccgaggcctcgagggcctccgacgctggcaccgcctcgcaggcctagacgccccggccgggcagagaccctttttaaagccacgttcgtaagatgcgttgaacaaatagcttttgaaatagccacgatcttagattcaggatagaatattctggacttaaacattactgtaattttgtgtaaatggtttcttacaagatttcacatctttacaattctgatgcttttttaaaaaaactaaactttaatatttccatttaaaattaaaagaaatgggaaattgcctacggagcatattgcttttcagatcatagttatcttttccaataactttattgtaaattttaagggagtttcgttggaccctagagccataccttcactgacatctcatccgtttgtgtttccaaaagctgcttttacaggtcttagccgccgccccggaggccggtgtgggcgtgacctgcaggcgtccaccctgcggctacgggagaagtcttagtagcttgtatctggagtcttgagaaacacaaaccttacaaatgcatctttcttttgtcataaaattggaattacaattttcaactgggaaacagaaacacatttcttagcgtgctcagattttatatatcaccttatcaattttttccaaaacatgatttaaagcaacatctgtcctagtataattgttgcattttaaataacaatttattgaaaaatgttaagttttaccagcctaaaaaaagtaacaaaccaattaagtgtactttgggggcagggaggagtccttgatttgaataatcaggagttttgttggtccagtttcgccttctgagcagttcttctgtatcccgggaaaagtacgctcggccccaaactggtatttgtcagacgatacatgtaaaagtttgtccttgaacgtggaacaagacttgtgtaaagtctgagacgggaactagtgatcactagctcaagaactgcaaatgagacaggaagctgttcactgtgaaacagtctcttgcttgtcgtgtatttttcgagtacttctgaagtgtgaagtaaaaaaatctggctaatttatttgtacaaatacactttgataattttttatattttcataaacttttacagatgtaaaattaaagaacttcacttgttctttggagtctgttattccattgtacgtcactacagatttttcactttatagcacagattttttaagttaagaaaacattgagaatgtatcagtttgagatgtttggtgttgaaagccaagtgtccataggttaaattacattaaagtaggtgtcacgttccaacatctagtacgatgagaaggttttgtttgtttaacatataaagcaaatttttctaatttaaatacacaaatgtaaaaatcaagtgtgtttctttagtttacttgatagagattcctgtacattgtattttatattgcggaggcttatatcactgtacatgagaacatggaacgacctaggttttgttactcgcagtagaataaacagctacaggaa

SEQ ID NO: 226990 - DNA, 6723 bp, Artificial Sequence
  derived and/or modified sequence
atggacgacaagggcgaccccagcaacgaggaggcccccaaggccattaagccgacttctaaagaatttcgaaaaacctggggatttaggagaaccacaatcgctaagagagaaggggccggcgacgctgaagcagaccccctggaacctcccccgcctcagcagcagcttgggctgagcctgaggagaagtgggaggcagcctaagcggacagagagggtcgagcagtttctgacaatcgctcgtcggcgggggcgcaggtctatgccggtgtccctggaagattctggagaacctacctcctgcccggccactgatgctgaaaccgcttccgagggctcagtggaatcggcctcagagaccagaagcggccctcaaagtgcctctaccgctgtcaaagaaaggccagcaagctcagagaaagtcaaaggaggggacgaccatgatgatacctctgatagcgacagtgacggattgacccttaaggaattacagaataggctcagacggaagcgggaacaggaacccaccgagcggcctcttaagggaatccagagtaggctgcggaagaagcggcgagaagagggccccgccgagacggtgggctccgaggccagcgacaccgtcgaaggggttctgccaagcaagcaagaacctgaaaatgatcagggcgtggtgtcccaagcaggaaaggatgacagagaatccaaattagaaggcaaggccgctcaagatatcaaagatgaggagcccggggatctgggacggcccaaaccggaatgcgagggatatgatcctaatgccctctattgcatctgccgccagccacataataaccggttcatgatctgttgtgaccggtgtgaagaatggttccacggggactgcgtgggaatcagcgaagcccgaggtagactgctcgagcggaatggagaggattatatttgccccaactgcacgatcctgcaggttcaggatgaaacccacagtgaaactgcggaccagcaggaggctaagtggcggcctggggacgccgatggaacagattgtacatcaatagggactatcgaacaaaagtctagcgaggatcaagggatcaagggacgtatcgagaaagctgccaacccatcaggcaagaagaagttgaagattttccagccagtgatcgaagctcctggcgcttctaagtgtattggaccgggctgttgtcacgttgctcagcccgactcagtgtattgctcaaacgactgtattcttaagcacgccgccgccactatgaaatttctgagtagtgggaaagaacagaagcctaagcctaaggaaaaaatgaaaatgaagcctgagaagccctcactgcctaagtgtggagcccaggcaggtataaagatatcttccgttcacaaaagacccgcccccgaaaagaaagagacgacagtgaagaaagctgttgtagttccagcccgtagtgaggctctgggcaaagaagcagcctgcgaaagcagcacgccgtcctgggctagcgatcacaactacaatgcagtgaagccggagaaaaccgcagcccccagcccatccctgctatataaatcaacgaaggaagatcgtagaagcgaagaaaaagctgcagctatggctgcatccaaaaaaaccgcacctccgggcagcgccgtggggaaacagccagcacctcgtaatctggtcccgaaaaaatctagcttcgctaatgtggctgcggcaacaccagcgatcaagaaaccgccaagcggctttaagggcacgatccctaaacgtccctggctgtccgccaccccctcctccggtgcgtctgctgccaggcaggcggggccagcgccggccgcggcaactgcggcctccaaaaagtttcctgggtccgctgccctggtcggggctgtgcgcaaacccgtcgtgccgtctgtgccaatggccagtccagcaccaggcagactgggcgctatgtctgcagctccctcacaacccaactcccagatcaggcagaatattaggcgatctctcaaggaaatcctgtggaagagagttaacgacagcgacgatctcattatgaccgaaaatgaagtgggaaaaattgccttgcacattgagaaggaaatgtttaatttattccaggtcactgataacagatataaatccaaatacaggagcattatgttcaacctaaaggatccgaagaatcagggtctctttcacagggtgctacgcgaagagatctcgcttgccaagctggtgaggttaaaacccgaggagctcgtctcaaaggagctctctacatggaaggagagacctgcccgctcagtcatggagtcaagaaccaaactacataacgaatccaagaagacagcccctagacaggaggccatcccagaccttgaggatagcccccctgtgtcggactctgaggagcagcaggagtcagcaagggccgttcctgagaaatcaactgctccattattagatgtattctcctctatgttaaaggatacaactagtcagcatcgcgcacatctattcgatctgaattgtaagatctgtactgggcaggtaccctcagcagaagacgaaccagcccccaaaaaacagaaacttagtgcctcggtgaaaaaagaggacctgaagtcaaagcatgactcatctgctcccgacccggctcccgatagtgcagacgaggtgatgcccgaggctgtgcctgaggtagcctcggagccaggactggagagcgcctctcaccccaacgttgaccggacttacttccccggaccacctggagatggacacccagagccgtctccattggaagacttgagcccctgcccggccagctgtggctcaggagtggtgacaaccgtcactgtcagcggccgggatcctcgcaccgccccgtccagctcgtgcactgccgtcgcatctgctgccagccgccccgattccacacatatggtcgaggcccgtcaggacgtgcccaaaccagtcttaacctcggtcatggtccccaagtctatccttgccaagccctctagctcaccagatcctagatatctctcagtgcccccttctcctaatatctccacctccgagtctaggtccccaccagagggagataccaccctctttctctctagactgtccactatctggaagggtttcattaacatgcagtcagtagccaagttcgtcactaaagcttaccccgtgagcggctgcttcgactatctgtccgaagacctgccggataccattcatattggcggcaggatcgcccctaagacagtgtgggattacgtgggcaaactgaaatcttcggtttccaaggaactgtgcctgatcagattccaccccgccacagaagaagaagaagtggcttatatcagtctgtacagttattttagtagtaggggtcgttttggcgttgtggctaataacaatcgccacgtgaaggatttgtatcttatcccattgagcgcacaggaccctgtgcctagtaagctccttcccttcgaagggccaggcctcgagagtccccggcccaatatcattctgggcctggtgatttgccaaaaaatcaaacgtcccgccaattccggggaactggataagatggacgaaaaacggacccggcttcagccagaggaggcggatgtgccagcgtatcccaaggtggcaacagtgccacagtcagagaagaagccaagcaaatatccgctgtgttctgctgacgctgctgtctccacgactccccctggctctcccccacccccaccccccctccctgaaccccctgtccttaaggtgctttcgagtttaaaacccgccgctccatctcctgcgacggcagccacgaccgctgccgccgcaagcacagcagcttcctccacagcaagctccgcgtcaaagactgctagcccgcttgaacatattcttcaaacactcttcgggaaaaagaagtcttttgatcctagcgcacgcgagcccccggggtcaactgccggtctgcctcaggaaccaaagacgacagccgaggatggggtgcccgccccgccgctcctggatcctatagtgcagcagtttggccagttctctaaggataaagccctggaggaagaggaggacgaccggccctacgaccccgaggaagagtacgaccctgaaagagctttcgacacgcagttggtcgagagaggcagacgccatgaagtagaaagagcccctgaggcagcagccgccgagagagaggaggtggcatatgacccggaagacgagacaatcctggaggaggccaaagttacagttgacgatcttccgaatcggatgtgcgccgatgtgcgaagaaacagcgtggaacggcccgctgaacctgtggcaggagcagccaccccctccttggtcgagcaacagaagatgcttgaggagttgaataagcagattgaagaacaaaaaaggcagctcgaagagcaggaggaggcattaagacaacagagagccgctgtcggcgtctctatggcccatttctctgtgtctgatgctctaatgtctcctccacctaaatcatcccttcctaaagccgagttattccagcaggaacagcaatctgcggataagccagcgtccctgccacccgcttctcaggcctcaaaccaccgggatccacgacaggcaaggaggctcgccaccgagactggcgagggagagggcgagccccttagtaggctgagtgcaaggggggctcagggtgctttgccagagagggacgccagccgcggtggcctggttggtcaggcccctatgcctgttccagaagaaaaggagcccgcctctagcccgtgggcttccggcgaaaagcctcccgctggatcagagcaggacggttggaaggctgagcccggcgagggcacgcgacccgccactgtgggcgattcttcggcaaggccagcacggcgcgtgttactcccgacacccccgtgtggggccctgcaaccaggctttcctctgcaacatgacggagaaagggaccccttcacctgccccggcttcgcttctcaggacaaggctcttggcagcgctcagtatgaggatcctaggaacctgcactcagccggtcggtcttcttctccggccggagagaccgagggtgatcgcgagccacaggccagacctggggagggtacagcgcccctgccaccaccgggtcagaaagtagggggttcccagcctcccttccagggccagcgggagcccggaccccacgctctcgggatgagcggactccatgggcccaacttcccaggtccgcgggggccggccccacctttccctgaagagaacatcgcttcaaacgatggacctcgtgggcccccacctgcaaggttcggagcgcaaaaaggtccaatcccatcgctattttctggacagcatggaccgcctccttatggggactctagagggcctagccccagctatcttggcggaccccggggagtcgcaccaagccagttcgaagaaagaaaagatccccatggcgaaaagcgcgagttccaggatgcaccttacaacgaggtgacaggagcgcccgctcagtttgagggaacagagcaagctccctttcttggctcacggggaggcgccccattccaatttggaggacaacgcaggccattgctgtcgcagttgaaggggcctaggggcggaccccccccaagccagtttggagggcagaggggacctccccctggtcattttgtaggaccacgcggaccccatccatcacagttcgagacagcgagagggccccaccccaaccagtttgaggggccccgagggcaggccccaaacttcatgccaggcccccgggggattcaaccccagcaattcgaggatcaacgcgttcacagcccacctagattcactaaccagcgggcccctgcacctctccaatttggcgggctgagaggctcagcaccttttagcgaaaagaacgagcagacccccagccgatttcattttcagggccaggctccccaggtgatgaagcccgggcctcggcccctacttgagcttccttctcaccctccccaacaccggaaagaccgctgggaagaggccggccctcccagtgctttgtcctcttctgcccctggtcaggggcccgaagccgacggacagtgggcttccgcggatttccgcgaaggtaagggacacgagtacaggaaccaaacattcgagggaaggcagcgtgagcgttttgacgtcggtcctaaggagaaacctctggaagaaccagacgctcaggggcgtgccagcgaggacagaaggagagagcgggagcgaggccgcaactggagccgcgaaagagattgggatagacctagagagtgggatcgtcaccgagataaggactcgagtagagactgggatcgcaaccgtgagcgctcagcaaatagagatcgcgagcgcgaggcggataggggtaaggagtgggatcggtcccgtgagcgctcaaggaacagggagagagagcgggacaggcggcgcgacagagataggtccagatcgagagagagagatcgtgataaagccagagacagagaaaggggacgggacagaaaggaccgatccaagagtaaggaaagcgcccgagatcccaaacctgaagcctcccgggcctcagatgccggtactgcttcacaagcgtag

SEQ ID NO: 226991 - DNA, 6723 bp, Artificial Sequence
  derived and/or modified sequence
atggatgataagggcgatccgagcaatgaagaagcaccaaaggcgatcaagcctacttccaaggagttcaggaagacatggggcttccggagaacaactatagctaagagggagggagccggagacgccgaggcagaccccctcgagcctccccctcctcagcagcagctgggcctgtccctgcgcaggtccgggagacagcccaagaggactgagagagtggaacagttcctgactattgccagacgcagggggaggcgctccatgcccgtcagcctggaagattctggtgaacccacctcgtgtcctgccacagatgcagagacagcatccgagggtagcgtcgaatctgcatctgaaacgaggagtggacctcagtctgcatctaccgcagtaaaagagaggcccgcttcctccgagaaggtgaagggcggagatgaccacgacgacacttccgattcggacagtgatggcctgacactcaaggagttacagaacaggctacgtagaaaaagagaacaggagcccactgaacgccctctaaaagggatccagtcccggctccgcaagaaacgccgagaggagggccctgcagaaactgtgggtagcgaggcaagcgatacagtcgagggggtgcttccaagtaagcaggagcctgaaaacgaccaaggtgtggtgagtcaggcaggtaaagatgatagagagagcaaacttgaagggaaggctgcacaggatattaaggatgaagaacccggtgacctgggaagaccaaagccggagtgcgaaggatatgatcctaacgccctgtactgcatctgccgccagcctcacaataaccgttttatgatatgttgcgaccggtgcgaagaatggttccatggggattgcgtaggcatcagcgaagccagagggcgtctcctcgagcgtaatggtgaggattatatctgtccaaattgcaccatccttcaggtgcaagacgaaactcactccgagacagccgaccagcaggaggctaagtggcggcctggtgatgctgacgggactgactgtacctccataggaacgattgaacagaaatcgtcggaagatcaaggaatcaaaggccgaatagagaaggcagctaatccatccggcaagaagaaacttaaaatctttcagcccgtgattgaagcgcctggtgccagtaaatgcatcggtccaggctgctgtcacgttgctcagccagactccgtgtattgttccaacgactgcattttgaagcacgccgctgccacgatgaagttcctctctagtggcaaggagcagaaaccaaaaccaaaagaaaaaatgaaaatgaaacccgaaaagccctccctgcccaaatgtggcgctcaagctggtatcaagatctcttcagtgcataaacgccctgcgccagaaaagaaggaaactaccgtcaaaaaagccgtcgttgtgcccgcaaggagcgaggctctgggaaaggaggctgcctgtgagtctagcacgccatcatgggcatctgaccataattataacgccgttaaaccagagaaaaccgcggcaccaagtccatctctcctgtacaaaagtacaaaagaagaccggaggtccgaggagaaggccgctgcgatggccgcttccaaaaagaccgcaccacctgggtcagccgttggcaagcagccggcaccacggaacctagtgccaaaaaagtcctcatttgctaacgtcgcagctgctacccccgctatcaaaaaacctccttctggctttaagggcacaatacccaagaggccatggctgtctgccaccccatcctctggagcctctgccgctaggcaggccggaccagcgcctgcagcggctaccgctgcttccaaaaagtttcccggtagcgccgcactggttggggcagtgaggaagccggttgttccttccgtacccatggcaagccccgctcctggtcgcctgggtgccatgtccgcggcaccgagccaacccaactcgcagataaggcagaacatccggagaagtctgaaggagatcctctggaaaagagtcaacgactcagatgacttaatcatgaccgaaaacgaggtagggaagatcgctctgcatatcgaaaaggagatgtttaacttatttcaggtgacagataataggtataaaagcaagtacagaagcatcatgtttaacttgaaggatccaaagaatcagggcctgtttcatagggtactgcgagaggagatctccctcgccaaactggtaaggctcaagccagaggagctggtaagcaaagagctgagcacgtggaaggagagacctgctcgctccgtgatggagagccgcactaaactacacaacgaaagcaaaaaaaccgccccacggcaggaggccattccggacctggaggattcacccccagtttctgattctgaagagcagcaggaatccgcgagagctgtgcccgaaaaatccacggcacctctgctagacgtgttcagttcaatgctcaaggatacaacgagtcagcatcgcgcacatcttttcgatctcaactgcaagatctgtaccgggcaggtgccgtcagctgaagatgaacccgcacccaagaaacaaaaactgtccgcatctgtcaaaaaggaagacttgaagagtaagcacgattcgtccgctcctgaccccgctcctgattctgccgatgaggtgatgcccgaagcggtgccagaagtagcctccgaacctggcctggagtctgcctcacatccaaacgtcgacagaacgtactttccgggaccaccaggcgatggtcatccggagccatccccgctggaagatctgtctccctgtcctgcgagctgcggatccggggtggtcacaaccgtaactgtgtccgggcgtgatccgaggaccgcccctagctcatcctgcacagccgttgctagcgccgcaagccgccctgactccacccacatggtcgaagctcgccaggacgtgccaaaacctgttctgacgtcggtaatggtgccaaagtcaattttggcaaagccgagcagttcccctgacccgcgttatctctctgtccctccatcccccaatatctcaacatctgagagcagatctcctcctgagggcgacaccactcttttcctgtctagactgtctacgatctggaaagggtttataaacatgcagtccgtcgcgaagttcgtgactaaggcttaccccgtttccggctgttttgactacctttccgaggacctcccagatacaatccacattggcggtaggattgctccaaaaacggtgtgggactatgttggaaagctgaagagctcagtgtcaaaggaactctgcttgatccggtttcacccagctacagaagaggaggaggtggcctacatctccctttattcctacttctccagcagaggacgttttggagttgtcgcaaataataatagacacgtgaaagacctctatctgatccccttgagcgcacaagaccccgtgccttcaaaactcttgccttttgaggggccagggctggaaagtcctcgacccaacatcatcctgggtttggtaatttgtcagaaaattaaacggcctgcgaacagcggcgagttggacaagatggatgagaagaggacgcgcctgcagccggaggaggccgacgttcctgcctaccccaaggtcgctaccgtgccacagtcagagaagaagccttccaaatatccgctatgctctgcggatgctgccgtgtctacaacacccccaggtagccccccacctccaccacctttgccagagccccctgtgctcaaagttctgagcagcctcaagcctgctgccccatcacccgctacggcggctacaactgcagcagctgcctcaaccgccgcttcatccacagcgtcaagcgccagtaaaaccgcctctcctctggagcacatcctccaaacactgtttggcaagaaaaagagttttgatccaagtgctcgcgaaccccctggcagcacagccggactccctcaggagcctaaaaccacagccgaggacggggtgcctgcaccacctctattggacccaatcgtgcagcagttcgggcaattcagcaaagacaaagctctggaagaggaagaggatgaccgaccttatgatccggaggaagagtatgacccagagagagcatttgacacacagctggtagagcggggaaggagacacgaggttgagcgcgcacccgaagccgcagccgcagagcgagaggaggtggcgtacgacccggaggatgagactattctggaggaagctaaagtgaccgtagacgacctgcccaatcggatgtgtgctgatgtgagacgaaacagcgtagagcgaccagcagaaccagtggccggtgcagctacacctagtctggtcgagcagcagaagatgctcgaggaactcaataagcagatagaggagcagaagcgtcagctggaagagcaggaggaagctctgagacaacaaagggcggctgtgggtgtctcgatggctcatttcagcgtgagcgatgccctgatgtcacccccaccaaagtcttcactgccaaaggcagagctctttcagcaggagcagcagagtgctgataagccagcatccctcccgccagcttcacaagccagcaaccacagagatcctagacaggcaaggcggctggctaccgagacaggtgaaggggaaggtgagcctcttagccggttgtccgccagaggcgcacagggcgcactgcccgagcgagacgcatccagaggcggactggttggccaagctccaatgcccgtccctgaagaaaaagaaccagcaagctccccgtgggcctctggcgagaagccaccagcaggaagcgagcaggacgggtggaaggccgaaccaggagaaggaacaaggcctgcaactgtgggcgattcctccgcccgacccgctcgacgggtactattgcccacacctccttgtggagcactccagcccggatttcccttacagcatgacggtgaaagggaccccttcacatgtcccggttttgccagtcaggacaaggcccttgggagtgcacagtatgaagacccgaggaacctgcattcagccggtagatcgagctcgcctgccggagagaccgagggggatcgagagcctcaggccaggcctggagaagggactgccccactgccaccccctggccaaaaagtagggggttcccagccgcctttccagggccagagggaacctggaccccatgccctaggaatgagtgggctgcacggccctaacttcccaggccctcggggacctgctccgccatttcccgaagaaaatattgcctccaatgatggtccccgtggtcctccaccagcgagattcggggctcagaaaggcccaatcccaagtctgttcagcggccagcatggaccaccaccctatggtgatagcagagggccaagcccttcctatctaggcggacctaggggggtggctccgtctcaatttgaagagagaaaagaccctcacggagaaaagagggaatttcaggatgctccctacaatgaagtgacaggggcacctgctcagttcgaaggaacagaacaagcccctttcctagggagccggggtggagctccttttcagttcggaggacaaagacgtccactgctcagccagttaaagggccctcgtggaggcccaccaccctcccagtttgggggacagaggggaccccctcctgggcactttgtaggacccaggggaccacatcccagccagttcgagactgctcgtggacctcacccaaaccagtttgagggacccagaggccaggcccctaatttcatgcccggaccacgaggaattcaacctcagcagttcgaggaccaaagagtacacagtccccctaggttcacgaaccaacgggctcctgctcccctccagttcggaggcctgaggggaagtgcaccgttctctgaaaaaaatgagcagacaccctcccggttccatttccagggacaggccccacaagtcatgaaacccggaccacgccctctcttggaactgccgtcccacccaccccagcaccgcaaagaccggtgggaagaggccggtccaccatcagctctctcttcatcggctccaggccaggggccagaggcagacggccagtgggccagcgccgattttcgagagggaaagggccatgaatatcgaaatcagactttcgaaggtcgtcagcgcgaacggtttgatgtggggcctaaggagaagcccttggaggaaccggatgcccagggcagagcctcagaagaccgaaggagagagcgcgaaaggggacgaaattggtccagagaaagagactgggatcgcccacgtgagtgggatcgccaccgagataaagactcatcccgagactgggatcgtaaccgcgaacgcagcgcgaatcgcgatagagagagggaagcagaccggggtaaagagtgggacagatctagggaacgttctcgaaaccgggaacgagaacgtgatagaaggcgcgaccgagaccgaagccgctccagagagagggatcgcgacaaggcaagggatcgagagagaggaagagataggaaggacaggtccaaatcaaaagaaagcgctagagatccaaagcctgaggctagcagggcctctgacgcaggtacggctagccaggcctac

SEQ ID NO: 226992 - DNA, 6722 bp, Artificial Sequence
  derived and/or modified sequence
atggatgacaagggtgatccctccaatgaagaagcacccaaagccatcaagccaaccagcaaagaattcagaaagacttggggttttcggaggacaacaatcgctaagagagaaggtgccggagacgcagaggcagacccactcgaaccccctcccccacaacaacaattagggctaagtctccgcaggtcagggaggcagccgaagagaacggaacgggttgaacagttcttgaccatcgccagacgccgaggaaggcgaagcatgcctgtgagcctggaggacagtggcgagcccacaagctgccccgctactgatgctgagaccgcttcagagggcagtgtcgagtccgcatccgaaaccagatcaggcccacaatcagccagcacagccgtgaaagagcgccctgccagcagtgagaaggtgaaaggcggagacgaccacgatgacacttctgattcagactccgacggcctcacgctgaaggaattgcagaacagattaagacgcaaaagggagcaggagccaaccgaacggccattaaaaggcatccaatctcgcctgcgcaagaagaggcgcgaagaaggaccagctgaaaccgtgggttctgaggcttccgataccgtggagggagtgctcccaagcaagcaggaacctgaaaatgaccagggagtggttagccaagccggaaaggatgaccgagaatcaaagcttgaggggaaggctgcccaggacatcaaggatgaggaaccaggcgatctgggacgccctaagcctgaatgcgaggggtatgatcctaacgcactgtattgtatctgccggcagcctcataacaatcggtttatgatctgctgcgatcggtgcgaggagtggtttcacggcgactgtgttggtatatcagaagccaggggcaggctccttgaacgaaacggagaagactacatatgcccaaattgtacaattctgcaagtgcaggatgagacccatagtgagaccgcggaccagcaggaggcaaagtggagacctggcgatgccgatgggaccgactgcacatcaataggtaccatcgagcagaaatcgagcgaagatcagggaatcaaaggccgaatcgagaaggccgctaacccctcggggaagaagaaacttaagatattccagccagtgatagaagcccctggagcatccaagtgcatagggcctgggtgctgtcacgtggcacaacctgacagcgtgtactgctcaaacgattgcatcttgaaacacgccgcagcaacaatgaaattcttatcatctggaaaggaacagaagcccaagccaaaggaaaagatgaaaatgaagccggagaagccatcacttccgaagtgtggtgcacaggctggcatcaagatatcttccgtacataaaagaccggctcctgagaagaaggaaacaaccgttaagaaggccgtcgtcgtccccgcacgtagcgaagctctggggaaggaggcagcttgtgagtccagcaccccgtcttgggcctcagaccacaattacaacgcggtaaaacctgagaaaactgcagcgccaagcccctcactcctgtacaaatcgacaaaagaagaccgcaggagcgaggagaaggccgctgcaatggctgcgagcaagaagaccgcaccccctggatcagccgtgggaaaacagcccgctccccgtaacctggtaccaaagaaaagctcctttgctaatgtcgccgctgcgaccccagctattaaaaagcctcctagcgggttcaaagggacaatccctaagcgcccatggctcagcgctaccccatcgagcggagcttccgcagcccgacaggcagggcctgcccctgccgctgcaaccgccgcttcaaaaaaattcccagggtccgctgctctggtcggcgctgtcagaaagccagtggtgccaagtgtgccaatggcatcacctgcacccggtaggcttggcgcaatgtcagctgccccaagtcagccaaactctcagatccgtcagaacataaggcggtccctcaaagagatactgtggaagcgcgtcaatgacagcgacgatcttatcatgacagagaacgaagttggcaaaatcgcccttcacatcgaaaaagagatgttcaatctctttcaggtgaccgataacaggtacaaatctaagtaccgttctatcatgttcaatctgaaagatcccaaaaaccaaggtctctttcaccgggtgctccgcgaggaaatctcgttagcaaagctggtacgcctaaagccggaagaactggtgtccaaggaactttcaacatggaaggagcgaccagctagaagcgtaatggaaagcagaaccaagctgcataacgagtcaaagaagaccgcgcctcggcaggaggctatccccgacctggaagattcccccccagtgtcagatagcgaagagcaacaggaaagcgctcgggctgtgcctgagaagagcaccgcccctctgctggacgtgttttctagcatgttgaaggataccacatcccagcatagggcgcatttgtttgaccttaactgcaagatctgcacaggccaggtgccctccgcggaggacgaacccgcacccaagaagcagaagctgagcgcctccgtcaaaaaggaagatttgaagtccaagcacgattcatctgcccctgatcctgcccctgattccgcagatgaagtcatgcctgaggcagtgccagaagttgcctccgaaccgggtctggagtccgccagccaccctaatgtggaccgaacttattttcccggacctcccggtgacggccatcccgagccttccccccttgaggatctctccccctgtcctgcgagttgtggttctggagtagtgaccaccgtgactgtctccggccgagatccacgcactgctccgagtagcagctgcacagcagtcgcatcagctgctagccgacccgatagtacacatatggtcgaagctaggcaggacgtcccaaagcctgtcctgacatcggtgatggtgccaaagagtatcctcgccaaaccctcctcttctccagaccctcggtacttatccgtccccccaagccctaatatttccaccagcgaaagccgttctccacccgaaggggatactaccctctttcttagccgactgagtacgatttggaaaggcttcatcaacatgcagagtgttgccaaattcgtcactaaggcctaccctgtcagcgggtgtttcgactatctctccgaagacctgcctgatactattcacataggtggacgcattgcacccaaaaccgtctgggactacgtcggcaagctgaagtcaagcgtcagcaaggaactctgcttaataagattccaccctgccacagaggaggaggaggtggcttacatcagtttatattcctacttctcttcgcgcggtagatttggagtggtggctaataataataggcacgtaaaagatctgtacctgattcccctctccgctcaggatcctgtgccatctaagttgttgccgttcgagggacctggactcgaaagccccaggccaaacatcatactcggactggttatttgtcaaaaaatcaagaggccagcgaattccggtgagctggataaaatggacgagaagcggacgcgtcttcagccagaggaagcggacgtaccggcatacccgaaggtcgccacagtaccccagtctgagaagaagcctagtaaataccccctgtgttcagctgacgccgcagtgtctaccactcccccaggtagtccccctccaccacccccactccctgagcctccagtgctaaaggttttaagttccctcaagcccgctgctccttcacccgctactgctgccactactgccgcagcggcaagcacggccgcaagctcaacagcctcctccgcttccaagaccgcaagcccactggagcatattctgcagacactgttcggtaaaaaaaagtcatttgatcccagcgcgagggagccaccgggaagtactgccggactgcctcaggagcctaagaccactgcagaggacggggtgcccgcacctcctctactcgaccccattgtacagcaattcgggcagttttcaaaagataaggcactggaggaggaagaagacgacaggccatacgatcccgaggaggaatatgacccagagcgggcattcgatacccaactagtggagagagggcgacggcatgaagtggagcgggcacctgaagcagctgcggctgaaagagaagaggttgcttatgatcccgaggatgaaaccattcttgaagaagccaaagtgacggtcgatgaccttcctaatcgcatgtgcgctgacgtgaggcgcaattctgtggagcgacctgccgagcccgtagccggagccgcaacccctagccttgtggagcaacagaaaatgctcgaggaattaaataaacagatagaggaacagaaaaggcagctggaagagcaagaagaggcattgaggcaacagcgggctgccgtgggcgtttcaatggcccacttctccgtgtccgacgcattaatgagcccgccaccaaagtcttcccttcctaaggccgaactctttcagcaagaacagcagagtgcagataaacccgctagtttgcctcccgctagccaggcttctaaccatcgcgatccccgtcaggcccgacgcctggcaacagagacaggtgagggcgagggcgagcccctgagccggttatcagccaggggggctcagggagcattgcccgaacgggatgcaagtagaggaggcctcgtcggacaggcccctatgcctgttcccgaggaaaaggaacctgcctcaagcccgtgggcctctggcgaaaaaccccctgccggtagcgagcaggatggctggaaagccgaacccggtgaagggaccaggccagccacagtgggcgacagctccgcgaggccagcaagacgagtgctattgccgactcccccatgtggcgctttacaacccggatttccgctgcagcacgacggtgaaagagatccctttacttgcccaggttttgcctcccaggataaggcgctggggagcgcgcaatacgaggaccctcgaaatctacattctgcagggagaagctccagccctgccggtgagacggaaggcgatcgagagccccaagcacgtcccggtgaaggaacagcccctttacctccaccagggcagaaggtgggcggaagccagcccccatttcagggccaacgcgagcctgggcctcatgccctgggcatgtctggactgcatggccctaactttccaggcccacgaggtccagccccaccgttccccgaggaaaacattgcaagcaatgacggccctcgcggtccacccccagcacggttcggggctcagaaaggtccgatcccttccttgttttcagggcagcacggtccccctccatatggagatagccgtgggccatccccctcatatctgggcggaccccgtggcgtagccccttcacagttcgaggaacggaaggacccccacggagaaaaacgcgagttccaagatgctccttacaacgaggtaacaggagcccctgcgcagtttgagggaacagagcaggctccctttctgggctctagaggtggggcaccctttcaatttggtggccagcgacgcccattgctgagccagctcaaaggacctcggggtgggcctccgccttcgcagtttggcggacagcggggtcctccaccaggacattttgtgggcccacggggtccccatccttctcagttcgagacggctagaggaccgcaccctaatcagttcgagggtccaagggggcaggctcccaatttcatgcccggacctcgcggaattcagccacagcagtttgaggaccagcgggtgcactccccaccgagatttacgaaccaacgggctcctgcccctctgcagttcggtggcctgcgcggaagtgctccttttagcgagaagaacgaacagaccccgtcacggttccactttcagggccaagctcctcaggtgatgaagccgggtccgagacccctattggagctccctagtcatccaccacaacaccgaaaggacagatgggaagaagccggacccccttcagctctgagtagtagtgcaccgggacaaggcccagaagccgacgggcagtgggcctcggccgactttagggagggcaagggacacgaatatcgaaatcagacctttgaagggcgtcagagagagcggtttgacgtgggacctaaagagaagccgctggaggaaccagatgcccagggtagagcctctgaggaccgtcgcagggagcgtgaacggggtaggaactggagtagagaacgcgactgggacaggccacgggaatgggaccggcatcgagacaaggatagctccagggattgggacagaaatagggagaggtccgcaaatcgagaccgggagcgcgaagcagatcggggaaaggagtgggatcggtcccgggaaagaagcagaaatagggagcgtgagagggatcggaggcgcgaccgggaccgctcgcgaagcagggaaagggaccgcgataaagccagagatcgcgagagggggagagaccggaaggacaggtctaagtctaaagagtctgctagagaccccaaaccagaagcaagcagagcctccgacgcagggaccgctagtcaggctta

SEQ ID NO: 226993 - DNA, 8544 bp, Artificial Sequence
  derived and/or modified sequence
cacgcactacgggttggcgccagagtcaaaaggcgtcggccctctggcaagatggctgctgcggaggcgttggagcgcggaaatctggaaccgggatggcgacgtctacactgagtcggaggcgaaggagcttactccacgggaacagcctctagataatctgagttgttgaaaatacgaagcctgttactcgtgaacagtggctgacaacagtgttgttgtgagcctggctgtctgcttggacccagaggtttcgtctgccagggtttttggttgtatttaggatttcagggaaaagtgtccaagctttcagtgttggagcaggtatggacgacaaaggcgacccgagcaatgaggaggcacctaaggccatcaaacccaccagcaaagagttcaggaaaacatggggttttcgaaggaccactatcgccaagcgagagggcgcaggggacgcggaggctgacccactggagccgccacccccacagcagcagctgggcctgtccctgcggcgcagtgggaggcagcccaagcgcactgagcgcgtggagcagttcctgaccattgcgcggcgccgcggcaggaggagcatgcctgtctccctggaggattctggtgagcccacgtcctgccccgccacagacgccgagacagcctccgagggcagcgtggaaagcgcttctgagaccagaagcggcccccagtctgcttccacagctgtgaaggaacgaccagcctcttctgaaaaggtgaaaggaggggatgaccacgatgacacctccgatagtgacagcgatggcctgaccttgaaagagcttcagaatcgccttcgcaggaagcgggaacaggagcccactgagaggcccctgaaagggatccagagtcgcctgcggaagaagcgccgggaggagggtcccgccgagactgtgggctccgaggccagtgacactgtggagggcgtcctgcccagtaagcaggagcccgagaacgatcagggggttgtgtcccaggctgggaaagatgacagagagagtaagttggagggaaaggcggctcaggacatcaaagatgaggagcctggagacttgggccgaccgaagcctgaatgtgagggttacgaccccaacgccctgtattgcatttgccgccagcctcacaacaacaggtttatgatttgctgtgaccgctgtgaagaatggtttcatggcgattgtgtgggcatttctgaggctcgagggaggcttttggaaaggaatggggaagactatatctgcccaaactgcaccattctgcaagtgcaggatgagactcattcagaaacggcagatcagcaggaagctaaatggagacctggagatgctgatggcaccgattgtacaagtataggaacaatagagcagaagtctagcgaagaccaagggataaagggtagaattgagaaagctgcaaatccaagtggcaagaagaaactcaagatcttccagcctgtgatagaggcgcctggtgcctcaaaatgtattggccccgggtgctgtcacgtggcgcagcccgactcggtgtactgcagtaatgactgtatcctcaaacacgccgcagcgacaatgaagtttctaagctcaggtaaagaacagaagccaaagcctaaagaaaagatgaagatgaagccagagaagcccagtcttccgaaatgcggtgctcaggcaggtattaaaatctcttctgtgcacaagagaccagctccagaaaaaaaagagaccacagtgaagaaggcagtggtggtccctgcgcggagtgaagcactcgggaaggaagcagcttgtgagagcagcacgccgtcgtgggcgagcgatcacaattacaatgcagtaaagccagaaaagactgctgctccctcgccgtcactgttgtataaatccacgaaggaagacaggaggtccgaggagaaagcggcagccatggcagcctcaaagaaaacagcccctccaggctccgcggtgggcaagcagcctgcacctagaaacctcgtgccaaagaagtcttcttttgctaatgtggcagcagccacaccagccattaaaaagccaccctcaggtttcaagggcaccatccccaagaggccatggctctccgctaccccatcgagtggtgcttcagctgccaggcaggccggaccggcacctgcagcggcaacggctgcctccaagaagttccctggctccgctgctttggtgggagccgtaaggaagccagtggtaccttctgttccaatggcctcgccagccccaggacgccttggggctatgagtgctgcaccatcgcagccaaattcacaaattcggcaaaatatcagacgctccttaaaagagattttgtggaaaagagtcaatgacagcgatgacttaatcatgacagaaaacgaagtaggaaaaattgccctccatattgagaaggagatgtttaacttgtttcaagttacagataatcgctacaagagtaaatatcgcagcatcatgttcaacctgaaggaccctaaaaatcagggactcttccatcgtgttctgcgtgaggaaatctctttggcgaaacttgtgagactgaagccagaagaacttgtatctaaagagctttccacgtggaaagagaggccagcgagatctgtgatggagtccagaactaaactgcacaatgaaagcaagaagacggcccccaggcaggaggccatccccgatctggaggactctccgccagtgtcggattcagaggaacagcaagagtcagcacgtgctgtccctgagaagagcacagcgccgcttctcgacgtcttcagcagcatgttgaaagacaccaccagtcagcaccgcgcacacctcttcgatctcaactgtaaaatttgcacaggccaggttccctccgcagaagatgagccagctccgaaaaaacaaaaattgtcagcttctgttaagaaagaagacttaaaatcaaagcatgacagctctgcacctgacccagctccggattcagctgatgaggtgatgccggaggctgtgcctgaagttgcctctgagccaggcctagaaagtgcttctcatccaaatgtggacagaacgtatttccctgggcctccaggagatggccatcccgagccctccccgctggaagacctgtccccctgcccagcctcctgtgggagcggggtggtcaccaccgtcacagtgtccggccgggaccccaggaccgctccaagcagttcatgcacagccgtggcctccgcagcatcccgcccagacagcacccacatggtggaagccagacaggatgtgccgaagcctgtcttgacttctgtgatggtgcccaagtccatactagctaagccatcctcatctcctgacccaagatacctgtcagttcctccgtcaccaaatatcagcacttcagaatcacgttcccctccagagggagacacgaccctctttttgtctcgactcagcaccatttggaaaggatttattaacatgcagagtgtggcaaaatttgtcactaaggcgtatcctgtctctgggtgttttgattacctcagtgaggatttgcctgacacaattcacattggtgggaggatcgcaccgaagacagtttgggattatgttggcaaactcaagtcttctgtgtctaaggagctctgtctgatccgcttccaccccgccacagaggaagaggaggtcgcctatatctctctctactcctatttcagcagccgtggccgctttggtgttgtagctaataacaacaggcacgtcaaggacctctacctgatcccgctgagcgcccaggaccctgttccatccaaactcttgccctttgagggaccaggtcttgagtcaccacgtccgaatataattcttgggttagtaatctgccaaaaaatcaaacgtcccgcaaacagtggagagttagacaagatggacgaaaagcggacccgacttcaaccggaagaagcggacgttccggcctatccaaaagtagccacagtcccgcagtcggaaaagaagccctccaagtatccactctgctctgcagacgcggctgtcagcaccacacctcctgggtcgccgccgcctccgccccctcttccagaaccaccggtgctaaaagtgctgtcatccctcaaacctgcagcccccagcccagccacagcagccacaacagcagcggcagcctccacggcagcttcctccaccgcttcgtctgcttccaaaacagcatcaccgctggagcacatcctgcagactctctttggaaagaagaaatcattcgacccgtccgccagagagcctcccgggtccaccgcaggtctcccccaggagcccaaaaccacagcagaggacggggtgccggcacctccgttgttagatccgatcgtccagcagttcggtcagttctcaaaagataaggctctagaggaagaggaggacgacaggccatacgaccctgaggaggagtacgacccggagagggccttcgacactcagcttgtggagcgagggcggcgccacgaggtggaaagggctcctgaagcagctgcagccgagcgggaagaggtggcctatgaccccgaggatgagaccatcttagaagaagcgaaagtgactgttgatgacctgcccaacaggatgtgtgccgacgtgagaaggaactccgtggagaggcctgccgagccggtggccggggctgcgacgccctccctggtggagcaacagaagatgctagaagagctgaacaaacagatcgaggagcagaagagacagctggaggagcaagaagaagctctcaggcagcagagggccgccgtcggggtctccatggcccacttctcggtgtcggacgccttgatgtctccaccaccaaagtcgtccttgcccaaggcagagctgttccagcaagagcagcagtctgcagacaagcccgcctcactgccccccgccagccaggcgtcaaaccacagggacccccggcaggcgaggcgcctggccactgagaccggtgagggggagggggagcctctctccaggctctcggcacgtggtgcccagggtgccctgcccgagagagatgcttccaggggtggcctcgtgggccaggcgcccatgccagtcccggaggaaaaagagccagcctcttccccctgggcttcgggcgaaaagcccccagcggggtccgagcaggacggctggaaggcagagcctggggagggcacccgccccgccacggttggagacagctcggccaggcctgcccggagggtgctgctgcccacaccgccttgcggcgccctgcagcccggcttcccgctgcagcacgacggtgagagggaccctttcacctgcccggggttcgcgtcgcaggacaaggctctcggctcagcccagtatgaggacccaagaaatcttcattctgctggaaggagcagcagccctgcaggtgaaacagagggggacagagagccacaggccagacccggcgagggcaccgccccgctccccccaccaggacagaaagtggggggctctcagcccccgtttcagggtcagcgggaacctggacctcatgctttggggatgtcagggcttcacggccccaatttcccgggaccaagggggccagcccctccgtttccagaagagaatatcgcttctaacgatgggccacgagggcctccgccagccagattcggagcccagaaggggcccatcccttccttattctcggggcaacatgggccacctccttatggggacagcagaggcccctcaccctcttaccttggtggaccacgaggagtggcaccatcccaatttgaagaacgcaaggatccccatggggagaagagggagttccaggacgccccgtataacgaggtgacgggcgcccccgcccagtttgaagggacagagcaagccccatttctgggaagcagaggcggcgcgcctttccagttcggaggccagagaaggccactgctgtctcagctgaaaggcccccgaggcggcccccctccctctcagtttggaggtcagagaggaccaccccctggtcatttcgtgggcccaagagggccccatcctagtcagtttgaaactgcccggggccctcatcccaaccagtttgaaggacccagaggccaagcgcctaactttatgccaggtcccaggggcattcagcctcagcagttcgaagaccagagggtccattcaccaccaagattcacaaaccaaagggcgcctgcacccctgcagtttggtggactacgggggtccgcacccttttctgaaaaaaatgagcagaccccttcgcgatttcacttccagggccaggccccgcaggtgatgaagccgggccccaggcccctgctggagcttcccagccaccccccgcagcaccggaaggaccgctgggaggaggccgggccgccctccgcgctctcctccagtgcgcccggacagggccccgaggccgacggacagtgggcatcggccgacttccgagaggggaaaggccacgaatacagaaaccagactttcgaagggaggcagagagagcggtttgacgtggggcccaaagagaagccgctggaggagcccgacgcccagggccgggcgtccgaggacaggaggagagagcgcgagcgcggccgaaactggagccgagagcgggactgggaccggccccgggagtgggaccgacaccgggacaaggactccagccgggactgggacagaaaccgggagaggagcgccaaccgcgaccgagagcgcgaggccgaccggggcaaggagtgggaccgcagccgggagcggagcaggaaccgagagcgcgagcgagaccggaggcgcgaccgggaccggtcccggagcagagagcgggaccgagacaaggccagggacagggagcggggccgcgaccgcaaggaccggagcaagagcaaagagagcgctcgggacccgaagcccgaggcctcgagggcctccgacgctggcaccgcctcgcaggcctagacgccccggccgggcagagaccctttttaaagccacgttcgtaagatgcgttgaacaaatagcttttgaaatagccacgatcttagattcaggatagaatattctggacttaaacattactgtaattttgtgtaaatggtttcttacaagatttcacatctttacaattctgatgcttttttaaaaaaactaaactttaatatttccatttaaaattaaaagaaatgggaaattgcctacggagcatattgcttttcagatcatagttatcttttccaataactttattgtaaattttaagggagtttcgttggaccctagagccataccttcactgacatctcatccgtttgtgtttccaaaagctgcttttacaggtcttagccgccgccccggaggccggtgtgggcgtgacctgcaggcgtccaccctgcggctacgggagaagtcttagtagcttgtatctggagtcttgagaaacacaaaccttacaaatgcatctttcttttgtcataaaattggaattacaattttcaactgggaaacagaaacacatttcttagcgtgctcagattttatatatcaccttatcaattttttccaaaacatgatttaaagcaacatctgtcctagtataattgttgcattttaaataacaatttattgaaaaatgttaagttttaccagcctaaaaaaagtaacaaaccaattaagtgtactttgggggcagggaggagtccttgatttgaataatcaggagttttgttggtccagtttcgccttctgagcagttcttctgtatcccgggaaaagtacgctcggccccaaactggtatttgtcagacgatacatgtaaaagtttgtccttgaacgtggaacaagacttgtgtaaagtctgagacgggaactagtgatcactagctcaagaactgcaaatgagacaggaagctgttcactgtgaaacagtctcttgcttgtcgtgtatttttcgagtacttctgaagtgtgaagtaaaaaaatctggctaatttatttgtacaaatacactttgataattttttatattttcataaacttttacagatgtaaaattaaagaacttcacttgttctttggagtctgttattccattgtacgtcactacagatttttcactttatagcacagattttttaagttaagaaaacattgagaatgtatcagtttgagatgtttggtgttgaaagccaagtgtccataggttaaattacattaaagtaggtgtcacgttccaacatctagtacgatgagaaggttttgtttgtttaacatataaagcaaatttttctaatttaaatacacaaatgtaaaaatcaagtgtgtttctttagtttacttgatagagattcctgtacattgtattttatattgcggaggcttatatcactgtacatgagaacatggaacgacctaggttttgttactcgcagtagaataaacagctacaggaagtttc

SEQ ID NO: 226994 - DNA, 6723 bp, Artificial Sequence
  derived and/or modified sequence
atggacgacaagggcgaccccagcaacgaggaggcccccaaggccatcaagcccaccagcaaggagttcagaaagacctggggcttcagaagaaccaccatcgccaagagagagggcgccggcgacgccgaggccgaccccctggagcccccccccccccagcagcagctgggcctgagcctgagaagaagcggcagacagcccaagagaaccgagagagtggagcagttcctgaccatcgccagaagaagaggcagaagaagcatgcccgtgagcctggaggacagcggcgagcccaccagctgccccgccaccgacgccgagaccgccagcgagggcagcgtggagagcgccagcgagaccagaagcggcccccagagcgccagcaccgccgtgaaggagagacccgccagcagcgagaaggtgaagggcggcgacgaccacgacgacaccagcgacagcgacagcgacggcctgaccctgaaggagctgcagaacagactgagaagaaagagagagcaggagcccaccgagagacccctgaagggcatccagagcagactgagaaagaagagaagagaggagggccccgccgagaccgtgggcagcgaggccagcgacaccgtggagggcgtgctgcccagcaagcaggagcccgagaacgaccagggcgtggtgagccaggccggcaaggacgacagagagagcaagctggagggcaaggccgcccaggacatcaaggacgaggagcccggcgacctgggcagacccaagcccgagtgcgagggctacgaccccaacgccctgtactgcatctgcagacagccccacaacaacagattcatgatctgctgcgacagatgcgaggagtggttccacggcgactgcgtgggcatcagcgaggccagaggcagactgctggagagaaacggcgaggactacatctgccccaactgcaccatcctgcaggtgcaggacgagacccacagcgagaccgccgaccagcaggaggccaagtggagacccggcgacgccgacggcaccgactgcaccagcatcggcaccatcgagcagaagagcagcgaggaccagggcatcaagggcagaatcgagaaggccgccaaccccagcggcaagaagaagctgaagatcttccagcccgtgatcgaggcccccggcgccagcaagtgcatcggccccggctgctgccacgtggcccagcccgacagcgtgtactgcagcaacgactgcatcctgaagcacgccgccgccaccatgaagttcctgagcagcggcaaggagcagaagcccaagcccaaggagaagatgaagatgaagcccgagaagcccagcctgcccaagtgcggcgcccaggccggcatcaagatcagcagcgtgcacaagagacccgcccccgagaagaaggagaccaccgtgaagaaggccgtggtggtgcccgccagaagcgaggccctgggcaaggaggccgcctgcgagagcagcacccccagctgggccagcgaccacaactacaacgccgtgaagcccgagaagaccgccgcccccagccccagcctgctgtacaagagcaccaaggaggacagaagaagcgaggagaaggccgccgccatggccgccagcaagaagaccgccccccccggcagcgccgtgggcaagcagcccgcccccagaaacctggtgcccaagaagagcagcttcgccaacgtggccgccgccacccccgccatcaagaagccccccagcggcttcaagggcaccatccccaagagaccctggctgagcgccacccccagcagcggcgccagcgccgccagacaggccggccccgcccccgccgccgccaccgccgccagcaagaagttccccggcagcgccgccctggtgggcgccgtgagaaagcccgtggtgcccagcgtgcccatggccagccccgcccccggcagactgggcgccatgagcgccgcccccagccagcccaacagccagatcagacagaacatcagaagaagcctgaaggagatcctgtggaagagagtgaacgacagcgacgacctgatcatgaccgagaacgaggtgggcaagatcgccctgcacatcgagaaggagatgttcaacctgttccaggtgaccgacaacagatacaagagcaagtacagaagcatcatgttcaacctgaaggaccccaagaaccagggcctgttccacagagtgctgagagaggagatcagcctggccaagctggtgagactgaagcccgaggagctggtgagcaaggagctgagcacctggaaggagagacccgccagaagcgtgatggagagcagaaccaagctgcacaacgagagcaagaagaccgcccccagacaggaggccatccccgacctggaggacagcccccccgtgagcgacagcgaggagcagcaggagagcgccagagccgtgcccgagaagagcaccgcccccctgctggacgtgttcagcagcatgctgaaggacaccaccagccagcacagagcccacctgttcgacctgaactgcaagatctgcaccggccaggtgcccagcgccgaggacgagcccgcccccaagaagcagaagctgagcgccagcgtgaagaaggaggacctgaagagcaagcacgacagcagcgcccccgaccccgcccccgacagcgccgacgaggtgatgcccgaggccgtgcccgaggtggccagcgagcccggcctggagagcgccagccaccccaacgtggacagaacctacttccccggcccccccggcgacggccaccccgagcccagccccctggaggacctgagcccctgccccgccagctgcggcagcggcgtggtgaccaccgtgaccgtgagcggcagagaccccagaaccgcccccagcagcagctgcaccgccgtggccagcgccgccagcagacccgacagcacccacatggtggaggccagacaggacgtgcccaagcccgtgctgaccagcgtgatggtgcccaagagcatcctggccaagcccagcagcagccccgaccccagatacctgagcgtgccccccagccccaacatcagcaccagcgagagcagaagcccccccgagggcgacaccaccctgttcctgagcagactgagcaccatctggaagggcttcatcaacatgcagagcgtggccaagttcgtgaccaaggcctaccccgtgagcggctgcttcgactacctgagcgaggacctgcccgacaccatccacatcggcggcagaatcgcccccaagaccgtgtgggactacgtgggcaagctgaagagcagcgtgagcaaggagctgtgcctgatcagattccaccccgccaccgaggaggaggaggtggcctacatcagcctgtacagctacttcagcagcagaggcagattcggcgtggtggccaacaacaacagacacgtgaaggacctgtacctgatccccctgagcgcccaggaccccgtgcccagcaagctgctgcccttcgagggccccggcctggagagccccagacccaacatcatcctgggcctggtgatctgccagaagatcaagagacccgccaacagcggcgagctggacaagatggacgagaagagaaccagactgcagcccgaggaggccgacgtgcccgcctaccccaaggtggccaccgtgccccagagcgagaagaagcccagcaagtaccccctgtgcagcgccgacgccgccgtgagcaccaccccccccggcagcccccccccccccccccccctgcccgagccccccgtgctgaaggtgctgagcagcctgaagcccgccgcccccagccccgccaccgccgccaccaccgccgccgccgccagcaccgccgccagcagcaccgccagcagcgccagcaagaccgccagccccctggagcacatcctgcagaccctgttcggcaagaagaagagcttcgaccccagcgccagagagccccccggcagcaccgccggcctgccccaggagcccaagaccaccgccgaggacggcgtgcccgccccccccctgctggaccccatcgtgcagcagttcggccagttcagcaaggacaaggccctggaggaggaggaggacgacagaccctacgaccccgaggaggagtacgaccccgagagagccttcgacacccagctggtggagagaggcagaagacacgaggtggagagagcccccgaggccgccgccgccgagagagaggaggtggcctacgaccccgaggacgagaccatcctggaggaggccaaggtgaccgtggacgacctgcccaacagaatgtgcgccgacgtgagaagaaacagcgtggagagacccgccgagcccgtggccggcgccgccacccccagcctggtggagcagcagaagatgctggaggagctgaacaagcagatcgaggagcagaagagacagctggaggagcaggaggaggccctgagacagcagagagccgccgtgggcgtgagcatggcccacttcagcgtgagcgacgccctgatgagccccccccccaagagcagcctgcccaaggccgagctgttccagcaggagcagcagagcgccgacaagcccgccagcctgccccccgccagccaggccagcaaccacagagaccccagacaggccagaagactggccaccgagaccggcgagggcgagggcgagcccctgagcagactgagcgccagaggcgcccagggcgccctgcccgagagagacgccagcagaggcggcctggtgggccaggcccccatgcccgtgcccgaggagaaggagcccgccagcagcccctgggccagcggcgagaagccccccgccggcagcgagcaggacggctggaaggccgagcccggcgagggcaccagacccgccaccgtgggcgacagcagcgccagacccgccagaagagtgctgctgcccacccccccctgcggcgccctgcagcccggcttccccctgcagcacgacggcgagagagaccccttcacctgccccggcttcgccagccaggacaaggccctgggcagcgcccagtacgaggaccccagaaacctgcacagcgccggcagaagcagcagccccgccggcgagaccgagggcgacagagagccccaggccagacccggcgagggcaccgcccccctgcccccccccggccagaaggtgggcggcagccagccccccttccagggccagagagagcccggcccccacgccctgggcatgagcggcctgcacggccccaacttccccggccccagaggccccgccccccccttccccgaggagaacatcgccagcaacgacggccccagaggccccccccccgccagattcggcgcccagaagggccccatccccagcctgttcagcggccagcacggcccccccccctacggcgacagcagaggccccagccccagctacctgggcggccccagaggcgtggcccccagccagttcgaggagagaaaggacccccacggcgagaagagagagttccaggacgccccctacaacgaggtgaccggcgcccccgcccagttcgagggcaccgagcaggcccccttcctgggcagcagaggcggcgcccccttccagttcggcggccagagaagacccctgctgagccagctgaagggccccagaggcggccccccccccagccagttcggcggccagagaggccccccccccggccacttcgtgggccccagaggcccccaccccagccagttcgagaccgccagaggcccccaccccaaccagttcgagggccccagaggccaggcccccaacttcatgcccggccccagaggcatccagccccagcagttcgaggaccagagagtgcacagcccccccagattcaccaaccagagagcccccgcccccctgcagttcggcggcctgagaggcagcgcccccttcagcgagaagaacgagcagacccccagcagattccacttccagggccaggccccccaggtgatgaagcccggccccagacccctgctggagctgcccagccaccccccccagcacagaaaggacagatgggaggaggccggcccccccagcgccctgagcagcagcgcccccggccagggccccgaggccgacggccagtgggccagcgccgacttcagagagggcaagggccacgagtacagaaaccagaccttcgagggcagacagagagagagattcgacgtgggccccaaggagaagcccctggaggagcccgacgcccagggcagagccagcgaggacagaagaagagagagagagagaggcagaaactggagcagagagagagactgggacagacccagagagtgggacagacacagagacaaggacagcagcagagactgggacagaaacagagagagaagcgccaacagagacagagagagagaggccgacagaggcaaggagtgggacagaagcagagagagaagcagaaacagagagagagagagagacagaagaagagacagagacagaagcagaagcagagagagagacagagacaaggccagagacagagagagaggcagagacagaaaggacagaagcaagagcaaggagagcgccagagaccccaagcccgaggccagcagagccagcgacgccggcaccgccagccaggcctag

SEQ ID NO: 226995 - protein, 210 aa, Artificial Sequence
  derived and/or modified sequence
MATETVELHKLKLAELKQECLARGLETKGIKQDLIHRLQAYLEEHAEEEANEEDVLGDETEEEETKPIELPVKEEEPPEKTVDVAAEKKVVKITSEIPQTERMQKRAERFNVPVSLESKKAARAARFGISSVPTKGLSSDNKPMVNLDKLKERAQRFGLNVSSISRKSEDDEKLKKRKERFGIVTSSAGTGTTEDTEAKKRKRAERFGIA

SEQ ID NO: 226996 - protein, 150 aa, Artificial Sequence
  derived and/or modified sequence
MEEETKPIELPVKEEEPPEKTVDVAAEKKVVKITSEIPQTERMQKRAERFNVPVSLESKKAARAARFGISSVPTKGLSSDNKPMVNLDKLKERAQRFGLNVSSISRKSEDDEKLKKRKERFGIVTSSAGTGTTEDTEAKKRKRAERFGIA

SEQ ID NO: 226997 - DNA, 633 bp, Artificial Sequence
  derived and/or modified sequence
atggcaaccgaaacagtggagctgcacaagctgaagcttgccgagctgaaacaggaatgcctggccagggggcttgagacaaagggcatcaagcaggatttaatccacagactgcaggcctacctcgaggaacacgccgaggaggaagctaacgaggaggacgtcctaggcgatgagaccgaggaagaagagaccaagccgattgagctcccagtcaaggaagaagagcccccagagaaaaccgttgatgtagccgccgagaagaaagtggtgaagatcacttctgagatcccacagaccgagaggatgcagaagcgggccgagagattcaacgtcccagtgagcctggagagcaagaaggcagctagagccgcgaggtttgggatctcgagtgtccctaccaaggggctcagctccgacaacaaacctatggtgaacctggataagctgaaggagagagctcagaggtttggccttaacgtaagctcgatatcgcgaaaaagtgaggacgacgagaaactaaaaaaacgtaaggaacgctttggaatcgtcacgtcatcagccggtacggggacgaccgaagacactgaggcaaagaagaggaagcgggccgagcggttcggaattgcatag

SEQ ID NO: 226998 - DNA, 453 bp, Artificial Sequence
  derived and/or modified sequence
atggaggaggagacgaagccaatcgagctgccggtgaaggaggaagaacccccggaaaaaactgttgatgtcgctgcagaaaaaaaggtcgtcaaaatcacctctgaaattccgcagacagagcgaatgcagaagagagcagaaaggttcaacgtgccagtttctctggagagcaagaaagcggccagggcagctcggttcggaattagttcggttccaacaaaaggtctgtcctctgacaacaagcccatggtgaacctggataagctcaaagagagggcccagagatttggccttaatgtgtcatcgatctctagaaagtctgaggatgatgaaaagctgaaaaaacggaaagagcgtttcgggatcgtgacctcaagcgcagggaccgggaccaccgaggacacagaggcaaagaagagaaaacgagccgaacgtttcggcattgcgtag

SEQ ID NO: 226999 - DNA, 633 bp, Artificial Sequence
  derived and/or modified sequence
atggccacagagacagtggagttgcacaaactcaagctcgctgaactcaaacaagagtgcctcgcaaggggtttagagactaagggtattaaacaggatctgattcaccgtctgcaggcctatctggaggagcacgctgaagaggaagcaaacgaagaagacgtgctaggtgatgagacagaagaagaggaaaccaaacccatcgaattgccagtcaaagaggaggaacccccagagaagaccgtggacgtggccgcggaaaaaaaggtggttaaaattactagcgaaatcccccagacagaacgcatgcagaagcgggccgagcgatttaatgtgcccgtctctctagagagtaagaaggcggctcgagctgccaggttcgggatctcatcggtgcctacgaagggcctgagctccgacaataagcccatggtgaatcttgacaaactgaaagagcgcgcccagcggtttgggctgaacgtatcttctatttccagaaagtctgaagacgatgagaagctaaaaaaaagaaaggagagatttggcatcgtaacttcttctgcgggaacaggcaccactgaagataccgaggccaaaaagaggaagcgtgctgagaggtttggcattgcgtag

SEQ ID NO: 227000 - DNA, 633 bp, Artificial Sequence
  derived and/or modified sequence
atggccacagaaacagtggagctgcacaagctgaagctggccgagctgaagcaggagtgcctggcccggggcctggagaccaagggcatcaagcaggacctgatccaccggctgcaggcctacctggaggagcacgccgaggaggaggccaatgaagaagatgtgctgggagatgaaacagaggaggaggagaccaagcccatcgagctgcctgtgaaggaggaggagcccccagagaagacagtggatgtggccgctgagaagaaggtggtgaagatcaccagcgagatcccccagacagagaggatgcagaagagagctgagcgcttcaacgtgcctgtgtccctggagagcaagaaggccgcccgggccgccaggtttggcatcagctctgtgcccaccaagggcctgagcagtgacaacaagcccatggtgaacctggacaagctgaaggagcgggcccagagatttggcctgaatgtgagcagcatcagcaggaagtcagaagatgatgagaagctgaagaagaggaaggagagatttggaattgtgaccagcagcgctggcaccggcaccacagaggacacagaggccaagaagaggaagagagctgagagatttggaattgcctag

SEQ ID NO: 227001 - DNA, 453 bp, Artificial Sequence
  derived and/or modified sequence
atggaggaggagaccaagcccatcgagctgcctgtgaaggaggaggagcccccagagaagacagtggatgtggccgctgagaagaaggtggtgaagatcaccagcgagatcccccagacagagaggatgcagaagagagctgagcgcttcaacgtgcctgtgtccctggagagcaagaaggccgcccgggccgccaggtttggcatcagctctgtgcccaccaagggcctgagcagtgacaacaagcccatggtgaacctggacaagctgaaggagcgggcccagagatttggcctgaatgtgagcagcatcagcaggaagtcagaagatgatgagaagctgaagaagaggaaggagagatttggaattgtgaccagcagcgctggcaccggcaccacagaggacacagaggccaagaagaggaagagagctgagagatttggaattgcctag

SEQ ID NO: 227002 - DNA, 633 bp, Artificial Sequence
  derived and/or modified sequence
atggccaccgagaccgtggagctgcacaagctgaagctggccgagctgaagcaggaatgtctggccaggggactcgaaaccaagggcatcaagcaggacctgatccaccgcctgcaagcatacctcgaggaacatgccgaggaggaagcgaacgaggaggatgtcctcggcgatgaaacagaagaagaagaaaccaagccaattgaactaccggtgaaagaagaggagcctccggaaaagacagtggatgtggctgcggagaagaaggtggtcaagattacgtctgagattcctcagaccgagcggatgcagaaaagagccgagaggtttaacgtcccagtgtcgctcgaaagcaagaaagcagcaagagctgctcggttcggtatctccagcgtgccaacaaagggcctgagttcagacaataagcctatggtcaatcttgacaaactgaaagaacgagcacaaaggtttggactgaacgtatcctccatcagccgtaagtccgaagatgatgagaaactcaaaaagaggaaggagaggtttggcatcgttacttcctctgctggaacggggactacagaggatacggaagcaaagaagagaaagcgagctgaaagatttggcatagcctag

SEQ ID NO: 227003 - DNA, 453 bp, Artificial Sequence
  derived and/or modified sequence
atggaggaggagaccaagcccatcgagctgcccgtgaaggaggaggaaccccctgaaaagaccgtagacgtggcagctgaaaagaaggttgtaaagatcacaagcgagatacctcagacagaaaggatgcagaaaagagcggaacgcttcaacgtcccggtctcacttgagagcaagaaagccgcccgggccgcccgttttggcatttccagcgtccctaccaaagggctgtctagcgataataagccgatggttaacttggacaagctaaaagagagagcccaaagattcggtctcaatgtgagctctatcagccgcaaaagtgaggacgacgaaaaactcaagaaacggaaagagcgcttcggcattgtgacctctagcgcaggcaccggcaccacagaagatacagaagcaaaaaagagaaaaagagctgagagatttggcatagcatag

SEQ ID NO: 227004 - DNA, 633 bp, Artificial Sequence
  derived and/or modified sequence
atggccaccgagaccgtggagctgcacaagctgaagctggccgagttaaaacaggagtgccttgctagaggcctggaaacaaaaggtatcaagcaggacctgatccatcggcttcaggcttatctcgaggagcacgccgaagaagaggcaaacgaggaagatgtgctcggtgacgagaccgaggaggaagagactaagcctattgaacttcctgtgaaagaagaggagcctcctgaaaaaactgtagacgtagccgctgagaagaaggtcgttaagatcacatcagagattccgcagaccgagaggatgcaaaaaagagcggagcggtttaacgtgcccgtgagcctggagagtaaaaaggccgctcgcgccgcacggttcggcattagtagcgtgcctactaagggcctgtcatctgataataagcctatggtcaacctggataagttgaaagagagagcccagcgcttcggcctgaacgtttcatccataagtcggaagagcgaagacgacgaaaagttaaaaaaacggaaggagcgttttggaatcgtgacaagtagcgcaggcactggcactacggaagacacagaagctaagaaaaggaaacgggccgaacgctttgggattgcttag

SEQ ID NO: 227005 - DNA, 633 bp, Artificial Sequence
  derived and/or modified sequence
atggcaacagagactgtcgaactacacaagttgaagctagcagagctcaaacaagagtgtctggcacgcggactggagacaaagggaatcaaacaggatctgatccacagactgcaggcatacctggaagagcatgccgaggaggaagcaaatgaggaggacgtcttgggcgacgagaccgaggaggaagagaccaaacccatcgaactacccgtaaaagaggaggagcccccagagaaaaccgtggacgtggcggcagagaagaaggtggttaagattaccagcgagattccccaaactgagcggatgcagaagcgcgcagaaagattcaacgttcccgtttctctcgagagcaagaaggccgctcgagccgcacggtttggtatatctagcgttcctacgaaagggctaagtagcgacaataaaccgatggtgaaccttgataagcttaaagaacgggcacagcgatttgggctgaacgtttccagcatttctaggaaatctgaggatgatgaaaagctgaaaaagcggaaggaacgattcggaatcgttacgtctagtgccggtactggcacaactgaggacactgaagctaagaagcgaaaacgcgcagagagatttggaatcgcttag

SEQ ID NO: 227006 - DNA, 453 bp, Artificial Sequence
  derived and/or modified sequence
atggaagaagagaccaaacctatcgagctgcctgttaaggaagaagagccacctgaaaaaaccgtggatgtggctgccgaaaagaaggtcgtgaaaatcacgtcagaaattccccagaccgaacgtatgcaaaaacgagctgagcgcttcaacgtaccagtgtcacttgagtccaaaaaagccgcacgcgctgccaggttcggtatttcgtccgtgcccacaaaaggactgtctagcgacaacaaaccaatggtgaatctggataagctgaaggagagggcacaacgctttgggttgaatgtttcgtccatttcccgtaagtcagaggacgacgaaaaactgaaaaagaggaaagaaagattcggaatcgtaaccagttctgccggaacaggaaccacggaggacactgaggctaagaagcgaaagcgtgcagagcggttcgggatcgcctag

SEQ ID NO: 227007 - DNA, 633 bp, Artificial Sequence
  derived and/or modified sequence
atggcaactgagactgttgaactccataagctcaagctagccgaactcaaacaagagtgtttggccaggggcctagagacgaaagggatcaagcaggaccttattcataggctgcaggcttaccttgaagagcatgccgaggaggaagccaacgaggaagatgtactcggagacgagactgaggaggaagagactaagccaattgagctcccagtgaaggaggaggagcccccagaaaaaactgtcgatgtagctgctgaaaagaaagtggtgaaaattacttccgagatacctcaaaccgagaggatgcagaaacgggcagagcgatttaacgttcctgtatcactcgagagcaagaaggcagctcgtgccgctaggttcgggatcagctcagttcctacaaaaggcttgagctccgataacaagcccatggtcaacttagacaaactgaaggaaagagcccagagattcggactcaatgtgagctccatcagtaggaaatccgaggatgacgaaaaactcaaaaaaaggaaagaaagattcggtatagtgacctcttcggctggaacaggaacaacagaggatacagaggcaaaaaaacgcaagagggccgagcgttttggcattgcctag

SEQ ID NO: 227008 - DNA, 926 bp, Artificial Sequence
  derived and/or modified sequence
agctcctggaggcggaggccgcgggtgggggcctagtggagtgaggggtaacaagatggcgaccgagacggtggagctccataagctaaagcttgccgaactaaagcaagaatgtcttgctcgtggtttggagaccaagggaataaagcaagatcttatccacagactccaggcatatcttgaagaacatgctgaagaggaggcaaatgaagaagatgtactgggagatgaaacagaggaagaagaaacaaagcccattgagctccctgtcaaagaggaagaaccccctgaaaaaactgttgatgtggcagcagagaagaaagtggtgaaaattacatctgaaataccacagactgagagaatgcagaagagggctgaacgattcaatgtacctgtgagcttggagagtaagaaagctgctcgggcagctaggtttgggatttcttcagttccaacaaaaggtctgtcatctgataacaaacctatggttaacttggataagctgaaggaaagagctcaaagatttggtttgaatgtctcttcaatctccagaaagtctgaagatgatgagaaactgaaaaagaggaaggagcgatttgggattgtcacaagttcagctggaactggaaccacagaggatacagaggcaaagaagaggaaaagagcagagcgctttgggattgcctgatgaaaagttcctgatactttctgttctccagtgttttccatttctctccttcttcttggtcacatatatgcctaaatgcacagtcatgtgcctacgtcctgcctcgcaatgagggagcatgtaccccaggtacatccatgaactgcggcagcagtttgacttattgctgtttcagctttaaggttgttgtgtttttgtttttgattatgttgcttgttaataaaaaaaaatagaaaag

SEQ ID NO: 227009 - DNA, 995 bp, Artificial Sequence
  derived and/or modified sequence
agtggagtgaggggtaacaagatggcgaccgagacggtggagctccataagctaaagcttgccgaactaaagcaagaatgtcttgctcgtggtttggagaccaagggaataaagcaagatcttatccacagactccaggcatatcttgaagaacatggaagaagaaacaaagcccattgagctccctgtcaaagaggaagaaccccctgaaaaaactgttgatgtggcagcagagaagaaagtggtgaaaattacatctgaaataccacagactgagagaatgcagaagagggctgaacgattcaatgtacctgtgagcttggagagtaagaaagctgctcgggcagctaggtttgggatttcttcagttccaacaaaaggtctgtcatctgataacaaacctatggttaacttggataagctgaaggaaagagctcaaagatttggtttgaatgtctcttcaatctccagaaagtctgaagatgatgagaaactgaaaaagaggaaggagcgatttgggattgtcacaagttcagctggaactggaaccacagaggatacagaggcaaagaagaggaaaagagcagagcgctttgggattgcctgatgaaaagttcctgatactttctgttctccagtgttttccatttctctccttcttcttggtcacatatatgcctaaatgcacagtcatgtgcctacgtcctgcctcgcaatgagggagcatgtaccccaggttcaagtgctggattgtgtcatgtgaccatcccaaaactcagagcaccctatggccgtctttgccctctgtcacataacttgaaaactgcctgatggcctttttgcagtggttccctccaggaagccttgatctcagttgaagaagttctttcctggcattccaatgcccctgtcagctccatactcctcagacacccttaacaaaggctgtcatgcacacaatgtgacaaatacacaaaataaatgataattacact

SEQ ID NO: 227010 - DNA, 1163 bp, Artificial Sequence
  derived and/or modified sequence
ctagtggagtgaggggtaacaagatggcgaccgagacggtggagctccataagctaaagcttgccgaactaaagcaagaatgtcttgctcgtggtttggagaccaagggaataaagcaagatcttatccacagactccaggcatatcttgaagaacatgctgaagaggaggcaaatgaagaagatgtactgggagatgaaacagaggaagaagaaacaaagcccattgagctccctgtcaaagaggaagaaccccctgaaaaaactgttgatgtggcagcagagaagaaagtggtgaaaattacatctgaaataccacagactgagagaatgcagaagagggctgaacgattcaatgtacctgtgagcttggagagtaagaaagctgctcgggcagctaggtttgggatttcttcagttccaacaaaaggtctgtcatctgataacaaacctatggttaacttggataagctgaaggaaagagctcaaagatttggtttgaatgtctcttcaatctccagaaagtctgaagatgatgagaaactgaaaaagaggaaggagcgatttgggattgtcacaagttcagctggaactggaaccacagaggatacagaggcaaagaagaggaaaagagcagagcgctttgggattgcctgatgaaaagttcctgatactttctgttctccagtgttttccatttctctccttcttcttggtcacatatatgcctaaatgcacagtcatgtgcctacgtcctgcctcgcaatgagggagcatgtaccccaggttcaagtgctggattgtgtcatgtgaccatcccaaaactcagagcaccctatggccgtctttgccctctgtcacataacttgaaaactgcctgatggcctttttgcagtggttccctccaggaagccttgatctcagttgaagaagttctttcctggcattccaatgcccctgtcagctccatactcctcagacacccttaacaaaggctgtcatgcacacaatgtgacaaatacacaaaataaatgataattacactaataatgatatgttcagaggggcactggccaggtccacacacatcataaggtgggagggggtgctaactcccactgggttgctgagctgtgccccccaagtcccttcactctgtgcctc

SEQ ID NO: 227011 - DNA, 633 bp, Artificial Sequence
  derived and/or modified sequence
atggccaccgagaccgtggagctgcacaagctgaagctggccgagctgaagcaggagtgcctggccagaggcctggagaccaagggcatcaagcaggacctgatccacagactgcaggcctacctggaggagcacgccgaggaggaggccaacgaggaggacgtgctgggcgacgagaccgaggaggaggagaccaagcccatcgagctgcccgtgaaggaggaggagccccccgagaagaccgtggacgtggccgccgagaagaaggtggtgaagatcaccagcgagatcccccagaccgagagaatgcagaagagagccgagagattcaacgtgcccgtgagcctggagagcaagaaggccgccagagccgccagattcggcatcagcagcgtgcccaccaagggcctgagcagcgacaacaagcccatggtgaacctggacaagctgaaggagagagcccagagattcggcctgaacgtgagcagcatcagcagaaagagcgaggacgacgagaagctgaagaagagaaaggagagattcggcatcgtgaccagcagcgccggcaccggcaccaccgaggacaccgaggccaagaagagaaagagagccgagagattcggcatcgcctag

SEQ ID NO: 227012 - DNA, 453 bp, Artificial Sequence
  derived and/or modified sequence
atggaggaggagaccaagcccatcgagctgcccgtgaaggaggaggagccccccgagaagaccgtggacgtggccgccgagaagaaggtggtgaagatcaccagcgagatcccccagaccgagagaatgcagaagagagccgagagattcaacgtgcccgtgagcctggagagcaagaaggccgccagagccgccagattcggcatcagcagcgtgcccaccaagggcctgagcagcgacaacaagcccatggtgaacctggacaagctgaaggagagagcccagagattcggcctgaacgtgagcagcatcagcagaaagagcgaggacgacgagaagctgaagaagagaaaggagagattcggcatcgtgaccagcagcgccggcaccggcaccaccgaggacaccgaggccaagaagagaaagagagccgagagattcggcatcgcctag

SEQ ID NO: 227013 - protein, 268 aa, Artificial Sequence
  derived and/or modified sequence
MNGTANPLLDREEHCLRLGESFEKRPRASFHTIRYDFKPASIDTSCEGELQVGKGDEVTITLPHIPGSTPPMTVFKGNKRPYQKDCVLIINHDTGEYVLEKLSSSIQVKKTRAEGSSKIQARMEQQPTRPPQTSQPPPPPPPMPFRAPTKPPVGPKTSPLKDNPSPEPQLDDIKRELRAEVDIIEQMSSSSGSSSSDSESSSGSDDDSSSSGGEDNGPASPPQPSHQQPYNSRPAVANGTSRPQGSNQLMNTLRNDLQLSESGSDSDD

SEQ ID NO: 227014 - DNA, 807 bp, Artificial Sequence
  derived and/or modified sequence
atgaatggcactgccaatcctttgctggatagggaagagcattgtttgcgcctgggtgagagctttgagaagcggcctcgcgcctcttttcataccattaggtacgactttaaacctgcaagcattgatacttcatgcgagggcgagcttcaagtaggcaagggcgacgaggttactataactcttccacatatccccggctcgacaccaccaatgaccgtcttcaaagggaacaagagaccatatcagaaagattgtgtgctcatcatcaaccacgacactggcgagtatgtgctcgagaagctctcttcatcaatccaagtaaagaagactagagccgagggaagcagcaagatacaggcccgaatggagcagcagcctacacgaccgcctcaaactagccagcctccaccccctccgcctcccatgccattcagagcaccgaccaaaccccccgtgggtccgaaaacctcccctctcaaggacaatccaagcccggagcctcagttggatgacataaaaagagaactccgcgccgaagtggatattattgaacagatgtcatcgtccagcggatccagtagttctgactccgagtccagttcaggctctgacgatgactcttcaagtagtggcggagaagacaacggaccagcctcaccgcctcagccctcacatcagcagccctacaattcaagaccagccgtggccaatgggaccagccgtccacaagggtctaaccagctgatgaacaccctcagaaatgacctgcagctgtccgaaagtgggtctgactcagacgattag

SEQ ID NO: 227015 - DNA, 807 bp, Artificial Sequence
  derived and/or modified sequence
atgaatggaacagccaaccccctgctggaccgggaggagcactgcctgcggctgggggagagctttgagaagaggccccgggccagcttccacaccatccgctatgacttcaagccagccagcattgacaccagctgtgagggggagctgcaggtgggcaaaggagatgaggtgaccatcaccctgccccacatccctggcagcaccccacccatgacagtgttcaagggcaacaagaggccctaccagaaggactgtgtgctgatcatcaaccacgacaccggggagtatgtgctggagaagctgagcagcagcatccaggtgaagaagaccagggctgagggcagcagcaagatccaggccaggatggagcagcagcccacccggcccccccagaccagccagcccccacctcctcctccacccatgcccttccgggcccccaccaagccccctgtgggccccaagaccagccccctgaaggacaaccccagccctgagccccagctggatgacatcaagcgggagctgcgggcagaggtggacatcatcgagcagatgagcagcagcagcggcagcagcagcagtgacagcgagagcagcagcggcagtgatgatgacagcagcagcagtggaggagaggacaatggacctgccagccccccccagcccagccaccagcagccctacaacagcaggcctgctgtggccaacggcaccagccggccccagggcagcaaccagctgatgaacaccctgagaaatgacctgcagctgtctgagagcggcagtgacagtgatgactag

SEQ ID NO: 227016 - DNA, 807 bp, Artificial Sequence
  derived and/or modified sequence
atgaacggcaccgccaaccccctgctggaccgggaggagcactgccttaggctcggcgagtccttcgagaagcggccccgggccagtttccatactatcagatacgattttaagccagccagcatcgacacttcatgtgaaggtgaactgcaggtgggcaagggcgatgaggtgacaattacccttcctcacatccccgggtctacacccccaatgaccgtgtttaaggggaacaagcgcccctatcagaaggattgtgtgctcattataaaccatgacacgggggaatacgtgctcgagaagctctctagctcaattcaggttaagaagaccagagcagaggggagctcaaaaattcaagctcggatggagcagcagcccacacggcctccgcagacctcccagccccctccgccaccacctcctatgcccttcagagcacccacaaagcctcctgtgggcccaaagactagcccactaaaggataacccctccccagaaccccagctcgatgatatcaagcgtgagctccgcgccgaagtggacatcatcgagcagatgtcctcgagctccgggtcaagttcctccgatagtgaatcaagcagcggtagcgacgatgatagcagctcaagcggcggagaagataatggccccgcctccccaccccagccgagccatcagcagccttacaattccagacccgctgttgcaaatgggacgtcccggcctcagggcagcaaccaattgatgaatactctccgcaacgatcttcaactttcagaatctgggtcagactcagacgattag

SEQ ID NO: 227017 - DNA, 807 bp, Artificial Sequence
  derived and/or modified sequence
atgaacggtaccgctaatccactcctggatcgcgaggagcactgcctgcggcttggcgagtcgttcgagaagcgacccagggcctcatttcataccatacgctacgattttaagcctgcatccatagatacctcctgcgagggcgaactgcaggttggaaaaggcgacgaggttacgataaccctgccgcacatccctgggtctaccccccctatgactgtcttcaagggaaacaaacggccataccagaaggattgcgtgttaattataaatcacgataccggagagtacgtgttggaaaagctctccagctccatacaagtaaagaagactcgcgcagagggcagtagtaaaatccaagcccgaatggaacagcagcccacccgcccaccccagacttcccagcctcctcctccccctccaccaatgccattcagggctcctacaaagccccctgtgggaccaaaaacatcccccctcaaggacaatccttcgcctgaaccccagctggatgatattaagcgcgagctgcgggcagaggtcgacattatcgagcagatgagctcttcctctggctcctcatctagcgattccgaatcctcttccgggagcgacgatgacagttcatcctcagggggagaggataacggcccagcctctccaccgcagcccagccaccagcaaccttataacagtaggccggcagtggccaatggtacatccaggccccaggggagtaatcagctgatgaacaccctcagaaacgatctccagctgtcagaatcaggctccgattccgatgattag

SEQ ID NO: 227018 - DNA, 807 bp, Artificial Sequence
  derived and/or modified sequence
atgaacggcaccgccaaccccctgctggacagagaggagcactgcctgagactgggcgagagcttcgagaagagacccagagccagcttccacaccatcagatacgacttcaagcccgccagcatcgacaccagctgcgagggcgagctgcaggtgggcaagggcgacgaggtgaccatcaccctgccccacatccccggcagcaccccccccatgaccgtgttcaagggcaacaagagaccctaccagaaggactgcgtgctgatcatcaaccacgacaccggcgagtacgtgctggagaagctgagcagcagcatccaggtgaagaagaccagagccgagggcagcagcaagatccaggccagaatggagcagcagcccaccagacccccccagaccagccagcccccccccccccccccccccatgcccttcagagcccccaccaagccccccgtgggccccaagaccagccccctgaaggacaaccccagccccgagccccagctggacgacatcaagagagagctgagagccgaggtggacatcatcgagcagatgagcagcagcagcggcagcagcagcagcgacagcgagagcagcagcggcagcgacgacgacagcagcagcagcggcggcgaggacaacggccccgccagccccccccagcccagccaccagcagccctacaacagcagacccgccgtggccaacggcaccagcagaccccagggcagcaaccagctgatgaacaccctgagaaacgacctgcagctgagcgagagcggcagcgacagcgacgactag

SEQ ID NO: 227019 - DNA, 4690 bp, Artificial Sequence
  derived and/or modified sequence
catcagttcctaaattcacctgcagggctagggccaggcgcactcaccccacagccagccccactgggcctcggaggcagaatacgggaagaaccgcgaaacaaccctaaaccaattctgaggaccacgaattcggattatccgggagttcttttgccatggcaccgcccccgccacttccgctaggaacccggaagttcctacccgacgccggaagtcccacggccttgcctcctcagattcctctctcacccccacgcagaggagagaacttgcttctggacccgggtgggtgccggctcggctctccttgtcttccagagcggtggcccggaagcacagtcctcccagacgccagcgccagaagctcggatcgcggctgcaccgggagagcgccgatctgggtgcgaggcaggtgcggggccatgaatgggaccgcaaacccgctgctggaccgcgaggaacattgcctgaggctcggggagagcttcgagaagcggccgcgggcctccttccacactattcgttatgattttaaaccagcatctatagacacttcctgtgaaggagagcttcaagttggcaaaggagatgaagtcacaattacactgccacatatccctggatccacaccacccatgactgtgttcaaggggaacaaacggccttaccagaaagactgtgtgcttattattaatcatgacactggtgaatatgtgctggaaaaactcagtagcagcattcaggtgaagaaaacaagagctgagggcagcagtaaaatccaggcccgaatggaacagcagcccactcgtcctccacagacgtcacagccaccaccacctccaccacctatgccattcagagctccaacgaagcctccagttggacccaaaacttctcccttgaaagataacccctcacctgaacctcagttggatgacatcaaaagagagctgagggctgaagttgacattattgaacaaatgagcagcagcagtgggagcagctcttcagactctgagagctcttcgggaagtgatgacgatagctccagcagtggaggcgaggacaatggcccagcctctcctccgcagccttcacaccagcagccctacaacagtaggcctgccgttgccaatggaaccagccggccacaaggaagcaaccagctcatgaacaccctcagaaatgacttgcagttgagtgagtctggcagtgacagtgatgactagtgctggatctttcgaaacctactttttggtgcacaaacatgccgcaagactgagctactttggcgtggagtccattgcaagaggaaaatgttatggatcagtgactgtagtaggagtttgaggctctggaactctcacatattcaagtctttaacttagtggtgatgggtgattttctcgtgtcatttttgaacaatctcatctttcaaagtttaagtagacctgtagaagagctaacagaattatatttctatttagttaaaattgttaatgaaaaacagataaatgtgccctggtctaagttactcaaaggccatatcttcaccaggccagagattcagttttaaacctcagcagccatcagtttggccaagtggttggtaccagtggaatgaagtctttgatgggtaggagagagagggaaaacctcaaactacatcatagaagtatgttaaaaccactttaaattgttgacacaaagtggtaaggaagttttgtctgactcagcctgacaagcctggatagaaatggacctcagaatacagaatggagtccttgagtgtcagttggtgaggaccatggagtcctgccagctcaacctgtcatttacagactaagaaagggaagtacacacctggcttgtggccagtctcctgccccctctctgggctttcctcactgttctctcccttgaatctcatttgtaggaatcaagagattcctatacatgggacttttagatgtacattggcacttggattagattccaaaagacaaaagtgttgggtgcttctagcttgaattcagtccctaaatacatgaggctgggtgagcagatgaaaccggtagccactgtgctgatgcatgtgactccattcagttggggattttggttccatgtggatccatactaagtattcttcagtcagtggattttagcaaggggaggtaggagtggaagagaggtgtgaagaaacctctccgaacaaatgaaccagcagtaagtttctaaaaatcagaatctagatagaagttctgcaatatgaaatgagcacattctttgataaggcgtatctattcatgcttttgtaccactgttttgtacctgactccctgaccgatttgtattttttatatacaactagaaggaagtcacaagattgccttctacagtgtgccatttccaaatggatctgttgttggaggaaactggttgctagtcaatgttctatatttaatgaatgtgtgataaatcatcctgtaatcagtatggagtaacctgtttttgtagtttggatgaatatgtcctgagaaatttccatccactttggttcagcggacatcaaggtagtaataataatttttcctccacaggtccctccactcatatggcctctccctccccagctagtggaggggaagcagtctggacttagaaaggaaataggtggtctgtcataggggctttcattagagttaaacttcatagagtcaactgtttcatcatcatagtgagcccagagagccactgcccagcagcatgctcacaccacctaccctagtgtaggtaataggtctacgctaggaccccgtgctgggctctcagcccatcatgagattttggtggatttaatggcaggtaggaacttatttatagtggattgataattgctttataattccttggtaatgacagctcagggaaggtttcacaaggtcatgatcaggagacttgaattgttactggatgtaggaattgtttcactgctcttaacttgctcaaactggggcaggttccaggaacttgaactaaaaatatctatttaagcctctctctctttctctcctccccaacttttttctgaaagccttgatttctgtagacagaactatggtttttggcatgttgggtcaagacgtgtttctataggaaatgcttgcacgtggcactggcttggtgagtcaagcttcctgagcttcagaccgtttgtcctgtcatctgtcctgcccaacactgtatggtttttctctagcacggcttcaattttgttctctgcacaaagcctttggtggttctgccctctgccctccagctttacccaccagagtaagcaatcttttctttttagaaatcaagaatttggcttcacagatggcttctcacagatgccctcctgccagccaaaccggacttgttcttcctgcctctgtgccttctctcattctccttctctccctccataccccacttttgaggttctgtgggtaccatctttgtggactcttgtcttttttttcaacccacatggagtgccctgtgtgtacatactgaccttttttttttttttttttttttgcttgaactctggtcggtatgagctccttaaaagcaggtactgggctggctgtggtgactcatgcctgtaatcccagcactttgggaggctgaggtgggaggattgcttgagtccaggagtttgagaccagcctgggcaacatggcgagaccctgtttctacaaaaagaaaaagggaaaaaaaaagcagggactgtcattctcatctcctccctggggtatccacaggaatggacattcaaatggttgtagcctggtggggtagaaggcagagaagactacccagccagtgaagtgcagaggatagacataggaaaacattccaggcatttggagacagctgaaagtatccatgctgactttcatgatttagaagtctttaactgaattattaaaattgccttttttttgtgctgtacaatgtctactgtactgtgggtcatttagatgagatgaaaaacttaattaaatctgaagtgtcagaggcgcttagtaagccttagtaaagttgtgattgaagaaacttaatacaaatgaactagaggtttgtaatcatgccactcactaacgattttatttctgtagcagaatcattttttctatgtaaggtgttaatgtgtgtgtatgtgctttggttgtaggaaaacttgaaaattccaaaatccttattttcctatttgagaggctggttcagcagggtgtgtgtgtgtgtgtgtgtgtgtgtgtatgaatggtatatttattacattattttgaaagagaattagtgtgttatgtggataatgttatatacagccaaagtggatgtttctatttggcaaggaaggtaggatttctgaaactcaggccttaaccaataggttggaagacaagaccaattgaagagttaggaaatgtgagtttttgttacttctgttattccagtcttggtttcattgtctcattctttatttttaaaatcttgtgcctaaaagtttttttgcttaattatgaagtagacatgcatgtttacatttatgtaaaatatttgctgtgtaaagtattttttgtttattctcttaaaagatcactatatttaaataaaagtgaaggtcagcaacaca

SEQ ID NO: 227020 - protein, 1471 aa, Artificial Sequence
  derived and/or modified sequence
MVSKRRLSKSEDKESLTEDASKTRKQPLSKKTKKSHIANEVEENDSIFVKLLKISGIILKTGESQNQLAVDQIAFQKKLFQTLRRHPSYPKIIEEFVSGLESYIEDEDSFRNCLLSCERLQDEEASMGASYSKSLIKLLLGIDILQPAIIKTLFEKLPEYFFENKNSDEINIPRLIVSQLKWLDRVVDGKDLTTKIMQLISIAPENLQHDIITSLPEILGDSQHADVGKELSDLLIENTSLTVPILDVLSSLRLDPNFLLKVRQLVMDKLSSIRLEDLPVIIKFILHSVTAMDTLEVISELREKLDLQHCVLPSRLQASQVKLKSKGRASSSGNQESSGQSCIILLFDVIKSAIRYEKTISEAWIKAIENTASVSEHKVFDLVMLFIIYSTNTQTKKYIDRVLRNKIRSGCIQEQLLQSTFSVHYLVLKDMCSSILSLAQSLLHSLDQSIISFGSLLYKYAFKFFDTYCQQEVVGALVTHICSGNEAEVDTALDVLLELVVLNPSAMMMNAVFVKGILDYLDNISPQQIRKLFYVLSTLAFSKQNEASSHIQDDMHLVIRKQLSSTVFKYKLIGIIGAVTMAGIMAADRSESPSLTQERANLSDEQCTQVTSLLQLVHSCSEQSPQASALYYDEFANLIQHEKLDPKALEWVGHTICNDFQDAFVVDSCVVPEGDFPFPVKALYGLEEYDTQDGIAINLLPLLFSQDFAKDGGPVTSQESGQKLVSPLCLAPYFRLLRLCVERQHNGNLEEIDGLLDCPIFLTDLEPGEKLESMSAKERSFMCSLIFLTLNWFREIVNAFCQETSPEMKGKVLTRLKHIVELQIILEKYLAVTPDYVPPLGNFDVETLDITPHTVTAISAKIRKKGKIERKQKTDGSKTSSSDTLSEEKNSECDPTPSHRGQLNKEFTGKEEKTSLLLHNSHAFFRELDIEVFSILHCGLVTKFILDTEMHTEATEVVQLGPPELLFLLEDLSQKLESMLTPPIARRVPFLKNKGSRNIGFSHLQQRSAQEIVHCVFQLLTPMCNHLENIHNYFQCLAAENHGVVDGPGVKVQEYHIMSSCYQRLLQIFHGLFAWSGFSQPENQNLLYSALHVLSSRLKQGEHSQPLEELLSQSVHYLQNFHQSIPSFQCALYLIRLLMVILEKSTASAQNKEKIASLARQFLCRVWPSGDKEKSNISNDQLHALLCIYLEHTESILKAIEEIAGVGVPELINSPKDASSSTFPTLTRHTFVVFFRVMMAELEKTVKKIEPGTAADSQQIHEEKLLYWNMAVRDFSILINLIKVFDSHPVLHVCLKYGRLFVEAFLKQCMPLLDFSFRKHREDVLSLLETFQLDTRLLHHLCGHSKIHQDTRLTQHVPLLKKTLELLVCRVKAMLTLNNCREAFWLGNLKNRDLQGEEIKSQNSQESTADESEDDMSSQASKSKATEVSLQNPPESGTDGCILLIVLSWWSRTLPTYVYCQMLLCPFPFPP

SEQ ID NO: 227021 - DNA, 5219 bp, Artificial Sequence
  derived and/or modified sequence
gtcagagcggcgtcgggcctggcgggaaagtcgaaaactacgggcggcgacggcttctcggaagtaatttaagtgcacaagacattggtcaaaatggtttccaaaagaagactgtcaaaatctgaggataaagagagcctgacagaagatgcctccaaaaccaggaagcaaccactttccaaaaagacaaagaaatctcatattgctaatgaagttgaagaaaatgacagcatctttgtaaagcttcttaagatatcaggaattattcttaaaacgggagagagtcagaatcaactagctgtggatcaaatagctttccaaaagaagctctttcagaccctgaggagacacccttcctatcccaaaataatagaagaatttgttagtggcctggagtcttacattgaggatgaagacagtttcaggaactgccttttgtcttgtgagcgtctgcaggatgaggaagccagtatgggtgcatcttattctaagagtctcatcaaactgcttctggggattgacatactgcagcctgccattatcaaaaccttatttgagaagttgccagaatatttttttgaaaacaagaacagtgatgaaatcaacatacctcgactcattgtcagtcaactaaaatggcttgacagagttgtggatggcaaggacctcaccaccaagatcatgcagctgatcagtattgctccagagaacctgcagcatgacatcatcaccagcctacctgagatcctaggggattcccagcacgctgatgtggggaaagaactcagtgacctactgatagagaatacttcactcactgtcccaatcctggatgtcctttcaagcctccgacttgacccaaacttcctattgaaggttcgccagttggtgatggataagttgtcgtctattagattggaggatttacctgtgataataaagttcattcttcattccgtaacagccatggatacacttgaggtaatttctgagcttcgggagaagttggatctgcagcattgtgttttgccatcacggttacaggcttcccaagtaaagttgaaaagtaaaggacgagcaagttcctcaggaaatcaagaaagcagcggtcagagctgtattattctcctctttgatgtaataaagtcagctattagatatgagaaaaccatttcagaagcctggattaaggcaattgaaaacactgcctcagtatctgaacacaaggtgtttgacctggtgatgcttttcatcatctatagcaccaatactcagacaaagaagtacattgacagggtgctaagaaataagattcgatcaggctgcattcaagaacagctgctccagagtacattctctgttcattacttagttcttaaggatatgtgttcatccattctgtcgctggctcagagtttgcttcactctctagaccagagtataatttcatttggcagtctcctatacaaatatgcatttaagttttttgacacgtactgccagcaggaagtggttggtgccttagtgacccatatctgcagtgggaatgaagctgaagttgatactgccttagatgtccttctagagttggtagtgttaaacccatctgctatgatgatgaatgctgtctttgtaaagggcattttagattatctggataacatatcccctcagcaaatacgaaaactcttctatgttctcagcacactggcatttagcaaacagaatgaagccagcagccacatccaggatgacatgcacttggtgataagaaagcagctctctagcaccgtattcaagtacaagctcattgggattattggtgctgtgaccatggctggcatcatggcggcagacagaagtgaatcacctagtttgacccaagagagagccaacctgagcgatgagcagtgcacacaggtgacctccttgttgcagttggttcattcctgcagtgagcagtctcctcaggcctctgcactttactatgatgaatttgccaacctgatccaacatgaaaagctggatccaaaagccctggaatgggttgggcataccatctgtaatgatttccaggatgccttcgtagtggactcctgtgttgttccggaaggtgactttccatttcctgtgaaagcactgtacggactggaagaatacgacactcaggatgggattgccataaacctcctgccgctgctgttttctcaggactttgcaaaagatgggggtccggtgacctcacaggaatcaggccaaaaattggtgtctccgctgtgcctggctccgtatttccggttactgagactttgtgtggagagacagcataacggaaacttggaggagattgatggtctactagattgtcctatattcctaactgacctggagcctggagagaagttggagtccatgtctgctaaagagcgttcattcatgtgttctctcatatttcttactctcaactggttccgagagattgtaaatgccttctgccaggaaacatcacctgagatgaaggggaaggtgctcactcggttaaagcacattgtagaattgcaaataatcctggaaaagtacttggcagtcaccccagactatgtccctcctcttggaaactttgatgtggaaactttagatataacacctcatactgttactgctatttcagcaaaaatcagaaagaaaggaaaaatagaaaggaaacaaaaaacagatggcagcaagacatcctcctctgacacactttcagaagagaaaaattcagaatgtgaccctacgccatctcatagaggccagctaaacaaggagttcacagggaaggaagaaaagacatcattgttactacataattcccatgcttttttccgagagctggacattgaggtcttctctattctacattgtggacttgtgacgaagttcatcttagatactgaaatgcacactgaagctacagaagttgtgcaacttgggccccctgagctgcttttcttgctggaagatctctcccagaagctggagagtatgctgacacctcctattgccaggagagtcccctttctcaagaacaaaggaagccggaatattggattctcacatctccaacagagatctgcccaagaaattgttcattgtgtttttcaactgctgaccccaatgtgtaaccacctggagaacattcacaactattttcagtgtttagctgctgagaatcacggtgtagttgatggaccaggagtgaaagttcaggagtaccacataatgtcttcctgctatcagaggctgctgcagatttttcatgggctttttgcttggagtggattttctcaacctgaaaatcagaatttactgtattcagccctccatgtccttagtagccgactgaaacagggagaacacagccagcctttggaggaactactcagccagagcgtccattacttgcagaatttccatcaaagcattcccagtttccagtgtgctctttatctcatcagacttttgatggttattttggagaaatcaacagcttctgctcagaacaaagaaaaaattgcttcccttgccagacaattcctctgtcgggtgtggccaagtggggataaagagaagagcaacatctctaatgaccagctccatgctctgctctgtatctacctggagcacacagagagcattctgaaggccatagaggagattgctggtgttggtgtcccagaactgatcaactctcctaaagatgcatcttcctccacattccctacactgaccaggcatacttttgttgttttcttccgtgtgatgatggctgaactagagaagacggtgaaaaaaattgagcctggcacagcagcagactcgcagcagattcatgaagagaaactcctctactggaacatggctgttcgagacttcagtatcctcatcaacttgataaaggtatttgatagtcatcctgttctgcatgtatgtttgaagtatgggcgtctctttgtggaagcatttctgaagcaatgtatgccgctcctagacttcagttttagaaaacaccgggaagatgttctgagcttactggaaaccttccagttggacacaaggctgcttcatcacctgtgtgggcattccaagattcaccaggacacgagactcacccaacatgtgcctctgctcaaaaagaccctggaacttttagtttgcagagtcaaagctatgctcactctcaacaattgtagagaggctttctggctgggcaatctaaaaaaccgggacttgcagggtgaagagattaagtcccaaaattcccaggagagcacagcagatgagagtgaggatgacatgtcatcccaggcctccaagagcaaagccactgaggtatctctacaaaacccaccagagtctggcactgatggttgcattttgttaattgttctaagttggtggagcagaactttgcctacttatgtttattgtcaaatgcttctatgcccatttccattccctccataacagcttctgtgcttatataatttttgggacccagaagaaacaacgacacaatcttagaatcactcctgagtatctcgagttgtggcatttgttatagagttgacaattttctgcattatagcctctcattttccatgaattcatatctgaaaccattttagaagggagaagtcatcgaagtattttctgagtgttgagaagaatgagttaaaccatttaaacacatttgaaacatacaaaaatagaaatgtgaaagcatttggtgaaagccaaagcacagagtcagaagctgccaccttagagaactgaaataaaaatagaagttcttacgcttttttgtggtacagatgctttcgacaatttaaagaaagctaaataaaaatgtagacatggctggcgcagtggctcatgcttgtaatcctagcactttttgaggccaaggtaggaggattgcttgagtccgggagctcaaggcaaagctgcacaacataacaagaccctatctccacaaaaaaaatgaaaaataaacctgggtgcggtggctcacacctgtaatcccagcactttgggaggccgatgtgggcagatcacaaggtcaggagttcaagaccagcctggccaacatagtgaaaccccatctctactgaaaatacaaaaattagctgggtgtggtggcacgtgcctgttatctcagctacttgggaggctga

SEQ ID NO: 227022 - DNA, 4416 bp, Artificial Sequence
  derived and/or modified sequence
atggtgagcaagagaagattgtctaaaagtgaggacaaagagtctctgaccgaggacgcaagcaagaccaggaagcagcccctgtccaaaaagacaaagaaatcacacattgctaatgaggtggaggagaacgactccatcttcgttaaactgcttaaaattagcggtattatcctgaaaactggcgagtcacaaaatcagctggccgtcgaccaaattgcctttcagaaaaagcttttccagacacttaggcggcacccatcatacccaaagatcattgaagagtttgtgtctggactagaatcatacattgaggacgaagattcattccggaattgtctgctgtcttgcgagaggctgcaagacgaagaggcctctatgggtgcctcttactcaaagagtttgattaagctgcttctgggcatagacatcctgcaaccagcaattatcaaaacgctgtttgagaagctccctgagtacttcttcgagaataaaaattccgacgagattaacattcccaggcttatcgtgagccagctgaaatggttggatcgcgtggtggacgggaaggatctaacaacaaagatcatgcagctgatctcaatagctccagagaatctgcagcacgatattattacttctctgcctgaaatactgggagattcccaacacgccgatgtcggcaaagagttaagcgatcttctcatagagaatacatccctcaccgtgcccattttagatgtgctctcctccttgcgcctggaccctaattttctgctcaaagttagacagctggtaatggataaactgtctagtatccggctggaggacttgccggttatcatcaagttcatcctacactctgtgacagcaatggacaccttggaggtaatttccgagctcagggaaaaacttgatttgcagcactgtgtgcttccctcacgactgcaagcttctcaggtgaaactcaagagcaaaggcagggcctcatctagcgggaaccaggagtcaagcggccagagctgtattattctattatttgatgttattaagagtgcaattaggtatgaaaaaaccatctccgaagcctggattaaggcaatagagaatacagcctctgtcagcgagcacaaggtgttcgatctggtgatgttattcatcatttactccactaatacccagactaaaaagtacattgaccgggtgctgcggaacaagatccggtcaggatgcattcaggaacagctcttacagagtaccttttctgttcactatcttgttctcaaagatatgtgctcctccattctatccctggcacagtccctgctacactcactggaccaatcaatcatctcattcggtagccttctttacaagtacgccttcaagttttttgatacgtactgccagcaagaggttgtaggagcccttgtgactcatatttgctcaggcaatgaggccgaggtggacaccgctctcgacgttctgctcgagttggtggttctcaatccttcggcgatgatgatgaacgcagtgttcgtgaaaggcattctggactatcttgataacatctcaccacaacagattcgcaagctgttctatgtactgtccactctggctttttccaagcagaacgaagcctccagccacattcaagatgatatgcacctcgtgattcgtaaacagctcagctccactgtgttcaagtataagctgatcgggattataggggccgtgaccatggcgggtatcatggccgctgatcgtagtgagagcccgtctctgacccaggaacgagcaaatctaagcgatgaacagtgcacccaggttacctctcttttgcagcttgtccattcctgcagcgagcagagtccccaggccagcgcattatactatgatgaattcgcaaacctgattcaacatgagaagttggatcctaaggccttggaatgggtcggccacactatttgcaatgattttcaagacgcattcgtagtcgactcatgcgtggttccagaaggcgatttcccctttcccgtgaaagcactgtacgggctggaggagtatgacacacaagacggcatcgccattaacttgctgccccttctgttcagtcaagatttcgcaaaggacggtggccccgttacttcacaggaatcaggccagaagctggttagtcctttgtgcctggctccgtatttccgtttgctcaggttgtgcgttgagcgccagcacaatgggaatcttgaggaaatcgacggtttgctggactgtcctatttttctgactgatcttgagccaggcgaaaagctggaatcgatgtctgcaaaggaaagatcttttatgtgcagcctgatctttctaaccctcaactggttcagagagatcgtgaacgccttttgtcaagaaaccagccctgaaatgaagggcaaggtgttaacccggcttaagcacatcgtggagctgcagatcatcttggaaaaataccttgcagttacccccgactacgtcccaccattaggaaatttcgatgttgaaacactggatatcacaccccatactgtgacagccatcagtgctaaaattaggaagaagggtaaaatcgaacgcaagcagaagactgacggttccaagacctcgtcttctgatactttatctgaggagaagaatagtgagtgcgatcctacgcccagccacagagggcagctgaacaaagaatttactggcaaagaggagaaaacaagtcttttgctgcacaactctcacgccttcttccgcgaactggacatcgaagtgtttagcatcctgcattgcgggcttgtcacgaagtttatactggatacagagatgcacaccgaagccacagaagtagtgcagctggggcctcctgagcttctgttcctgctggaagacctgagccagaagctggaatcaatgctgacaccgcccattgctaggcgtgtgccatttttaaaaaataaggggagtagaaacattggattcagtcacctgcaacagaggtctgctcaggagatagtccactgtgtttttcagctgctgacacccatgtgcaaccatttggagaatattcacaactactttcagtgcctggccgcagaaaatcacggcgtcgtggatggtcctggagtgaaggtgcaggagtaccacattatgtcaagctgttaccaaagactcctgcagatttttcatggactcttcgcatggagcgggttctcccaacccgaaaatcaaaatctgctgtatagcgccttgcacgttttgagctccagactcaaacaaggggagcatagccaacccctggaagaactgctgtcccagagtgtgcactacctccagaactttcaccagtcaattccaagctttcagtgcgcgctctatctgatcagactattaatggtaattctggagaagagtactgcaagcgctcaaaacaaagaaaagatcgcctctcttgctcggcagttcttatgccgagtgtggccttctggagacaaggagaagtcgaatatctccaatgatcagctgcacgcgctgttgtgcatctatctcgaacacacagagtctattctgaaggccatagaggagatcgccggggttggcgtgccagaacttattaactccccaaaggacgccagctcatccacttttcctaccctgaccagacatacttttgtcgttttctttcgggtgatgatggccgaactcgagaaaactgttaaaaagattgaacctgggactgctgctgactctcagcagatccacgaggaaaaactcctgtactggaacatggctgtccgggacttttccatcctaatcaatttaattaaggtcttcgatagccacccagtactccacgtctgccttaagtacggccgcctgttcgtcgaggctttccttaagcagtgtatgccgctcttagatttctcatttcgaaagcatcgtgaggacgtcctgtctcttctggagacatttcagctggacacaaggctcctgcaccacctgtgtgggcattctaagatccaccaggatacgcgcctgactcaacacgtccccctgctcaaaaaaaccctggagctgctggtatgccgagtaaaggccatgttaacgttaaacaactgccgcgaggcattttggctgggcaatcttaagaacagggatctgcagggagaagagatcaaaagccagaactcccaagagtccacagctgatgagagtgaagacgacatgagctcgcaagcatccaaatcaaaagcgactgaggtgtctctgcagaatcctccagaatcaggcacagatggatgcattttgttgattgtgctctcttggtggtctaggaccctgccaacgtacgtgtattgtcagatgcttttgtgcccatttccctttcccccttag

SEQ ID NO: 227023 - DNA, 4416 bp, Artificial Sequence
  derived and/or modified sequence
atggtgtccaagaggcggctgagcaagtctgaggacaaggagagcctgacagaagatgccagcaagaccaggaagcagcccctgagcaagaagaccaagaagagccacatcgccaatgaggtggaggagaatgacagcatctttgtgaagctgctgaagatcagcggcatcatcctgaagacaggagagagccagaaccagctggccgtggaccagatcgccttccagaagaagctgttccagaccctgcggcggcaccccagctaccccaagatcatcgaggagtttgtgtctggcctggagagctacattgaagatgaagattccttcaggaactgcctgctgagctgtgagcggctgcaggatgaggaggcctccatgggcgccagctacagcaagagcctcatcaagctgctgctgggcatcgacatcctgcagcctgccatcatcaagaccctgtttgagaagctgcctgagtacttctttgagaacaagaacagtgatgagatcaacatccccaggctcatcgtgtcccagctgaagtggctggacagagtggtggatggcaaggacctgaccaccaagatcatgcagctgatcagcatcgcccctgagaacctgcagcacgacatcatcaccagcctgcctgagatcctgggggacagccagcacgcagatgtgggcaaggagctgagtgacctgctgattgagaacaccagcctgactgtgcccatcctggatgtgctgagcagcctgcggctggaccccaacttcctgctgaaggtgcggcagctggtgatggacaagctgagcagcatccggctggaggacctgcctgtgatcatcaagttcatcctgcacagcgtgacagccatggacaccctggaggtgatcagcgagctgcgggagaagctggacctgcagcactgtgtgctgcccagccggctgcaggccagccaggtgaagctgaagagcaagggccgggccagcagcagcggcaaccaggagagcagcggccagagctgcatcatcctgctgtttgatgtgatcaagagcgccatccgctatgagaagaccatcagcgaggcctggatcaaggccattgaaaatacagcctctgtgtctgagcacaaggtgtttgacctggtgatgctgttcatcatctacagcaccaacacccagaccaagaagtacatcgacagagtgctgaggaacaagatccgcagcggctgcatccaggagcagctgctgcagagcaccttctctgtgcactacctggtgctgaaggacatgtgcagcagcatcctgagcctggcccagagcctgctgcacagcctggaccagagcatcatcagctttggcagcctgctgtacaagtatgccttcaagttctttgacacctactgccagcaggaggtggtgggcgccctggtgacccacatctgcagcggaaatgaagctgaggtggacacagccctggatgtgctgctggagctggtggtgctgaaccccagcgccatgatgatgaatgctgtgtttgtgaagggcatcctggactacctggacaacatcagcccccagcagatcaggaagctgttctacgtgctgagcaccctggccttcagcaagcagaatgaggccagcagccacatccaggatgacatgcacctggtgatcaggaagcagctgagcagcaccgtcttcaagtacaagctgattggcatcatcggggctgtgaccatggccggcatcatggctgctgacagaagtgagagccccagcctgacccaggagcgggccaacctgagtgatgagcagtgcacccaggtgaccagcctgctgcagctggtgcacagctgcagcgagcagagcccccaggccagcgccctgtactatgatgaatttgccaacctgatccagcacgagaagctggaccccaaggccctggagtgggtgggccacaccatctgcaatgacttccaggatgcctttgtggtggacagctgtgtggtgcctgagggggacttccccttccctgtgaaggccctgtatggcctggaggagtatgacacccaggacggcatcgccatcaacctgctgcccctgctcttcagccaggactttgccaaggatggcggccctgtgaccagccaggagagcggccagaagctggtgagccccctgtgcctggccccctacttccggctgctgcggctgtgtgtggagcggcagcacaacggcaacctggaggagattgatggcctgctggactgccccatcttcctgacagacctggagcctggagagaagctggagagcatgtctgccaaggagaggagcttcatgtgcagcctcatcttcctgaccctgaactggttccgggagatcgtgaatgccttctgccaggagaccagccctgagatgaagggcaaggtgctgacccggctgaagcacatcgtggagctgcagatcatcctggagaagtacctggccgtgaccccagactatgtgccccccctgggcaactttgatgtggagaccctggacatcaccccccacacagtgacagccatcagcgccaagatcaggaagaagggcaagattgaaaggaagcagaagacagatggcagcaagaccagcagcagtgacaccctgtctgaggagaagaacagtgaatgtgaccccacccccagccaccggggccagctgaacaaggagttcaccgggaaggaggagaagaccagcctgctgctgcacaacagccacgccttcttccgggagctggacatcgaggtgttcagcatcctgcactgcggcctggtgaccaagttcatcctggacacagagatgcacacagaggccacagaggtggtgcagctgggccccccagagctgctcttcctgctggaggacctgagccagaagctggagagcatgctgaccccacccatcgcccggcgggtgcccttcctgaagaacaagggcagcagaaatattggcttcagccacctgcagcagaggtctgcccaggagatcgtgcactgtgtgttccagctgctgacccccatgtgcaaccacctggagaacatccacaactacttccagtgcctggccgctgagaaccacggcgtggtggatggccctggggtgaaggtgcaggagtaccacatcatgagcagctgctaccagaggctgctgcagatcttccacggcctgtttgcctggagcggcttcagccagcctgagaaccagaacctgctgtacagcgccctgcacgtgctgagcagccggctgaagcagggcgagcacagccagcccctggaggagctgctgagccagagcgtgcactacctgcagaacttccaccagagcatccccagcttccagtgtgccctgtacctgatccggctgctgatggtgatcctggagaagagcacagccagcgcccagaacaaggagaagatcgccagcctggcccggcagttcctgtgccgggtgtggcccagcggggacaaggagaagagcaacatcagcaatgaccagctgcacgccctgctgtgcatctacctggagcacacagagagcatcctgaaggccatcgaggagattgctggggtgggcgtgcctgagctgatcaacagccccaaggatgccagcagcagcaccttccccaccctgaccaggcacacctttgtggtgttcttccgggtgatgatggccgagctggagaagacagtgaagaagattgagcctggaacagctgctgacagccagcagatccacgaggagaagctgctgtactggaacatggctgtgcgggacttcagcatcctgatcaacctgatcaaggtgtttgacagccaccctgtgctgcacgtgtgcctgaagtatggccgcctgtttgtggaggccttcctgaagcagtgcatgcccctgctggacttctccttcaggaagcaccgggaggatgtgctgagcctgctggagaccttccagctggacacccggctgctgcaccacctgtgtggccacagcaagatccaccaggacacccggctgacccagcacgtgcccctgctgaagaagaccctggagctgctggtgtgccgggtgaaggccatgctgaccctgaacaactgccgggaggccttctggctgggcaacctgaagaacagagacctgcagggcgaggagatcaagagccagaacagccaggagagcacagcagatgaaagtgaagatgacatgagcagccaggccagcaagagcaaggccacagaggtgtccctgcagaaccccccagagagcggcacagatggctgcatcctgctgattgtgctgtcctggtggagcaggaccctgcccacctacgtgtactgccagatgctgctgtgccccttccccttccccccatag

SEQ ID NO: 227024 - DNA, 4416 bp, Artificial Sequence
  derived and/or modified sequence
atggtgagcaagcggcggctgagcaagagcgaggacaaggagagcctgaccgaggacgcttccaaaacacgaaaacaacctctcagtaagaaaacgaagaaatcgcatatagccaacgaagttgaggagaatgactccatcttcgttaaactcctcaaaatcagcgggatcatcttgaagacaggcgagagtcaaaatcagctagccgttgatcagatagcttttcagaagaaactttttcagacccttcgtaggcacccgagctatcctaagattattgaagaatttgtgtctggccttgagagctatattgaggatgaagactccttccgcaactgtctactgtcgtgtgagcggctgcaggatgaggaggcctccatgggcgctagctatagcaaatccctgataaaactcctgctgggtatagatatcctgcaacctgccataataaagacccttttcgaaaaactcccagagtattttttcgaaaataagaacagcgacgaaatcaacatcccccgacttatagtatcacagcttaaatggctggatcgcgtagtggacggtaaggatttaaccaccaaaatcatgcagctcatctctatcgcgcctgaaaacctgcagcatgacattattacttcgctccctgagatcttgggagactctcagcacgccgacgtaggaaaggagctatcagacttacttattgaaaacacttctctgacagttcctatcctcgatgtgttgagttccttacgactggaccctaatttcctcctgaaggtgagacagttggttatggacaagctcagctcgatacggttagaagatctgccggtgataattaagttcatcctgcactctgtgaccgccatggacactctggaggtcatatccgagttgagggaaaaattggacttgcagcactgtgtgttaccctcccggctccaagcctcacaggtgaagcttaaatctaaaggacgcgcctcctcctccggaaatcaggagagctccgggcagtcctgcatcatcctcctgttcgatgtgattaaaagcgcgattagatacgaaaagacaatctctgaagcctggattaaagcaatcgagaacactgcctccgtaagcgaacacaaagtgttcgatctggttatgttgtttattatctactcaaccaatactcagaccaaaaaatatattgatcgggtgttgaggaataaaataagatccgggtgcattcaggagcaactcttgcagtcaacctttagtgtccattacctggtgttgaaggatatgtgttcttccattctcagcctggcccagtccctgctacacagcctagatcaaagcattatcagtttcggcagcctgctctacaagtacgccttcaagttctttgatacctactgtcagcaggaggtggtgggtgccctggtgacccatatttgcagtgggaacgaggcagaagtggataccgcactggacgtactactcgagctcgtggtgctcaacccttccgcgatgatgatgaatgcagtctttgtaaagggtatcctagactatctcgataatatttctccacagcagattcgcaagttattctacgtcttgagtacactggcctttagtaagcagaacgaggcctcatctcatattcaggatgatatgcacttagtcatcagaaaacagctctcttccaccgtgttcaagtacaaactaattggcatcataggcgccgtcaccatggctggaataatggccgcagatcgttctgagagcccgtcactgacacaggagagagctaacttaagcgacgagcaatgtactcaggtcacctcactcctccagctggtgcactcatgttcggagcaaagcccgcaggcctcagccctatactacgacgagttcgcaaatctgatccagcatgagaagctggacccaaaagccctggaatgggtcggccatacgatatgtaacgacttccaggacgctttcgtggtggactcctgtgtggtgccggaaggcgacttccccttccccgttaaggccctgtacgggctggaggagtacgatactcaagacgggatcgccatcaacctgctgcctctgctgtttagtcaggattttgccaaggatggtggtccggttacatcgcaggaatccggacagaagttggtctcccctctttgtttagcaccttatttcaggctgctccggctctgtgtagagcgtcagcacaacggcaacctcgaggagatagatggtttgttagattgtccaatcttcctgaccgatttggaacccggcgagaagctggaatccatgagcgctaaggaacgttcctttatgtgctccctgatatttttgaccctgaattggtttcgggagatcgttaacgccttctgtcaagaaacctctccagagatgaagggcaaggtgctcactaggctgaagcacatagtggaactgcaaattatcctggagaaataccttgctgtaaccccggactatgtcccccccctgggcaacttcgacgtggaaacactcgacatcacaccacacactgtcacagccatcagcgctaagattagaaagaagggtaagattgagaggaagcagaaaactgacggatcaaaaacttcatccagtgacacactctcagaagagaagaactccgagtgcgatcctacacccagtcatcgtgggcagctcaacaaagagttcaccgggaaggaagagaaaacttcactgctcctgcacaatagccatgcctttttcagggagctggatattgaagtcttcagtattctccactgtgggctcgtcacgaagtttatcttagatacagaaatgcatactgaagcaaccgaagtggtgcagcttggcccccccgagctgttattcctgctggaagatctgagccagaagctcgagagcatgctgacgcctcctattgccagacgcgttcccttcctcaaaaacaagggttcacgtaacataggctttagccatctgcagcagaggagcgctcaggaaattgtgcactgtgtttttcagctcctgactccaatgtgcaatcatctcgagaacattcataattattttcaatgtctggccgcagagaatcacggggttgtggacgggccgggggttaaagtccaggaataccacattatgtcaagttgctatcagcgcctgcttcaaatattccacggcttgtttgcctggagtgggttcagccaacccgaaaaccagaatcttttatactctgcactgcatgttctgagcagtaggctgaaacaaggtgagcattctcagcccctagaagagctcctgtcacaatctgtccattacctgcaaaactttcatcagtcgattccctcattccagtgtgcactatacctcatacgtctgcttatggtcatactcgaaaagtccactgcaagtgcccagaacaaggagaaaattgcttcgcttgcgcgtcaatttctatgtcgagtttggccatcaggcgataaggagaaatccaacatatctaatgatcagttgcatgcactgctctgtatctacctggaacacactgagagcatcctgaaagctattgaggagatcgcaggtgtgggcgtgcctgagctgattaactcgccgaaggatgcgagctcctcaacctttcctactctgactcgacacacctttgtagttttcttcagggtgatgatggccgaactcgagaaaaccgtaaaaaaaattgagccgggaacagccgctgattctcaacagatacacgaggagaaattgctgtattggaatatggctgttcgtgatttctcaattttaatcaaccttatcaaggtattcgatagccaccccgttctgcacgtgtgtctgaagtacggcagactcttcgtggaagcctttctgaaacagtgcatgcctctgctcgatttctctttcagaaaacatcgtgaggatgtgctctcactgctggaaacattccagttagataccaggctgctgcatcacctgtgcggccattccaaaatccaccaggacactagactaacacaacatgtgccactgctcaaaaagaccctcgagcttctggtgtgcagagtgaaggcaatgctgacactaaacaattgtcgcgaggcattttggctcggtaacctgaaaaatcgggacctgcaaggtgaggaaatcaaatcacaaaattctcaggagtcaacagccgacgagtcagaagatgacatgtcatctcaagcctctaaaagtaaagccacagaggtgtccttacagaacccaccagagagcgggactgatgggtgtatcctgctgatcgtgttgtcatggtggtcccgcacactccccacctatgtgtattgccagatgctgctgtgtcctttcccgtttccaccttag

SEQ ID NO: 227025 - DNA, 4416 bp, Artificial Sequence
  derived and/or modified sequence
atggtcagcaagcgaaggctgagtaaatcagaggataaggagagcctgacagaggatgccagcaagacgcgaaagcagcccctgagcaagaaaaccaagaaaagtcatatcgctaacgaggtggaggaaaacgattccatttttgtcaaactgctcaaaatctctggtataatcctgaagactggggaatcccaaaaccagttagccgtggatcagatcgcattccagaagaaactgttccagacacttagaaggcacccatcctaccctaagattattgaggagtttgtttccgggttggagtcctacattgaggacgaggattcattcagaaattgtctgctgagttgcgagcgattgcaagacgaagaggcatctatgggggcaagctactcaaagtctctcattaaactcctgctggggattgatattctccaacctgccatcatcaagaccctctttgaaaagctcccagagtacttctttgaaaacaagaactccgacgagattaacattccacgcctgattgtgtctcagctcaagtggctcgatagagtggtggatgggaaagacctcaccacaaaaatcatgcagttgatatcgatcgctccggaaaacctacagcatgatatcataacaagcctgcctgagatactcggagactctcagcatgccgacgtgggtaaagagttgagtgacttgctcatagaaaacaccagtctgactgtgcccattctggatgtcttgtccagcctgcgtttggatccaaacttcttgttaaaagttcgacagctcgttatggacaagctctcatcgataagactcgaagacctgcctgtcatcattaaatttattcttcactccgtcactgcgatggacacccttgaggttattagtgaattgagagagaagctggacttgcaacattgtgtgctcccatctaggctgcaggcctcacaggtaaaattgaagtcaaagggacgggcaagcagctccgggaatcaggagagcagtggccagtcctgcattatcctgctctttgacgtcattaagagtgccattaggtacgagaaaactataagtgaggcatggataaaggctattgagaacaccgctagtgtgagcgagcataaagtgttcgatctggttatgttattcatcatttatagtaccaacacgcaaactaaaaaatacatcgatcgagtgctccgcaacaagatacgtagcgggtgtatacaggaacagctactgcagagtacgttctctgttcactacctagttctcaaagatatgtgtagcagcatcctcagcctggctcaaagcctgctgcattctcttgaccaatctatcatctcattcggcagtctcctgtacaagtatgcttttaagtttttcgatacttattgccagcaggaggtggtgggagctctggtcacccatatttgctctggcaacgaagccgaagtcgacaccgctttagatgtgcttctcgaactggtggtcctgaacccatccgccatgatgatgaatgcagtctttgtaaaagggatccttgattaccttgataacatcagcccacagcagattcgcaaattgttttatgtcctctctacattagccttcagtaagcagaatgaggctagttctcacatccaggatgatatgcatctcgttattaggaagcaactgtcttccacagtgttcaagtacaagctgatagggattattggtgccgtgacaatggccggaattatggccgcagaccgcagcgaatcgccctcccttacacaggaacgagccaacttgtccgatgagcagtgtacacaagtcaccagccttttgcagctggtacactcctgttcggaacagtcccctcaggcatctgcgttatattacgacgaattcgccaatctgatacagcacgagaagctcgacccaaaggccctcgagtgggtggggcataccatctgtaacgactttcaagatgcttttgtggtggactcttgtgttgtcccggaaggtgatttccctttccccgtgaaagccctctacgggctggaggagtacgacacccaagatggcatcgccataaacctgcttccgctgctgtttagtcaggacttcgcaaaagacggagggccagtgacatcacaggaatctgggcagaagctggtgtccccactctgtctagcaccatactttagactgcttaggctttgcgtagagagacaacataatgggaacctcgaagaaattgatggactactggattgcccgatttttctgactgacctggaaccaggcgaaaaactagaatccatgtctgccaaagagcgttctttcatgtgcagcttgatatttctgacacttaactggtttcgcgagatcgtgaacgctttctgtcaggaaacttctccagaaatgaagggtaaggtcctgaccaggttgaagcatattgtcgaactgcagatcattctggagaaatacctagctgtcacccccgattacgtgcctcctttggggaactttgatgttgaaacactggatatcacgccacacactgtgacagccatcagtgccaagatccgaaagaaaggaaagatcgagcggaagcagaagaccgatggatccaaaacatctagttcggacacgctaagtgaagaaaagaactccgaatgtgatcctactcctagccatcggggacaattgaacaaggagtttactggtaaggaggagaaaacgtccctgctccttcataactctcatgcattttttagggaattagatattgaagttttcagcatcctacactgcgggctcgtcaccaaatttatcctggacactgagatgcatacggaagcaaccgaggtggtccaactgggccctcccgaactgctgtttctgctggaggatctgtctcagaaactcgagagcatgctaacaccgcctatcgcacgacgggttccatttctgaaaaataagggcagtaggaacataggatttagccacctgcagcagcgttctgctcaggagattgtgcactgtgtgttccagctcctgaccccaatgtgcaaccatctggagaacattcacaattatttccagtgtctggcggcagagaatcatggggtggtggatggccctggagttaaggtgcaggaataccacattatgtcttcctgctaccagagattgctgcagatttttcatggcctatttgcttggtccgggttttcgcagcctgagaatcagaacttactgtattctgctctacacgttttatcttctcgccttaaacagggggaacactctcagcccttggaagaactgttgagtcagagcgtccattacttgcaaaatttccaccagtccattcccagcttccagtgtgccctgtatctgattcggttgctgatggtgattctagaaaaatccacagcctcagcacagaataaagaaaaaattgcgtccctcgctcgtcagtttctatgtcgagtatggcccagtggcgacaaagaaaaatccaacatctcaaacgaccaactacatgctcttttatgtatatatctggaacatactgagtctatactgaaggcaatagaagagatagccggtgtgggcgtgcccgagctgataaattccccaaaagacgcgtcctcctcaactttccccacacttacaaggcatacattcgtggtgttttttcgtgtgatgatggctgagttggaaaagactgttaagaagattgagcccggtactgccgcagatagtcagcagattcacgaggaaaaattactttattggaacatggctgtgagggatttcagtattctaataaacctgattaaggtgttcgacagtcacccagtcctgcatgtgtgcttgaaatacgggaggctgttcgtggaggcgttcctgaaacagtgtatgcccctgctggatttttcctttcggaagcacagagaagacgtattgagtctgttagaaacttttcagttagatacccggctgctacaccatctgtgcggacattctaagattcaccaggacacccgcctgacacagcacgtgcccctgctcaagaaaacactggagttgctggtctgccgggtcaaagctatgctgactctgaataactgtagggaggctttctggctcggcaacctgaagaatcgtgatctgcagggtgaagagatcaaaagtcagaacagccaggaaagcacagcagatgagtctgaggacgacatgagctcccaggcttctaagtccaaggccaccgaggtttccctccagaaccctccagagtcaggaacggacggctgtatcctcctcatcgttctgtcttggtggagccgcaccttaccgacatacgtgtactgtcaaatgctcctttgcccgtttccgttccccccatag

SEQ ID NO: 227026 - DNA, 4416 bp, Artificial Sequence
  derived and/or modified sequence
atggtgagcaagagaagactgagcaagagcgaggacaaggagagcctgaccgaggacgccagcaagaccagaaagcagcccctgagcaagaagaccaagaagagccacatcgccaacgaggtggaggagaacgacagcatcttcgtgaagctgctgaagatcagcggcatcatcctgaagaccggcgagagccagaaccagctggccgtggaccagatcgccttccagaagaagctgttccagaccctgagaagacaccccagctaccccaagatcatcgaggagttcgtgagcggcctggagagctacatcgaggacgaggacagcttcagaaactgcctgctgagctgcgagagactgcaggacgaggaggccagcatgggcgccagctacagcaagagcctgatcaagctgctgctgggcatcgacatcctgcagcccgccatcatcaagaccctgttcgagaagctgcccgagtacttcttcgagaacaagaacagcgacgagatcaacatccccagactgatcgtgagccagctgaagtggctggacagagtggtggacggcaaggacctgaccaccaagatcatgcagctgatcagcatcgcccccgagaacctgcagcacgacatcatcaccagcctgcccgagatcctgggcgacagccagcacgccgacgtgggcaaggagctgagcgacctgctgatcgagaacaccagcctgaccgtgcccatcctggacgtgctgagcagcctgagactggaccccaacttcctgctgaaggtgagacagctggtgatggacaagctgagcagcatcagactggaggacctgcccgtgatcatcaagttcatcctgcacagcgtgaccgccatggacaccctggaggtgatcagcgagctgagagagaagctggacctgcagcactgcgtgctgcccagcagactgcaggccagccaggtgaagctgaagagcaagggcagagccagcagcagcggcaaccaggagagcagcggccagagctgcatcatcctgctgttcgacgtgatcaagagcgccatcagatacgagaagaccatcagcgaggcctggatcaaggccatcgagaacaccgccagcgtgagcgagcacaaggtgttcgacctggtgatgctgttcatcatctacagcaccaacacccagaccaagaagtacatcgacagagtgctgagaaacaagatcagaagcggctgcatccaggagcagctgctgcagagcaccttcagcgtgcactacctggtgctgaaggacatgtgcagcagcatcctgagcctggcccagagcctgctgcacagcctggaccagagcatcatcagcttcggcagcctgctgtacaagtacgccttcaagttcttcgacacctactgccagcaggaggtggtgggcgccctggtgacccacatctgcagcggcaacgaggccgaggtggacaccgccctggacgtgctgctggagctggtggtgctgaaccccagcgccatgatgatgaacgccgtgttcgtgaagggcatcctggactacctggacaacatcagcccccagcagatcagaaagctgttctacgtgctgagcaccctggccttcagcaagcagaacgaggccagcagccacatccaggacgacatgcacctggtgatcagaaagcagctgagcagcaccgtgttcaagtacaagctgatcggcatcatcggcgccgtgaccatggccggcatcatggccgccgacagaagcgagagccccagcctgacccaggagagagccaacctgagcgacgagcagtgcacccaggtgaccagcctgctgcagctggtgcacagctgcagcgagcagagcccccaggccagcgccctgtactacgacgagttcgccaacctgatccagcacgagaagctggaccccaaggccctggagtgggtgggccacaccatctgcaacgacttccaggacgccttcgtggtggacagctgcgtggtgcccgagggcgacttccccttccccgtgaaggccctgtacggcctggaggagtacgacacccaggacggcatcgccatcaacctgctgcccctgctgttcagccaggacttcgccaaggacggcggccccgtgaccagccaggagagcggccagaagctggtgagccccctgtgcctggccccctacttcagactgctgagactgtgcgtggagagacagcacaacggcaacctggaggagatcgacggcctgctggactgccccatcttcctgaccgacctggagcccggcgagaagctggagagcatgagcgccaaggagagaagcttcatgtgcagcctgatcttcctgaccctgaactggttcagagagatcgtgaacgccttctgccaggagaccagccccgagatgaagggcaaggtgctgaccagactgaagcacatcgtggagctgcagatcatcctggagaagtacctggccgtgacccccgactacgtgccccccctgggcaacttcgacgtggagaccctggacatcaccccccacaccgtgaccgccatcagcgccaagatcagaaagaagggcaagatcgagagaaagcagaagaccgacggcagcaagaccagcagcagcgacaccctgagcgaggagaagaacagcgagtgcgaccccacccccagccacagaggccagctgaacaaggagttcaccggcaaggaggagaagaccagcctgctgctgcacaacagccacgccttcttcagagagctggacatcgaggtgttcagcatcctgcactgcggcctggtgaccaagttcatcctggacaccgagatgcacaccgaggccaccgaggtggtgcagctgggcccccccgagctgctgttcctgctggaggacctgagccagaagctggagagcatgctgaccccccccatcgccagaagagtgcccttcctgaagaacaagggcagcagaaacatcggcttcagccacctgcagcagagaagcgcccaggagatcgtgcactgcgtgttccagctgctgacccccatgtgcaaccacctggagaacatccacaactacttccagtgcctggccgccgagaaccacggcgtggtggacggccccggcgtgaaggtgcaggagtaccacatcatgagcagctgctaccagagactgctgcagatcttccacggcctgttcgcctggagcggcttcagccagcccgagaaccagaacctgctgtacagcgccctgcacgtgctgagcagcagactgaagcagggcgagcacagccagcccctggaggagctgctgagccagagcgtgcactacctgcagaacttccaccagagcatccccagcttccagtgcgccctgtacctgatcagactgctgatggtgatcctggagaagagcaccgccagcgcccagaacaaggagaagatcgccagcctggccagacagttcctgtgcagagtgtggcccagcggcgacaaggagaagagcaacatcagcaacgaccagctgcacgccctgctgtgcatctacctggagcacaccgagagcatcctgaaggccatcgaggagatcgccggcgtgggcgtgcccgagctgatcaacagccccaaggacgccagcagcagcaccttccccaccctgaccagacacaccttcgtggtgttcttcagagtgatgatggccgagctggagaagaccgtgaagaagatcgagcccggcaccgccgccgacagccagcagatccacgaggagaagctgctgtactggaacatggccgtgagagacttcagcatcctgatcaacctgatcaaggtgttcgacagccaccccgtgctgcacgtgtgcctgaagtacggcagactgttcgtggaggccttcctgaagcagtgcatgcccctgctggacttcagcttcagaaagcacagagaggacgtgctgagcctgctggagaccttccagctggacaccagactgctgcaccacctgtgcggccacagcaagatccaccaggacaccagactgacccagcacgtgcccctgctgaagaagaccctggagctgctggtgtgcagagtgaaggccatgctgaccctgaacaactgcagagaggccttctggctgggcaacctgaagaacagagacctgcagggcgaggagatcaagagccagaacagccaggagagcaccgccgacgagagcgaggacgacatgagcagccaggccagcaagagcaaggccaccgaggtgagcctgcagaacccccccgagagcggcaccgacggctgcatcctgctgatcgtgctgagctggtggagcagaaccctgcccacctacgtgtactgccagatgctgctgtgccccttccccttccccccctag

SEQ ID NO: 227027 - protein, 183 aa, Artificial Sequence
  derived and/or modified sequence
MAGGPPNTKAEMEMSLAEELNHGRQGENQEHLVIAEMMELGSRSRGASQKKQKLEQKAAGSASAKRVWNMTATRPKKMGSQLPKPRMLRESGHGDAHLQEYAGNFQGIRFHYDRNPGTDAVAQTSLEEFNVLEMEVMRRQLYAVNRRLRALEEQGATWRHRETLIIAVLVSASIANLWLWMNQ

SEQ ID NO: 227028 - DNA, 552 bp, Artificial Sequence
  derived and/or modified sequence
atggccggcggcccccccaacaccaaggccgagatggagatgagcctggccgaggagctgaaccacggcagacagggcgagaaccaggagcacctggtgatcgccgagatgatggagctgggcagcagaagcagaggcgccagccagaagaagcagaagctggagcagaaggccgccggcagcgccagcgccaagagagtgtggaacatgaccgccaccagacccaagaagatgggcagccagctgcccaagcccagaatgctgagagagagcggccacggcgacgcccacctgcaggagtacgccggcaacttccagggcatcagattccactacgacagaaaccccggcaccgacgccgtggcccagaccagcctggaggagttcaacgtgctggagatggaggtgatgagaagacagctgtacgccgtgaacagaagactgagagccctggaggagcagggcgccacctggagacacagagagaccctgatcatcgccgtgctggtgagcgccagcatcgccaacctgtggctgtggatgaaccagtag

SEQ ID NO: 227029 - DNA, 1072 bp, Artificial Sequence
  derived and/or modified sequence
agaggtgattttctgagtgtgactcctctgttcctggcaccctgtgcatccttagccatagcttacaagagaacagctggttgtgatggcaggaggccctcccaacaccaaggcggagatggaaatgtccctggcagaagaactgaatcatggacgccaaggggaaaaccaagagcacctggtgatagcagaaatgatggagcttggatctcggtcccggggtgcctcccagaagaagcagaagttggaacaaaaagctgctggctctgcttcagccaaacgagtttggaatatgactgccacccgacccaagaaaatggggtcccagctgccaaagcccagaatgctgagagaatcaggccatggggatgcccatctccaggagtacgctggcaatttccaaggcatacgtttccattatgatcgcaacccagggacagatgcagtggcgcagactagcctggaagagttcaatgtactggagatggaagtcatgagaagacagctgtatgcagtcaaccggcgtctgcgcgccctggaggaacagggcgccacctggcgccacagggagaccctgatcatcgccgtgctggtgtcggccagcattgccaacctgtggctgtggatgaaccagtgatcgccccagcgcggcctccgtattggagccctccctgcttccccttctttctttcctctttccccaggccgccactgcccttgcccctttcatctcccagcagccctcaggagcgtcaggatcattttcaactctggttaggcctcctacctggggaggccaggtcactgcactgggaggtcctggctgctgcgaagctggaggaggactgcgtgggctgagatgccaccctttgaagggtgaacagcatggcggcatctgggccccacagtaacacctagtggcaaccttgccttcctgacctcagcggcccttctgttccatcctctgtgggcaggggtgtggctttgttttcctccctcgtttgcttccacctcgtgcacagcgctctgcacagacaacacgctcaataaaagttcagccatagcagcaaaa

SEQ ID NO: 227030 - DNA, 552 bp, Artificial Sequence
  derived and/or modified sequence
atggctggtggaccaccaaatacaaaggctgagatggagatgtctttggcagaagagctgaatcatggcaggcaaggggaaaaccaggagcatctggttattgccgagatgatggaactgggctcaaggtctcgcggtgcctctcagaagaaacagaagctcgaacagaaggcggccggatctgcctccgcaaagcgagtttggaatatgacggccaccaggcccaagaaaatggggtcccagctgccgaagcctagaatgcttagagagtcaggccacggtgacgcccaccttcaggaatacgcgggcaacttccagggcataaggtttcattatgaccgcaaccccgggacagacgccgttgctcagacctcgctagaggaattcaacgtgcttgaaatggaagtgatgagacgccagctgtacgcagttaaccgccgattaagagctctggaggagcaaggagccacttggcgtcatcgcgaaacgctcatcatagcagtcctggtgtcagcaagcattgcaaacctgtggctttggatgaaccagtag

SEQ ID NO: 227031 - DNA, 552 bp, Artificial Sequence
  derived and/or modified sequence
atggccggcggcccccccaacaccaaggccgagatggagatgagcctggccgaggagctgaaccacggccggcagggcgagaaccaggagcacctggtgattgctgagatgatggagctgggcagccgcagcagaggagccagccagaagaagcagaagctggagcagaaggctgctggcagcgccagcgccaagagggtgtggaacatgacagccacccggcccaagaagatgggcagccagctgcccaagcccaggatgctgcgggagagcggccatggagatgcccacctgcaggagtatgccggcaacttccagggcatccgcttccactatgacaggaaccctggaacagatgctgtggcccagaccagcctggaggagttcaacgtgctggagatggaggtgatgaggcggcagctgtatgctgtgaacagaaggctgcgggccctggaggagcagggcgccacctggaggcaccgggagaccctcatcatcgctgtgctggtgtctgccagcatcgccaacctgtggctgtggatgaaccagtag

SEQ ID NO: 227032 - DNA, 552 bp, Artificial Sequence
  derived and/or modified sequence
atggccggcggcccccccaacaccaaggccgagatggagatgagcctggcggaagaactgaaccacgggcggcaaggcgaaaaccaagagcacttagttatcgccgaaatgatggaactcggaagcagaagcagaggcgccagtcagaaaaagcagaaacttgagcagaaagcggccgggtccgcctccgctaaacgcgtgtggaatatgaccgccacacggccaaagaagatggggtctcagctgccaaagcccagaatgctcagagagagtggccacggtgacgcccacttgcaggagtatgcaggcaatttccagggaatcagatttcactacgacaggaatcccgggactgacgctgtcgctcagactagccttgaagaatttaacgtgctggaaatggaagtgatgcgacgccagctttacgcagtgaaccgccgtctgagagccctcgaagaacagggtgcaacttggcggcatcgcgagaccctgattatcgctgtgctcgtgagcgcgtccatagctaacctctggctgtggatgaatcagtag

SEQ ID NO: 227033 - DNA, 552 bp, Artificial Sequence
  derived and/or modified sequence
atggcagggggacccccaaatacaaaggcagagatggaaatgtcactggcggaagagctcaaccacggacgccaaggggagaatcaggagcatctggtgatagccgagatgatggaacttgggtcccgtagccggggtgcatctcagaaaaaacagaagctcgagcaaaaagcggctgggtcagcctcggctaaacgtgtgtggaacatgaccgccactcgcccaaaaaagatggggtctcagttgcctaagcccaggatgctgcgagagagcgggcatggagatgctcatttacaggagtacgccggaaacttccaaggcatcagattccattatgatcgcaaccctgggaccgatgctgtcgctcagacctccctcgaagagtttaatgtactcgaaatggaggtcatgaggcgtcagctgtatgcggtcaaccgcaggcttcgcgcactcgaagagcagggtgcgacatggagacatcgtgaaacacttataattgcagtgctagtaagtgccagtatcgccaacctctggctctggatgaatcaatag

SEQ ID NO: 227034 - protein, 323 aa, Artificial Sequence
  derived and/or modified sequence
MPLLKLVHGSPLVFGEKFKLFTLVSACIPVFRLARRRKKILFYCHFPDLLLTKRDSFLKRLYRAPIDWIEEYTTGMADCILVNSQFTAAVFKETFKSLSHIDPDVLYPSLNVTSFDSVVPEKLDDLVPKGKKFLLLSINRYERKKNLTLALEALVQLRGRLTSQDWERVHLIVAGGYDERVLENVEHYQELKKMVQQSDLGQYVTFLRSFSDKQKISLLHSCTCVLYTPSNEHFGIVPLEAMYMQCPVIAVNSGGPLESIDHSVTGFLCEPDPVHFSEAIEKFIREPSLKATMGLAGRARVKEKFSPEAFTEQLYRYVTKLLV

SEQ ID NO: 227035 - protein, 416 aa, Artificial Sequence
  derived and/or modified sequence
MAEEQGRERDSVPKPSVLFLHPDLGVGGAERLVLDAALALQARGCSVKIWTAHYDPGHCFAESRELPVRCAGDWLPRGLGWGGRGAAVCAYVRMVFLALYVLFLADEEFDVVVCDQVSACIPVFRLARRRKKILFYCHFPDLLLTKRDSFLKRLYRAPIDWIEEYTTGMADCILVNSQFTAAVFKETFKSLSHIDPDVLYPSLNVTSFDSVVPEKLDDLVPKGKKFLLLSINRYERKKNLTLALEALVQLRGRLTSQDWERVHLIVAGGYDERVLENVEHYQELKKMVQQSDLGQYVTFLRSFSDKQKISLLHSCTCVLYTPSNEHFGIVPLEAMYMQCPVIAVNSGGPLESIDHSVTGFLCEPDPVHFSEAIEKFIREPSLKATMGLAGRARVKEKFSPEAFTEQLYRYVTKLLV

SEQ ID NO: 227036 - DNA, 972 bp, Artificial Sequence
  derived and/or modified sequence
atgcctctgctcaaactagttcacggaagcccactggtcttcggtgagaagtttaaactgttcacgctggtgtccgcatgcatcccagtgttccggctggctagaaggagaaagaagattctcttttactgtcacttcccagatctgctccttaccaaacgcgattcttttcttaagcgactgtatcgagccccaatcgactggatagaggagtataccactggaatggctgactgcattctggtgaatagccagtttaccgcggcggttttcaaagaaactttcaaaagtttgagccatatcgacccagatgttctgtaccctagtctcaatgttactagcttcgatagtgtcgtgccagagaagctggacgaccttgtgcccaagggcaagaaattcctcttgctttccataaatcgatatgagcgcaagaagaatctgactctggccctcgaagccttggtccaactcagaggcagactgacctcacaagactgggagagggtccacctcattgttgccggaggctatgatgaacgagtgctcgaaaatgttgagcactaccaagagctcaaaaaaatggtgcagcaatctgacctggggcaatatgtcacttttttgaggtcattttccgataagcagaaaatatcactcctccacagctgtacatgtgtgctatacactccttctaacgagcacttcgggattgttcctttggaagccatgtatatgcaatgccctgtcattgccgttaatagtggcggacctcttgagtcaatcgaccattcagttacagggttcctttgtgagcccgacccagttcacttctcggaagcgattgaaaaattcattagagagccttctctgaaagccaccatgggattagccggcagagcacgcgtgaaagagaagttttcacctgaggcctttacagagcaactgtaccggtacgtaaccaaactactggtctag

SEQ ID NO: 227037 - DNA, 1251 bp, Artificial Sequence
  derived and/or modified sequence
atggctgaagagcagggcagagaacgggactctgtgcccaagccgtcggtgctgttcttgcatcctgatctaggtgtgggcggtgctgagcgactggtcttagacgcagcccttgctctgcaagctcgaggctgctctgtcaagatctggaccgctcattacgatcctggacattgctttgccgaatccagggagcttcccgtgcgatgcgccggagattggctgcctcgtggactgggctggggcggtcgaggagctgctgtgtgcgcttatgtgagaatggtgtttctcgccctgtatgtgctgtttttagctgacgaggagttcgacgtagttgtctgtgaccaagtctcggcctgcatccccgtatttagactggcacgacgtagaaagaagatccttttttattgccattttccagacctgcttctcacaaaacgggactctttcttaaagcgcttgtaccgtgcccccatcgactggatagaagagtacactacagggatggccgactgcattctagttaatagccaatttactgccgctgtcttcaaggagacgtttaagtccctgtcacatatagatcctgacgttttgtacccttccctgaacgtcacctctttcgactcagtggtgccagagaagctggacgatttggttccgaaaggtaaaaagttcctgcttttaagcattaacagatatgagcgcaaaaagaaccttaccttagctctggaagctctggtacagcttcgagggcggctgaccagccaagactgggagcgcgtgcatctaatcgtggccggaggatatgatgaacgggtactcgaaaacgtcgaacactatcaggaattaaagaaaatggtgcagcagtcagacctgggccagtatgtgaccttcctccggagctttagcgacaagcaaaagattagtcttctccattcatgcacttgtgtgctgtacaccccctcaaacgagcacttcggtatagtacctctggaggccatgtacatgcagtgtccagttatcgccgtcaactcagggggtccattggagtccattgatcattcagtaactggttttctgtgcgagccggaccctgttcatttctcagaggctatcgaaaaattcataagagagccttccttaaaggccactatggggctagcgggccgcgctagagtgaaagagaagtttagtcctgaagcctttaccgaacagctatacaggtatgttactaagctgctggtgtag

SEQ ID NO: 227038 - DNA, 972 bp, Artificial Sequence
  derived and/or modified sequence
atgcccctgctgaagctggtgcacggcagccccctggtgtttggagagaagttcaagctgttcaccctggtgtctgcctgcatccctgtgttccggctggcccggcggaggaagaagatcctcttctactgccacttcccagacctgctgctgaccaagagggacagcttcctgaagaggctgtaccgggcccccatcgactggattgaggagtacaccaccggcatggctgactgcatcctggtgaacagccagttcaccgctgctgtgttcaaggagaccttcaagagcctgagccacattgatcctgatgtgctgtaccccagcctgaatgtgaccagctttgattctgtggtgcctgagaagctggatgacctggtgcccaagggcaagaagttcctgctgctgagcatcaacagatatgaaaggaagaagaacctgaccctggccctggaggccctggtgcagctgcggggccgcctgaccagccaggactgggagcgggtgcacctgattgtggccggcggctatgatgagcgggtgctggagaatgtggagcactaccaggagctgaagaagatggtgcagcagagcgacctgggccagtatgtgaccttcctgcgctccttcagtgacaagcagaagatcagcctgctgcacagctgcacctgtgtgctgtacacccccagcaatgagcacttcggcatcgtgcccctggaggccatgtacatgcagtgccctgtgattgctgtgaacagcggcggccccctggagagcattgaccacagcgtgacaggcttcctgtgtgagccagaccctgtgcacttcagcgaggccatcgagaagttcatccgggagcccagcctgaaggccaccatgggcctggccggccgggcccgggtgaaggagaagttcagccctgaggccttcacagagcagctgtaccgctacgtgaccaagctgctggtgtag

SEQ ID NO: 227039 - DNA, 1251 bp, Artificial Sequence
  derived and/or modified sequence
atggccgaggagcagggccgggagcgggacagcgtgcccaagcccagcgtgctcttcctgcacccagacctgggcgtgggcggcgctgagcggctggtgctggatgctgccctggccctgcaggcccggggctgcagcgtgaagatctggacagcccactatgaccccggccactgctttgctgagagccgggagctgcctgtgcgctgtgccggggactggctgccccggggcctgggctggggcggccgcggggctgctgtgtgtgcctacgtgaggatggtgttcctggccctgtatgtgctcttcctggctgatgaggagtttgatgtggtggtgtgtgaccaggtgtctgcctgcatccctgtgttccggctggcccggcggaggaagaagatcctcttctactgccacttcccagacctgctgctgaccaagagggacagcttcctgaagaggctgtaccgggcccccatcgactggattgaggagtacaccaccggcatggctgactgcatcctggtgaacagccagttcaccgctgctgtgttcaaggagaccttcaagagcctgagccacatcgaccctgatgtgctgtaccccagcctgaatgtgaccagctttgacagcgtggtgcctgagaagctggatgacctggtgcccaagggcaagaagttcctgctgctgagcatcaacagatatgaaaggaagaagaacctgaccctggccctggaggccctggtgcagctgcggggccgcctgaccagccaggactgggagcgggtgcacctgattgtggccggcggctatgatgagcgggtgctggagaatgtggagcactaccaggagctgaagaagatggtgcagcagagcgacctgggccagtatgtgaccttcctgcggagcttcagtgacaagcagaagatcagcctgctgcacagctgcacctgtgtgctgtacacccccagcaatgagcactttggaattgtgcccctggaggccatgtacatgcagtgccctgtgattgctgtgaacagcggcggccccctggagagcattgaccacagcgtgacaggcttcctgtgtgagccagaccctgtgcacttcagcgaggccatcgagaagttcatccgggagcccagcctgaaggccaccatgggcctggccggccgggcccgggtgaaggagaagttcagccctgaggccttcacagagcagctgtaccgctacgtgaccaagctgctggtgtag

SEQ ID NO: 227040 - DNA, 972 bp, Artificial Sequence
  derived and/or modified sequence
atgcccctgctgaagctggtgcacggcagccccctggtgttcggcgagaaattcaagctgtttaccctggtctctgcgtgtatccctgtctttagacttgcacggaggagaaaaaaaatcctgttctactgtcattttcccgatctgctattaaccaaacgggattcatttcttaaacggctgtatcgggcccctatcgattggattgaggaatacactaccggcatggctgactgcatcctcgtaaatagccagtttacggcagcagtgttcaaagaaactttcaagtccctgagtcacatcgacccggatgtgctgtaccctagcttgaatgtaacttccttcgactccgtggtccctgagaagctagacgatctggtaccgaagggcaaaaagttcctgctcctctcgatcaatcggtatgagcgcaagaagaacttaactctggccctcgaagcacttgtgcagctgagagggcgccttaccagtcaggattgggaaagagtgcacttgattgtggctggcggctacgacgaaagagtgctcgagaacgttgaacactatcaagagctgaagaagatggtgcaacagtccgacctcgggcagtatgtgaccttcctgcggtcatttagtgataaacaaaagatcagtctgctgcacagttgtacctgcgtcttgtacaccccctctaatgagcactttggtatcgtcccgttagaggccatgtatatgcagtgtccagtaatcgcagttaacagcggtgggcctctggagagcatcgatcactccgtgaccggatttttatgcgagcctgaccctgtgcacttcagcgaggctattgagaaattcatccgagagccaagtttgaaggctacgatgggactagctggtcgcgccagagtaaaggagaagttttctccagaggccttcactgaacaattatatcgctatgtcacaaaactactcgtctag

SEQ ID NO: 227041 - DNA, 1251 bp, Artificial Sequence
  derived and/or modified sequence
atggccgaggagcagggccgggagcgggacagcgtgcccaagccctcagttctcttcctccaccccgacctaggggtgggtggcgcggagcgattggtgctggacgcagccctcgccttacaggcaagaggatgctccgttaagatctggaccgcccactacgaccccggccactgctttgccgaatcaagagagttgcctgtgagatgtgctggcgactggctgccacgcggacttggctggggtggccggggggctgccgtttgcgcttacgtgaggatggtttttttggcgctgtacgtcctgttcctggccgatgaagagttcgatgtcgtggtttgcgatcaggtgtcggcttgcatccccgtgtttaggcttgcccgccgacggaaaaagattcttttttactgtcacttccccgatcttctgctcacaaagcgggactcctttttgaagcggctttatagggcacccatagattggattgaagaatataccaccgggatggccgactgtatcttagtaaactctcagtttactgctgctgtattcaaagaaacatttaagagtttaagtcacatcgatcccgacgtgctgtacccaagtctcaacgtgacatcctttgatagcgtcgtcccggagaagctcgacgatctggttcctaaaggaaagaagtttctgttgctctctatcaataggtacgagaggaagaagaatcttaccctggctctggaggcgctggtccagctccgtggccgccttacgagccaggactgggagcgcgtgcatctgattgtggctggcggatatgacgagcgagttctcgagaacgtagagcactatcaggagctgaaaaagatggtacagcagagtgacttggggcagtacgtaactttcctgcggtccttctctgacaaacaaaagattagtctgttacactcttgcacctgtgttctatacacaccctcaaatgaacattttggcatagtcccactcgaggccatgtatatgcagtgccccgtgatagcagtgaattctggtggcccgcttgagagcatcgatcattcagtgacaggctttctttgtgaacctgacccagttcacttctcagaggccattgagaaatttatcagagagccttccctgaaggcaaccatgggcttggctgggagggcccgggtgaaggaaaaattctctccagaggcattcactgagcagctctataggtatgttactaagctgttggtttag

SEQ ID NO: 227042 - DNA, 972 bp, Artificial Sequence
  derived and/or modified sequence
atgccgctcttaaagcttgtgcatggctcccctcttgttttcggggagaaatttaagcttttcacattggtgtctgcctgtatccctgtgttcaggctggcacgccgacggaaaaaaattctcttctactgccactttcctgacctgttgctgaccaagagagattctttccttaaaagactgtacagagcacccattgattggattgaggagtacacaacggggatggctgactgcatcctggtcaactctcagtttacagccgcagtcttcaaagagacctttaaaagcctgagccatatcgatcctgacgtactctacccttctctcaacgtgacctcattcgatagcgtggttcccgaaaaattggacgatcttgtacccaagggaaagaaattcctactgctcagcattaacaggtacgagaggaagaagaacctgaccctggccctggaagctctcgttcaactgcggggacgccttacctcgcaggactgggaacgggtacaccttatagtggctgggggatatgatgaaagagtgctggaaaatgtggagcactatcaggaattgaaaaagatggtgcagcaaagcgacctcggtcagtatgtcacgttcctgagaagttttagcgacaaacagaagatcagtctcttgcactcctgcacatgtgtcctgtacaccccctctaatgaacactttggaattgtgcccctcgaggcaatgtacatgcagtgcccagtgatcgcagtgaattcgggtggcccattggagtcaatcgaccactccgtaaccggtttcctgtgcgagcctgacccggtgcatttttccgaagccatagagaagttcatcagagagcccagcttaaaagcaacgatgggcttggccggtagggctagagtaaaggaaaagtttagtcccgaggccttcacagagcagctgtacagatatgtcacaaagctgttggtgtag

SEQ ID NO: 227043 - DNA, 1251 bp, Artificial Sequence
  derived and/or modified sequence
atggctgaggagcaaggtcgggaacgagatagtgtgcctaagccaagtgttcttttcctccacccagatctgggagtcggtggcgcagaacgactggttttagacgctgccttggccctgcaggccagaggctgctcggtcaagatatggacagcccactacgaccctggacactgcttcgcagagtctagagagctgccagttcgttgcgccggagattggctgcccagaggcttggggtggggcggtaggggcgctgccgtgtgtgcctatgtgcggatggtttttctggccctgtacgtgctttttttggccgatgaagagtttgacgtggtggtgtgtgaccaggtcagtgcctgcatccccgtgtttagactggccaggagacgcaagaagatcctgttttattgtcactttcccgatctcttgctgacaaagagggatagcttcctgaaacggctctatcgagccccaattgattggatcgaggagtatactactggcatggcagattgtatactggtgaattctcagttcactgcagcagtgttcaaggagacattcaaatccctgagccatatcgatccagatgttctttacccatctttgaacgtcactagctttgactctgtggtgcctgagaaattagacgacctcgtgcccaaaggcaaaaaattcctacttctcagtatcaacaggtacgagcgaaaaaaaaacctcactctcgccctggaagccctggtgcagttgcgtggcaggctcaccagccaggattgggaaagggtgcacctgatagttgccggtggttacgatgagcgcgtcctcgagaacgtggagcattaccaggagctgaaaaaaatggttcagcaaagtgatctgggccagtatgtgacattcctcaggtctttttccgataaacagaaaattagcctgcttcactcctgtacttgcgttttatacaccccttccaacgaacatttcggcattgtgcccctggaggccatgtacatgcagtgtccagtcatcgcagtgaattcggggggacctttagagtctatagatcatagcgtcaccggtttcctgtgcgaaccggatcctgtgcacttcagtgaggccatcgagaaattcatcagagaaccatccttgaaagccaccatgggccttgcaggtcgtgccagagtcaaagagaagttctctccagaggcttttaccgagcaactgtatcggtatgtgaccaaactcctggtgtag

SEQ ID NO: 227044 - DNA, 1536 bp, Artificial Sequence
  derived and/or modified sequence
atgcccctattaaaacttgtacatggctccccattggtttttggagaaaagttcaagctttttaccttggtgtctgcctgtatcccagtgttcaggctggctagacggcggaagaagatcctattttactgtcacttcccagatctgcttctcaccaagagagattcttttcttaaacgactatacagggccccaattgactggatagaggaatacaccacaggcatggcagactgcatcttagtcaacagccagttcacagctgctgtttttaaggaaacattcaagtccctgtctcacatagaccctgatgtcctctatccatctctaaatgtcaccagctttgactcagttgttcctgaaaagctggatgacctagtccccaaggggaaaaaattcctgctgctctccatcaacagatacgaaaggaagaaaaatctgactttggcactggaagccctagtacagctgcgtggaagattgacatcccaagattgggagagggttcatctgatcgtggcaggtggttatgacgagagagtcctggagaatgtggaacattatcaggaattgaagaaaatggtccaacagtccgaccttggccagtatgtgaccttcttgaggtctttctcagacaaacagaaaatctccctcctccacagctgcacgtgtgtgctttacacaccaagcaatgagcactttggcattgtccctctggaagccatgtacatgcagtgcccagtcattgctgttaattcgggtggacccttggagtccattgaccacagtgtcacagggtttctgtgtgagcctgacccggtgcacttctcagaagcaatagaaaagttcatccgtgaaccttccttaaaagccaccatgggcctggctggaagagccagagtgaaggaaaaattttcccctgaagcatttacagaacagctctaccgatatgttaccaaactgctggtataatcagattgtttttaagatctccattaatgtcatttttatggattgtagacccagttttgaaaccaaaaaagaaacctagaatctaatgcagaagagatcttttaaaaaataaacttgagtcttgaatgtgagccactttcctatataccacacctccctgtccacttttcagaaaaaccatgtcttttatgctataatcattccaaattttgccagtgttaagttacaaatgtggtgtcattccatgttcagcagagtattttaattatattttctcgggattattgctcttctgtctataaattttgaatgatactgtgccttaattggttttcatagtttaagtgtgtatcattatcaaagttgattaatttggcttcatagtataatgagagcagggctattgtagttcccagattcaatccaccgaagtgttcactgtcatctgttagggaatttttgtttgtcctgtctttgcctggatccatagcgagagtgctctgtattttttttaagataatttgtatttttgcacactgagatataataaaaggtgtttatcat

SEQ ID NO: 227045 - DNA, 1880 bp, Artificial Sequence
  derived and/or modified sequence
agcgcggagcttgcgcagaagacccccatcagggtgcggggtgcagttgcggctccagggccatggcggaggagcagggccgggaacgggactcggttcccaagccgtcggtgctgttcctccacccagacctgggcgtgggcggcgctgagcggctggtgttggacgcggcgctggcgctgcaggcgcgcgggtgtagcgtgaagatctggacagcgcactacgacccgggccactgtttcgccgagagccgcgagctaccggtgcgctgtgccggggactggctgccgcgaggcctgggctggggcggccgcggcgccgccgtctgcgcctacgtgcgcatggttttcctggcgctctacgtgctgttcctcgccgacgaggagttcgacgtggtagtgtgcgaccaggtgtctgcctgtatcccagtgttcaggctggctagacggcggaagaagatcctattttactgtcacttcccagatctgcttctcaccaagagagattcttttcttaaacgactatacagggccccaattgactggatagaggaatacaccacaggcatggcagactgcatcttagtcaacagccagttcacagctgctgtttttaaggaaacattcaagtccctgtctcacatagaccctgatgtcctctatccatctctaaatgtcaccagctttgactcagttgttcctgaaaagctggatgacctagtccccaaggggaaaaaattcctgctgctctccatcaacagatacgaaaggaagaaaaatctgactttggcactggaagccctagtacagctgcgtggaagattgacatcccaagattgggagagggttcatctgatcgtggcaggtggttatgacgagagagtcctggagaatgtggaacattatcaggaattgaagaaaatggtccaacagtccgaccttggccagtatgtgaccttcttgaggtctttctcagacaaacagaaaatctccctcctccacagctgcacgtgtgtgctttacacaccaagcaatgagcactttggcattgtccctctggaagccatgtacatgcagtgcccagtcattgctgttaattcgggtggacccttggagtccattgaccacagtgtcacagggtttctgtgtgagcctgacccggtgcacttctcagaagcaatagaaaagttcatccgtgaaccttccttaaaagccaccatgggcctggctggaagagccagagtgaaggaaaaattttcccctgaagcatttacagaacagctctaccgatatgttaccaaactgctggtataatcagattgtttttaagatctccattaatgtcatttttatggattgtagacccagttttgaaaccaaaaaagaaacctagaatctaatgcagaagagatcttttaaaaaataaacttgagtcttgaatgtgagccactttcctatataccacacctccctgtccacttttcagaaaaaccatgtcttttatgctataatcattccaaattttgccagtgttaagttacaaatgtggtgtcattccatgttcagcagagtattttaattatattttctcgggattattgctcttctgtctataaattttgaatgatactgtgccttaattggttttcatagtttaagtgtgtatcattatcaaagttgattaatttggcttcatagtataatgagagcagggctattgtagttcccagattcaatccaccgaagtgttcactgtcatctgttagggaatttttgtttgtcctgtctttgcctggatccatagcgagagtgctctgtattttttttaagataatttgtatttttgcacactgagatataataaaaggtgtttatcataaa

SEQ ID NO: 227046 - DNA, 972 bp, Artificial Sequence
  derived and/or modified sequence
atgcccctgctgaagctggtgcacggcagccccctggtgttcggcgagaagttcaagctgttcaccctggtgagcgcctgcatccccgtgttcagactggccagaagaagaaagaagatcctgttctactgccacttccccgacctgctgctgaccaagagagacagcttcctgaagagactgtacagagcccccatcgactggatcgaggagtacaccaccggcatggccgactgcatcctggtgaacagccagttcaccgccgccgtgttcaaggagaccttcaagagcctgagccacatcgaccccgacgtgctgtaccccagcctgaacgtgaccagcttcgacagcgtggtgcccgagaagctggacgacctggtgcccaagggcaagaagttcctgctgctgagcatcaacagatacgagagaaagaagaacctgaccctggccctggaggccctggtgcagctgagaggcagactgaccagccaggactgggagagagtgcacctgatcgtggccggcggctacgacgagagagtgctggagaacgtggagcactaccaggagctgaagaagatggtgcagcagagcgacctgggccagtacgtgaccttcctgagaagcttcagcgacaagcagaagatcagcctgctgcacagctgcacctgcgtgctgtacacccccagcaacgagcacttcggcatcgtgcccctggaggccatgtacatgcagtgccccgtgatcgccgtgaacagcggcggccccctggagagcatcgaccacagcgtgaccggcttcctgtgcgagcccgaccccgtgcacttcagcgaggccatcgagaagttcatcagagagcccagcctgaaggccaccatgggcctggccggcagagccagagtgaaggagaagttcagccccgaggccttcaccgagcagctgtacagatacgtgaccaagctgctggtgtag

SEQ ID NO: 227047 - DNA, 1251 bp, Artificial Sequence
  derived and/or modified sequence
atggccgaggagcagggcagagagagagacagcgtgcccaagcccagcgtgctgttcctgcaccccgacctgggcgtgggcggcgccgagagactggtgctggacgccgccctggccctgcaggccagaggctgcagcgtgaagatctggaccgcccactacgaccccggccactgcttcgccgagagcagagagctgcccgtgagatgcgccggcgactggctgcccagaggcctgggctggggcggcagaggcgccgccgtgtgcgcctacgtgagaatggtgttcctggccctgtacgtgctgttcctggccgacgaggagttcgacgtggtggtgtgcgaccaggtgagcgcctgcatccccgtgttcagactggccagaagaagaaagaagatcctgttctactgccacttccccgacctgctgctgaccaagagagacagcttcctgaagagactgtacagagcccccatcgactggatcgaggagtacaccaccggcatggccgactgcatcctggtgaacagccagttcaccgccgccgtgttcaaggagaccttcaagagcctgagccacatcgaccccgacgtgctgtaccccagcctgaacgtgaccagcttcgacagcgtggtgcccgagaagctggacgacctggtgcccaagggcaagaagttcctgctgctgagcatcaacagatacgagagaaagaagaacctgaccctggccctggaggccctggtgcagctgagaggcagactgaccagccaggactgggagagagtgcacctgatcgtggccggcggctacgacgagagagtgctggagaacgtggagcactaccaggagctgaagaagatggtgcagcagagcgacctgggccagtacgtgaccttcctgagaagcttcagcgacaagcagaagatcagcctgctgcacagctgcacctgcgtgctgtacacccccagcaacgagcacttcggcatcgtgcccctggaggccatgtacatgcagtgccccgtgatcgccgtgaacagcggcggccccctggagagcatcgaccacagcgtgaccggcttcctgtgcgagcccgaccccgtgcacttcagcgaggccatcgagaagttcatcagagagcccagcctgaaggccaccatgggcctggccggcagagccagagtgaaggagaagttcagccccgaggccttcaccgagcagctgtacagatacgtgaccaagctgctggtgtag

SEQ ID NO: 227048 - protein, 404 aa, Artificial Sequence
  derived and/or modified sequence
MATGGGAEEERKRGRPQLLPPARPAARGEEADGGREKMGWAQVVKNLAEKKGEFREPRPPRREEESGGGGGSAGLGGPAGLAAPDLGDFPPAGRGDPKGRRRDPAGEAVDPRKKKGAAEAGRRKKAEAAAAAMATPARPGEAEDAAERPLQDEPAAAAAGPGKGRFLVRICFQGDEGACPTRDFVVGALILRSIGMDPSDIYAVIQIPGSREFDVSFRSAEKLALFLRVYEEKREQEDCWENFVVLGRSKSSLKTLFILFRNETVDVEDIVTWLKRHCDVLAVPVKVTDRFGIWTGEYKCEIELRQGEGGVRHLPGAFFLGAERGYSWYKGQPKTCFKCGSRTHMSGSCTQDRCFRCGEEGHLSPYCRKGIVCNLCGKRGHAFAQCPKAVHNSVAAQLTGVAGH

SEQ ID NO: 227049 - DNA, 1215 bp, Artificial Sequence
  derived and/or modified sequence
atggccaccggcggcggcgccgaggaggagagaaagagaggcagaccccagctgctgccccccgccagacccgccgccagaggcgaggaggccgacggcggcagagagaagatgggctgggcccaggtggtgaagaacctggccgagaagaagggcgagttcagagagcccagaccccccagaagagaggaggagagcggcggcggcggcggcagcgccggcctgggcggccccgccggcctggccgcccccgacctgggcgacttcccccccgccggcagaggcgaccccaagggcagaagaagagaccccgccggcgaggccgtggaccccagaaagaagaagggcgccgccgaggccggcagaagaaagaaggccgaggccgccgccgccgccatggccacccccgccagacccggcgaggccgaggacgccgccgagagacccctgcaggacgagcccgccgccgccgccgccggccccggcaagggcagattcctggtgagaatctgcttccagggcgacgagggcgcctgccccaccagagacttcgtggtgggcgccctgatcctgagaagcatcggcatggaccccagcgacatctacgccgtgatccagatccccggcagcagagagttcgacgtgagcttcagaagcgccgagaagctggccctgttcctgagagtgtacgaggagaagagagagcaggaggactgctgggagaacttcgtggtgctgggcagaagcaagagcagcctgaagaccctgttcatcctgttcagaaacgagaccgtggacgtggaggacatcgtgacctggctgaagagacactgcgacgtgctggccgtgcccgtgaaggtgaccgacagattcggcatctggaccggcgagtacaagtgcgagatcgagctgagacagggcgagggcggcgtgagacacctgcccggcgccttcttcctgggcgccgagagaggctacagctggtacaagggccagcccaagacctgcttcaagtgcggcagcagaacccacatgagcggcagctgcacccaggacagatgcttcagatgcggcgaggagggccacctgagcccctactgcagaaagggcatcgtgtgcaacctgtgcggcaagagaggccacgccttcgcccagtgccccaaggccgtgcacaacagcgtggccgcccagctgaccggcgtggccggccactag

SEQ ID NO: 227050 - DNA, 1215 bp, Artificial Sequence
  derived and/or modified sequence
atggcaacgggcggaggtgccgaggaggagcggaaaagggggcggccgcagcttctccccccagccaggcctgccgcccggggggaagaagccgacggaggtagagaaaaaatggggtgggctcaggtggtcaaaaacctggcagagaaaaagggggaattccgtgagccgcgcccacccaggcgcgaggaggagtctggcggggggggggggtccgccggactcggtggacctgcgggtctggctgcccccgatctgggtgattttccgcccgcagggcgcggagaccctaaaggtaggagacgcgaccccgccggggaagcagtagatccaaggaagaaaaagggcgccgccgaagccggaaggcggaaaaaggccgaggcggccgcagcggccatggccacccctgcaaggccaggcgaagccgaggacgccgccgagcggccacttcaggatgagcccgccgctgccgccgcggggccaggcaagggccggtttttggttcggatatgttttcaaggggatgaaggagcctgccctactcgggacttcgtagttggggcacttatactgcgaagtatcgggatggacccctcagatatttatgcagtaattcagataccagggtccagagaatttgacgtttctttccgctctgctgagaagcttgctcttttcttgcgggtatacgaagagaagagagagcaggaggattgttgggagaactttgtggtattagggcgatctaaatctagcctgaagactctttttatcctcttcagaaacgagacggtggatgtcgaagacatagtcacctggctgaagaggcattgcgacgtgctggcagtccccgtgaaggtaaccgacaggtttgggatctggaccggtgagtacaaatgcgaaatcgagttgcggcagggggaaggcggggtccgccaccttcctggcgcttttttcttgggcgccgagaggggatactcatggtacaagggacagcccaagacgtgttttaaatgcggctcacgaacccacatgtctggctcttgcacccaggatcgctgcttccgatgcggggaggagggccatttgtctccgtactgtcgaaaggggattgtgtgtaacctgtgtggaaagcgaggccacgcttttgcccaatgcccaaaggccgtgcacaactcagttgcggcccagctcaccggcgttgctgggcattag

SEQ ID NO: 227051 - DNA, 1215 bp, Artificial Sequence
  derived and/or modified sequence
atggccactggaggcggcgctgaggaggagaggaagaggggccggccccagctgctgcccccagcccggcctgctgcccggggggaggaggctgatggcggccgggagaagatgggctgggcccaggtggtgaagaacctggccgagaagaagggggagttccgggagccccggcccccaagaagagaggaggagagcggcggcggcggcggcagcgctggcctgggcggccctgctggcctggccgccccagacctgggggacttccccccagctggccgcggggaccccaagggcagaagaagagatcctgctggggaggccgtggaccccaggaagaagaagggagctgctgaggccggccgcaggaagaaggccgaggccgctgctgctgccatggccaccccagcccggcctggagaggctgaagatgctgctgagcggcccctgcaggatgagcctgctgctgctgctgctggccctgggaagggccgcttcctggtgcgcatctgcttccagggagatgaaggagcctgccccacccgggactttgtggtgggcgccctgatcctgcggagcatcggcatggaccccagcgacatctatgctgtgatccagatccctggcagccgggagtttgatgtgtccttccgctctgctgagaagctggccctcttcctgcgggtgtatgaggagaagcgggagcaggaggactgctgggagaactttgtggtgctgggccgcagcaagagcagcctgaagaccctcttcatcctcttcagaaatgagaccgtggatgtggaggacatcgtgacctggctgaagaggcactgtgatgtgctggccgtgcctgtgaaggtgacagacagatttggcatctggacaggagagtacaagtgtgaaattgagctgcggcagggcgagggcggcgtgcgccacctgcccggggccttcttcctgggcgctgagcggggctacagctggtacaagggccagcccaagacctgcttcaagtgtggcagcaggacccacatgagcggcagctgcacccaggaccgctgcttccgctgtggggaggagggccacctgagcccctactgcaggaaaggaattgtgtgcaacctgtgtgggaagaggggccacgcctttgcccagtgccccaaggctgtgcacaacagcgtggccgcccagctgactggagtggccggccactag

SEQ ID NO: 227052 - DNA, 1215 bp, Artificial Sequence
  derived and/or modified sequence
atggccaccggcggcggcgccgaggaggagcggaagcggggccggccccaacttctccctccagctcgccctgctgcgaggggggaggaggctgatgggggtcgggaaaagatggggtgggctcaggtggtgaaaaatctggccgaaaagaagggcgagtttagagaacctcgccctcccaggagggaagaggagtcgggaggtggcgggggttcagcgggcctggggggccccgctgggttggctgcaccagacctcggagactttccaccggccgggaggggggatccaaagggccgcaggagggaccccgcaggtgaggctgtagatccccggaaaaagaaaggtgccgccgaagctggccgcaggaaaaaagccgaggccgctgcggctgcaatggccacaccagctcggccgggcgaggccgaagatgcggcggagagacctctgcaggatgaaccagcagccgccgccgctggtcccgggaaaggtcgtttcttagtccggatttgctttcagggggacgaaggcgcctgccccacccgagatttcgttgtcggtgctctgatcctccgatcaataggcatggacccaagtgacatttacgccgttatccagattcccggttctcgtgagttcgacgtgtcatttcggtcggcagaaaaactggccctgtttttacgagtgtacgaagagaagagagaacaggaggactgctgggaaaattttgtggtgctgggcagatctaagagttccctcaagactctttttatactgtttcgcaacgagaccgtcgacgtggaagacattgtcacctggctgaaacggcactgcgatgttctggcggtgcccgtgaaggtgacggatcgatttgggatatggaccggagagtacaaatgcgagatcgaattgaggcagggcgagggaggtgtgcgacacttgccaggtgcattttttttgggggcagagcgggggtattcatggtataagggccaacccaaaacgtgcttcaaatgcggcagcagaactcacatgtctggatcgtgcacacaagacaggtgctttcgctgcggagaagagggccatctgtccccttattgtagaaaggggatcgtgtgtaacttatgtggaaaacgtggccacgccttcgcccagtgccctaaagctgtacataactcagttgccgctcagctaacaggcgtggcaggtcactag

SEQ ID NO: 227053 - DNA, 1215 bp, Artificial Sequence
  derived and/or modified sequence
atggcaactggaggcggtgcagaggaagagcggaagcggggtcgaccacagcttcttccgccagctaggccggcagcccgaggcgaagaggcggacgggggaagggaaaaaatggggtgggcacaagtggtgaagaatctggcggagaaaaagggggagttcagagaacccagaccacccaggcgcgaggaagaaagtgggggagggggtggcagtgctggtttgggtggtcccgctgggcttgcagcaccagaccttggcgatttccccccagccggacgcggagatcctaaggggcgacgacgtgaccccgcaggcgaggccgtggacccaagaaagaagaaaggggcagccgaagccggtcgcaggaagaaggcagaagccgctgcagctgctatggcaactccagcaagacccggtgaagctgaggacgccgctgagcgcccactacaagacgaacctgcggctgctgccgctggaccgggtaagggcaggtttctcgtccggatctgctttcagggggacgaaggcgcttgccctacgagagattttgttgtaggcgctttgatactgcggtccattggcatggatccgtcagacatctatgcagtcatccaaatccctggtagccgagagtttgacgtttccttccgatcggccgagaagctcgccttgtttctgagagtctacgaggagaagagagaacaagaagattgttgggaaaatttcgttgtgctcggcagatccaaatcaagcctaaagacactctttattctgtttaggaacgaaacagtggatgttgaagacatagtgacttggctcaagcgtcattgtgatgtactggctgtccccgttaaagtgactgatcgtttcgggatttggaccggagaatataagtgtgagatcgaactgaggcagggggaagggggtgtccggcacctgcccggtgccttttttctgggcgctgaacgagggtacagttggtataaaggtcagcccaaaacctgcttcaaatgcggcagccgcactcacatgagtgggagttgtactcaggacagatgttttcgatgtggagaggagggccacctcagcccctattgcagaaaagggatagtgtgtaacttgtgtgggaaacggggtcacgcttttgcccagtgtcccaaagcagttcacaacagtgtggcggctcagcttaccggagtcgccggacactag

SEQ ID NO: 227054 - DNA, 3229 bp, Artificial Sequence
  derived and/or modified sequence
ttctggggaaacggaaagctaagttttaattttgctattgcttttgcttttttaacagaaaaggtacaaaaaagaaaaaatgggagagatgttgccgaactccgtcccgcctgtgggctgtgggccgttagcaaagctgctagcatgaaatcgtcgagcaccgcttgcgaaacgccaaatcctcgagagcgaggccggaggctgccaaacccgcgctggggaaagggccgcctccgggcgccccatcccgctgcggacggaggtgaggttggagcgagcgctggcggaagagaggctcagcgcagggggcgcagagccggcgctggccaatatgcgccgcatgtgatacctttgagggcgcggcgggggagggtagcgtcaaatttcaaaaaaaaaaaaaaaccaaacccacacagccccggcgggcgggcgcgcgcgatgggcgccctttggctgcgggagcgagtggaggatgctgggaaggaggtaaaatggccaccggcggcggcgcggaggaagagaggaaacgggggcggccgcagcttctgccccccgcgcggcccgcggcccggggcgaggaggccgacggcggccgcgagaagatgggctgggcccaggtggtgaagaatctagccgagaagaagggcgaattccgcgagccgcggccgccgcggcgggaggaggaaagcggcggcggtggagggagcgccgggctcggcggccccgcgggcctggcggcgccggacctcggcgacttcccaccggctggccgcggggatccgaagggccgtcggagagatccggccggcgaggcggtggacccccgcaaaaagaagggcgctgcggaggcgggcaggaggaagaaggccgaggcggcggcggccgccatggcgaccccggccaggcccggcgaggccgaggacgcggccgagcggcccctccaggatgagccggcggcggcggcggcaggcccgggcaagggtcgcttcctcgtccgcatctgtttccagggagacgagggcgcctgcccgacccgggacttcgtggtaggagcgcttatcctgcgctccatcggcatggacccgagcgacatctacgcggtcatccagatcccgggcagccgcgaattcgacgtgagcttccgctcagcggagaagctggccctgttcctacgcgtctacgaggagaagcgggagcaggaggactgctgggagaactttgtggtgctggggcggagcaagtccagcttgaagacgctcttcatcctcttccggaacgagacggtggacgtggaggacattgtgacttggctcaagcgccactgcgacgtgctggccgtgccggtgaaagtgaccgacaggtttgggatctggaccggggagtacaaatgcgagatcgagctgcgccagggggagggcggggtcaggcacttgccaggggccttcttcctgggggccgagaggggctacagctggtacaaggggcagcccaagacatgctttaaatgtggttcccggacccacatgagcggcagctgcacgcaggacaggtgcttcaggtgcggggaggaggggcacctgagcccttactgccggaagggcatcgtgtgcaacctctgtggcaagcgaggacacgcctttgcccagtgtcccaaagcagtgcacaattccgtggcagctcagctaaccggcgtggccgggcactaaacacccgcctgcctgccagggtgaacacacagccagcttatccctcttaagtgccaaaacttttttttaaaccattttttatcgtttttgaaggagatctttttaaaacctacaagagacatctctctatgccttcttaaaccgagtttactccatttcagcctgttctgaattggtgactctgtcaccaataacgactgcggagaactgtagcgtgcagatgtgttgcccctcccttttaaaattttattttcgtttttctattgggtatttgttttgtttcttgtactttttctctctctccttgcccccctcccgccctccccgccccataccttttcttcccctggattttcaccctttgggctgccttgctcatctttatgccccagcactaggtacggggcccaacacgtggtaggcactccatcagtgtttgctgaattgaaaacattgttgactgtggcttctatcagagtgtctaccttttgcagctcttcccctccctcatttaatttgctgcttttaatctacgtggtctgagaatttgtgaaaccagtgttgttagaagtgtatataatctgaatcaataagctctgaatggtggccaagggcctctcttatggcacaaagatgcatggacttcatgacagctcttttggtggctcagaagccattttttatagaatcatggaatctagaatattcctgctggaaagaacctgagagttggtttggaccaattccctggttttccagcagatgaaacaggcccaaagaggttaaatgactgggtgaaaatcacatagctgtctggtgccagagccagcctatagtagagtcccctgaccccaagcccggtgctcattccactacctctcacacttcacaacaatttcctcaacacttgagggcccagaaagtctgatctctccagaatgatcagcccagaggaatgctgagaaatcacctggaggagggagcagaaagagaaggtttttaaggaggggcttctgaatacttgggagatacggaacggaccaaggaccacactccagggtgcattcgttgctccctggggcaccacttctggattacagtgtgccaggtcctttggaggccctaccccttccccattcattgccaccagtgagaaatgggggtgcccctgtgtaaagaaacctaccaaaggtttacatttgcaccttagcctcaatagctacgaaccctagagaagcagctagctggagctcatgtgcaactcctgattctcaggagaaagatggattttaacccaaaattatgagtgagctgttaactctaaaatgtacttgggagataggccaagcgagaggtcatgggccaactaagtgttatccagtagaaaagacagtacactgcttttcttttagtgtttgcttttcctttgctatatgttttgctatttccttgtggcttagaatgtaaaattgattgttaaaagttttgttctgaataaatatttatcttttgtattgctaaaa

SEQ ID NO: 227055 - protein, 347 aa, Artificial Sequence
  derived and/or modified sequence
MASGILVNVKEEVTCPICLELLTQPLSLDCGHSFCQACLTANHKKSMLDKGESSCPVCRISYQPENIRPNRHVANIVEKLREVKLSPEGQKVDHCARHGEKLLLFCQEDGKVICWLCERSQEHRGHHTFLTEEVAREYQVKLQAALEMLRQKQQEAEELEADIREEKASWKTQIQYDKTNVLADFEQLRDILDWEESNELQNLEKEEEDILKSLTNSETEMVQQTQSLRELISDLEHRLQGSVMELLQGVDGVIKRTENVTLKKPETFPKNQRRVFRAPDLKGMLEVFRELTDVRRYWGKEKSHYHKPPCGLSLLLSLSFRILCSLLGSCFKIYDSPSKTHITYPSL

SEQ ID NO: 227056 - DNA, 1044 bp, Artificial Sequence
  derived and/or modified sequence
atggccagcggcatcctggtgaacgtgaaggaggaggtgacctgccccatctgcctggagctgctgacccagcccctgagcctggactgcggccacagcttctgccaggcctgcctgaccgccaaccacaagaagagcatgctggacaagggcgagagcagctgccccgtgtgcagaatcagctaccagcccgagaacatcagacccaacagacacgtggccaacatcgtggagaagctgagagaggtgaagctgagccccgagggccagaaggtggaccactgcgccagacacggcgagaagctgctgctgttctgccaggaggacggcaaggtgatctgctggctgtgcgagagaagccaggagcacagaggccaccacaccttcctgaccgaggaggtggccagagagtaccaggtgaagctgcaggccgccctggagatgctgagacagaagcagcaggaggccgaggagctggaggccgacatcagagaggagaaggccagctggaagacccagatccagtacgacaagaccaacgtgctggccgacttcgagcagctgagagacatcctggactgggaggagagcaacgagctgcagaacctggagaaggaggaggaggacatcctgaagagcctgaccaacagcgagaccgagatggtgcagcagacccagagcctgagagagctgatcagcgacctggagcacagactgcagggcagcgtgatggagctgctgcagggcgtggacggcgtgatcaagagaaccgagaacgtgaccctgaagaagcccgagaccttccccaagaaccagagaagagtgttcagagcccccgacctgaagggcatgctggaggtgttcagagagctgaccgacgtgagaagatactggggcaaggagaagagccactaccacaagcccccctgcggcctgagcctgctgctgagcctgagcttcagaatcctgtgcagcctgctgggcagctgcttcaagatctacgacagccccagcaagacccacatcacctaccccagcctgtag

SEQ ID NO: 227057 - DNA, 1044 bp, Artificial Sequence
  derived and/or modified sequence
atggcatcgggaatactcgttaacgtgaaagaggaagttacctgcccaatttgtctggaactgcttacccagcccctgagtttagactgtggccattctttctgccaggcatgccttacagcaaaccataaaaagtcaatgctcgacaagggagaatccagttgccctgtgtgtcggatctcctaccagcccgaaaacattcgcccaaacagacatgtcgccaatatcgtcgaaaagcttcgggaggtgaaattaagccccgagggacagaaagtcgaccattgcgcccggcatggggaaaaactgttgttattttgtcaggaggacggcaaggtgatatgttggctttgtgaaagatcacaggagcaccgcggtcaccacacatttttaactgaagaggttgccagggaataccaggtgaaactccaggctgccctggaaatgttacgccagaagcagcaggaagccgaagagctggaagcagacataagggaggaaaaagctagctggaagacccagatccagtatgataaaacgaacgtactcgccgatttcgagcagctgagggatatcttagactgggaagaaagcaatgaacttcagaaccttgaaaaggaagaggaagatatcctgaaatctttgacaaactccgagaccgagatggtccaacagacccagtcactgagggaattgataagcgatctcgagcaccgtttacagggctctgtcatggagctcttgcaaggcgtggacggagtgatcaagaggactgagaatgtgacgctgaagaaacccgagacatttcctaagaatcaacgacgagtgtttcgagccccggacttgaagggaatgctcgaggtgtttagagagttgacggacgtgcggaggtattgggggaaggagaagagtcactaccacaaacctccatgcggactctcactcctgctgtctctatctttcaggattctatgctccttgttgggtagttgcttcaaaatatacgacagtcccagcaaaacacatataacatatccttctctgtag

SEQ ID NO: 227058 - DNA, 1044 bp, Artificial Sequence
  derived and/or modified sequence
atggccagcggcatcctggtgaatgtgaaggaggaggtgacctgccccatctgcctggagctgctgacccagcccctgagcctggactgtggccacagcttctgccaggcctgcctgacagccaaccacaagaagtccatgctggacaagggggagagcagctgccctgtgtgccgcatctcctaccagcctgagaacatccggcccaacagacatgtggccaacatcgtggagaagctgcgggaggtgaagctgagccctgagggccagaaggtggaccactgtgcccggcacggggagaagctgctgctcttctgccaggaggatggcaaggtgatctgctggctgtgtgagaggagccaggagcaccggggccaccacaccttcctgacagaggaggtggcccgggagtaccaggtgaagctgcaggccgccctggagatgctgcggcagaagcagcaggaggccgaggagctggaggccgacatccgggaggagaaggcctcctggaagacccagatccagtatgacaagaccaacgtgctggccgactttgagcagctgcgggacatcctggactgggaggagagcaatgagctgcagaacctggagaaggaggaggaggacatcctgaagagcctgaccaacagcgagacagagatggtgcagcagacccagagcctgcgggagctgatcagtgacctggagcaccggctgcagggctctgtgatggagctgctgcagggcgtggatggagtcatcaagaggacagaaaatgtgaccctgaagaagccagagaccttccccaagaaccagaggagggtcttccgggccccagacctgaagggcatgctggaggtgttccgggagctgacagatgtgcggcgctactggggcaaggagaagagccactaccacaagccaccctgtggcctgagcctgctgctgagcctgtccttccgcatcctgtgcagcctgctgggcagctgcttcaagatctatgacagccccagcaagacccacatcacctaccccagcctgtag

SEQ ID NO: 227059 - DNA, 1044 bp, Artificial Sequence
  derived and/or modified sequence
atggccagcggcatcctggtgaacgtgaaggaggaggtgacctgccctatctgtctcgagctgctgactcagccattgagcctggactgtggacattccttttgtcaagcctgcctcacagctaaccataaaaagtcaatgctggataaaggcgagtcatcctgtcccgtgtgtcggatttcttatcaacccgagaatatccgccccaatcgacacgtggctaacatcgtggaaaaactgcgggaggttaagttgagccctgagggacaaaaggtggaccactgcgccagacacggtgagaaactgttgctcttctgtcaagaagacggcaaggtgatctgctggctttgcgagcgctctcaggagcatcgggggcaccatacctttttgaccgaggaggtggcaagagaatatcaggtaaaattacaggctgctctcgagatgctgagacagaagcaacaggaggctgaagagttggaggcagacatccgggaagagaaggcatcttggaagacccagatccagtacgataagacaaatgtgctcgcagacttcgaacagctgagggatattctcgattgggaagaaagcaacgagctgcagaacctggaaaaggaggaggaagatattctgaaaagtttaactaatagtgagacagagatggtacaacagacccagagcctgagagagcttatctctgatctcgagcaccggctacagggaagcgtgatggaactacttcagggagtggatggcgtgatcaaacgcacggaaaatgtgacactgaagaaacccgaaactttccccaaaaaccagcggagagtgttcagggcgcccgacctgaaagggatgcttgaagttttcagggaactgactgatgtgaggcggtattgggggaaagagaagagtcactaccataaacctccctgcggcctcagtctgctgctcagtctatcatttaggatcctctgttctctgttggggtcttgtttcaagatctacgatagccccagcaagacccacattacttatccttccctgtag

SEQ ID NO: 227060 - DNA, 1044 bp, Artificial Sequence
  derived and/or modified sequence
atggcaagcggtattcttgtcaacgttaaagaagaagtcacttgccctatctgcctggaactactgacacagccactgtctctggactgcggccactccttctgtcaggcatgtcttacagccaaccacaaaaagagcatgctcgacaaaggcgagtcctcctgtcctgtgtgtcgcataagttaccagccagagaacatcaggcctaatcggcacgttgccaatattgtggagaaactgagggaagtcaaactgagccctgaagggcaaaaagtggaccactgcgcgagacacggcgagaaactgttgttgttctgccaagaggatggcaaggtcatttgctggttatgcgagaggagccaggagcacagaggtcatcacacgtttctcactgaggaggtggctagggaatatcaggtcaagctgcaagcagcattggagatgctgcggcagaagcaacaggaagccgaagagctcgaggctgacatccgggaggaaaaggcaagttggaaaacccaaatccagtatgacaaaacaaatgtcttagccgactttgagcagctgcgtgacattctggactgggaagagtcaaatgaactgcagaacttggagaaagaagaagaggatattctaaagagcttaaccaacagcgagaccgaaatggtgcagcagactcaaagtctgagagaactgatcagtgatctcgagcacaggctgcaaggctctgtcatggagcttctccagggtgtggacggggtaattaagagaactgaaaacgtgacattgaagaaaccagagaccttccccaaaaaccaacgaagagtgttccgggcaccagatctgaagggtatgctcgaagttttcagggaacttacagacgtgagaagatattgggggaaggaaaagtcccactaccacaaacctccatgcggcttaagcctcctgctgtccctctcatttcgcattttatgttctctcttagggtcatgttttaaaatctatgatagtccgagcaaaacacacattacttacccgtctctctag

SEQ ID NO: 227061 - DNA, 3170 bp, Artificial Sequence
  derived and/or modified sequence
ctttgtgcagatcaggcccgtggattggtgagtgaatcctaaccacgtcttccctggcctgtcttcactcttctccccagaatcaccacttctgcactggtgtctgaaggtgtattgagtgattttgtggagggcagaagtaggaagtctttgggacaaaactgtatttaccttgggatctgtgaacaagaggaacctcagcagccaggacaggcaggagcagtggaatagctactatggcttctggaatcctggttaatgtaaaggaggaggtgacctgccccatctgcctggaactcctgacacaacccctgagcctggactgcggccacagcttctgccaagcatgcctcactgcaaaccacaagaagtccatgctagacaaaggagagagtagctgccctgtgtgccggatcagttaccagcctgagaacatacggcctaatcggcatgtagccaacatagtggagaagctcagggaggtcaagttgagcccagaggggcagaaagttgatcattgtgcacgccatggagagaaacttctactcttctgtcaggaggacgggaaggtcatttgctggctttgtgagcggtctcaggagcaccgtggtcaccacacgttcctcacagaggaggttgcccgggagtaccaagtgaagctccaggcagctctggagatgctgaggcagaagcagcaggaagctgaagagttagaagctgacatcagagaagagaaagcttcctggaagactcaaatacagtatgacaaaaccaacgtcttggcagattttgagcaactgagagacatcctggactgggaggagagcaatgagctgcaaaacctggagaaggaggaggaagacattctgaaaagccttacgaactctgaaactgagatggtgcagcagacccagtccctgagagagctcatctcagatctggagcatcggctgcaggggtcagtgatggagctgcttcagggtgtggatggcgtcataaaaaggacggagaacgtgaccttgaagaagccagaaacttttccaaaaaatcaaaggagagtgtttcgagctcctgatctgaaaggaatgctagaagtgtttagagagctgacagatgtccgacgctactggggtaaggagaagtcacattatcataagccaccctgcggcttatcattattattatctttatcttttagaattttatgttctctattaggctcatgttttaagatttatgattctccttccaagacacacataacttacccctccttataacttctaaacaaggttcctcccagttttctctcaagtctttatcaagatttctctcatatcacaaataaagttacattatatcccttagctgacctgttaatttttctacagttgatgtgacagtggctccaaacaacatttcatgtgctgtcatttctgaagataagagacaagtgagctctccgaaaccacagataatatatggggcacgagggacaagataccagacatttgtgaatttcaattattgtactggcatcctgggctctcaaagtatcacatcagggaaacattactgggaggtagacgtgtccaagaaaactgcttggatcctgggggtatgtgctggcttccaacctgatgcaatgtgtaatattgaaaaaaatgaaaattatcaacctaaatacggctactgggttatagggttagaggaaggagttaaatgtagtgctttccaggatagttccttccatactccttctgttcctttcattgtgcccctctctgtgattatttgtcctgatcgtgttggagttttcctagactatgaggcttgcactgtctcattcttcaatatcacaaaccatggatttctcatctataagttttctcactgttctttttctcagcctgtatttccatatttaaatcctagaaaatgtggagtccccatgactctgtgctcaccaagctcttgaaccttcttacacactcagccccttctgtacagcacctcttgtccaggtgcatctcatacacctgaactcatttgcatcattttaaccatcttttccttgctgtctcccttctttctatttgaacgtccttcactcatcagtaaaatgtaataattgccttgtgccatattgtccccaatattttattgacatttgatagcaatttttttcatcattttccgtactcctaaggaaaactgacctatacctcataaaatgagaccgctatttaggtattacttctgccagatatttatcacccaattgcctctgacactgactaagaagatgaagaaaagcttttcaacagcctttctatatcatcgtgtgataattgttcaccaatgaatgagtccttagccctgtgtcagtttaccctcgatgcccttatttgtgagttaaagagaaaatatcataaatggtatactcttaagtatagaggttttgtatctagaggatctcagttcaactcctgtctctccatataccagcagtgtaactgtgaataacatacttaaatggctgtgcttatttccttttcttttcttttttctttttttttttttttgagatgaagttttgctcttgttccccaggctggagtgcaatggcacgatctcggttcactgcaacctccacctctcagattcaagcaattctcctgcctcagcctcccaagtagctgggattacaggtgcccaccaccacccctggctaaatttgtattttcagtagagacggggtttccccatgttggttaggctcgtctagaacctctgacctcaggtgatccacccgcctcggcctcccaaagtgctgggattacaggcgtgagccacggcgcccagcctgtgcttattttcttaaaataatttttgtattaaaaacttcacattaaataagtgctaatgttttattgcatagtagggtgactagagttaacaataacctattgcatatattttgaaatagctagaagagaggattttgaaagttctcaacacaaagaaatgacacatatttgaggtgatggatatgctaattaccctggttcggttattacgcaatgtatacatgtatcaaaacatcacactgtaccacataaatatgtatatttattatttgtcaattaaaagcaaaataaaacaaaaaa

SEQ ID NO: 227062 - protein, 326 aa, Artificial Sequence
  derived and/or modified sequence
MASGILVNVKEEVTCPICLELLTQPLSLDCGHSFCQACLTANHKKSMLDKGESSCPVCRISYQPENIRPNRHVANIVEKLREVKLSPEGQKVDHCARHGEKLLLFCQEDGKVICWLCERSQEHRGHHTFLTEEVAREYQVKLQAALEMLRQKQQEAEELEADIREEKASWKTQIQYDKTNVLADFEQLRDILDWEESNELQNLEKEEEDILKSLTNSETEMVQQTQSLRELISDLEHRLQGSVMELLQGVDGVIKRTENVTLKKPETFPKNQRRVFRAPDLKGMLEVFRELTDVRRYWGWSAMARSRFTATSTSQIQAILLPQPPK

SEQ ID NO: 227063 - protein, 327 aa, Artificial Sequence
  derived and/or modified sequence
MASGILVNVKEEVTCPICLELLTQPLSLDCGHSFCQACLTANHKKSMLDKGESSCPVCRISYQPENIRPNRHVANIVEKLREVKLSPEGQKVDHCARHGEKLLLFCQEDGKVICWLCERSQEHRGHHTFLTEEVAREYQVKLQAALEMLRQKQQEAEELEADIREEKASWKTQIQYDKTNVLADFEQLRDILDWEESNELQNLEKEEEDILKSLTNSETEMVQQTQSLRELISDLEHRLQGSVMELLQAGVQCLILRTENVTLKKPETFPKNQRRVFRAPDLKGMLEVFRELTDVRRYWGWSAMARSRFTATSTSQIQAILLPQPPK

SEQ ID NO: 227064 - DNA, 981 bp, Artificial Sequence
  derived and/or modified sequence
atggccagcggcatcctggtgaacgtgaaggaggaggtgacctgccccatctgcctggagctgctgacccagcccctgagcctggactgcggccacagcttctgccaggcctgcctgaccgccaaccacaagaagagcatgctggacaagggcgagagcagctgccccgtgtgcagaatcagctaccagcccgagaacatcagacccaacagacacgtggccaacatcgtggagaagctgagagaggtgaagctgagccccgagggccagaaggtggaccactgcgccagacacggcgagaagctgctgctgttctgccaggaggacggcaaggtgatctgctggctgtgcgagagaagccaggagcacagaggccaccacaccttcctgaccgaggaggtggccagagagtaccaggtgaagctgcaggccgccctggagatgctgagacagaagcagcaggaggccgaggagctggaggccgacatcagagaggagaaggccagctggaagacccagatccagtacgacaagaccaacgtgctggccgacttcgagcagctgagagacatcctggactgggaggagagcaacgagctgcagaacctggagaaggaggaggaggacatcctgaagagcctgaccaacagcgagaccgagatggtgcagcagacccagagcctgagagagctgatcagcgacctggagcacagactgcagggcagcgtgatggagctgctgcagggcgtggacggcgtgatcaagagaaccgagaacgtgaccctgaagaagcccgagaccttccccaagaaccagagaagagtgttcagagcccccgacctgaagggcatgctggaggtgttcagagagctgaccgacgtgagaagatactggggctggagcgccatggccagaagcagattcaccgccaccagcaccagccagatccaggccatcctgctgccccagccccccaagtag

SEQ ID NO: 227065 - DNA, 984 bp, Artificial Sequence
  derived and/or modified sequence
atggccagcggcatcctggtgaacgtgaaggaggaggtgacctgccccatctgcctggagctgctgacccagcccctgagcctggactgcggccacagcttctgccaggcctgcctgaccgccaaccacaagaagagcatgctggacaagggcgagagcagctgccccgtgtgcagaatcagctaccagcccgagaacatcagacccaacagacacgtggccaacatcgtggagaagctgagagaggtgaagctgagccccgagggccagaaggtggaccactgcgccagacacggcgagaagctgctgctgttctgccaggaggacggcaaggtgatctgctggctgtgcgagagaagccaggagcacagaggccaccacaccttcctgaccgaggaggtggccagagagtaccaggtgaagctgcaggccgccctggagatgctgagacagaagcagcaggaggccgaggagctggaggccgacatcagagaggagaaggccagctggaagacccagatccagtacgacaagaccaacgtgctggccgacttcgagcagctgagagacatcctggactgggaggagagcaacgagctgcagaacctggagaaggaggaggaggacatcctgaagagcctgaccaacagcgagaccgagatggtgcagcagacccagagcctgagagagctgatcagcgacctggagcacagactgcagggcagcgtgatggagctgctgcaggccggcgtgcagtgcctgatcctgagaaccgagaacgtgaccctgaagaagcccgagaccttccccaagaaccagagaagagtgttcagagcccccgacctgaagggcatgctggaggtgttcagagagctgaccgacgtgagaagatactggggctggagcgccatggccagaagcagattcaccgccaccagcaccagccagatccaggccatcctgctgccccagccccccaagtag

SEQ ID NO: 227066 - DNA, 981 bp, Artificial Sequence
  derived and/or modified sequence
atggcgtcggggatattggtgaatgtgaaagaggaagtcacctgtcccatctgcctcgagctgctgacccagcccttgtcattggactgtggtcatagcttctgccaggcgtgtctcacagccaaccataagaaatccatgctcgacaagggagaatcatcatgccctgtttgcaggatttcataccagcccgaaaatattcgtcctaatagacatgtggctaacatagtcgagaaacttcgggaagtcaagttgtcccctgagggtcaaaaggtggaccattgtgcaaggcacggcgagaagctcctccttttctgccaagaggatggaaaggtgatctgctggctttgcgagagatcccaggaacatcggggtcatcatacatttctgaccgaggaggtcgctcgcgagtaccaggtgaaactgcaagccgcattagaaatgttgcgacagaagcagcaagaggccgaagagttggaagctgacatccgagaagagaaggcgtcttggaagactcagatccagtacgataaaacgaacgtgctcgccgattttgagcagcttagggatattctggattgggaagagtcgaacgaactgcagaatctggaaaaagaggaagaagacattctgaagtctctgactaactcggaaactgaaatggtgcaacagacccagtcactacgcgagcttatctccgacctcgagcacagactgcagggcagtgtcatggaacttctgcagggcgtggacggtgtgattaagaggactgagaacgtaactttgaaaaagcctgaaacttttcctaagaaccaacggagagtgttccgtgctcccgacctgaagggcatgctggaggtgtttcgggaactgaccgacgtacggcggtattggggctggtccgccatggcgagaagccgcttcactgcgacatccaccagccagatccaggctattctcctcccacagccccctaagtag

SEQ ID NO: 227067 - DNA, 984 bp, Artificial Sequence
  derived and/or modified sequence
atggcttccggcatattagttaacgtgaaggaggaggtgacttgccccatctgtttggaactgctcactcaacctctttcattggattgcggtcactctttttgccaggcgtgcctgaccgccaatcacaaaaagagcatgttagataaaggcgagtcttcttgccccgtgtgccgtatctcctaccagcctgaaaacatacgccccaacagacacgtggcgaacattgtcgaaaagctgcgggaggtcaagctctcccccgagggtcaaaaagtggatcactgtgcccggcacggcgagaagctgctgctcttctgtcaggaggacggaaaggtcatttgttggctttgcgagagatctcaggaacacagaggtcatcatacattcctgacagaggaagtggcaagagagtatcaagttaaacttcaagcggccttagagatgctacgccaaaaacagcaagaggcagaggagttagaagctgacatccgtgaagagaaagcttcatggaagactcaaatccagtacgacaagacgaatgtgctcgcggattttgaacagcttagggatatcctcgattgggaagaatccaacgagctccagaacctagaaaaagaagaggaggacattctgaaaagtctgactaattccgagaccgaaatggtgcagcagacccagtccctaagagaactgattagcgacctggagcatcgcctgcaaggatctgtgatggagcttcttcaagccggagtgcaatgcctcatcctccggactgagaacgttaccctgaagaagccggaaaccttccccaaaaaccagaggcgggtttttcgcgcccccgacctgaaagggatgctcgaggtctttcgtgagcttactgacgtcagacggtactggggctggagtgctatggctagatctcggtttacagctacctccaccagccagattcaagcaatcctcttgccacagcccccaaagtag

SEQ ID NO: 227068 - DNA, 981 bp, Artificial Sequence
  derived and/or modified sequence
atggcaagcggcattctcgttaacgtgaaggaagaggtgacatgtcccatttgcctggagctgttgacccagcctctcagtctcgattgtggccactctttctgtcaagcctgcctcacagccaatcacaagaagtcgatgctggacaaaggcgaatcctcctgtccggtctgccgcatttcgtaccagcctgagaatatcaggcctaatcggcatgtcgccaatattgtggagaagctgcgggaggtgaagctaagccctgagggacagaaagtggaccattgcgcccgtcacggggagaaactgctgctgttctgtcaggaggatggcaaggtgatatgctggctgtgcgaacgcagccaagagcatcgcgggcaccacacttttttgacggaagaggttgcacgggaataccaggttaagcttcaagctgctttggaaatgctgcggcagaaacagcaggaggccgaagagttagaggccgacattcgcgaagaaaaggcttcctggaaaacccagatccagtacgataaaacaaacgtgctcgcagatttcgagcagctgagagatattctggattgggaggaatcaaacgagctccagaacctggagaaagaggaggaagacatcctgaagtctctgacaaattccgaaaccgagatggtgcagcagacccagagtctccgggagctgatatccgacctcgagcatcgtctacaaggctccgtcatggaactgctgcaaggagttgatggcgtcattaagaggacagagaatgtcacattaaaaaagccagaaaccttcccaaagaatcagagacgggtcttccgggcccctgatcttaagggcatgctggaagtcttcagggagctcacagatgttagaaggtactggggctggtccgctatggcccgctcacggtttacggccacttctacctcacaaatccaggccatcctgctgcctcagcctccaaaatag

SEQ ID NO: 227069 - DNA, 981 bp, Artificial Sequence
  derived and/or modified sequence
atggccagcggcatcctggtgaatgtgaaggaggaggtgacctgccccatctgcctggagctgctgacccagcccctgagcctggactgtggccacagcttctgccaggcctgcctgacagccaaccacaagaagtccatgctggacaagggggagagcagctgccctgtgtgccgcatctcctaccagcctgagaacatccggcccaacagacatgtggccaacatcgtggagaagctgcgggaggtgaagctgagccctgagggccagaaggtggaccactgtgcccggcacggggagaagctgctgctcttctgccaggaggatggcaaggtgatctgctggctgtgtgagaggagccaggagcaccggggccaccacaccttcctgacagaggaggtggcccgggagtaccaggtgaagctgcaggccgccctggagatgctgcggcagaagcagcaggaggccgaggagctggaggccgacatccgggaggagaaggcctcctggaagacccagatccagtatgacaagaccaacgtgctggccgactttgagcagctgcgggacatcctggactgggaggagagcaatgagctgcagaacctggagaaggaggaggaggacatcctgaagagcctgaccaacagcgagacagagatggtgcagcagacccagagcctgcgggagctgatcagtgacctggagcaccggctgcagggctctgtgatggagctgctgcagggcgtggatggagtcatcaagaggacagaaaatgtgaccctgaagaagccagagaccttccccaagaaccagaggagggtcttccgggccccagacctgaagggcatgctggaggtgttccgggagctgacagatgtgcggcgctactggggctggagcgccatggcccggagccgcttcaccgccaccagcaccagccagatccaggccatcctgctgccccagccccccaagtag

SEQ ID NO: 227070 - DNA, 984 bp, Artificial Sequence
  derived and/or modified sequence
atggccagcggcatcctggtgaatgtgaaggaggaggtgacctgccccatctgcctggagctgctgacccagcccctgagcctggactgtggccacagcttctgccaggcctgcctgacagccaaccacaagaagtccatgctggacaagggggagagcagctgccctgtgtgccgcatctcctaccagcctgagaacatccggcccaacagacatgtggccaacatcgtggagaagctgcgggaggtgaagctgagccctgagggccagaaggtggaccactgtgcccggcacggggagaagctgctgctcttctgccaggaggatggcaaggtgatctgctggctgtgtgagaggagccaggagcaccggggccaccacaccttcctgacagaggaggtggcccgggagtaccaggtgaagctgcaggccgccctggagatgctgcggcagaagcagcaggaggccgaggagctggaggccgacatccgggaggagaaggcctcctggaagacccagatccagtatgacaagaccaacgtgctggccgactttgagcagctgcgggacatcctggactgggaggagagcaatgagctgcagaacctggagaaggaggaggaggacatcctgaagagcctgaccaacagcgagacagagatggtgcagcagacccagagcctgcgggagctgatcagtgacctggagcaccggctgcagggctctgtgatggagctgctgcaggccggcgtgcagtgcctgatcctgaggacagaaaatgtgaccctgaagaagccagagaccttccccaagaaccagaggagggtcttccgggccccagacctgaagggcatgctggaggtgttccgggagctgacagatgtgcggcgctactggggctggagcgccatggcccggagccgcttcaccgccaccagcaccagccagatccaggccatcctgctgccccagccccccaagtag

SEQ ID NO: 227071 - DNA, 981 bp, Artificial Sequence
  derived and/or modified sequence
atggccagcggcatcctggtgaacgtgaaggaggaggtgacctgcccgatttgtctcgaactattgacacagcctttgtcactagattgtgggcactccttctgccaagcgtgcctgactgctaaccataaaaagagcatgctggacaagggcgagagttcctgccccgtatgtagaatttcttaccagccagagaacattcgaccgaaccgtcacgtggctaatatcgtggagaagctccgggaggtgaaactttctccagagggccaaaaagtggaccattgtgcacgccacggagagaagctcctgcttttctgtcaagaagatggtaaggtcatttgttggctttgcgaacgtagtcaagaacaccgcggccatcatacgttccttactgaggaggtggccagagagtatcaggttaaacttcaagccgctctcgagatgctgcgacaaaaacagcaggaggctgaggaactggaagctgacatcagggaagaaaaggcctcctggaagactcagatccaatacgacaaaacgaacgttctcgccgatttcgagcaacttcgggacatcttagattgggaagagagtaacgagctacaaaatctcgagaaggaggaagaggacattctaaaatctctgacaaactccgaaaccgagatggtgcaacagacacagagcttaagagaactgatcagtgacctggaacatcggctccaaggaagcgttatggagttgctgcagggagtggacggcgtgatcaagcgcacagaaaacgttacactcaaaaaacccgaaacctttccaaagaaccagagacgggttttccgggcccccgatttgaaagggatgctggaagtgttccgagaattgacagatgtgcgacgctattggggttggtcagctatggccagatccaggttcactgcaacctcaacaagtcagattcaggccattctgctcccacagccacctaagtag

SEQ ID NO: 227072 - DNA, 984 bp, Artificial Sequence
  derived and/or modified sequence
atggccagcggcatcctggtgaacgtgaaggaggaggtgacctgcccaatctgtttggaactgctcactcagcctcttagcttagattgcggccatagtttttgtcaggcatgcttgacggcaaatcacaagaaatctatgctggataaaggtgagtcttcctgccctgtgtgccgcatcagctaccagccggagaacattagacctaaccgccacgtggccaatatagtggagaagctgagggaagttaaactgagccctgagggacagaaggtagaccattgtgcccggcatggcgagaagctgctgctgttctgtcaggaggacggtaaggttatatgctggctctgcgagcgctcccaggagcaccgtgggcaccatacattcctcactgaagaagtagcccgagaataccaggtgaagctccaagcagccctggagatgttacggcagaagcagcaggaggctgaagaactggaagccgatatcagggaagaaaaggcttcctggaaaacccagatccagtacgataagacaaacgtgctcgccgattttgagcagttgagggacatactcgattgggaagagagcaatgaactgcaaaacctggagaaggaggaagaggacattctgaagtccttgacaaactccgaaaccgaaatggtccaacaaactcagagcctccgggagctgatttctgacctggagcaccgcctgcagggctccgtcatggagctcctgcaagccggcgtgcagtgtctgatcttacggacggagaacgtgacactcaagaaacccgaaactttcccgaagaatcagaggcgcgttttccgagcgcctgacttgaaaggaatgctcgaggtattccgagaactcacggacgtgcgtcgctattggggttggtctgctatggccagatctcggtttacagctacgtcaacatcccagatccaggccattctgttgccacagccacctaagtag

SEQ ID NO: 227073 - DNA, 981 bp, Artificial Sequence
  derived and/or modified sequence
atggccagcggcatcctggtgaacgtgaaggaggaggtgacctgcccgatctgtctggaactcctaacacagcctctgagtctggattgcgggcacagtttctgtcaagcctgcttgaccgcgaaccacaaaaagagtatgctcgacaaaggcgagtccagctgtcctgtgtgcagaatttcttatcagcctgagaacattaggccaaaccgacacgtcgctaatattgtagaaaaacttagagaggtgaagttgtctcctgagggtcagaaagtggatcactgtgcaagacacggggaaaaattgctcctgttttgccaggaagatggcaaggtcatttgctggctctgtgaaaggagccaagaacacagaggccatcatacgtttctgacggaggaagtggccagggagtaccaagtgaaactccaagctgccctggaaatgctacgccaaaagcaacaagaagcagaagaactggaagccgatatacgcgaagagaaggctagctggaagacgcagattcagtacgacaagaccaatgttttggccgatttcgagcagttgcgcgatattcttgactgggaggagtcaaatgagcttcagaatttggaaaaggaagaggaagatatattaaaaagtctgacaaactcagaaaccgagatggtgcagcagactcaatcactgcgtgaattaatctcagacctggaacatagattacagggatcagtcatggagttactgcagggggtcgatggcgttatcaaacgcactgagaacgtcactctcaagaagcccgaaacctttccaaagaaccagcgaagagtgttccgggcgcccgacctgaagggaatgctcgaagtgttcagagagcttactgacgttcgccgatattggggctggtcagccatggctcggagcaggttcacagctactagcaccagtcagatccaagccattctactgcctcaaccccccaaatag

SEQ ID NO: 227074 - DNA, 981 bp, Artificial Sequence
  derived and/or modified sequence
atggcatcaggcatactggtgaacgtcaaggaggaagtgacatgccccatctgcctggaactgctcacccaaccattatctctcgattgcggtcactctttttgtcaagcctgtttgaccgcaaatcacaaaaaatccatgctggacaagggggagagctcatgtcccgtgtgtcggatatcctatcagcccgagaacatcagacctaaccgccatgtagccaatattgtcgaaaagctgcgggaggtgaagttgtctccagaagggcaaaaggtggatcactgcgcaagacacggtgaaaagctcctgcttttctgccaggaagatggcaaggtgatttgctggctgtgtgaaaggtctcaggaacacaggggacatcacacattcctgactgaggaggtggcacgcgaataccaagtgaaactccaggccgctctggagatgcttaggcagaaacaacaggaggccgaggaactcgaggcagacattagagaagagaaagcctcttggaagactcagatccaatacgataaaaccaacgtccttgccgatttcgagcagctgagggacatcctggactgggaagaaagtaacgagctccagaacctcgagaaggaggaggaggatatcttgaagtctctaaccaacagcgagaccgagatggtgcagcagactcagagcctgcgggagctgatatcagatctggagcaccgtctgcaagggagtgtgatggagctgttgcaaggggtggatggagtcattaagcgaaccgagaacgttactttaaagaaaccagagacattcccgaaaaatcagagacgcgtgttccgggctccagatcttaaaggcatgctggaagtgttccgagaattgactgacgtgcggagatattggggctggtccgctatggctagaagcaggtttacggccacctccacttcacaaatccaggctatcctgctgccccagccacccaaatag

SEQ ID NO: 227075 - DNA, 984 bp, Artificial Sequence
  derived and/or modified sequence
atggccagtggtatccttgtcaacgtcaaagaggaagtgacttgccccatatgcttggaactgctgacgcagcccttgtctctggattgcgggcatagtttctgccaggcatgtctgaccgccaaccacaagaagagtatgctggacaagggtgagagtagctgcccagtgtgtaggatcagctaccagcctgagaacatcaggcccaacaggcatgtggcaaatatagtggagaagcttcgtgaggtgaaacttagtcccgaagggcagaaagtggatcattgtgctcgtcatggggaaaaactccttttattctgtcaggaagatgggaaagtgatttgctggctgtgcgaaaggtctcaggagcatcgcggtcaccatacgttccttacagaggaagtggccagagagtatcaggtaaaacttcaggccgcactggaaatgttgcgccagaaacagcaagaggctgaagaactggaggcagacattagggaagagaaggcctcttggaaaactcagatccagtatgataaaaccaacgtcctggcggattttgagcagctccgtgatatcctggattgggaagagagcaacgagctgcagaacctcgagaaggaggaagaggatatacttaagtcccttactaattcagaaacagaaatggtgcagcaaactcagagcctgcgagagttgatcagtgacttagaacaccgccttcagggatctgtcatggaactgctccaagccggtgtgcagtgtctgatcctgcgcactgaaaacgttacactgaaaaagcctgaaactttccccaagaaccagcgcagggtcttccgggcaccagatctaaagggaatgctggaggtgttccgggaactcactgatgtgaggagatattggggctggagcgccatggcaaggagtaggttcaccgctacctcaacaagtcagatccaggccatcctgcttccacagccgcctaagtag

SEQ ID NO: 227076 - DNA, 981 bp, Artificial Sequence
  derived and/or modified sequence
atggcttcagggatcctggtgaatgtgaaagaggaggtgacgtgccctatttgccttgagttgctcacacaaccactgagtctggattgcgggcactccttctgtcaggcctgtttgaccgcaaaccacaaaaaatcaatgctggataaaggtgagagcagctgccccgtatgccggattagctatcagcccgaaaacataaggccgaacaggcatgtggctaatatcgttgagaagctccgtgaggtgaaactgtctccagagggacaaaaagtggaccattgtgccaggcacggcgagaagcttttgctgttctgtcaagaggatggcaaagtcatttgttggctgtgtgaaaggtcccaggagcataggggccaccacacgtttcttacggaagaagtggcaagagagtaccaggtgaagctccaggccgctcttgagatgttaaggcaaaagcagcaggaagctgaagagctggaggctgacatccgcgaggaaaaagctagttggaaaactcagatccagtacgacaaaaccaacgtgctggctgatttcgaacagttgagggacattcttgattgggaagagtcgaatgaacttcagaatttagaaaaagaagaagaggatatcctgaagtctctcacaaatagcgagacagaaatggtccagcagacacaatctctcagggagttgatttctgacctggagcataggctgcagggttcggtaatggagcttcttcagggcgtggatggagtaatcaaaaggaccgaaaacgtgacccttaagaagcctgaaaccttcccaaagaatcagcgccgagtcttcagagctccggacctcaagggaatgctggaggtgttccgagagctgaccgacgtgcgtaggtattggggctggtctgccatggctcgctcacgtttcacagcgacaagtactagccagatccaggctattctattgccccagcctccaaaatag

SEQ ID NO: 227077 - DNA, 2290 bp, Artificial Sequence
  derived and/or modified sequence
atttccttctagaagccaggagcaaaggacagacctctctctggtataaggaggaagagattgagaagaggaattctccagagtctattaactatactacatcaacgcctccaagatactatggtacccatcccaggggaagtggggctacaagaacagtataaatatctcctattggcataataaatggtgtaccccaagaatatgccaagggatgttttgtagagattttgagactaaggagatttggaaattgtgtggctattagcagtttcattcataatgaaatttataatcccttaaaaaacttggaggaagataattgcaggaagaacaccttgaataagcagaactcagctgtgagatcaggagcaagaggagcacattggaagaatttcgaaaaagggcaccttttctaatttttaatacttggctgggttaatctgaaactatgtcagaagaagtggcatgataacaagatcctgagactcaagagaaaagggagattgagtgggaatgcctctagttcccacggctcctcctgtgaacagcacagctacacggcccggctgattcattcagagggcgggactcaccaggccctacgtggagaaatgccattggcccatagtttatctttcactttcctgccctgagtgtgagcaagaatttcctgcggttcctctaggaaaattcctttgtgcagatcaggcccgtggattgggatctgtgaacaagaggaacctcagcagccaggacaggcaggagcagtggaatagctactatggcttctggaatcctggttaatgtaaaggaggaggtgacctgccccatctgcctggaactcctgacacaacccctgagcctggactgcggccacagcttctgccaagcatgcctcactgcaaaccacaagaagtccatgctagacaaaggagagagtagctgccctgtgtgccggatcagttaccagcctgagaacatacggcctaatcggcatgtagccaacatagtggagaagctcagggaggtcaagttgagcccagaggggcagaaagttgatcattgtgcacgccatggagagaaacttctactcttctgtcaggaggacgggaaggtcatttgctggctttgtgagcggtctcaggagcaccgtggtcaccacacgttcctcacagaggaggttgcccgggagtaccaagtgaagctccaggcagctctggagatgctgaggcagaagcagcaggaagctgaagagttagaagctgacatcagagaagagaaagcttcctggaagactcaaatacagtatgacaaaaccaacgtcttggcagattttgagcaactgagagacatcctggactgggaggagagcaatgagctgcaaaacctggagaaggaggaggaagacattctgaaaagccttacgaactctgaaactgagatggtgcagcagacccagtccctgagagagctcatctcagatctggagcatcggctgcaggggtcagtgatggagctgcttcagggtgtggatggcgtcataaaaaggacggagaacgtgaccttgaagaagccagaaacttttccaaaaaatcaaaggagagtgtttcgagctcctgatctgaaaggaatgctagaagtgtttagagagctgacagatgtccgacgctactggggctggagtgcaatggcacgatctcggttcactgcaacctccacctctcagattcaagcaattctcctgcctcagcctcccaagtagctgggattacaggtgcccaccaccacccctggctaaatttgtattttcagtagagacggggtttccccatgttggttaggctcgtctagaacctctgacctcaggtgatccacccgcctcggcctcccaaagtgctgggattacaggcgtgagccacggcgcccagcctgtgcttattttcttaaaataatttttgtattaaaaacttcacattaaataagtgctaatgttttattgcatagtagggtgactagagttaacaataacctattgcatatattttgaaatagctagaagagaggattttgaaagttctcaacacaaagaaatgacacatatttgaggtgatggatatgctaattaccctggttcggttattacgcaatgtatacatgtatcaaaacatcacactgtaccacataaatatgtatatttattatttgtcaattaaaagcaaaataaaacaaaaaaccttcatctaatactttggatcattgtgaaaaaataaattcctgaagtataaag

SEQ ID NO: 227078 - DNA, 1287 bp, Artificial Sequence
  derived and/or modified sequence
agtttatctttcactttcctgccctgagtgtgagcaagaatttcctgcggttcctctaggaaaattcctttgtgcagatcaggcccgtggattggtgagtgaatcctaaccacgtcttccctggcctgtcttcactcttctccccagaatcaccacttctgcactggtgtctgaaggtgtattgagtgattttgtggagggcagaagtaggaagtctttgggacaaaactgtatttaccttgggatctgtgaacaagaggaacctcagcagccaggacaggcaggagcagtggaatagctactatggcttctggaatcctggttaatgtaaaggaggaggtgacctgccccatctgcctggaactcctgacacaacccctgagcctggactgcggccacagcttctgccaagcatgcctcactgcaaaccacaagaagtccatgctagacaaaggagagagtagctgccctgtgtgccggatcagttaccagcctgagaacatacggcctaatcggcatgtagccaacatagtggagaagctcagggaggtcaagttgagcccagaggggcagaaagttgatcattgtgcacgccatggagagaaacttctactcttctgtcaggaggacgggaaggtcatttgctggctttgtgagcggtctcaggagcaccgtggtcaccacacgttcctcacagaggaggttgcccgggagtaccaagtgaagctccaggcagctctggagatgctgaggcagaagcagcaggaagctgaagagttagaagctgacatcagagaagagaaagcttcctggaagactcaaatacagtatgacaaaaccaacgtcttggcagattttgagcaactgagagacatcctggactgggaggagagcaatgagctgcaaaacctggagaaggaggaggaagacattctgaaaagccttacgaactctgaaactgagatggtgcagcagacccagtccctgagagagctcatctcagatctggagcatcggctgcaggggtcagtgatggagctgcttcaggctggagtgcagtgtttaattcttaggacggagaacgtgaccttgaagaagccagaaacttttccaaaaaatcaaaggagagtgtttcgagctcctgatctgaaaggaatgctagaagtgtttagagagctgacagatgtccgacgctactggggctggagtgcaatggcacgatctcggttcactgcaacctccacctctcagattcaagcaattctcctgcctcagcctcccaagtag

SEQ ID NO: 227079 - DNA, 2029 bp, Artificial Sequence
  derived and/or modified sequence
agtttatctttcactttcctgccctgagtgtgagcaagaatttcctgcggttcctctaggaaaattcctttgtgcagatcaggcccgtggattgggatctgtgaacaagaggaacctcagcagccaggacaggcaggagcagtggaatagctactatggcttctggaatcctggttaatgtaaaggaggaggtgacctgccccatctgcctggaactcctgacacaacccctgagcctggactgcggccacagcttctgccaagcatgcctcactgcaaaccacaagaagtccatgctagacaaaggagagagtagctgccctgtgtgccggatcagttaccagcctgagaacatacggcctaatcggcatgtagccaacatagtggagaagctcagggaggtcaagttgagcccagaggggcagaaagttgatcattgtgcacgccatggagagaaacttctactcttctgtcaggaggacgggaaggtcatttgctggctttgtgagcggtctcaggagcaccgtggtcaccacacgttcctcacagaggaggttgcccgggagtaccaagtgaagctccaggcagctctggagatgctgaggcagaagcagcaggaagctgaagagttagaagctgacatcagagaagagaaagcttcctggaagactcaaatacagtatgacaaaaccaacgtcttggcagattttgagcaactgagagacatcctggactgggaggagagcaatgagctgcaaaacctggagaaggaggaggaagacattctgaaaagccttacgaactctgaaactgagatggtgcagcagacccagtccctgagagagctcatctcagatctggagcatcggctgcaggggtcagtgatggagctgcttcagggtgtggatggcgtcataaaaaggacggagaacgtgaccttgaagaagccagaaacttttccaaaaaatcaaaggagagtgtttcgagctcctgatctgaaaggaatgctagaagtgtttagagagctgacagatgtccgacgctactggggctggagtgcaatggcacgatctcggttcactgcaacctccacctctcagattcaagcaattctcctgcctcagcctcccaagtagctgggattacaggtgcccaccaccacccctggctaaatttgtattttcagtagagacggggtttccccatgttggttaggctcgtctagaacctctgacctcaggtgatccacccgcctcggcctcccaaagtgctgggattacaggcgtgagccacggcgcccagcctgtgcttattttcttaaaataatttttgtattaaaaacttcacattaaataagtgctaatgttttattgcatagtagggtgactagagttaacaataacctattgcatatattttgaaatagctagaagagaggattttgaaagttctcaacacaaagaaatgacacatatttgaggtgatggatatgctaattaccctggttcggttattacgcaatgtatacatgtatcaaaacatcacactgtaccacataaatatgtatatttattatttgtcaattaaaagcaaaataaaacaaaaaaccttcatctaatactttggatcattgtgaaaaaataaattcctgaagtataaagcatctatctaagtgtcttgatctaataagtacttgttctacaaattattgaaaaacataaactctgttaatgtctcatggaacaggttgtgccttcagggaaactaggattggatttactaaattctcattttttagatctcagatactactgtcaaaatgacttcaattctgccttctatatataatacacacatatatttaggattttattgtaattctagtgttgctacatattagtctttatcaaacaaactgaattatgtgggaatcagtttattaattgtaaaaaataattataataaaattagctgatgtagttttttaaaagttaaacgagttttttgaatagcttcactcatttctagc

SEQ ID NO: 227080 - protein, 859 aa, Artificial Sequence
  derived and/or modified sequence
MRRCRWAALALGLLRLCLAQANFAPHFFDNGVGSTNGNMALFSLPEDTPVGSHVYTLNGTDPEGDPISYHISFDPSTRSVFSVDPTFGNITLVEELDREREDEIEAIISISDGLNLVAEKVVILVTDANDEAPRFIQEPYVALVPEDIPAGSIIFKVHAVDRDTGSGGSVTYFLQNLHSPFAVDRHSGVLRLQAGATLDYERSRTHYITVVAKDGGGRLHGADVVFSATTTVTVNVEDVQDMAPVFVGTPYYGYVYEDTLPGSEVLKVVAMDGDRGKPNRILYSLVNGNDGAFEINETSGAISITQSPAQLQREVYELHVQVTEMSPAGSPAAQATVPVTIRIVDLNNHPPTFYGESGPQNRFELSMNEHPPQGEILRGLKITVNDSDQGANAKFNLQLVGPRGIFRVVPQTVLNEAQVTIIVENSAAIDFEKSKVLTFKLLAVEVNTPEKFSSTADVVIQLLDTNDNVPKFDSLYYVARIPENAPGGSSVVAVTAVDPDTGPWGEVKYSTYGTGADLFLIHPSTGLIYTQPWASLDAEATARYNFYVKAEDMEGKYSVAEVFITLLDVNDHPPQFGKSVQKKTMVLGTPVKIEAIDEDAEEPNNLVDYSITHAEPANVFDINSHTGEIWLKNSIRSLDALHNITPGRDCLWSLEVQAKDRGSPSFSTTALLKIDITDAETLSRSPMAAFLIQTKDNPMKAVGVLAGTMATVVAITVLISTATFWRNKKSNKVLPMRRVLRKRPSPAPRTIRIEWLKSKSTKAATKFMLKEKPPNENCNNNSPESSLLPRAPALPPPPSVAPSTGAAQWTVPTVSGSLTPQPTQPPPKPKTMGSPVQSTLISELKQKFEKKSVHNKAYF

SEQ ID NO: 227081 - protein, 563 aa, Artificial Sequence
  derived and/or modified sequence
MAPVFVGTPYYGYVYEDTLPGSEVLKVVAMDGDRGKPNRILYSLVNGNDGAFEINETSGAISITQSPAQLQREVYELHVQVTEMSPAGSPAAQATVPVTIRIVDLNNHPPTFYGESGPQNRFELSMNEHPPQGEILRGLKITVNDSDQGANAKFNLQLVGPRGIFRVVPQTVLNEAQVTIIVENSAAIDFEKSKVLTFKAVDPDTGPWGEVKYSTYGTGADLFLIHPSTGLIYTQPWASLDAEATARYNFYVKAEDMEGKYSVAEVFITLLDVNDHPPQFGKSVQKKTMVLGTPVKIEAIDEDAEEPNNLVDYSITHAEPANVFDINSHTGEIWLKNSIRSLDALHNITPGRDCLWSLEVQAKDRGSPSFSTTALLKIDITDAETLSRSPMAAFLIQTKDNPMKAVGVLAGTMATVVAITVLISTATFWRNKKSNKVLPMRRVLRKRPSPAPRTIRIEWLKSKSTKAATKFMLKEKPPNENCNNNSPESSLLPRAPALPPPPSVAPSTGAAQWTVPTVSGSLTPQPTQPPPKPKTMGSPVQSTLISELKQKFEKKSVHNKAYF

SEQ ID NO: 227082 - DNA, 2580 bp, Artificial Sequence
  derived and/or modified sequence
atgaggcgctgccgctgggctgccctggctttagggctgctgaggctctgcctcgcccaggctaacttcgcccctcacttctttgacaacggggttggatctaccaacggtaacatggctctcttttcactccccgaggatacccccgtaggatcacacgtctacaccctgaatggcaccgatcctgaaggtgatcctatttcctaccatattagcttcgatccctccaccagatctgtgtttagtgttgatccaactttcgggaatataacattggtggaagagctggatcgagagcgcgaggatgaaattgaggctataataagcatatcagacgggctcaaccttgtggctgagaaggtcgtcatactggtgacagacgcgaacgacgaggccccccgctttatccaggagccatacgttgccctagtgcccgaagacatccccgccggatcaatcattttcaaagtgcacgccgttgatcgagataccggatctggggggtccgtgacctattttttgcagaaccttcacagcccgtttgctgttgaccgtcatagtggagttctacggctgcaggccggcgccaccttggactacgaaaggtcaaggacacattatataacagtagttgccaaagatggtgggggccggctccatggagcagacgtcgtgtttagtgccacaactaccgtcactgtgaacgtcgaggacgtccaggatatggccccggtttttgtcggcactccctactatggatacgtctatgaggacaccctaccaggatctgaggttcttaaagttgtggccatggatggagaccgtggtaagcccaacagaatcctgtacagtcttgttaatggaaacgatggagcctttgagattaacgagacaagcggggcgatcagcattactcaatctccggctcagctgcagcgggaggtttatgagctccacgtgcaggtgacagaaatgtctccagcaggttcccctgccgctcaagctacagtaccagtgactatacgtattgtcgatctgaacaaccatcctccaaccttttacggggaatctgggccacagaatcggttcgagctcagcatgaatgagcatccgccccaaggcgagattctacgcggcctgaagattaccgtcaacgattctgaccagggcgccaatgcgaagttcaacctgcaactcgtgggacccagagggatcttcagagtcgtgcctcagactgtgctgaacgaagcacaggttaccattattgttgagaattcagcagctattgacttcgagaaatccaaggtcctgacttttaagctcctcgcagtggaagtcaacactcccgaaaaattctccagtaccgcagacgtggtgattcagctgctggacaccaacgataatgtgcccaagttcgacagtctgtattacgtggccaggattccggagaacgccccaggaggttcctctgtggttgccgtgacggcagtcgaccccgatacagggccctggggggaagtgaagtacagcacctatggaactggcgccgatctgttcttgatccatccatccacgggattgatttacacacagccatgggcctctttggatgctgaagcaaccgcccgttacaatttctatgtcaaagccgaagacatggaagggaaatacagcgtcgccgaggttttcatcactctcctagatgtgaacgatcaccctcctcaatttggaaaatctgtacagaaaaagacgatggtgttgggcacgcctgttaagatagaggctattgatgaagacgctgaggagcctaacaacttggtggattactcaattacgcacgccgagcctgctaatgtatttgatattaacagtcataccggtgagatctggctgaaaaactcaattcggagtctggacgcattacataacatcacccctggccgagactgcctctggtccctggaggttcaggctaaggacagaggctccccttccttcagcactactgctttgctgaagatcgacatcacggatgcagaaacactgagcaggtctcccatggcagcattcttaatccaaactaaggacaatcccatgaaggctgttggtgtgcttgctggaactatggcgactgtggttgccattaccgtcctcatctccacggctaccttttggcgtaataagaagagcaataaagtgcttcctatgcggagagttcttaggaaacgaccttcacctgctccacgcacgatcaggatcgaatggttgaagagcaagagcactaaggcagctacgaagttcatgttgaaggaaaaaccgccaaatgaaaattgtaataataattctcctgagagcagtctcctgcctcgtgcccctgctctcccccctccccctagcgtcgccccatccacaggtgccgcgcagtggacagttcctactgtttctggaagccttacaccccaacccactcagcctcctccgaaaccaaaaacaatgggttctcccgtccagtccacactcatcagcgagctgaagcagaaatttgaaaagaagtccgtgcacaataaagcctacttttag

SEQ ID NO: 227083 - DNA, 1692 bp, Artificial Sequence
  derived and/or modified sequence
atggctcccgttttcgtgggcacaccatactatggatatgtctatgaagataccctgccgggcagcgaagttctgaaagtcgtggccatggacggagaccgcgggaagccaaatcgcatattgtacagtctggtgaatggaaatgatggcgccttcgagattaatgagacctctggcgctattagtattacacaaagcccggctcagttgcaaagggaagtgtatgagctacacgtccaagtcaccgaaatgagtcccgccggctcgccagctgcacaggcgacagtcccggtgacaattcggatcgttgatctgaataaccatccaccaaccttttacggagagtccggacctcagaatcgtttcgaactctccatgaacgagcacccaccccaaggggaaatcttgcgtggactgaaaattacagttaatgacagcgaccagggtgctaatgcgaaattcaacctacagctagtgggccctcgcgggattttccgagtggttccacagacggtgctaaacgaagcccaagtgacgattatcgttgaaaactctgccgcaattgattttgagaaatccaaggtgcttacgtttaaggctgtcgatcctgatacaggcccttggggtgaggtaaaatattccacctacggcaccggtgccgacctcttcctcattcatccatctaccgggctgatatatacgcaaccctgggccagtctcgacgccgaagctactgctcggtataatttttacgttaaagcagaggacatggaaggtaagtactcagtggcagaagtgttcattacattactggacgtgaatgatcatcctccacagtttggtaagtcagtccagaaaaagactatggtccttggcactccagtgaagatcgaggcgatagatgaagacgcggaagagcccaacaatctggtagactactcgatcacccatgccgagcccgcaaacgtctttgatatcaactcacatactggtgaaatttggctgaaaaactcaattcgttccctggacgctcttcacaacataacacccggcagagattgcctgtggagcttggaagtgcaggccaaagacagaggatctccttcattctcgaccaccgcactgcttaagatcgacataactgatgctgagacgctgtcaagatcccccatggctgcctttctcatccagaccaaggacaacccgatgaaggcagttggagtgttggcaggtactatggcaaccgtggttgcaatcaccgtcttgatctctaccgccactttctggcgtaataagaaatccaacaaggtcctgccaatgaggagagtgctgcggaagcgcccgtcgcctgcaccgcggacaattcggatcgaatggctgaagtctaaatctaccaaggccgccactaagttcatgcttaaagaaaagccccccaatgagaactgcaacaacaactcaccagaaagttcccttctgcccagggcccccgcactacctccacccccatctgttgcacctagcacaggcgccgctcagtggacagttccaactgtcagcggctctctgacaccccagcctacacagcctccgccaaagcccaagaccatggggtcgcccgttcagtcgaccttaatcagcgagctaaagcagaaattcgagaagaaatcagttcacaacaaggcatacttctag

SEQ ID NO: 227084 - DNA, 2580 bp, Artificial Sequence
  derived and/or modified sequence
atgaggcgctgccgctgggccgccctggccctgggcctgctgcggctgtgcctggcccaggccaactttgccccccacttctttgacaacggggtgggcagcaccaacggcaacatggccctcttcagcctgcctgaggacacccctgtgggcagccacgtgtacaccctgaatggaacagatcctgagggggaccccatctcctaccacatcagctttgaccccagcaccaggtctgtgttttctgtggaccccacctttggaaacatcaccctggtggaggagctggaccgggagagagaagatgaaattgaggccatcatcagcatcagtgatggcctgaacctggtggccgagaaggtggtgatcctggtgacagatgccaatgatgaggccccccgcttcatccaggagccctacgtggccctggtgcctgaggacatcccagctggcagcatcatcttcaaggtgcatgctgtggaccgggacaccggcagcggcggctctgtgacctacttcctgcagaacctgcacagcccctttgctgtggacagacattctggagtgctgcggctgcaggccggggccaccctggactatgaaagaagcaggacccactacatcaccgtggtggccaaggatggcggcggccgcctgcacggggctgatgtggtgttttctgccaccaccaccgtgacagtgaatgtggaggatgtgcaggacatggcccctgtgtttgtgggcaccccctactacggctacgtgtatgaggacaccctgcccggcagcgaggtgctgaaggtggtggccatggatggagaccggggcaagcccaaccgcatcctgtacagcctggtgaatggaaatgatggagcctttgagatcaatgagaccagcggggccatcagcatcacccagagccctgcccagctgcagcgggaggtgtatgagctgcacgtgcaggtgacagagatgagccctgctggcagccctgctgcccaggccaccgtgcctgtgaccatcagaattgtggacctgaacaaccacccccccaccttctacggggagagcggcccccagaacagatttgagctgtccatgaatgagcaccccccccagggcgagatcctgcggggcctgaagatcaccgtgaatgacagcgaccagggcgccaatgccaagttcaacctgcagctggtgggcccccggggcatcttccgggtggtgccccagacagtgctgaatgaggcccaggtgaccatcatcgtggagaacagcgctgccatcgactttgagaagagcaaggtgctgaccttcaagctgctggccgtggaggtgaacaccccagagaagttcagcagcacagcagatgtggtgatccagctgctggacaccaatgacaacgtgcccaagtttgacagcctgtactacgtggcccgcatcccagaaaatgcccctgggggcagctctgtggtggccgtgacagctgtggaccctgacaccggcccctggggcgaggtgaagtacagcacctacggcaccggggctgacctcttcctgatccaccccagcacaggcctcatctacacccagccctgggccagcctggatgctgaggccacagcccgctacaacttctacgtgaaggccgaggacatggagggcaagtacagcgtggccgaggtgttcatcaccctgctggatgtgaatgaccaccccccccagtttgggaagtctgtgcagaagaagaccatggtgctgggcacccctgtgaagattgaggccattgatgaagatgctgaggagcccaacaacctggtggactacagcatcacccacgccgagcccgccaacgtgtttgacatcaacagccacactggagagatctggctgaagaacagcatccgcagcctggatgccctgcacaacatcaccccaggccgggactgcctgtggagcctggaggtgcaggccaaggaccggggcagccccagcttcagcaccacagccctgctgaagattgacatcacagatgctgagaccctgagccgcagccccatggccgccttcctgatccagaccaaggacaaccccatgaaggctgtgggcgtgctggccggcaccatggccaccgtggtggccatcaccgtgctgatcagcacagccaccttctggaggaacaagaagagcaacaaggtgctgcccatgagaagagtgctgaggaagaggcccagccctgcccccaggaccatcagaattgagtggctgaagagcaagagcaccaaggccgccaccaagttcatgctgaaggagaagcccccaaatgaaaactgcaacaacaacagccctgagagcagcctgctgccccgggccccagccctgcccccacctccttctgtggcccccagcactggagctgcccagtggacagtgcccaccgtgtctggcagcctgaccccccagcccacccagcccccacccaagcccaagaccatgggcagccctgtgcagagcaccctcatcagcgagctgaagcagaagtttgagaagaagtctgtgcacaacaaggcctacttctag

SEQ ID NO: 227085 - DNA, 1692 bp, Artificial Sequence
  derived and/or modified sequence
atggcccctgtgtttgtgggcaccccctactacggctacgtgtatgaggacaccctgcccggcagcgaggtgctgaaggtggtggccatggatggagaccggggcaagcccaaccgcatcctgtacagcctggtgaatggaaatgatggagcctttgagatcaatgagaccagcggggccatcagcatcacccagagccctgcccagctgcagcgggaggtgtatgagctgcacgtgcaggtgacagagatgagccctgctggcagccctgctgcccaggccaccgtgcctgtgaccatccgcatcgtggacctgaacaaccacccccccaccttctatggagagagcggcccccagaacagatttgagctgtccatgaatgagcaccccccccagggcgagatcctgcggggcctgaagatcaccgtgaatgacagcgaccagggcgccaatgccaagttcaacctgcagctggtgggcccccggggcatcttccgggtggtgccccagacagtgctgaatgaggcccaggtgaccatcatcgtggagaacagcgctgccatcgactttgagaagagcaaggtgctgaccttcaaggctgtggaccctgacaccggcccctggggcgaggtgaagtacagcacctacggcaccggggctgacctcttcctgatccaccccagcacaggcctcatctacacccagccctgggccagcctggatgctgaggccacagcccgctacaacttctacgtgaaggccgaggacatggagggcaagtacagcgtggccgaggtgttcatcaccctgctggatgtgaatgaccaccccccccagtttgggaagtctgtgcagaagaagaccatggtgctgggcacccctgtgaagattgaggccattgatgaagatgctgaggagcccaacaacctggtggactacagcatcacccacgccgagcccgccaacgtgtttgacatcaacagccacactggagagatctggctgaagaacagcatccgcagcctggatgccctgcacaacatcaccccaggccgggactgcctgtggagcctggaggtgcaggccaaggaccggggcagccccagcttcagcaccacagccctgctgaagattgacatcacagatgctgagaccctgagccgcagccccatggccgccttcctgatccagaccaaggacaaccccatgaaggctgtgggcgtgctggccggcaccatggccaccgtggtggccatcaccgtgctgatcagcacagccaccttctggaggaacaagaagagcaacaaggtgctgcccatgagaagagtgctgaggaagaggcccagccctgcccccaggaccatcagaattgagtggctgaagagcaagagcaccaaggccgccaccaagttcatgctgaaggagaagcccccaaatgaaaactgcaacaacaacagccctgagagcagcctgctgccccgggccccagccctgcccccacctccttctgtggcccccagcactggagctgcccagtggacagtgcccaccgtgtctggcagcctgaccccccagcccacccagcccccacccaagcccaagaccatgggcagccctgtgcagagcaccctcatcagcgagctgaagcagaagtttgagaagaagtctgtgcacaacaaggcctacttctag

SEQ ID NO: 227086 - DNA, 2580 bp, Artificial Sequence
  derived and/or modified sequence
atgcggcggtgccggtgggccgccctggccctgggcctgctgcggctgtgtttagcccaggctaatttcgcccctcacttctttgacaacggcgtgggtagtaccaacgggaatatggccctttttagcctaccggaagataccccggtgggatcccacgtgtatacacttaatggtactgaccccgagggcgacccaatcagctaccatatctccttcgacccatccacccgctctgtcttctcagtggacccaacatttggcaacatcactctagtggaggagcttgaccgggagagggaggatgagatcgaagcaattattagtatatccgacgggctgaacttagttgcagagaaggtcgtaattttggtgacggacgcaaacgacgaggcgccccggttcattcaggaaccatacgtggctctggtgcctgaagatatacccgccggctccatcattttcaaggttcatgccgtggatcgcgacactggatctgggggttctgtgacatacttcttgcagaacttgcacagccccttcgccgttgatcgccactccggggtgctgcgcctgcaggctggtgctacactcgattacgagaggagcagaacacattatatcactgtggtggctaaagatggaggcgggcgcctgcacggtgcagatgtcgttttttccgcaactaccacggtgaccgtcaatgtcgaggatgttcaggatatggcgccggtattcgtgggcaccccatattatggatatgtttacgaagatactctccccggaagtgaagtgttaaaggtggtcgctatggacggtgaccgaggaaaaccgaatcgcattctgtatagcctcgtcaatgggaacgacggtgcatttgaaattaacgaaacgtcgggcgctatttccatcacacaaagtcccgctcagttgcagagggaagtctacgaactccatgtgcaagtgaccgagatgagtcctgcggggtcacctgccgcccaggccacagttccagtgaccattagaattgttgaccttaacaatcatcccccaacgttctacggtgagagcggaccgcagaaccgattcgaactcagtatgaacgaacatccaccgcagggggaaatccttcgcggcctcaaaattacagtcaatgactcagatcagggggctaacgccaaatttaacttacagttggtgggcccccgcggcattttcagagtggtcccacagacagttctgaacgaggcccaagtcacaatcatcgttgagaacagcgcggcaatcgactttgaaaaatcaaaagttctgaccttcaagttgctggctgtggaagttaacacacccgaaaagttttctagtaccgctgatgtcgtgattcaactcctggacacaaatgacaacgttcccaagtttgactccctctactatgtggcccgcatccctgagaatgcccccggagggtcatcagtggtggcggtaacggcagttgatcccgatacaggcccttggggggaggtcaaatattctacttacggaaccggcgctgatctcttcctgattcatccttcaacaggcctgatttacacacagccatgggccagtctcgacgcagaagctactgctcgctacaacttttatgtaaaggccgaagacatggaaggtaaatactctgttgccgaggtgtttataacattgctcgatgtgaacgatcatccaccccaatttggtaagtctgtgcagaagaagaccatggtccttgggacgccagtgaaaatcgaagctatcgatgaggatgccgaggaacccaataatctggtggactactcaatcacccatgctgagccagctaacgtcttcgacattaacagtcacactggcgaaatctggctgaagaactcaatacgcagtttggatgccctgcacaacatcacacctggaagggactgtctgtggtcgttagaagtacaggctaaagatcgcggctcgccaagcttcagcactactgctctgcttaagattgatataactgatgccgaaactttgagtcggagcccaatggccgcatttcttattcagacaaaagacaatcccatgaaagccgtgggcgttcttgctgggaccatggcaaccgtggtggccatcacagttttgatcagcaccgcgacgttttggagaaacaaaaaatccaataaagtgctgcccatgaggcgcgtgttgaggaagagaccaagcccagctcctcggaccattcgcatcgagtggctcaaatcaaagtcaacaaaggcagccacaaagttcatgctcaaggaaaagccaccaaatgagaattgtaataataactctccagaaagctcactgctgccgcgggcgcctgccctgcccccccccccgagcgtagctccttccaccggggccgcgcaatggactgttcccacggtctccggttccctgacaccacagccgacccaacccccgccaaaaccaaaaaccatgggttcaccagtgcagagcacactgatttccgaacttaagcagaagtttgaaaaaaagtctgtgcacaacaaagcttacttctag

SEQ ID NO: 227087 - DNA, 1692 bp, Artificial Sequence
  derived and/or modified sequence
atggcccccgtgttcgtgggcaccccctactacggctacgtgtacgaagacaccctcccaggttcagaagtcttgaaggtcgtggcaatggacggagatagaggtaagccaaaccggatactgtactctttagtaaacggaaacgatggggcgttcgagataaacgagacctctggagccatcagtatcacacagtcacctgcgcagctgcagagggaggtgtatgagctccatgttcaggttactgagatgtcacctgccggatcgcctgctgcccaggctactgtaccagtgacgatccggatagtggatcttaacaaccaccccccaacattttacggggaatctggtccacagaaccgctttgagttgtcaatgaacgagcacccccctcagggggagatactgcgagggttaaaaatcacagtcaatgactcagaccaaggagcaaacgcaaagttcaatctccagctcgtggggccaaggggaatctttagggtggttccccagaccgtgcttaacgaagctcaagtcacaatcatcgttgaaaattctgccgctatcgacttcgagaagagcaaggttctgacctttaaggctgtggaccccgacaccggaccatggggcgaggtgaagtattcaacatatggtaccggcgcagacctgtttctcatccatccgtccactggcttgatctacacccaaccatgggcttccctagacgccgaggcaacagctcggtacaacttttacgtgaaggccgaagacatggagggaaagtactctgtggccgaggtgttcatcacgctgttggatgtgaatgatcaccccccacagttcggcaaatccgtgcagaagaaaactatggttctggggactcccgtcaagatagaggccattgatgaagacgcagaggaacccaataacctcgttgactactcaattacacatgctgagcccgccaacgtctttgacatcaatagccatacaggagagatctggcttaagaattccattaggtcgctggacgcattgcataacattacccccggtagagactgcctgtggtctctggaagttcaggctaaggatagagggtcgccctctttctcgacaactgctctcctgaaaatcgacattactgatgctgagaccctctccagatccccaatggctgcctttctgatccagaccaaggacaacccaatgaaggcagtcggcgtgttggcggggaccatggctactgtcgtagcgatcacagtcctgatcagcaccgccaccttctggcgcaacaagaaatctaacaaggtgcttcccatgagacgagtgcttaggaagcgcccctcccctgctccacggaccattagaatagaatggcttaagagcaaaagcactaaggccgccactaagttcatgcttaaagagaaaccgcctaatgagaattgcaataataactcccctgaaagctcacttctgcctcgtgcccccgcccttcccccccctcccagcgtcgcgccgtcaacgggcgctgcccagtggactgtgccaaccgtatctggatccttgactccacaaccaacgcagcccccccctaaaccaaagacaatggggagcccagtgcagtccaccctaatttccgagctgaagcagaagttcgaaaagaagtccgttcacaataaagcctacttttag

SEQ ID NO: 227088 - DNA, 2580 bp, Artificial Sequence
  derived and/or modified sequence
atgagaagatgtcgatgggcggcattggcccttggcctgctcagactgtgcttggcacaagccaacttcgcgccacattttttcgacaacggtgtagggagtaccaatggtaacatggcgttattctctcttccagaggatacaccagttggttcccatgtgtatacactgaatgggactgatcccgagggagatccaatttcatatcacattagcttcgatccctctacacgctccgttttcagcgttgaccccacatttggcaatatcactctggtagaagagctcgatagggagcgggaagacgagattgaagccattataagtatatcagatggcctcaacttggttgcagaaaaagtagtaattctggttaccgatgccaatgatgaagcacccaggttcattcaagagccatacgtggcgctggttcccgaagatatcccagccggttcgatcatcttcaaagtgcatgcagtcgatcgcgataccgggtcagggggtagcgtcacctacttcctgcagaatctgcactcaccttttgcagtcgaccgccacagcggagtgctgcgcctgcaggccggtgctacgctggattacgagcggtctagaacgcactacatcacagtggtcgccaaagacggtgggggacgtctacacggagcagatgtagttttttctgctacaaccaccgtgactgtcaacgtggaggacgtgcaggatatggcgcctgtctttgtgggtaccccatattatggctatgtatacgaagataccctccctggctccgaagtactgaaagtcgtggcgatggacggtgatcgaggcaagccaaatcgaatcctctattcgttggtgaatggcaatgacggcgcttttgagattaacgaaacatcaggagctatctccataacacagtcgcctgcccagttacagcgcgaggtctatgagcttcacgtacaggtaacagaaatgtccccggctggaagcccagctgctcaagctacggtccccgttacgatacgaatcgtggacctaaacaaccacccaccgactttttatggtgagtccggtcctcagaataggttcgagctgagtatgaatgagcatcctccccagggggagatcttgcgtggattgaagatcaccgtcaatgatagcgatcagggggcaaacgcgaagtttaatctgcagctggttggccctaggggtatttttagggttgtgcctcagaccgtgctcaacgaagcccaggtcaccattatagtcgagaattcagcagcaattgacttcgagaaatctaaggtgttgacatttaaacttctcgctgtggaggttaacacgccagaaaaattttcatcaaccgctgatgtagtcatccagcttctcgatacaaatgataacgtccctaagtttgactcgctgtactacgtcgcacgcattccggagaatgctccgggtgggagcagcgtggtagcagttactgccgttgaccctgacacaggaccctggggcgaggtaaagtactcaacctacgggaccggcgctgacttgttcctgattcatcccagtactggtctcatctacacccagccgtgggcttcactggacgcagaggccacagccaggtataacttttacgtgaaggcagaggacatggaagggaagtactctgtcgccgaggtgttcatcactcttctggacgttaacgatcacccaccccagtttgggaaaagcgtccagaagaaaactatggtgctcgggaccccagttaaaattgaggcgatcgatgaggacgccgaggaacccaataacctggtggactactccataacgcatgctgagcccgcaaatgtgtttgatatcaatagccataccggcgaaatatggcttaagaattccatcagaagcctggatgcccttcataatattactcccggtagggactgtctatggagtctcgaagttcaggccaaggataggggctctcctagcttcagtaccacagcacttctgaaaatagacattaccgacgccgaaactctaagtagatccccaatggcggcatttctgatccagaccaaagacaatcccatgaaagccgtcggtgttctggcaggcactatggccactgttgtagctattactgttctgatctcgactgctaccttctggagaaacaaaaaatccaataaggttctgccaatgcgacgggtcctaagaaagcgcccttcccctgccccacgcactatccggattgaatggctcaaatccaagtccactaaggcagccaccaagttcatgctaaaggaaaagcctcccaacgagaattgcaataacaactctcctgagtctagcctcctaccccgagccccagctctgcctcctcccccttccgtcgccccttcgaccggggctgcccagtggaccgttcctacagtgagcggatcattgaccccgcaacctacacagccccctcccaaacctaagactatgggctctccggtgcaatccactttgatctccgaactcaagcagaaatttgaaaagaagtctgtgcataacaaagcctacttttag

SEQ ID NO: 227089 - DNA, 1692 bp, Artificial Sequence
  derived and/or modified sequence
atggcccctgtcttcgtgggcaccccttactatggatacgtgtacgaggacaccctgcctggctccgaggtgctgaaggtggtagcaatggatggtgaccggggtaaaccaaaccgcattttgtatagtctagttaatggaaacgacggggcttttgagattaatgaaacctctggagcaatctccattacccagagcccagcacagctgcagagggaagtttatgagctgcacgttcaagtcacagaaatgtccccggcagggagtccagctgcacaggcaaccgtgccagtgaccatcaggattgtcgatttgaataaccacccacccaccttttacggagaatccggccctcaaaatcggtttgagttgtcaatgaacgaacatcctccccaaggcgagattctcagaggacttaagattacggtcaacgattctgaccagggggctaacgccaaattcaatttgcaattggtcgggcctcgcggtatctttagagttgttcctcagactgtgctcaacgaagcccaggtgacaattatcgttgagaactccgcagcgattgatttcgagaagtcaaaggtgcttacctttaaagctgttgatcccgataccggcccttggggcgaggtgaaatactctacctatggtaccggtgccgatctttttctgatccacccgtccaccggccttatttacacccagccctgggccagcttggatgcggaagcaacggcaaggtataatttttacgtcaaggccgaggatatggaaggaaagtacagtgtggctgaagtgttcattaccctcctggacgtgaacgaccacccaccccagtttggaaaatctgtgcagaagaaaacaatggtgctgggaacgcccgtgaaaattgaagctatcgacgaggatgcggaagagccaaacaatttggtcgattacagcattacacacgcagagcctgctaacgtgttcgatatcaatagtcacaccggagagatctggctgaagaactcaataaggtcgctggacgccctccataatattacacccggacgagactgcctctggagcctggaggtccaggcgaaggaccgcggatcgcctagtttcagcactactgcgctgttaaaaattgatatcactgacgccgaaacactttcccgttccccaatggcagctttcctgatccaaacgaaagacaaccccatgaaagcagtcggggtgctggcaggaaccatggctaccgtcgtggcgattactgtccttatttctacagccaccttctggcggaataagaagagcaataaagtgctaccaatgcggagggtgctacgtaaacgaccctcccctgcccctcggactattcgcatagagtggttgaagagtaagtcaacaaaagcagctactaagttcatgttgaaagagaagcccccaaatgaaaattgcaacaataattctcctgagtcatcccttctacctcgagcccctgccctgcctccccctccctcagttgcaccaagcactggtgctgcacaatggactgtcccgacagtctccggaagtcttaccccacaaccaactcagcctcccccaaagcctaaaactatggggtctccagtccagtctactctgattagtgagctgaaacagaagtttgagaagaagagcgttcataataaggcctatttctag

SEQ ID NO: 227090 - DNA, 5428 bp, Artificial Sequence
  derived and/or modified sequence
tacccccattgtggtctctgccctccccgcgggcccagggcatgctccgtgcccctgcgcccggtctcggcggcggcaggcgacactccgcgccggcggagacatgaggcgctgccggtgggccgccctggccctggggctgctgcgcctctgcttggctcaggccaacttcgccccgcacttcttcgacaacggggtcggcagcaccaacggaaacatggctctgttcagcctcccagaggacacccctgtaggctctcacgtatacaccctgaatgggacagaccctgagggagaccccatctcctaccacatcagctttgaccccagcactagaagcgtcttttctgttgaccccacttttggaaacatcaccctggttgaagagctggacagagagagggaagatgagattgaagccatcatcagcatttctgatggcctgaatctggtggccgaaaaagtcgtgatcctggtgaccgatgccaatgatgaggcgcccaggttcatccaggagccttatgttgccctggttcccgaggacatacctgctgggagcatcatctttaaggtccatgcagtggacagggacacaggctctggagggagtgtcacctacttcctgcagaacctgcactccccatttgccgtggaccgccacagcggtgtgctgcgcctccaggctggggccactctggactacgagaggtcccggacccactacatcaccgtggtcgccaaggatggcggtgggaggcttcatggggctgatgtggtgttctcagccaccaccacggtcacggtcaatgtggaggatgttcaggacatggcccctgtcttcgtgggcacaccctactatggctatgtgtacgaggacacccttccgggctcggaggtactgaaggtggtcgccatggatggagaccggggcaaacccaatcgaattctctacagccttgtaaatgggaacgatggagcctttgaaattaatgagacatctggagccatctccatcactcagagcccggcccagctccagagagaggtgtatgagctgcatgtacaggtgactgaaatgagccctgcggggagcccagctgcccaggccaccgtcccagtcaccatcaggattgtggacctcaacaaccacccgccaacattctatggagagagcggaccccaaaacaggtttgagctgtccatgaatgagcacccaccccagggagagatcctgcggggcctcaagatcaccgtcaatgactccgaccagggagccaatgccaaattcaacttgcagctggtgggacccaggggcatcttccgagtggttccacagacagtcctgaatgaagcccaagtcacaatcattgtggagaactcagctgccattgactttgaaaagtccaaagtattaaccttcaagctcctggctgttgaagtgaacaccccagagaagttcagttccacagcggatgttgtgatccagctcctggacaccaatgacaatgtccccaagttcgactccctctactacgttgccaggattcctgagaacgccccagggggctccagcgtggtggctgtcacagctgtggatccagatacaggaccctggggcgaagtgaaatattccacctatgggactggggcagacctcttcctgatccacccatccactgggcttatctacacccagccctgggctagcctggacgctgaggccactgccaggtacaacttctatgtgaaggcagaggacatggaaggcaagtacagcgtagctgaggtgtttatcacactgctggatgtcaatgaccacccccctcagtttggaaagagcgttcagaagaagacgatggtgctagggaccccagtgaaaattgaggccatagacgaggatgcagaggaacccaacaacctggtggactattccatcacccatgcagagcccgccaacgtgttcgacatcaattcccacacgggggagatctggctcaagaattccatccgctccctggatgccctgcacaacatcacacctggaagggactgcctatggtccctagaggtgcaggccaaggaccggggctccccatccttcagcaccacagccttactcaagattgacatcacagatgctgagaccctctcccggagccccatggctgccttcctgatacagaccaaggacaaccccatgaaggccgtgggtgtgctggccggcaccatggccaccgtcgtggccatcactgtcctcatctccaccgccaccttctggcgcaacaagaagtctaacaaggtcctgccaatgcggcgggtgctccgcaagcggcccagccctgcgccccgcaccatccgcattgagtggctcaagtccaagagcaccaaagccgctaccaagttcatgctcaaagagaaacctcccaatgagaactgtaacaacaacagcccagaaagctctctgctcccgagagctccggctctccctccaccacccagcgtggcgcccagcactggcgcagcccagtggaccgtgcctactgtctctggctctctcactccgcagccgacccaacccccgccaaaacccaaaactatgggaagccccgtccagtcaactctgatctctgagctcaagcaaaagtttgagaagaagagtgtgcacaacaaggcttacttctagtgtatgccctatgaccccccatctttcctccgcccctgacccccaccaccctgctgctcggactatgctccccttcctctgctccttaaggtcactgacccctgttttgcacaatggtataatccccactgtcctcatctctaccgccaccttctggcgcaacaagaagttgcgctctgacagggctctagtcagggccttgggcaagacattgggctctaggatgcaattggcaaatacgtccccgttactcaaatccttggcactactacaatgccctccattcttcagggctgagaattgacgagaagccagctcacccatcccagacctcacagtccctcaggttctactgggatctcatcatcatccttagtcaagcagcagggccctggccacgtggagcaacactgactagaatctggatcctgacgcctgcagctgagagcaggagcaggaaaaggaggctcagcactgtctcaggctggaggtcagcgaacctcgtgggctgtaggaaagcaaatgtaggtaaggggagagcaaggatgcacagaaaacacactgactgtgggactgtgccaggatgcatttggaaagatagagcattctgtctgggcagagactgtggaccctggtatgcccacgtgggacagaggacacagaggtggaagattgatcttgccaagagtgagggcagatgtctccagccaggactgccctgagccgcaaaatgtcaaagctggagctatagaggtagccctaaaggcaactagaagagcatcagggctgctctctgaggagctgccccaccagccatccttgaagagacaattcagggcagttgatgaatatcagggctgagatgtggtgagacttccgtttttatccagctcttttgctcacatcgcgtaaccttgggaaagctgtttaaagtcgctgatcatcctcttcctcatctgtaaatgaagaaagtaggccctgtctacctcacatgcaggtctagggtgaggattgaagaaaatagtggtgatgagggctttaaccaagtgcaaagcggcatgaatgcaaagtatttttctgcagcccagttctgtgggtgcagctcttccagaaagtattaggagcctcacatctactctgccaagcgccccagcaggcactgtgctgggcttaggggctaccactggatgatggcattgccgtgactcacacacctctacttctgttcttccctcactccatccccgctaccgtcctggccagctaccgtcagagagaaccagagctccaagtctttaatttgccaagatgaagaaaatgagttctcaaggagggaatgctttgcttgaggccacacagcaggttggtagcaaagatcttgtctagccagggcagcccttatcagcttgtgacaaccttccccaggacagaagtcatacaaggcctctggggttaatacaaataggttgtgccctgctttaaggaacctgctatcaggaaatctacatgtgtgcacagagagagaaaagtagaacagttctttgcatttggctctacttactaacaacccctctagaatacattggtgatttcatttaaagagattgtatgcatttgtggctttcctgatttctgagtctgtgtttggaggtgttactgagatgtgccagtgtgcagaatccttgctggggtttctacagtccccaacgtgaacagtattaagcaagaggtggactcgagcaatccaggagcccagactgagcaaataagtactttccagcctgtgtttcaggagaggactgtgctggatcatgcttgccctccacagggaatacagcatccttacagcttgcatgcaatcaacctcttttgtaaatggaaaataaagtctgttacccaaaggccatgctgatcccctgctccctgctttcatttatgtttgctgacctgtggagaccagtctttctgacacacagtgaagctcaacttgcctcctggctgcttcagcaggtggatccattcttcgacccccagatgtgactctaaagaaggctgaaaatttttgtccaaattgccatgcagatatcttgaacagcaggacatttgcaggccttgtctactggacttttctcccaaacaggacaagcccaggcagggctgcatggagaggaatggaacctggagctagaattaattgcccactctcccaccctaccagtgcagcccggcaagggcaggaattgggaggcctagggtgggcatgaaagcttgggaagcactgtcgtctctcagacaggcgtcctaaagacctctaggctggaagcttgggcttgcaagtggatccgggaccgagggtggtctcttggacaaccccaggaacttggaccaaggcagagccaatcttgcaaactggccatggatggggaagtgcccggtagccagcatgagccacactaggaaagaggaggagggtgcagccaaacttaaggcaccggcaagtgttgtcagcactggaggagaccccgccagtggggtgaggccagccaagtccctgtgttacgaatggtgggccaaggggctgtctgctaggtcccagtaggacaggcagagctccaggctggcaccatggtaggcctccagggaaagagctgggaggcaggaatggcacactgggcaggcttgcccattcctggccctgagaatggagctgtagcctcatggacaataaatggatgtgacaccaaa

SEQ ID NO: 227091 - DNA, 4537 bp, Artificial Sequence
  derived and/or modified sequence
catcaccgtggtcgccaaggatggcggtgggaggcttcatggggctgatgtggtgttctcagccaccaccacggtcacggtcaatgtggaggatgttcaggacatggcccctgtcttcgtgggcacaccctactatggctatgtgtacgaggacacccttccgggctcggaggtactgaaggtggtcgccatggatggagaccggggcaaacccaatcgaattctctacagccttgtaaatgggaacgatggagcctttgaaattaatgagacatctggagccatctccatcactcagagcccggcccagctccagagagaggtgtatgagctgcatgtacaggtgactgaaatgagccctgcggggagcccagctgcccaggccaccgtcccagtcaccatcaggattgtggacctcaacaaccacccgccaacattctatggagagagcggaccccaaaacaggtttgagctgtccatgaatgagcacccaccccagggagagatcctgcggggcctcaagatcaccgtcaatgactccgaccagggagccaatgccaaattcaacttgcagctggtgggacccaggggcatcttccgagtggttccacagacagtcctgaatgaagcccaagtcacaatcattgtggagaactcagctgccattgactttgaaaagtccaaagtattaaccttcaaggctgtggatccagatacaggaccctggggcgaagtgaaatattccacctatgggactggggcagacctcttcctgatccacccatccactgggcttatctacacccagccctgggctagcctggacgctgaggccactgccaggtacaacttctatgtgaaggcagaggacatggaaggcaagtacagcgtagctgaggtgtttatcacactgctggatgtcaatgaccacccccctcagtttggaaagagcgttcagaagaagacgatggtgctagggaccccagtgaaaattgaggccatagacgaggatgcagaggaacccaacaacctggtggactattccatcacccatgcagagcccgccaacgtgttcgacatcaattcccacacgggggagatctggctcaagaattccatccgctccctggatgccctgcacaacatcacacctggaagggactgcctatggtccctagaggtgcaggccaaggaccggggctccccatccttcagcaccacagccttactcaagattgacatcacagatgctgagaccctctcccggagccccatggctgccttcctgatacagaccaaggacaaccccatgaaggccgtgggtgtgctggccggcaccatggccaccgtcgtggccatcactgtcctcatctccaccgccaccttctggcgcaacaagaagtctaacaaggtcctgccaatgcggcgggtgctccgcaagcggcccagccctgcgccccgcaccatccgcattgagtggctcaagtccaagagcaccaaagccgctaccaagttcatgctcaaagagaaacctcccaatgagaactgtaacaacaacagcccagaaagctctctgctcccgagagctccggctctccctccaccacccagcgtggcgcccagcactggcgcagcccagtggaccgtgcctactgtctctggctctctcactccgcagccgacccaacccccgccaaaacccaaaactatgggaagccccgtccagtcaactctgatctctgagctcaagcaaaagtttgagaagaagagtgtgcacaacaaggcttacttctagtgtatgccctatgaccccccatctttcctccgcccctgacccccaccaccctgctgctcggactatgctccccttcctctgctccttaaggtcactgacccctgttttgcacaatggtataatccccactgtcctcatctctaccgccaccttctggcgcaacaagaagttgcgctctgacagggctctagtcagggccttgggcaagacattgggctctaggatgcaattggcaaatacgtccccgttactcaaatccttggcactactacaatgccctccattcttcagggctgagaattgacgagaagccagctcacccatcccagacctcacagtccctcaggttctactgggatctcatcatcatccttagtcaagcagcagggccctggccacgtggagcaacactgactagaatctggatcctgacgcctgcagctgagagcaggagcaggaaaaggaggctcagcactgtctcaggctggaggtcagcgaacctcgtgggctgtaggaaagcaaatgtaggtaaggggagagcaaggatgcacagaaaacacactgactgtgggactgtgccaggatgcatttggaaagatagagcattctgtctgggcagagactgtggaccctggtatgcccacgtgggacagaggacacagaggtggaagattgatcttgccaagagtgagggcagatgtctccagccaggactgccctgagccgcaaaatgtcaaagctggagctatagaggtagccctaaaggcaactagaagagcatcagggctgctctctgaggagctgccccaccagccatccttgaagagacaattcagggcagttgatgaatatcagggctgagatgtggtgagacttccgtttttatccagctcttttgctcacatcgcgtaaccttgggaaagctgtttaaagtcgctgatcatcctcttcctcatctgtaaatgaagaaagtaggccctgtctacctcacatgcaggtctagggtgaggattgaagaaaatagtggtgatgagggctttaaccaagtgcaaagcggcatgaatgcaaagtatttttctgcagcccagttctgtgggtgcagctcttccagaaagtattaggagcctcacatctactctgccaagcgccccagcaggcactgtgctgggcttaggggctaccactggatgatggcattgccgtgactcacacacctctacttctgttcttccctcactccatccccgctaccgtcctggccagctaccgtcagagagaaccagagctccaagtctttaatttgccaagatgaagaaaatgagttctcaaggagggaatgctttgcttgaggccacacagcaggttggtagcaaagatcttgtctagccagggcagcccttatcagcttgtgacaaccttccccaggacagaagtcatacaaggcctctggggttaatacaaataggttgtgccctgctttaaggaacctgctatcaggaaatctacatgtgtgcacagagagagaaaagtagaacagttctttgcatttggctctacttactaacaacccctctagaatacattggtgatttcatttaaagagattgtatgcatttgtggctttcctgatttctgagtctgtgtttggaggtgttactgagatgtgccagtgtgcagaatccttgctggggtttctacagtccccaacgtgaacagtattaagcaagaggtggactcgagcaatccaggagcccagactgagcaaataagtactttccagcctgtgtttcaggagaggactgtgctggatcatgcttgccctccacagggaatacagcatccttacagcttgcatgcaatcaacctcttttgtaaatggaaaataaagtctgttacccaaaggccatgctgatcccctgctccctgctttcatttatgtttgctgacctgtggagaccagtctttctgacacacagtgaagctcaacttgcctcctggctgcttcagcaggtggatccattcttcgacccccagatgtgactctaaagaaggctgaaaatttttgtccaaattgccatgcagatatcttgaacagcaggacatttgcaggccttgtctactggacttttctcccaaacaggacaagcccaggcagggctgcatggagaggaatggaacctggagctagaattaattgcccactctcccaccctaccagtgcagcccggcaagggcaggaattgggaggcctagggtgggcatgaaagcttgggaagcactgtcgtctctcagacaggcgtcctaaagacctctaggctggaagcttgggcttgcaagtggatccgggaccgagggtggtctcttggacaaccccaggaacttggaccaaggcagagccaatcttgcaaactggccatggatggggaagtgcccggtagccagcatgagccacactaggaaagaggaggagggtgcagccaaacttaaggcaccggcaagtgttgtcagcactggaggagaccccgccagtggggtgaggccagccaagtccctgtgttacgaatggtgggccaaggggctgtctgctaggtcccagtaggacaggcagagctccaggctggcaccatggtaggcctccagggaaagagctgggaggcaggaatggcacactgggcaggcttgcccattcctggccctgagaatggagctgtagcctcatggacaataaatggatgtgacacc

SEQ ID NO: 227092 - DNA, 2580 bp, Artificial Sequence
  derived and/or modified sequence
atgagaagatgcagatgggccgccctggccctgggcctgctgagactgtgcctggcccaggccaacttcgccccccacttcttcgacaacggcgtgggcagcaccaacggcaacatggccctgttcagcctgcccgaggacacccccgtgggcagccacgtgtacaccctgaacggcaccgaccccgagggcgaccccatcagctaccacatcagcttcgaccccagcaccagaagcgtgttcagcgtggaccccaccttcggcaacatcaccctggtggaggagctggacagagagagagaggacgagatcgaggccatcatcagcatcagcgacggcctgaacctggtggccgagaaggtggtgatcctggtgaccgacgccaacgacgaggcccccagattcatccaggagccctacgtggccctggtgcccgaggacatccccgccggcagcatcatcttcaaggtgcacgccgtggacagagacaccggcagcggcggcagcgtgacctacttcctgcagaacctgcacagccccttcgccgtggacagacacagcggcgtgctgagactgcaggccggcgccaccctggactacgagagaagcagaacccactacatcaccgtggtggccaaggacggcggcggcagactgcacggcgccgacgtggtgttcagcgccaccaccaccgtgaccgtgaacgtggaggacgtgcaggacatggcccccgtgttcgtgggcaccccctactacggctacgtgtacgaggacaccctgcccggcagcgaggtgctgaaggtggtggccatggacggcgacagaggcaagcccaacagaatcctgtacagcctggtgaacggcaacgacggcgccttcgagatcaacgagaccagcggcgccatcagcatcacccagagccccgcccagctgcagagagaggtgtacgagctgcacgtgcaggtgaccgagatgagccccgccggcagccccgccgcccaggccaccgtgcccgtgaccatcagaatcgtggacctgaacaaccacccccccaccttctacggcgagagcggcccccagaacagattcgagctgagcatgaacgagcaccccccccagggcgagatcctgagaggcctgaagatcaccgtgaacgacagcgaccagggcgccaacgccaagttcaacctgcagctggtgggccccagaggcatcttcagagtggtgccccagaccgtgctgaacgaggcccaggtgaccatcatcgtggagaacagcgccgccatcgacttcgagaagagcaaggtgctgaccttcaagctgctggccgtggaggtgaacacccccgagaagttcagcagcaccgccgacgtggtgatccagctgctggacaccaacgacaacgtgcccaagttcgacagcctgtactacgtggccagaatccccgagaacgcccccggcggcagcagcgtggtggccgtgaccgccgtggaccccgacaccggcccctggggcgaggtgaagtacagcacctacggcaccggcgccgacctgttcctgatccaccccagcaccggcctgatctacacccagccctgggccagcctggacgccgaggccaccgccagatacaacttctacgtgaaggccgaggacatggagggcaagtacagcgtggccgaggtgttcatcaccctgctggacgtgaacgaccaccccccccagttcggcaagagcgtgcagaagaagaccatggtgctgggcacccccgtgaagatcgaggccatcgacgaggacgccgaggagcccaacaacctggtggactacagcatcacccacgccgagcccgccaacgtgttcgacatcaacagccacaccggcgagatctggctgaagaacagcatcagaagcctggacgccctgcacaacatcacccccggcagagactgcctgtggagcctggaggtgcaggccaaggacagaggcagccccagcttcagcaccaccgccctgctgaagatcgacatcaccgacgccgagaccctgagcagaagccccatggccgccttcctgatccagaccaaggacaaccccatgaaggccgtgggcgtgctggccggcaccatggccaccgtggtggccatcaccgtgctgatcagcaccgccaccttctggagaaacaagaagagcaacaaggtgctgcccatgagaagagtgctgagaaagagacccagccccgcccccagaaccatcagaatcgagtggctgaagagcaagagcaccaaggccgccaccaagttcatgctgaaggagaagccccccaacgagaactgcaacaacaacagccccgagagcagcctgctgcccagagcccccgccctgccccccccccccagcgtggcccccagcaccggcgccgcccagtggaccgtgcccaccgtgagcggcagcctgaccccccagcccacccagcccccccccaagcccaagaccatgggcagccccgtgcagagcaccctgatcagcgagctgaagcagaagttcgagaagaagagcgtgcacaacaaggcctacttctag

SEQ ID NO: 227093 - DNA, 1692 bp, Artificial Sequence
  derived and/or modified sequence
atggcccccgtgttcgtgggcaccccctactacggctacgtgtacgaggacaccctgcccggcagcgaggtgctgaaggtggtggccatggacggcgacagaggcaagcccaacagaatcctgtacagcctggtgaacggcaacgacggcgccttcgagatcaacgagaccagcggcgccatcagcatcacccagagccccgcccagctgcagagagaggtgtacgagctgcacgtgcaggtgaccgagatgagccccgccggcagccccgccgcccaggccaccgtgcccgtgaccatcagaatcgtggacctgaacaaccacccccccaccttctacggcgagagcggcccccagaacagattcgagctgagcatgaacgagcaccccccccagggcgagatcctgagaggcctgaagatcaccgtgaacgacagcgaccagggcgccaacgccaagttcaacctgcagctggtgggccccagaggcatcttcagagtggtgccccagaccgtgctgaacgaggcccaggtgaccatcatcgtggagaacagcgccgccatcgacttcgagaagagcaaggtgctgaccttcaaggccgtggaccccgacaccggcccctggggcgaggtgaagtacagcacctacggcaccggcgccgacctgttcctgatccaccccagcaccggcctgatctacacccagccctgggccagcctggacgccgaggccaccgccagatacaacttctacgtgaaggccgaggacatggagggcaagtacagcgtggccgaggtgttcatcaccctgctggacgtgaacgaccaccccccccagttcggcaagagcgtgcagaagaagaccatggtgctgggcacccccgtgaagatcgaggccatcgacgaggacgccgaggagcccaacaacctggtggactacagcatcacccacgccgagcccgccaacgtgttcgacatcaacagccacaccggcgagatctggctgaagaacagcatcagaagcctggacgccctgcacaacatcacccccggcagagactgcctgtggagcctggaggtgcaggccaaggacagaggcagccccagcttcagcaccaccgccctgctgaagatcgacatcaccgacgccgagaccctgagcagaagccccatggccgccttcctgatccagaccaaggacaaccccatgaaggccgtgggcgtgctggccggcaccatggccaccgtggtggccatcaccgtgctgatcagcaccgccaccttctggagaaacaagaagagcaacaaggtgctgcccatgagaagagtgctgagaaagagacccagccccgcccccagaaccatcagaatcgagtggctgaagagcaagagcaccaaggccgccaccaagttcatgctgaaggagaagccccccaacgagaactgcaacaacaacagccccgagagcagcctgctgcccagagcccccgccctgccccccccccccagcgtggcccccagcaccggcgccgcccagtggaccgtgcccaccgtgagcggcagcctgaccccccagcccacccagcccccccccaagcccaagaccatgggcagccccgtgcagagcaccctgatcagcgagctgaagcagaagttcgagaagaagagcgtgcacaacaaggcctacttctag

SEQ ID NO: 227094 - protein, 336 aa, Artificial Sequence
  derived and/or modified sequence
MSQPSGGRAPGTRIYSWSCPTVMSPGEKLDPIPDSFILQPPVFHPVVPYVTTIFGGLHAGKMVMLQGVVPLDAHRFQVDFQCGCSLCPRPDIAFHFNPRFHTTKPHVICNTLHGGRWQREARWPHLALRRGSSFLILFLFGNEEVKVSVNGQHFLHFRYRLPLSHVDTLGIFGDILVEAVGFLNINPFVEGSREYPAGHPFLLMSPRLEVPCSHALPQGLSPGQVIIVRGLVLQEPKHFTVSLRDQAAHAPVTLRASFADRTLAWISRWGQKKLISAPFLFYPQRFFEVLLLFQEGGLKLALNGQGLGATSMNQQALEQLRELRISGSVQLYCVHS

SEQ ID NO: 227095 - protein, 275 aa, Artificial Sequence
  derived and/or modified sequence
MVMLQGVVPLDAHRFQVDFQCGCSLCPRPDIAFHFNPRFHTTKPHVICNTLHGGRWQREARWPHLALRRGSSFLILFLFGNEEVKVSVNGQHFLHFRYRLPLSHVDTLGIFGDILVEAVGFLNINPFVEGSREYPAGHPFLLMSPRLEVPCSHALPQGLSPGQVIIVRGLVLQEPKHFTVSLRDQAAHAPVTLRASFADRTLAWISRWGQKKLISAPFLFYPQRFFEVLLLFQEGGLKLALNGQGLGATSMNQQALEQLRELRISGSVQLYCVHS

SEQ ID NO: 227096 - DNA, 1011 bp, Artificial Sequence
  derived and/or modified sequence
atgagccaaccctctggtggccgcgctcccggcacacggatttattcttggtcctgtcccaccgtgatgtcaccaggcgaaaagctcgatccaataccagacagttttattctccaacccccagttttccaccccgtggttccctatgtcacgacgatcttcgggggccttcacgcaggaaagatggttatgctccagggtgtagttcccctggatgcgcatcggtttcaggtcgactttcaatgtgggtgtagcctgtgcccaaggcctgatatcgcgttccacttcaatccccggtttcacactacaaaaccccacgtcatttgcaatactctgcacggaggtcgctggcaacgggaagctaggtggccacatctggccttgaggcggggaagctctttccttattctgttcctgtttggaaatgaagaagtcaaggtttctgtgaatggccaacactttctgcactttaggtatcggcttcctctcagccacgtggacacgttgggtatctttggcgatatcctagtcgaggctgtcggattcctgaacattaacccattcgtcgaagggtccagagagtatcctgctggtcacccttttcttctgatgtcccctcggcttgaggtcccctgctcgcacgcactgcctcagggactgtccccaggtcaggtgattattgtgcggggtctggtgctccaagaacccaaacactttaccgtgagccttagggaccaggcagcacacgcaccagttactctaagggcatcattcgcggatcgaactctggcttggatcagcagatgggggcagaagaagctgatcagcgctccttttttgttctatccacagcgcttttttgaggtgttgttgctgttccaggagggtggactcaagctggctcttaatgggcaaggtttgggagcaacaagcatgaatcagcaagcgttagaacaactgagggagctgcggatctccggaagcgtacagctgtactgcgttcacagctag

SEQ ID NO: 227097 - DNA, 1011 bp, Artificial Sequence
  derived and/or modified sequence
atgagccagcccagcggcggccgggcccctggcacccgcatctacagctggagctgccccaccgtgatgagccctggagagaagctggaccccatcccagacagcttcatcctgcagccccctgtgttccaccctgtggtgccctacgtgaccaccatctttggaggcctgcatgctgggaagatggtgatgctgcagggcgtggtgcccctggatgcccaccgcttccaggtggacttccagtgtggctgcagcctgtgccccaggccagacatcgccttccacttcaacccccgcttccacaccaccaagccccacgtgatctgcaacaccctgcatggaggccgctggcagcgggaggcccgctggccccacctggccctgcggcggggcagcagcttcctgatcctcttcctgtttggaaatgaggaggtgaaggtgtctgtgaatggccagcacttcctgcacttccgctaccgcctgcccctgagccacgtggacaccctgggcatctttggagacatcctggtggaggccgtgggcttcctgaacatcaacccctttgtggagggcagccgggagtacccagctggccaccccttcctgctgatgagcccccggctggaggtgccctgcagccacgccctgccccagggcctgagccctggccaggtgatcatcgtgcggggcctggtgctgcaggagcccaagcacttcaccgtgtccctgcgggaccaggccgcccacgcccctgtgaccctgcgggccagctttgctgacaggaccctggcctggatcagccgctggggccagaagaagctgatcagcgcccccttcctgttctacccccagcgcttctttgaggtgctgctgctcttccaggagggcggcctgaagctggccctgaatggccagggcctgggcgccacctccatgaaccagcaggccctggagcagctgcgggagctgcgcatcagcggctctgtgcagctgtactgtgtgcacagctag

SEQ ID NO: 227098 - DNA, 1618 bp, Artificial Sequence
  derived and/or modified sequence
cacaggagccagcctctggcttctctctgcaatggccatgtgctgcagacccggagtgggtagttagttggttaatgccagtcttcctcccctggacactgagttctgctgacagcccccgcccagccagagctctgctgtataccaccgggagtggggctggtgtggagcctggaggtcgcccgctgccctcctagggctgctccagacagcattaaaacgctgcaggtcgcaggtgagactaacagctgggagagctgctccaggcatttaggaccctgactggggcagatgagtcagcccagtgggggcagggctcctggaacgaggatctacagttggagttgccccactgtcatgtcacctggagaaaaactggacccaattcctgacagcttcattctgcaaccaccagtcttccacccggtggttccttatgtcacgacgatttttggaggcctgcatgcaggcaagatggtcatgctgcaaggagtggtccctctagatgcacacaggtttcaggtggacttccagtgtggctgcagcctgtgtccccggccagatatcgccttccacttcaaccctcgcttccataccaccaagccccatgtcatctgcaacaccctgcatggtggacgctggcaaagggaggcccggtggccccacctggccctgcgaagaggctccagcttcctcatcctctttctcttcgggaatgaggaagtgaaggtgagtgtgaatggacagcactttctccacttccgctaccggctcccactgtctcatgtggacacgctgggtatatttggtgacatcctggtagaggctgttggattcctgaacatcaatccatttgtggagggcagcagagagtacccagctggacatcctttcctgctgatgagccccaggctggaggtgccctgctcacatgctcttccccagggtctctcgcctgggcaggtcatcatagtacggggactggtcttgcaagagccgaagcattttactgtgagcctgagggaccaggctgcccatgctcctgtgacactcagggcctccttcgcagacagaactctggcctggatctcccgctgggggcagaagaaactgatctcagcccccttcctcttttacccccagagattctttgaggtgctgctcctgttccaggagggagggctgaagctggcgctcaatgggcaggggctgggggccaccagcatgaaccagcaggccctggagcagctgcgggagctccggatcagtggaagtgtccagctctactgtgtccactcctgaggatggttccagggaaataccgccagaaaacaagaaggtcagcccactcccagggccccactctcctcccctcattaaaccatccacctgacaccagcacatcaggcctggttcacctctggggtcacgagactgagtctacaggagctttgggcctgagggaaggcacaagagtgcaaaggttcctcgaactctgcaccttcctccaccaggagcctgggatatggctccatctgccttcagggcctggactgcactcacagaggcaagtgttgtagactaacaaagatactccaaaatacaatggcttaaagaa

SEQ ID NO: 227099 - DNA, 1816 bp, Artificial Sequence
  derived and/or modified sequence
cctcagcttcccagagtgctgagattacaggcatgagccacagagcccagcccaggtaacttctacatggggaaaggtgagcctgggaaggccattgttaagtgcctctccaggggtccatttcagagttagctgtcagttcctaacttgtccattcttcttgcctcccagttcctagtctccagccactcaacagtcctcagaaagccccagtaccaggcttctggggaccagggtgacatctagtggatggcaagcctccctggggtcactgcagcctgttgtgtcctaggagctggggaaaggcaactggctggtgctgaatttggcaagggagcggaatttgacttctctggtgtaatgcagctttgccgtgtgacggtccaggaaaggggattaggtggaagaaaatatttcagtgaacactgatttttacctataaggaattttctgtttggagaggaaaagttgagttttattctgctcctttcctcccactcgcctgacatagaggtccctaagccctttctccaaacctgcatggatgagtttcttttcttgttcaggtggttccttatgtcacgacgatttttggaggcctgcatgcaggcaagatggtcatgctgcaaggagtggtccctctagatgcacacaggtttcaggtggacttccagtgtggctgcagcctgtgtccccggccagatatcgccttccacttcaaccctcgcttccataccaccaagccccatgtcatctgcaacaccctgcatggtggacgctggcaaagggaggcccggtggccccacctggccctgcgaagaggctccagcttcctcatcctctttctcttcgggaatgaggaagtgaaggtgagtgtgaatggacagcactttctccacttccgctaccggctcccactgtctcatgtggacacgctgggtatatttggtgacatcctggtagaggctgttggattcctgaacatcaatccatttgtggagggcagcagagagtacccagctggacatcctttcctgctgatgagccccaggctggaggtgccctgctcacatgctcttccccagggtctctcgcctgggcaggtcatcatagtacggggactggtcttgcaagagccgaagcattttactgtgagcctgagggaccaggctgcccatgctcctgtgacactcagggcctccttcgcagacagaactctggcctggatctcccgctgggggcagaagaaactgatctcagcccccttcctcttttacccccagagattctttgaggtgctgctcctgttccaggagggagggctgaagctggcgctcaatgggcaggggctgggggccaccagcatgaaccagcaggccctggagcagctgcgggagctccggatcagtggaagtgtccagctctactgtgtccactcctgaggatggttccagggaaataccgccagaaaacaagaaggtcagcccactcccagggccccactctcctcccctcattaaaccatccacctgacaccagcacatcaggcctggttcacctctggggtcacgagactgagtctacaggagctttgggcctgagggaaggcacaagagtgcaaaggttcctcgaactctgcaccttcctccaccaggagcctgggatatggctccatctgccttcagggcctggactgcactcacagaggcaagtgttgtagactaacaaagatactccaaaatacaatggcttaaagaatgtggtcatttattctttattatttatttatttgtggtcaaataaataaataaggtta

SEQ ID NO: 227100 - DNA, 1011 bp, Artificial Sequence
  derived and/or modified sequence
atgagccagcccagcggcggccgggcccccggcacccggatctacagctggtcctgtcctactgtgatgtcccctggtgagaagctggacccaattcctgattcatttatcctccagcctcccgtattccatcccgtagtcccgtatgtgactacgatttttggagggctacatgccggcaagatggtgatgctgcaaggcgtcgtgccactggacgctcacagatttcaagtggatttccaatgtggctgcagtctgtgtcctcggccagatatcgcattccacttcaatcctcgttttcacactactaaaccacacgtcatttgtaacacacttcatggtgggcgctggcagcgggaagcaaggtggccgcatctggcattgcggcgtggatcgtctttcctgatcctgtttcttttcgggaatgaagaagtgaaagtgtctgtgaacgggcagcatttcctgcatttccggtatagactgcccctcagccatgttgacactctaggcatttttggagatattctggtggaagccgtgggatttcttaatatcaatccatttgtggaaggatcaagagagtatccagctgggcacccctttctgctaatgtccccacggcttgaggttccatgttcacatgcactgccacaaggactgagtccagggcaggtaattatcgtgcgtggccttgtactgcaggagccaaaacactttaccgtcagcttgcgagaccaggccgctcatgcccccgtgactctgcgcgcatcttttgccgatagaacactggcttggataagccgctggggtcaaaagaaactcatctcagccccatttctcttctacccccaaagattctttgaggtgttacttctctttcaggagggcggccttaaattggcactcaacggtcagggccttggtgcgactagtatgaaccaacaggccctcgagcaactgagggagttgcgaatttcaggctccgttcaactttactgcgtacatagctag

SEQ ID NO: 227101 - DNA, 1011 bp, Artificial Sequence
  derived and/or modified sequence
atgtctcagccttccgggggtcgcgcaccaggcactcggatttacagctggagctgtcccaccgttatgtctccaggcgagaagcttgaccccattcctgattcttttatcctgcaaccaccagtgtttcaccctgttgtcccttacgtgactacaatcttcggcggtctgcacgctggcaagatggtcatgctgcaaggcgtggttcctttggacgcacatagatttcaagtagactttcagtgcggatgcagtctgtgccctcggccagacattgccttccacttcaacccgcgattccataccacaaagccccacgttatctgcaacaccctccacgggggacgctggcagcgggaagcccgttggccacatctggcactgcgaaggggcagtagctttctgatactgttcttgtttggaaatgaggaggtaaaagtatcagtgaatggtcagcactttttgcatttccggtataggttacccctaagtcatgtggatacactgggaatcttcggggacattctggttgaggccgttgggtttctaaacatcaatcccttcgtcgagggatctcgagagtacccagcgggtcatccctttctgctcatgtccccccgtcttgaagttccctgctcacacgctctgcctcagggcttaagccccggacaggtgattatcgttagaggtctagttctgcaggaacctaaacacttcaccgtgtccttgcgcgaccaggcagcgcatgctcccgtcacacttcgagcttcattcgccgacagaaccctcgcgtggatttcccggtggggtcagaaaaagctgatctcagccccattcttattctacccacagagattctttgaggtgttgctactgttccaggaagggggacttaaactggcgctaaatggtcaaggcctcggcgcaacctcaatgaatcagcaggcccttgagcaactgcgtgagctgcggatctcaggctctgtccagttatattgcgttcatagttag

SEQ ID NO: 227102 - DNA, 1011 bp, Artificial Sequence
  derived and/or modified sequence
atgagccagcccagcggcggcagagcccccggcaccagaatctacagctggagctgccccaccgtgatgagccccggcgagaagctggaccccatccccgacagcttcatcctgcagccccccgtgttccaccccgtggtgccctacgtgaccaccatcttcggcggcctgcacgccggcaagatggtgatgctgcagggcgtggtgcccctggacgcccacagattccaggtggacttccagtgcggctgcagcctgtgccccagacccgacatcgccttccacttcaaccccagattccacaccaccaagccccacgtgatctgcaacaccctgcacggcggcagatggcagagagaggccagatggccccacctggccctgagaagaggcagcagcttcctgatcctgttcctgttcggcaacgaggaggtgaaggtgagcgtgaacggccagcacttcctgcacttcagatacagactgcccctgagccacgtggacaccctgggcatcttcggcgacatcctggtggaggccgtgggcttcctgaacatcaaccccttcgtggagggcagcagagagtaccccgccggccaccccttcctgctgatgagccccagactggaggtgccctgcagccacgccctgccccagggcctgagccccggccaggtgatcatcgtgagaggcctggtgctgcaggagcccaagcacttcaccgtgagcctgagagaccaggccgcccacgcccccgtgaccctgagagccagcttcgccgacagaaccctggcctggatcagcagatggggccagaagaagctgatcagcgcccccttcctgttctacccccagagattcttcgaggtgctgctgctgttccaggagggcggcctgaagctggccctgaacggccagggcctgggcgccaccagcatgaaccagcaggccctggagcagctgagagagctgagaatcagcggcagcgtgcagctgtactgcgtgcacagctag

SEQ ID NO: 227103 - protein, 553 aa, Artificial Sequence
  derived and/or modified sequence
MVQRLWVSRLLRHRKAQLLLVNLLTFGLEVCLAAGITYVPPLLLEVGVEEKFMTMVLGIGPVLGLVCVPLLGSASDHWRGRYGRRRPFIWALSLGILLSLFLIPRAGWLAGLLCPDPRPLELALLILGVGLLDFCGQVCFTPLEALLSDLFRDPDHCRQAYSVYAFMISLGGCLGYLLPAIDWDTSALAPYLGTQEECLFGLLTLIFLTCVAATLLVAEEAALGPTEPAEGLSAPSLSPHCCPCRARLAFRNLGALLPRLHQLCCRMPRTLRRLFVAELCSWMALMTFTLFYTDFVGEGLYQGVPRAEPGTEARRHYDEGVRMGSLGLFLQCAISLVFSLVMDRLVQRFGTRAVYLASVAAFPVAAGATCLSHSVAVVTASAALTGFTFSALQILPYTLASLYHREKQVFLPKYRGDTGGASSEDSLMTSFLPGPKPGAPFPNGHVGAGGSGLLPPPPALCGASACDVSVRVVVGEPTEARVVPGRGICLDLAILDSAFLLSQVAPSLFMGSIVQLSQSVTAYMVSAAGLGLVAIYFATQVVFDKSDLAKYSA

SEQ ID NO: 227104 - DNA, 1662 bp, Artificial Sequence
  derived and/or modified sequence
atggtgcagagactgtgggtgagcagactgctgagacacagaaaggcccagctgctgctggtgaacctgctgaccttcggcctggaggtgtgcctggccgccggcatcacctacgtgccccccctgctgctggaggtgggcgtggaggagaagttcatgaccatggtgctgggcatcggccccgtgctgggcctggtgtgcgtgcccctgctgggcagcgccagcgaccactggagaggcagatacggcagaagaagacccttcatctgggccctgagcctgggcatcctgctgagcctgttcctgatccccagagccggctggctggccggcctgctgtgccccgaccccagacccctggagctggccctgctgatcctgggcgtgggcctgctggacttctgcggccaggtgtgcttcacccccctggaggccctgctgagcgacctgttcagagaccccgaccactgcagacaggcctacagcgtgtacgccttcatgatcagcctgggcggctgcctgggctacctgctgcccgccatcgactgggacaccagcgccctggccccctacctgggcacccaggaggagtgcctgttcggcctgctgaccctgatcttcctgacctgcgtggccgccaccctgctggtggccgaggaggccgccctgggccccaccgagcccgccgagggcctgagcgcccccagcctgagcccccactgctgcccctgcagagccagactggccttcagaaacctgggcgccctgctgcccagactgcaccagctgtgctgcagaatgcccagaaccctgagaagactgttcgtggccgagctgtgcagctggatggccctgatgaccttcaccctgttctacaccgacttcgtgggcgagggcctgtaccagggcgtgcccagagccgagcccggcaccgaggccagaagacactacgacgagggcgtgagaatgggcagcctgggcctgttcctgcagtgcgccatcagcctggtgttcagcctggtgatggacagactggtgcagagattcggcaccagagccgtgtacctggccagcgtggccgccttccccgtggccgccggcgccacctgcctgagccacagcgtggccgtggtgaccgccagcgccgccctgaccggcttcaccttcagcgccctgcagatcctgccctacaccctggccagcctgtaccacagagagaagcaggtgttcctgcccaagtacagaggcgacaccggcggcgccagcagcgaggacagcctgatgaccagcttcctgcccggccccaagcccggcgcccccttccccaacggccacgtgggcgccggcggcagcggcctgctgccccccccccccgccctgtgcggcgccagcgcctgcgacgtgagcgtgagagtggtggtgggcgagcccaccgaggccagagtggtgcccggcagaggcatctgcctggacctggccatcctggacagcgccttcctgctgagccaggtggcccccagcctgttcatgggcagcatcgtgcagctgagccagagcgtgaccgcctacatggtgagcgccgccggcctgggcctggtggccatctacttcgccacccaggtggtgttcgacaagagcgacctggccaagtacagcgcctag

SEQ ID NO: 227105 - DNA, 1662 bp, Artificial Sequence
  derived and/or modified sequence
atggtgcaacgactgtgggtgagtagactcctgaggcatagaaaagctcagttgcttctcgtgaatctgcttacatttgggcttgaagtttgtcttgcagctggcatcacctacgttccaccactgctccttgaggtgggagttgaggaaaagtttatgaccatggtgttgggaatcggccctgttcttgggttagtgtgcgttccactcttggggagtgcctccgatcactggcgagggaggtatggccgccgtcggccgttcatttgggctctaagcctcggtatactactctccctgttcctgattccacgggccggttggctagctgggctgctttgcccggacccccggccgctggaactggcattactgattctgggcgtgggtctgctggatttctgcggacaggtgtgcttcacgcccctggaggcccttcttagcgatctttttagagatcctgaccactgtcggcaggcctactctgtgtacgccttcatgatatctcttggtggctgtttgggttatctcctccccgccattgactgggatacaagtgcgcttgctccttacctaggcactcaggaagaatgtcttttcggtctgttaaccctgatattcctgacctgcgtcgcagcaaccctgttggtggcagaggaagctgctctgggcccaaccgagcccgccgagggcctaagcgctccatcccttagtccacattgctgtccatgcagagccagattggccttcagaaacttaggggctcttctgcctcgcctccatcaactctgctgtcgcatgccgcggacccttcgcaggctctttgtggcagaactgtgttcctggatggccctcatgactttcaccttattctacactgactttgtgggagaaggtctttaccagggcgtccctcgagcagaacccggcacagaagcaagacgacactatgatgagggggtcaggatggggagcctaggcctgttcctccagtgcgctatcagcctcgtgttctcactagttatggataggttagtgcaacgatttggtaccagggccgtttacctggcctctgtggcagcatttccagtggctgcgggagcaacctgcctgtcacactcggtcgccgtggttactgcttcagctgcattaaccgggttcactttcagcgcccttcaaatcctgccctacactctcgcgagtctgtatcaccgcgaaaaacaggtatttctgccaaagtatcgcggcgacactgggggcgcctctagcgaggactcgttaatgaccagctttttacctggacccaagccaggagctcctttccctaacggccacgttggtgccggaggctccggcctgctgccccctcccccggccttatgtggtgccagcgcttgtgacgtatcagttcgtgttgtggtcggcgaaccgaccgaagcacgagtggtgccaggacgcggtatatgtctggatctggccatcctggattcagcctttctgctctcccaagttgcgccctctctgtttatgggatcgattgttcagctttcacagtccgtgacagcatatatggtttcagcagccggactgggactagtggcaatctacttcgctactcaggttgttttcgataaatcagatttggccaagtactccgcctag

SEQ ID NO: 227106 - DNA, 1662 bp, Artificial Sequence
  derived and/or modified sequence
atggtgcagaggctgtgggtgtcccggctgctgcggcacaggaaggcccagctgctgctggtgaacctgctgaccttcggcctggaggtgtgcctggccgccggcatcacctacgtgccccccctgctgctggaggtgggcgtggaggagaagttcatgaccatggtgctgggcatcggccctgtgctgggcctggtgtgtgtgcccctgctgggcagcgccagtgaccactggaggggccgctatggaagaagaagacccttcatctgggccctgagcctgggcatcctgctgagcctcttcctgatcccccgggccggctggctggccggcctgctgtgcccagacccccggcccctggagctggccctgctgatcctgggcgtgggcctgctggacttctgtggccaggtgtgcttcacccccctggaggccctgctgagtgacctcttccgggaccctgaccactgccggcaggcctacagcgtgtatgccttcatgatcagcctgggcggctgcctgggctacctgctgcctgccatcgactgggacaccagcgccctggccccctacctgggcacccaggaggagtgcctgtttggcctgctgaccctcatcttcctgacctgtgtggccgccaccctgctggtggccgaggaggccgccctgggccccacagagcctgctgagggcctgagcgcccccagcctgagcccccactgctgcccctgccgggcccggctggccttcaggaacctgggcgccctgctgccccggctgcaccagctgtgctgcaggatgcccaggaccctgcggcggctgtttgtggccgagctgtgctcctggatggccctgatgaccttcaccctcttctacacagactttgtgggggagggcctgtaccagggcgtgcccagggctgagcctggaacagaggcccggcggcactatgatgagggcgtgaggatgggcagcctgggcctcttcctgcagtgtgccatcagcctggtgttcagcctggtgatggaccggctggtgcagagatttggcaccagggctgtgtacctggcctctgtggccgccttccctgtggccgccggggccacctgcctgagccacagcgtggccgtggtgacagccagcgctgccctgaccggcttcaccttcagcgccctgcagatcctgccctacaccctggccagcctgtaccaccgggagaagcaggtgttcctgcccaagtacagaggagacaccggcggggccagcagcgaggacagcctgatgaccagcttcctgcccggccccaagccaggggcccccttccccaatggacatgtgggcgctgggggcagcggcctgctgcccccacctccagccctgtgtggggccagcgcctgtgatgtgtctgtgcgggtggtggtgggggagcccacagaggcccgggtggtgcccggccggggcatctgcctggacctggccatcctggacagcgccttcctgctgagccaggtggcccccagcctcttcatgggcagcatcgtgcagctgagccagagcgtgacagcctacatggtgtctgctgctggcctgggcctggtggccatctactttgccacccaggtggtgtttgacaagagtgacctggccaagtacagcgcctag

SEQ ID NO: 227107 - DNA, 1662 bp, Artificial Sequence
  derived and/or modified sequence
atggtgcagcggctgtgggtgagccggctgctgcggcaccggaaggcacagctgctcctcgtgaatttattaacatttggattagaggtatgtctggcagctggcattacctatgttccaccactccttcttgaggtgggcgttgaagaaaaattcatgacgatggtgcttggcataggacctgttctgggactcgtctgtgtgccactactgggctctgcgtctgaccactggagaggcagatacggtagacgacgaccctttatctgggcattgagcctgggaatcctactttctttgtttttaattcctcgggctggttggctggccggcctgctgtgcccagatcctagaccacttgagctcgctctgctgatcctgggtgtgggacttctcgacttttgcggccaggtctgtttcacacctcttgaagcactgttgtcagacctattccgcgatcccgaccattgccggcaggcgtactccgtctatgcttttatgatctctctgggcgggtgtctgggctatcttctacccgcaattgactgggatactagcgcactagctccgtatcttggaactcaggaggaatgtttgtttggcctcctgaccctgatctttctcacatgtgtggctgccaccctgctagtggccgaggaagctgctcttggaccgacagagcccgcagaagggctgtccgccccgtctctgtccccccattgttgtccttgtcgtgcgcggcttgctttccggaacttgggagccctgctgccaagactgcatcaactctgttgcagaatgccccgtactcttcgccgcctgttcgtggcagaactgtgctcatggatggccctaatgacgtttaccctattctacactgacttcgtgggggagggcctttaccagggagtacctcgcgctgagcctggaacggaggcacggcgccactacgacgagggggtacgtatgggcagtttggggttatttctccagtgtgcaatttcattagtttttagcctcgtgatggacagacttgttcaacgatttgggactagagctgtttatctggcaagcgtggccgccttccctgtggcagccggggcaacctgtctttcacactccgtggctgtcgtaactgccagcgccgctttgacaggctttactttttcagcactacaaatccttccctacaccttggcaagcttgtaccatagggagaagcaggtttttcttccaaagtaccggggcgataccggaggggcctctagcgaagacagcttgatgactagtttcctgcccggaccaaagcctggcgccccctttcccaatgggcacgtgggcgccggcggatctgggctgctgccgccaccccctgccctgtgtggggccagtgcatgcgatgtttccgtgcgtgtggttgtaggcgagccgacggaggccagggttgtgcctggacgcggaatctgccttgacctggccattctcgacagcgctttccttctgtcacaggtcgcacctagcctgttcatgggctctattgtgcagttatcccaatccgttacagcctatatggtttccgctgccggcttggggctagtggctatctactttgcgactcaagtcgtgtttgacaagtcagatcttgccaaatacagcgcctag

SEQ ID NO: 227108 - DNA, 1662 bp, Artificial Sequence
  derived and/or modified sequence
atggtgcaaagactctgggtttctcggctgctgaggcacagaaaggcgcagctattgttggtgaatcttctcacctttggtctcgaagtttgcctggccgctggcattacctatgtcccccctctgctcttagaggttggcgtggaggagaaatttatgacgatggtgctgggcattggtcccgtcctcggactagtctgcgtgcccctcttggggagtgcgtctgaccattggagaggccgttatggccgtcgcagaccctttatttgggcactgtcacttggcatcctcctgtccctgtttctgatcccccgtgctggatggctggctggccttctgtgccccgatcccagacctctggaactggccttgttaattttaggtgtcggcctgctggatttttgcggacaagtgtgttttacacccctcgaagccctgctctctgatttgtttagggatccagaccactgtagacaggcttacagcgtctatgccttcatgatctccctcggaggttgcttaggttatctgctcccagctattgactgggatacttcagcattggctccctacctcggtacccaggaggaatgtctcttcggcctactcacacttattttcttaacgtgtgttgcagcaacgttgctcgtggccgaggaagcagctctaggacccaccgagcctgctgagggcctgtctgccccatctctgtcaccccattgctgtccttgccgcgcacggttggcatttcgtaacctgggggctctgctgcctcgcctgcatcagctttgttgcaggatgccgaggactctgaggcgattgttcgtcgccgagttatgctcatggatggcactaatgacctttactcttttctatacggactttgtcggagaggggctgtatcagggcgtaccacgggctgagcccggaaccgaggctcgacggcattacgatgaaggtgtgcgcatggggagcctggggctttttctgcagtgtgcaatcagcctggtattttcattagtgatggataggttggtgcagaggttcggtacacgtgctgtatatctggcatctgttgccgcttttccggtcgctgccggagcaacatgcctgtcccacagcgtggcagtggttacagcatcagccgctcttactggcttcaccttttcagctctccagatcttgccttataccctggccagcttgtaccacagggaaaaacaggtgtttctgcctaagtatcggggagatacagggggagcttcttcagaagacagcctgatgacctcattcttgcccggaccgaagccgggagctcccttccctaatggccatgttggagctggaggctcaggcctcttgcctcctccccctgctctctgcggcgcatccgcatgcgacgtgtcagttagggtggtcgttggagagccaaccgaagctagagttgtccccggaagagggatttgccttgacctggctatcctcgactctgcgtttctgcttagccaggtggcaccctccctgtttatgggaagtattgtgcagctctcccaatccgtgaccgcatatatggtgtctgcggctggtctcggcctagtggctatttacttcgccacccaggtcgtgttcgacaaatcggaccttgccaagtacagtgcctag

SEQ ID NO: 227109 - DNA, 3341 bp, Artificial Sequence
  derived and/or modified sequence
aaggaagggggggcggaaccagcctgcacgcgctggctccgggtgacagccgcgcgcctcggccaggatctgagtgatgagacgtgtccccactgaggtgccccacagcagcaggtgttgagcatgggctgagaagctggaccggcaccaaagggctggcagaaatgggcgcctggctgattcctaggcagttggcggcagcaaggaggagaggccgcagcttctggagcagagccgagacgaagcagttctggagtgcctgaacggccccctgagccctacccgcctggcccactatggtccagaggctgtgggtgagccgcctgctgcggcaccggaaagcccagctcttgctggtcaacctgctaacctttggcctggaggtgtgtttggccgcaggcatcacctatgtgccgcctctgctgctggaagtgggggtagaggagaagttcatgaccatggtgctgggcattggtccagtgctgggcctggtctgtgtcccgctcctaggctcagccagtgaccactggcgtggacgctatggccgccgccggcccttcatctgggcactgtccttgggcatcctgctgagcctctttctcatcccaagggccggctggctagcagggctgctgtgcccggatcccaggcccctggagctggcactgctcatcctgggcgtggggctgctggacttctgtggccaggtgtgcttcactccactggaggccctgctctctgacctcttccgggacccggaccactgtcgccaggcctactctgtctatgccttcatgatcagtcttgggggctgcctgggctacctcctgcctgccattgactgggacaccagtgccctggccccctacctgggcacccaggaggagtgcctctttggcctgctcaccctcatcttcctcacctgcgtagcagccacactgctggtggctgaggaggcagcgctgggccccaccgagccagcagaagggctgtcggccccctccttgtcgccccactgctgtccatgccgggcccgcttggctttccggaacctgggcgccctgcttccccggctgcaccagctgtgctgccgcatgccccgcaccctgcgccggctcttcgtggctgagctgtgcagctggatggcactcatgaccttcacgctgttttacacggatttcgtgggcgaggggctgtaccagggcgtgcccagagctgagccgggcaccgaggcccggagacactatgatgaaggcgttcggatgggcagcctggggctgttcctgcagtgcgccatctccctggtcttctctctggtcatggaccggctggtgcagcgattcggcactcgagcagtctatttggccagtgtggcagctttccctgtggctgccggtgccacatgcctgtcccacagtgtggccgtggtgacagcttcagccgccctcaccgggttcaccttctcagccctgcagatcctgccctacacactggcctccctctaccaccgggagaagcaggtgttcctgcccaaataccgaggggacactggaggtgctagcagtgaggacagcctgatgaccagcttcctgccaggccctaagcctggagctcccttccctaatggacacgtgggtgctggaggcagtggcctgctcccacctccacccgcgctctgcggggcctctgcctgtgatgtctccgtacgtgtggtggtgggtgagcccaccgaggccagggtggttccgggccggggcatctgcctggacctcgccatcctggatagtgccttcctgctgtcccaggtggccccatccctgtttatgggctccattgtccagctcagccagtctgtcactgcctatatggtgtctgccgcaggcctgggtctggtcgccatttactttgctacacaggtagtatttgacaagagcgacttggccaaatactcagcgtagaaaacttccagcacattggggtggagggcctgcctcactgggtcccagctccccgctcctgttagccccatggggctgccgggctggccgccagtttctgttgctgccaaagtaatgtggctctctgctgccaccctgtgctgctgaggtgcgtagctgcacagctgggggctggggcgtccctctcctctctccccagtctctagggctgcctgactggaggccttccaagggggtttcagtctggacttatacagggaggccagaagggctccatgcactggaatgcggggactctgcaggtggattacccaggctcagggttaacagctagcctcctagttgagacacacctagagaagggtttttgggagctgaataaactcagtcacctggtttcccatctctaagccccttaacctgcagcttcgtttaatgtagctcttgcatgggagtttctaggatgaaacactcctccatgggatttgaacatatgaaagttatttgtaggggaagagtcctgaggggcaacacacaagaaccaggtcccctcagcccacagcactgtctttttgctgatccacccccctcttaccttttatcaggatgtggcctgttggtccttctgttgccatcacagagacacaggcatttaaatatttaacttatttatttaacaaagtagaagggaatccattgctagcttttctgtgttggtgtctaatatttgggtagggtgggggatccccaacaatcaggtcccctgagatagctggtcattgggctgatcattgccagaatcttcttctcctggggtctggccccccaaaatgcctaacccaggaccttggaaattctactcatcccaaatgataattccaaatgctgttacccaaggttagggtgttgaaggaaggtagagggtggggcttcaggtctcaacggcttccctaaccacccctcttctcttggcccagcctggttccccccacttccactcccctctactctctctaggactgggctgatgaaggcactgcccaaaatttcccctacccccaactttcccctacccccaactttccccaccagctccacaaccctgtttggagctactgcaggaccagaagcacaaagtgcggtttcccaagcctttgtccatctcagcccccagagtatatctgtgcttggggaatctcacacagaaactcaggagcaccccctgcctgagctaagggaggtcttatctctcagggggggtttaagtgccgtttgcaataatgtcgtcttatttatttagcggggtgaatattttatactgtaagtgagcaatcagagtataatgtttatggtgacaaaattaaaggctttcttatatgttta

SEQ ID NO: 227110 - protein, 686 aa, Artificial Sequence
  derived and/or modified sequence
MTDALLPAAPQPLEKENDGYFRKGCNPLAQTGRSKLQNQRAALNQQILKAVRMRTGAENLLKVATNSKVREQVRLELSFVNSDLQMLKEELEGLNISVGVYQNTEEAFTIPLIPLGLKETKDVDFAVVLKDFILEHYSEDGYLYEDEIADLMDLRQACRTPSRDEAGVELLMTYFIQLGFVESRFFPPTRQMGLLFTWYDSLTGVPVSQQNLLLEKASVLFNTGALYTQIGTRCDRQTQAGLESAIDAFQRAAGVLNYLKDTFTHTPSYDMSPAMLSVLVKMMLAQAQESVFEKISLPGIRNEFFMLVKVAQEAAKVGEVYQQLHAAMSQAPVKENIPYSWASLACVKAHHYAALAHYFTAILLIDHQVKPGTDLDHQEKCLSQLYDHMPEGLTPLATLKNDQQRRQLGKSHLRRAMAHHEESVREASLCKKLRSIEVLQKVLCAAQERSRLTYAQHQEEDDLLNLIDAPSVVAKTEQEVDIILPQFSKLTVTDFFQKLGPLSVFSANKRWTPPRSIRFTAEEGDLGFTLRGNAPVQVHFLDPYCSASVAGAREGDYIVSIQLVDCKWLTLSEVMKLLKSFGEDEIEMKVVSLLDSTSSMHNKSATYSVGMQKTYSMICLAIDDDDKTDKTKKISKKLSFLSWGTNKNRQKSASTLCLPSVGAARPQVKKKLPSPFSLLNSDSSWY

SEQ ID NO: 227111 - protein, 535 aa, Artificial Sequence
  derived and/or modified sequence
MDLRQACRTPSRDEAGVELLMTYFIQLGFVESRFFPPTRQMGLLFTWYDSLTGVPVSQQNLLLEKASVLFNTGALYTQIGTRCDRQTQAGLESAIDAFQRAAGVLNYLKDTFTHTPSYDMSPAMLSVLVKMMLAQAQESVFEKISLPGIRNEFFMLVKVAQEAAKVGEVYQQLHAAMSQAPVKENIPYSWASLACVKAHHYAALAHYFTAILLIDHQVKPGTDLDHQEKCLSQLYDHMPEGLTPLATLKNDQQRRQLGKSHLRRAMAHHEESVREASLCKKLRSIEVLQKVLCAAQERSRLTYAQHQEEDDLLNLIDAPSVVAKTEQEVDIILPQFSKLTVTDFFQKLGPLSVFSANKRWTPPRSIRFTAEEGDLGFTLRGNAPVQVHFLDPYCSASVAGAREGDYIVSIQLVDCKWLTLSEVMKLLKSFGEDEIEMKVVSLLDSTSSMHNKSATYSVGMQKTYSMICLAIDDDDKTDKTKKISKKLSFLSWGTNKNRQKSASTLCLPSVGAARPQVKKKLPSPFSLLNSDSSWY

SEQ ID NO: 227112 - protein, 416 aa, Artificial Sequence
  derived and/or modified sequence
MSPAMLSVLVKMMLAQAQESVFEKISLPGIRNEFFMLVKVAQEAAKVGEVYQQLHAAMSQAPVKENIPYSWASLACVKAHHYAALAHYFTAILLIDHQVKPGTDLDHQEKCLSQLYDHMPEGLTPLATLKNDQQRRQLGKSHLRRAMAHHEESVREASLCKKLRSIEVLQKVLCAAQERSRLTYAQHQEEDDLLNLIDAPSVVAKTEQEVDIILPQFSKLTVTDFFQKLGPLSVFSANKRWTPPRSIRFTAEEGDLGFTLRGNAPVQVHFLDPYCSASVAGAREGDYIVSIQLVDCKWLTLSEVMKLLKSFGEDEIEMKVVSLLDSTSSMHNKSATYSVGMQKTYSMICLAIDDDDKTDKTKKISKKLSFLSWGTNKNRQKSASTLCLPSVGAARPQVKKKLPSPFSLLNSDSSWY

SEQ ID NO: 227113 - DNA, 1608 bp, Artificial Sequence
  derived and/or modified sequence
atggacctgagacaggcctgcagaacccccagcagagacgaggccggcgtggagctgctgatgacctacttcatccagctgggcttcgtggagagcagattcttcccccccaccagacagatgggcctgctgttcacctggtacgacagcctgaccggcgtgcccgtgagccagcagaacctgctgctggagaaggccagcgtgctgttcaacaccggcgccctgtacacccagatcggcaccagatgcgacagacagacccaggccggcctggagagcgccatcgacgccttccagagagccgccggcgtgctgaactacctgaaggacaccttcacccacacccccagctacgacatgagccccgccatgctgagcgtgctggtgaagatgatgctggcccaggcccaggagagcgtgttcgagaagatcagcctgcccggcatcagaaacgagttcttcatgctggtgaaggtggcccaggaggccgccaaggtgggcgaggtgtaccagcagctgcacgccgccatgagccaggcccccgtgaaggagaacatcccctacagctgggccagcctggcctgcgtgaaggcccaccactacgccgccctggcccactacttcaccgccatcctgctgatcgaccaccaggtgaagcccggcaccgacctggaccaccaggagaagtgcctgagccagctgtacgaccacatgcccgagggcctgacccccctggccaccctgaagaacgaccagcagagaagacagctgggcaagagccacctgagaagagccatggcccaccacgaggagagcgtgagagaggccagcctgtgcaagaagctgagaagcatcgaggtgctgcagaaggtgctgtgcgccgcccaggagagaagcagactgacctacgcccagcaccaggaggaggacgacctgctgaacctgatcgacgcccccagcgtggtggccaagaccgagcaggaggtggacatcatcctgccccagttcagcaagctgaccgtgaccgacttcttccagaagctgggccccctgagcgtgttcagcgccaacaagagatggaccccccccagaagcatcagattcaccgccgaggagggcgacctgggcttcaccctgagaggcaacgcccccgtgcaggtgcacttcctggacccctactgcagcgccagcgtggccggcgccagagagggcgactacatcgtgagcatccagctggtggactgcaagtggctgaccctgagcgaggtgatgaagctgctgaagagcttcggcgaggacgagatcgagatgaaggtggtgagcctgctggacagcaccagcagcatgcacaacaagagcgccacctacagcgtgggcatgcagaagacctacagcatgatctgcctggccatcgacgacgacgacaagaccgacaagaccaagaagatcagcaagaagctgagcttcctgagctggggcaccaacaagaacagacagaagagcgccagcaccctgtgcctgcccagcgtgggcgccgccagaccccaggtgaagaagaagctgcccagccccttcagcctgctgaacagcgacagcagctggtactag

SEQ ID NO: 227114 - DNA, 1251 bp, Artificial Sequence
  derived and/or modified sequence
atgagccccgccatgctgagcgtgctggtgaagatgatgctggcccaggcccaggagagcgtgttcgagaagatcagcctgcccggcatcagaaacgagttcttcatgctggtgaaggtggcccaggaggccgccaaggtgggcgaggtgtaccagcagctgcacgccgccatgagccaggcccccgtgaaggagaacatcccctacagctgggccagcctggcctgcgtgaaggcccaccactacgccgccctggcccactacttcaccgccatcctgctgatcgaccaccaggtgaagcccggcaccgacctggaccaccaggagaagtgcctgagccagctgtacgaccacatgcccgagggcctgacccccctggccaccctgaagaacgaccagcagagaagacagctgggcaagagccacctgagaagagccatggcccaccacgaggagagcgtgagagaggccagcctgtgcaagaagctgagaagcatcgaggtgctgcagaaggtgctgtgcgccgcccaggagagaagcagactgacctacgcccagcaccaggaggaggacgacctgctgaacctgatcgacgcccccagcgtggtggccaagaccgagcaggaggtggacatcatcctgccccagttcagcaagctgaccgtgaccgacttcttccagaagctgggccccctgagcgtgttcagcgccaacaagagatggaccccccccagaagcatcagattcaccgccgaggagggcgacctgggcttcaccctgagaggcaacgcccccgtgcaggtgcacttcctggacccctactgcagcgccagcgtggccggcgccagagagggcgactacatcgtgagcatccagctggtggactgcaagtggctgaccctgagcgaggtgatgaagctgctgaagagcttcggcgaggacgagatcgagatgaaggtggtgagcctgctggacagcaccagcagcatgcacaacaagagcgccacctacagcgtgggcatgcagaagacctacagcatgatctgcctggccatcgacgacgacgacaagaccgacaagaccaagaagatcagcaagaagctgagcttcctgagctggggcaccaacaagaacagacagaagagcgccagcaccctgtgcctgcccagcgtgggcgccgccagaccccaggtgaagaagaagctgcccagccccttcagcctgctgaacagcgacagcagctggtactag

SEQ ID NO: 227115 - DNA, 2061 bp, Artificial Sequence
  derived and/or modified sequence
atgaccgatgccctcctccctgccgccccccagcccctggagaaggaaaatgatgggtattttcggaaaggatgcaaccccctggcccagaccgggcggagtaaactccagaaccagagagccgcacttaaccagcagatccttaaggcagttcgcatgcgcactggagctgagaatctcctgaaggttgccacaaatagcaaggtgcgggagcaggtgcgattagagttatcctttgtaaactccgatctacagatgttgaaggaggagttggaggggttaaatattagtgtgggtgtataccagaatacagaggaggcttttacgattccattgattccactgggattaaaggagaccaaggatgtcgattttgctgtggtcctcaaggattttattctggaacactacagtgaagatggctatttatatgaagatgagatcgcagatctgatggatctaaggcaggcctgtcggacgccatctcgcgatgaggctggcgtggagctgttgatgacatatttcattcaactcggctttgttgagtccagatttttccctcctacgagacagatggggctactcttcacatggtatgactcccttaccggtgtgcctgtgagccaacagaatctgctgctggagaaggcatcagttcttttcaacactggggcactgtacacgcaaattggcaccaggtgtgaccgccagacacaggcaggcctagagtcagccattgatgcatttcagcgggctgctggcgtcctgaactacctgaaggataccttcacacacactccttcttacgatatgagcccggccatgcttagtgtgctggtcaaaatgatgcttgcccaggctcaggaatccgtcttcgagaagatctccttacctggaatccgcaacgagttcttcatgttggtgaaagtcgcccaggaggccgctaaggtcggtgaggtgtaccagcagctccatgccgcaatgtcccaggcacccgtcaaggaaaatatcccctatagctgggcgtcactcgcctgcgtcaaagctcaccactacgcagcgcttgcgcattacttcactgcaattctgctgatagaccaccaagttaaacccggcactgatttggatcaccaggaaaaatgccttagccagctctacgatcacatgccagagggactgactccgttggccacactgaagaacgaccagcagagaaggcagctcggcaagtcacatttgcgaagagctatggcacaccacgaagagtctgtgcgagaagcctcactctgtaagaagcttagatctatcgaggtccttcagaaagtgctgtgcgcagcacaagagcggtcaaggctcacatatgctcagcatcaggaggaggacgacctgcttaatctcattgacgcgccatcagtggttgcaaagacagaacaagaagttgatattatactcccccaattcagcaagttgaccgttacggacttttttcagaagctcggacctctgtcggtgtttagcgccaacaagaggtggacaccacctcgcagcatcagattcacggcagaagaaggggacttgggctttactctgcgaggaaatgctcccgtccaggttcactttctggatccctattgtagcgcctctgtcgccggtgccagagaaggagattacattgtgagcatccagctggtggactgtaaatggttaacactttccgaagtcatgaagctgctgaagtcttttggggaggacgaaatcgagatgaaagtcgtgagtctgttggatagtaccagcagcatgcataacaaaagtgccacatactccgttggtatgcagaagacctacagcatgatctgccttgctattgatgacgacgacaagacagacaaaactaaaaagattagcaagaaactaagcttcctcagttggggcacaaacaagaaccggcagaagagtgcaagtacactatgtctcccctctgtgggggccgctaggccacaggtgaagaagaagctgccttcgccattttccttactgaattctgattcaagctggtattag

SEQ ID NO: 227116 - DNA, 1608 bp, Artificial Sequence
  derived and/or modified sequence
atggatcttcggcaggcatgccgaacgcctagccgtgacgaagccggtgtagaattgctgatgacttacttcatccagctgggtttcgttgagagcagattctttccaccgaccagacagatgggattgctctttacctggtacgattcgctcaccggcgttcccgtgtcccagcagaacctacttttagagaaagcctccgttttattcaacacaggggctctttatacacagattgggacccgatgcgatagacagacacaggctggactggaaagtgccatcgacgcatttcagagagcagctggagtgttgaattaccttaaagataccttcactcacactcccagttacgacatgagccccgctatgctgtccgttcttgtcaagatgatgttggcccaggcccaagagtccgtgttcgaaaaaatttccttacctgggatacggaacgagttttttatgctcgtgaaagtcgcgcaggaggctgctaaggtcggagaggtgtaccagcagttgcatgctgcgatgtcccaggctccagttaaggagaacattccatactcgtgggcatccctggcctgtgtgaaagcccatcactatgccgccctcgcacattacttcaccgcaatcctgttaattgaccatcaggtaaagccgggaacagatctcgaccaccaggaaaaatgcctcagccagctctacgaccatatgcccgagggcctgacacctctggccacactgaagaacgaccagcagaggaggcagttgggtaaaagtcatcttaggagggcaatggcacatcacgaggaaagtgttcgggaagccagtctttgtaagaagctgcggagtattgaagtgcttcaaaaagtgttgtgtgctgcacaggagcgatcccgcttaacatatgctcagcaccaggaggaggatgacctgctcaacctcatcgatgcaccctcagttgtggcaaagaccgagcaggaggtggacatcatccttccccagtttagcaagctgaccgtcacagatttttttcagaagcttgggcctctcagtgtgttcagcgctaataaaagatggacaccacctcgctcaatacgtttcacggccgaagagggagacctgggctttacactgcgcggaaatgccccggtacaggttcactttctggacccatactgtagtgcctctgtagccggcgcgcgcgagggcgactatatcgtttccatccagttggtggattgtaagtggctgactcttagcgaagtgatgaaactgctaaagagctttggagaggacgagatcgaaatgaaagtcgtaagtctgctggactctacctcctcgatgcacaacaagagcgcgacttactcagtaggaatgcaaaagacgtacagcatgatatgtcttgcgatcgatgacgatgacaaaaccgataagacaaaaaaaattagtaagaaacttagttttctgtcttggggcactaacaagaatcggcagaaaagtgcctccactctctgtttgccaagtgtgggagccgctcggccgcaggtgaaaaaaaagctgccaagccccttctctctccttaactctgacagttcctggtattag

SEQ ID NO: 227117 - DNA, 1251 bp, Artificial Sequence
  derived and/or modified sequence
atgtctccggcaatgctgtcggtgctggtaaagatgatgctcgcccaggcccaggagtcagtgttcgagaaaatttcacttccaggaatccggaacgagttttttatgctcgtgaaggtagctcaggaagcagcaaaggtgggcgaggtctaccaacagctgcacgccgcaatgtcccaggcgccagttaaagagaacattccatattcatgggcgagtcttgcctgcgtaaaagctcatcattacgctgccttggcgcactattttactgctattctcctgatcgaccaccaggtcaaaccaggcacagacctcgatcaccaggagaagtgcctcagccagctgtatgaccatatgcccgaaggccttacacctctggcaaccctgaagaatgaccagcagagacggcagttgggaaaaagccatttgcgccgggctatggcgcaccacgaagagtcagttagggaagcatcactttgcaagaagctccgttcaattgaggtcctgcaaaaagtgctctgcgcagcacaggaacgttcccgcctcacttacgctcagcaccaggaagaagacgatctcttgaatctgatcgacgccccctctgtcgtggctaaaactgaacaggaagtggatattattttgccccagttttctaagttgacagtgactgattttttccaaaagctcggccccttatccgtcttttccgccaataaaagatggacacctccacgcagcattaggtttactgctgaggaaggagacttaggattcactctccgtggtaatgcccctgttcaggttcacttccttgatccctactgtagcgcctcagtcgctggtgcacgagaaggcgattatattgtatctatccagttggttgactgtaagtggttgactctgtccgaagtgatgaagctgctgaagtcctttggcgaagatgaaattgagatgaaggtcgtcagcctgttggactctactagctctatgcataataaatctgccacatacagtgtggggatgcagaagacttactccatgatttgcctcgccattgacgatgatgataaaactgacaagaccaaaaaaatatccaagaagctttcattcctctcatggggcaccaacaagaacaggcaaaagagcgccagtacactgtgcctccctagtgttggagcagcaagaccgcaggtgaaaaaaaagttgcctagcccattttccctccttaactcagactcctcgtggtactag

SEQ ID NO: 227118 - DNA, 2061 bp, Artificial Sequence
  derived and/or modified sequence
atgacagatgccctgctgcctgctgccccccagcccctggagaaggaaaatgatggctacttcaggaagggctgcaaccccctggcccagacaggccgcagcaagctgcagaaccagagagctgccctgaaccagcagatcctgaaggctgtgaggatgaggactggagctgagaacctgctgaaggtggccaccaacagcaaggtgcgggagcaggtgcggctggagctgagctttgtgaacagcgacctgcagatgctgaaggaggagctggagggcctgaacatctctgtgggcgtgtaccagaacacagaggaggccttcaccatccccctcatccccctgggcctgaaggagaccaaggatgtggactttgctgtggtgctgaaggacttcatcctggagcactacagtgaagatggctacctgtatgaagatgaaattgctgacctgatggacctgcggcaggcctgcaggacccccagcagagatgaggccggcgtggagctgctgatgacctacttcatccagctgggctttgtggagagccgcttcttcccccccacccggcagatgggcctgctcttcacctggtatgacagcctgactggagtgcctgtgtcccagcagaacctgctgctggagaaggcctctgtgctcttcaacacaggagccctgtacacccagatcggcacccgctgtgaccggcagacccaggccggcctggagagcgccattgatgccttccagagagctgctggggtgctgaactacctgaaggacaccttcacccacacccccagctatgacatgagccctgccatgctgtctgtgctggtgaagatgatgctggcccaggcccaggagagcgtgtttgagaagatcagcctgcccggcatcagaaatgagttcttcatgctggtgaaggtggcccaggaggccgccaaggtgggggaggtgtaccagcagctgcacgccgccatgagccaggcccctgtgaaggagaacatcccctacagctgggccagcctggcctgtgtgaaggcccaccactatgctgccctggcccactacttcaccgccatcctgctgattgaccaccaggtgaagccaggcacagacctggaccaccaggagaagtgcctgagccagctgtatgaccacatgcctgagggcctgacccccctggccaccctgaagaatgaccagcagaggcggcagctgggcaagagccacctgcggcgggccatggcccaccacgaggagagcgtgcgggaggccagcctgtgcaagaagctgcggagcattgaggtgctgcagaaggtgctgtgtgccgcccaggagaggagccggctgacctacgcccagcaccaggaggaggatgacctgctgaacctgattgatgcccccagcgtggtggccaagacagagcaggaggtggacatcatcctgccccagttcagcaagctgactgtgacagacttcttccagaagctgggccccctgtctgtgttcagcgccaacaagcgctggaccccacccaggagcatccgcttcaccgctgaggagggggacctgggcttcaccctgcggggaaatgcccctgtgcaggtgcacttcctggacccctactgcagcgcctctgtggccggggcccgggagggggactacatcgtgtccatccagctggtggactgcaagtggctgaccctgtctgaggtgatgaagctgctgaagagctttggagaagatgaaattgagatgaaggtggtgtccctgctggacagcaccagctccatgcacaacaagagcgccacctacagcgtgggcatgcagaagacctacagcatgatctgcctggccattgatgatgatgacaagacagacaagaccaagaagatcagcaagaagctgtccttcctgtcctggggcaccaacaagaaccggcagaagagcgccagcaccctgtgcctgcccagcgtgggcgccgcccggccccaggtgaagaagaagctgcccagccccttcagcctgctgaacagcgacagctcctggtactag

SEQ ID NO: 227119 - DNA, 1608 bp, Artificial Sequence
  derived and/or modified sequence
atggacctgcggcaggcctgcaggacccccagcagagatgaagctggggtggagctgctgatgacctacttcatccagctgggctttgtggagagccgcttcttcccccccacccggcagatgggcctgctcttcacctggtatgacagcctgactggagtgcctgtgtcccagcagaacctgctgctggagaaggcctctgtgctcttcaacacaggagccctgtacacccagatcggcacccgctgtgaccggcagacccaggccggcctggagagcgccattgatgccttccagagagctgctggggtgctgaactacctgaaggacaccttcacccacacccccagctatgacatgagccctgccatgctgtctgtgctggtgaagatgatgctggcccaggcccaggagagcgtgtttgagaagatcagcctgcccggcatcagaaatgagttcttcatgctggtgaaggtggcccaggaggccgccaaggtgggggaggtgtaccagcagctgcatgctgccatgagccaggcccctgtgaaggagaacatcccctacagctgggccagcctggcctgtgtgaaggcccaccactacgccgccctggcccactacttcaccgccatcctgctgattgaccaccaggtgaagccaggcacagacctggaccaccaggagaagtgcctgagccagctgtatgaccacatgcctgagggcctgacccccctggccaccctgaagaatgaccagcagaggcggcagctgggcaagagccacctgcggcgggccatggcccaccacgaggagagcgtgcgggaggccagcctgtgcaagaagctgcggagcattgaggtgctgcagaaggtgctgtgtgccgcccaggagaggagccggctgacctacgcccagcaccaggaggaggatgacctgctgaacctgattgatgcccccagcgtggtggccaagacagagcaggaggtggacatcatcctgccccagttcagcaagctgactgtgacagacttcttccagaagctgggccccctgagcgtcttcagcgccaacaagcgctggaccccacccaggagcatccgcttcaccgctgaggagggggacctgggcttcaccctgcggggaaatgcccctgtgcaggtgcacttcctggacccctactgcagcgcctctgtggccggggcccgggagggggactacatcgtgtccatccagctggtggactgcaagtggctgaccctgtctgaggtgatgaagctgctgaagagctttggagaagatgaaattgagatgaaggtggtgtccctgctggacagcaccagctccatgcacaacaagagcgccacctacagcgtgggcatgcagaagacctacagcatgatctgcctggccattgatgatgatgacaagacagacaagaccaagaagatcagcaagaagctgtccttcctgtcctggggcaccaacaagaaccggcagaagagcgccagcaccctgtgcctgcccagcgtgggcgccgcccggccccaggtgaagaagaagctgcccagccccttcagcctgctgaacagcgacagctcctggtactag

SEQ ID NO: 227120 - DNA, 1251 bp, Artificial Sequence
  derived and/or modified sequence
atgagccctgccatgctgtctgtgctggtgaagatgatgctggcccaggcccaggagagcgtgtttgagaagatcagcctgcccggcatcagaaatgagttcttcatgctggtgaaggtggcccaggaggccgccaaggtgggggaggtgtaccagcagctgcacgccgccatgagccaggcccctgtgaaggagaacatcccctacagctgggccagcctggcctgtgtgaaggcccaccactatgctgccctggcccactacttcaccgccatcctgctgattgaccaccaggtgaagccaggcacagacctggaccaccaggagaagtgcctgagccagctgtatgaccacatgcctgagggcctgacccccctggccaccctgaagaatgaccagcagaggcggcagctgggcaagagccacctgcggcgggccatggcccaccacgaggagagcgtgcgggaggccagcctgtgcaagaagctgcggagcattgaggtgctgcagaaggtgctgtgtgccgcccaggagaggagccggctgacctacgcccagcaccaggaggaggatgacctgctgaacctgattgatgcccccagcgtggtggccaagacagagcaggaggtggacatcatcctgccccagttcagcaagctgactgtgacagacttcttccagaagctgggccccctgtctgtgttcagcgccaacaagcgctggaccccacccaggagcatccgcttcaccgctgaggagggggacctgggcttcaccctgcggggaaatgcccctgtgcaggtgcacttcctggacccctactgcagcgcctctgtggccggggcccgggagggggactacatcgtgtccatccagctggtggactgcaagtggctgaccctgtctgaggtgatgaagctgctgaagagctttggagaagatgaaattgagatgaaggtggtgtccctgctggacagcaccagctccatgcacaacaagagcgccacctacagcgtgggcatgcagaagacctacagcatgatctgcctggccattgatgatgatgacaagacagacaagaccaagaagatcagcaagaagctgtccttcctgtcctggggcaccaacaagaaccggcagaagagcgccagcaccctgtgcctgcccagcgtgggcgccgcccggccccaggtgaagaagaagctgcccagccccttcagcctgctgaacagcgacagctcctggtactag

SEQ ID NO: 227121 - DNA, 2061 bp, Artificial Sequence
  derived and/or modified sequence
atgaccgacgccctgctgcccgccgccccccagcccctggagaaggagaacgacggctacttcaggaaaggatgcaaccctctggcccagactggtcggagcaagttgcagaatcaaagggcagccttgaaccaacagatcctgaaggcagtacgcatgagaaccggagcagagaacctccttaaggtggccaccaacagtaaggttcgggaacaggtgcggctggagctctcttttgtgaactccgacttacaaatgctgaaagaagagctggaaggtttaaacatatctgttggagtgtaccagaacacagaagaggcatttaccatccctctcatacccttggggttaaaggagacaaaagacgtggatttcgccgttgtgctgaaggactttattcttgagcattacagcgaagacggttacctctacgaggacgaaattgctgatttaatggacctccgtcaagcttgtcgaaccccctcaagggatgaggctggggtagaactcctaatgacgtacttcatacagcttggattcgtggagtcccgattctttccccccactcgccaaatgggcctcctgtttacatggtatgacagtctcactggggtaccggtgtcccaacagaacctgctgttagaaaaagctagtgtgctctttaatacaggtgctctgtacactcaaataggcacacgctgtgatcgccagactcaggcaggtcttgagagtgcaatcgacgcattccagagggctgccggggttcttaattatttgaaggatacattcacccacacaccgagctacgatatgagcccggcaatgctgtctgtgctcgtcaagatgatgctcgctcaggcccaggaatcagtgttcgaaaagatcagcctgcccggcatccgcaatgagttctttatgttggtgaaagtggcacaggaggctgctaaagtcggtgaagtgtaccaacagcttcatgctgctatgtcgcaggcgccagtgaaagaaaatattccctactcatgggcgagtctggcgtgcgtcaaggcgcaccattatgctgcccttgctcactattttaccgccattctcttaatcgaccaccaggtgaaaccaggaacagacttggatcatcaggagaagtgtttgagtcagctgtacgaccacatgccagaagggttaactcccctggccaccctcaaaaatgatcagcagcgacgtcagctcggaaagtcccatctccgtagggctatggcccaccacgaggaatcagtcagagaggcaagcttgtgcaaaaagctcagatccatcgaagtccttcaaaaggtgctgtgtgccgctcaggaacgtagccgcctcacatatgcccaacatcaagaagaagacgatctcctcaatcttattgacgcacccagcgtcgtggctaaaacagagcaggaggtggatatcatacttcctcagtttagcaagctcacagtgaccgacttcttccagaaactgggccccctgagcgttttcagcgccaataaacggtggactccacccagatcaatcaggtttactgcagaagagggtgacctaggcttcaccctgcgtggaaatgcgcccgtacaagtgcattttcttgacccttattgcagtgccagcgtggctggagcaagggaaggagactacattgtgtccattcagctcgtggactgcaagtggcttacgctgtccgaagtgatgaaactgctgaaatcattcggggaagatgaaatcgagatgaaagttgttagcctgctggactcaacaagcagtatgcacaacaagagcgccacttattcggtggggatgcaaaagacttacagcatgatctgcctggctattgatgacgacgataaaactgataagacaaagaagatttctaagaagctgagcttcctttcctggggcactaacaagaatcggcagaagagcgctagcacattgtgcctgcccagcgtcggagcagcacgcccacaagtaaagaagaaactgccatctcccttcagcctattgaatagcgatagctcatggtactag

SEQ ID NO: 227122 - DNA, 1608 bp, Artificial Sequence
  derived and/or modified sequence
atggacctgcggcaggcctgccggacccccagccgggacgaggccggcgtggaactcctcatgacatatttcattcagttggggtttgttgagagtaggttcttcccacccactcgccaaatgggcctgctgttcacttggtacgacagcctgacaggcgtccccgtgagccagcagaatctgcttctggagaaagcaagcgttttgttcaatactggggccctgtatacccaaattggaacccgatgtgatcgccagactcaagcaggactggagagtgccatcgatgcattccagcgggctgccggtgtgctgaactaccttaaagacaccttcacccacaccccgtcatatgatatgagtccagccatgcttagtgtcctggtgaaaatgatgctcgcccaggctcaggagtctgtgtttgagaaaattagtctcccgggaattcgcaacgagttttttatgcttgttaaagttgctcaagaagcagcaaaagttggggaagtttatcagcagctccatgctgctatgagccaagcccctgtaaaagagaatattccttacagttgggcctctctagcatgcgtgaaagcacaccattacgctgctctcgcacattatttcactgcgatccttttgatagatcaccaggtgaaaccaggtacagacctggaccatcaagaaaagtgcctcagccagttatacgaccatatgcctgagggtctcacccctctcgcaacactcaagaacgaccagcaacgaaggcagctcgggaaatctcacctccggcgggccatggcccatcatgaagaaagtgtccgggaggcaagcctttgcaagaagctaaggagcattgaggtgctgcagaaagtgctgtgcgctgcccaggaacgaagcaggctgacatatgcccagcaccaggaagaggacgatctgttgaatttgatagatgccccttctgtggtggcaaaaaccgagcaggaggtagacatcattctgcctcagttttctaaattgactgtgaccgacttctttcaaaaactggggccactgagtgtgttttctgctaacaagcgctggacaccaccacggagcataaggttcaccgccgaggaaggcgacctggggtttaccctgcgcggtaacgccccagtgcaggtccacttcttagatccctactgctccgcaagcgtggctggcgctagagaaggcgactatattgtcagcatccaacttgtggattgtaagtggctgacccttagcgaagttatgaagctgttgaaatccttcggcgaagacgagattgagatgaaggtcgtttccctgttagatagcaccagtagcatgcacaataagtccgccacttactcagtcggtatgcagaaaacgtacagcatgatatgtctagctatcgacgatgacgacaagaccgataaaacaaaaaaaatctccaagaagttgagcttcttgtcttggggcacgaataagaaccgacagaagtctgcttccaccctgtgtctgccctccgttggcgccgccaggccacaagtcaagaagaaactgccctctcctttcagccttctgaatagcgattcaagttggtattag

SEQ ID NO: 227123 - DNA, 2378 bp, Artificial Sequence
  derived and/or modified sequence
agtccgccgtccgccctccgcgcccgcgccgctagcatgaccgacgcgctgttgcccgcggccccccagccgctggagaaggagaacgacggctactttcggaagggctgtaatccccttgcacaaaccggccggagtaaattgcagaatcaaagagctgctttgaatcagcagatcctgaaagccgtgcggatgaggaccggagcggaaaaccttctgaaagtggccacaaactcaaaggtgcgggagcaagtgcggctggagctgagcttcgtcaactcagacctgcagatgctcaaggaagagctggaggggctgaacatctcggtgggcgtctatcagaacacagagattttatcctggaacattacagtgaagatggctatttatatgaagatgaaattgcagatcttatggatctgagacaagcttgtcggacgcctagccgggatgaggccggggtggaactgctgatgacatacttcatccagctgggctttgtcgagagtcgattcttcccgcccacacggcagatgggactcctgttcacctggtatgactctctcaccggggttccggtcagccagcagaacctgctgctggagaaggccagtgtcctgttcaacactggggccctctacacccagattgggacccggtgtgatcggcagacgcaggctgggctggagagtgccatagatgcctttcagagagccgcaggggttttaaattacctgaaagacacatttacccatactccaagttacgacatgagccctgccatgctcagcgtgctcgtcaaaatgatgcttgcacaagcccaagaaagcgtgtttgagaaaatcagccttcctgggatccggaatgaattcttcatgctggtgaaggtggctcaggaggctgctaaggtgggagaggtctaccaacagctacacgcagccatgagccaggcgccggtgaaagagaacatcccctactcctgggccagcttagcctgcgtgaaggcccaccactacgcggccctggcccactacttcactgccatcctcctcatcgaccaccaggtgaagccaggcacggatctggaccaccaggagaagtgcctgtcccagctctacgaccacatgccagaggggctgacacccttggccacactgaagaatgatcagcagcgccgacagctggggaagtcccacttgcgcagagccatggctcatcacgaggagtcggtgcgggaggccagcctctgcaagaagctgcggagcattgaggtgctacagaaggtgctgtgtgccgcacaggaacgctcccggctcacgtacgcccagcaccaggaggaggatgacctgctgaacctgatcgacgcccccagtgttgttgctaaaactgagcaagaggttgacattatattgccccagttctccaagctgacagtcacggacttcttccagaagctgggccccttatctgtgttttcggctaacaagcggtggacgcctcctcgaagcatccgcttcactgcagaagaaggggacttggggttcaccttgagagggaacgcccccgttcaggttcacttcctggatccttactgctctgcctcggtggcaggagcccgggaaggagattatattgtctccattcagcttgtggattgtaagtggctgacgctgagtgaggttatgaagctgctgaagagctttggcgaggacgagatcgagatgaaagtcgtgagcctcctggactccacatcatccatgcataataagagtgccacatactccgtgggaatgcagaaaacgtactccatgatctgcttagccattgatgatgacgacaaaactgataaaaccaagaaaatctccaagaagctttccttcctgagttggggcaccaacaagaacagacagaagtcagccagcaccttgtgcctcccatcggtcggggctgcacggcctcaggtcaagaagaagctgccctcccctttcagccttctcaactcagacagttcttggtactaatgtgaggaaacaaacatgttcaggccctgaacatttccggtgctgactcggccttaaacgtttgtgccataatggaaaatatctatctatctgttctcaaatcctgtttttctcatagtgtaaactcacatttgatgtgtttttatgaaggaaagtaaccaagaaacctctaggaattagtgaaaaaagaacttttttgaggtgtgttactatactgctgtaagttatttattatataaagtattgtaaatagaatagtgttgaagatatgaaatatggctatttttaatggtgacaattatgacttttagtcactattaaattggggttacctatatcagtacaatttgtagttgt

SEQ ID NO: 227124 - DNA, 1251 bp, Artificial Sequence
  derived and/or modified sequence
atgagccccgccatgctgagcgtgctggtgaagatgatgctggcccaagctcaagaatctgtcttcgagaaaatcagtctacccggaatcaggaacgagttctttatgttggtgaaggtggcacaggaggctgccaaggtcggcgaagtctatcaacaactccatgccgctatgtcccaggcccctgtgaaagagaacattccttacagctgggcctccttggcatgtgtgaaagctcaccattatgccgccctggctcactattttactgcgattctactgattgaccatcaggtaaaaccgggcacggacctggatcaccaggagaaatgcctttcgcagttgtatgatcacatgcctgaagggctgaccccacttgctaccctgaaaaacgatcaacagcgacgacagcttgggaagtctcacctaaggagagctatggcacaccatgaggaaagcgtgcgtgaggcaagcctgtgcaagaaactcagatccattgaagtcttgcagaaggtcttgtgtgcagctcaggagaggtctcgcctgacttacgcccagcatcaggaggaggacgacttgctgaatctcatcgacgcgccatccgttgtcgccaagactgagcaggaggtcgacataatcttacctcagttcagtaagctcacggtgactgatttctttcagaagttgggcccgttgtctgtgttctccgctaataagagatggacacccccacggagtattcgcttcactgctgaagagggtgaccttggatttacgctgcgcgggaacgcacctgtccaagtgcatttccttgacccctactgttctgctagcgtcgcaggagccagggaaggggattatattgtctccattcaactcgtggattgcaaatggttaacactgagtgaagttatgaagcttttgaagagcttcggggaagatgaaattgagatgaaagttgtatccctccttgactccacgagctccatgcataataagagcgccacgtacagcgtcgggatgcagaagacttattctatgatctgcctggcaatagatgatgatgataaaaccgacaagaccaagaaaataagtaagaaattatcattcttatcgtggggtaccaataagaataggcagaaatctgcgtctaccctgtgcttgccaagtgttggtgccgctcgccctcaggtcaagaaaaagctgccatcaccattctcacttttgaactccgattcttcttggtactag

SEQ ID NO: 227125 - DNA, 2061 bp, Artificial Sequence
  derived and/or modified sequence
atgaccgacgcgctgctcccggcagcacctcaacccctggaaaaggagaatgatgggtactttagaaaagggtgcaaccccttggcacagacgggacggagcaagttgcagaaccagcgcgcagctctgaaccagcagattctcaaagccgtgcgcatgagaacaggtgccgaaaacctattgaaggtggcaaccaattccaaggtcagggagcaggttaggttagaactctcttttgtgaactccgatttacaaatgctgaaagaggagcttgaagggcttaacatatctgtcggcgtgtatcagaatacggaggaggcattcacaatacctctaataccattaggcctaaaggaaaccaaagacgtggatttcgctgtcgttctgaaagacttcatactcgagcactactccgaagacggctatctctacgaggacgagatcgcagacctcatggacctgcgccaggcttgtcggaccccatcaagggacgaggctggagttgaattgctgatgacttatttcattcagctcggattcgtggagagtcggtttttcccccctactaggcagatgggattgctgtttacctggtacgattccctcactggagtgccagtgtcccagcagaatttactgctggaaaaagccagcgtcctgttcaataccggtgctctttacactcagattggcactcgctgcgatagacaaacgcaagccggactggagtctgccattgatgctttccagagggctgcgggtgttttaaattatttgaaggacacattcacgcataccccttcctatgatatgtcaccagccatgctgagcgtcctggtgaaaatgatgctggctcaggcccaagaatcagtctttgaaaagatatccctgccagggatcagaaacgagttctttatgctggtaaaggtcgctcaagaggccgcaaaggtgggcgaggtttaccagcagctccatgctgccatgagccaggccccagtcaaagaaaatattccttattcatgggccagcctcgcttgtgtgaaagcgcaccactatgccgcacttgctcattactttactgcaattttgcttatcgaccaccaggtgaagcctggaaccgacctcgaccatcaggagaaatgcctgtcccagttatacgatcacatgcccgaggggctgaccccgctcgccactctgaagaacgaccagcaacgtcggcagctgggcaaatctcacctgcgccgagccatggctcaccacgaagagtctgtgagagaggccagcctctgcaaaaagctgcgctccattgaagtgctgcagaaagtgctttgtgcggctcaggagcgcagcaggctaacgtacgcacagcatcaagaggaggatgacttgttaaacctgatagacgccccatccgtggttgcaaagacagagcaggaggtggacataatcctgcctcaattttcgaagcttaccgtgacggacttctttcagaagctcggcccattatcagtgtttagtgcaaacaagagatggacacctcctagaagcattaggttcaccgccgaggagggtgatctcggttttactcttcgcggtaacgcacccgtacaggtccactttctcgacccatactgttccgctagtgtggctggagccagagaaggggattacatagtcagcatacagttagttgattgcaagtggctgactctttccgaggtaatgaagctgttgaagtcttttggcgaggatgaaattgagatgaaagtcgttagccttctggactccacatcgtctatgcataacaaatcagcaacgtactcagtgggtatgcagaagacatactccatgatctgtctggccatcgatgatgacgataagaccgacaagacaaagaagattagcaagaagttgtcgttcctcagctggggtaccaataaaaacaggcagaagtctgcttccacactgtgcttgcccagcgtgggcgcagcgagacctcaagtcaagaaaaagctgccttcccctttttctctccttaattcagattctagttggtactag

SEQ ID NO: 227126 - DNA, 1608 bp, Artificial Sequence
  derived and/or modified sequence
atggatctgagacaggcatgcaggacgccttctagagacgaagctggcgttgaactcctgatgacttactttatccagctcggctttgtggagtctaggttcttccccccaaccagacagatgggcttgcttttcacatggtacgacagtctcactggcgttcccgtctctcagcaaaacctattactcgagaaggcatccgtcctgttcaacaccggcgctctgtacacacagataggcacaaggtgtgacaggcaaacgcaggcagggctcgagagcgcaatcgacgccttccagcgggcagccggtgtgctgaattatctgaaggatacctttacccataccccgtcctacgacatgtcccccgctatgctgtctgtgcttgtgaaaatgatgctcgctcaggctcaagaatcagtcttcgaaaaaatctccctccccggaatccgcaacgagttctttatgttggttaaggttgcccaggaggccgctaaagtcggggaagtctaccagcagctgcacgctgctatgagccaggcacctgtgaaagagaacataccttacagttgggcgagcctggcttgcgtaaaagcccaccactatgccgctctcgctcactatttcaccgctattctcctaatagatcaccaggtcaaacctggcaccgatctggaccaccaggaaaagtgcctctctcaactttatgaccacatgccagaagggctcacgcctctcgcgaccctgaagaatgatcagcagcggagacagctagggaagtctcacctgagacgcgcaatggcgcaccacgaggaatcggtgagggaggcctctctgtgcaagaagctgagatcaattgaagttcttcagaaagtgttgtgtgccgcacaggaacgttctcgtctcacttatgcccagcatcaggaggaagacgacctactgaatcttattgacgctccgtcagtagtggctaagactgaacaggaggtagatatcatcctaccacagttcagtaagctgaccgtcacagacttcttccagaagctggggcctttatccgtctttagcgctaataaacggtggacaccaccacgatcgattcgctttaccgccgaagaaggggacttggggtttacactgcgtggaaacgcccctgtacaggttcacttcctcgatccatattgctccgctagcgttgcaggggcacgggaaggggattatatcgtgtccattcaactggtggactgtaaatggctaaccctctcagaggtcatgaagctcctgaaatcgttcggcgaggacgagattgaaatgaaagtcgtcagtctgctggactcgactagttccatgcacaataaatccgcgacttatagcgtgggaatgcagaagacgtacagtatgatctgtcttgccatcgacgacgatgacaagaccgataagacgaaaaaaattagtaaaaaattatcattcctgtcgtggggcacaaacaagaatcggcagaagtctgcttctacattatgcctcccgtcggttggagctgcgcgacctcaagttaagaagaaactccccagccccttcagcctcctgaatagcgattccagttggtactag

SEQ ID NO: 227127 - DNA, 1251 bp, Artificial Sequence
  derived and/or modified sequence
atgtctcccgctatgttgtccgtgttggtgaaaatgatgctggcccaagctcaggagtccgtattcgagaagattagccttcccggtatcaggaacgaattctttatgctggtcaaagtggctcaggaggctgctaaggtgggcgaggtttatcagcagctccatgccgctatgtcccaggcacctgtgaaggagaacataccttatagttgggcttccctggcttgcgttaaggcacatcactacgctgccctcgcgcattacttcactgctatactgctaatcgaccatcaggtgaagccaggaaccgaccttgatcatcaagagaagtgtctgtcgcagctgtacgatcacatgccagagggcctgacccccttagccaccttaaagaatgatcagcagagacgccagctgggaaagagccacctgcgtagagccatggcccaccacgaggagtctgtacgggaggctagcctctgtaaaaagttacggtcaatagaagtactgcagaaggtcctgtgcgctgctcaggagagatccaggctgacgtatgcccaacatcaggaggaagacgatttactaaatctgatcgatgcccctagcgtcgtggctaaaacagagcaggaggtggacatcatcctcccccaattctcgaaattgactgtcaccgatttcttccagaagctaggaccactgtctgtgttctctgctaataagaggtggacaccacctaggagcattagattcacagcagaggagggagacctgggatttaccttacggggtaacgcgcctgtgcaggtccactttctagatccatactgtagtgcttctgtcgccggtgcaagagaaggggattatatcgtttctatccagctggtagactgcaaatggctcaccctgtctgaagtgatgaaactgctgaagtccttcggtgaggacgaaattgagatgaaagtggttagtctccttgacagcacaagttccatgcataataaatccgctacttactccgtgggtatgcagaagacctattcaatgatttgccttgcaatcgatgatgatgacaaaacagataagaccaaaaaaatcagcaagaagctatcctttttgtcttggggcaccaataaaaaccggcaaaagtccgcaagcactctgtgcctgcccagtgtgggggcagcaagacctcaagttaagaaaaagttgccctctccatttagtctccttaattcggactcaagctggtactag

SEQ ID NO: 227128 - DNA, 3530 bp, Artificial Sequence
  derived and/or modified sequence
ctctcgggccagcctcagccgccgcgcctcagtccgccgtccgccctccgcgcccgcgccgctagcatgaccgacgcgctgttgcccgcggccccccagccgctggagaaggagaacgacggctactttcggaagggctgtaatccccttgcacaaaccggccggagtaaattgcagaatcaaagagctgctttgaatcagcagatcctgaaagccgtgcggatgaggaccggagcggaaaaccttctgaaagtggccacaaactcaaaggtgcgggagcaagtgcggctggagctgagcttcgtcaactcagacctgcagatgctcaaggaagagctggaggggctgaacatctcggtgggcgtctatcagaacacagaggaggcatttacgattcccctgattcctcttggcctgaaggaaacgaaagacgtcgactttgcagtcgtcctcaaggattttatcctggaacattacagtgaagatggctatttatatgaagatgaaattgcagatcttatggatctgagacaagcttgtcggacgcctagccgggatgaggccggggtggaactgctgatgacatacttcatccagctgggctttgtcgagagtcgattcttcccgcccacacggcagatgggactcctgttcacctggtatgactctctcaccggggttccggtcagccagcagaacctgctgctggagaaggccagtgtcctgttcaacactggggccctctacacccagattgggacccggtgtgatcggcagacgcaggctgggctggagagtgccatagatgcctttcagagagccgcaggggttttaaattacctgaaagacacatttacccatactccaagttacgacatgagccctgccatgctcagcgtgctcgtcaaaatgatgcttgcacaagcccaagaaagcgtgtttgagaaaatcagccttcctgggatccggaatgaattcttcatgctggtgaaggtggctcaggaggctgctaaggtgggagaggtctaccaacagctacacgcagccatgagccaggcgccggtgaaagagaacatcccctactcctgggccagcttagcctgcgtgaaggcccaccactacgcggccctggcccactacttcactgccatcctcctcatcgaccaccaggtgaagccaggcacggatctggaccaccaggagaagtgcctgtcccagctctacgaccacatgccagaggggctgacacccttggccacactgaagaatgatcagcagcgccgacagctggggaagtcccacttgcgcagagccatggctcatcacgaggagtcggtgcgggaggccagcctctgcaagaagctgcggagcattgaggtgctacagaaggtgctgtgtgccgcacaggaacgctcccggctcacgtacgcccagcaccaggaggaggatgacctgctgaacctgatcgacgcccccagtgttgttgctaaaactgagcaagaggttgacattatattgccccagttctccaagctgacagtcacggacttcttccagaagctgggccccttatctgtgttttcggctaacaagcggtggacgcctcctcgaagcatccgcttcactgcagaagaaggggacttggggttcaccttgagagggaacgcccccgttcaggttcacttcctggatccttactgctctgcctcggtggcaggagcccgggaaggagattatattgtctccattcagcttgtggattgtaagtggctgacgctgagtgaggttatgaagctgctgaagagctttggcgaggacgagatcgagatgaaagtcgtgagcctcctggactccacatcatccatgcataataagagtgccacatactccgtgggaatgcagaaaacgtactccatgatctgcttagccattgatgatgacgacaaaactgataaaaccaagaaaatctccaagaagctttccttcctgagttggggcaccaacaagaacagacagaagtcagccagcaccttgtgcctcccatcggtcggggctgcacggcctcaggtcaagaagaagctgccctcccctttcagccttctcaactcagacagttcttggtactaatgtgaggaaacaaacatgttcaggccctgaacatttccggtgctgactcggccttaaacgtttgtgccataatggaaaatatctatctatctgttctcaaatcctgtttttctcatagtgtaaactcacatttgatgtgtttttatgaaggaaagtaaccaagaaacctctaggaattagtgaaaaaagaacttttttgaggtgtgttactatactgctgtaagttatttattatataaagtattgtaaatagaatagtgttgaagatatgaaatatggctatttttaatggtgacaattatgacttttagtcactattaaattggggttacctatatcagtacaatttgtagttgtttccaggtttggctaataatcattccttaacctagaattcagatgatcctggaattaaggcaggtcagaggactgtaatgatagaattaaattagtgtcactaaaaactgtcccaaagtgctgcttcctaataggaattcattaacctaaaacaagatgttactattatatcgatagactatgaatgctatttctagaaaaagtctagtgccaaatttgtcttattaaataaaaacaatgtaggagcagcttttcttctagtttgatgtcatttaagaattactaacacagtggcagtgttagatgaagatgctgtctacaaggtagataatatactgtttgatactcaaaacatttttcattttgtttaaagtagaagttacataattctatattttaagtcttgggtaaaaaagtagttttacattttataaagtaaagatgtaaatgattcaggtttaaagctctatttgacttcctttttttgtttgagatagcgtcttgctgtgttgcccaggctggagtgcagtggtgtgatctcagctcagtgcaacctccgccccctgggatcaagcgattctcctacctcagcctcccaaatagctgggactacaaggtgccctccagcatgcctggctgatttttgtatttttagttgaggtgaggtttcaccatgttggccaggcgggtttcgaaatcctgacctcaaatgatccacccacctcagcctcccaaagtgctgggattacaggcatgagccaccacaaccgtcccactattttactttttaaaatgacattcctactgattgatttttatcttgctataagttcgatgacaccgtgaatctaataaggttcactgttgacacagtacaagttacatagctaaaatacatagcattgaagactaattttaaggattgacaagagtttattttctattgtgcaatatcttaaaggaagcaaccacctttgggaaagtgtatctgctgctcctagggccatgcttgtatacatatttaaataaacatattcatttacccg

SEQ ID NO: 227129 - DNA, 3770 bp, Artificial Sequence
  derived and/or modified sequence
gagagggagccttgctctgttgtccaggctggagtgcagtggcataatctcagctcactgcaacccctatctcccaggttcaagcctcagccttctgcatagctgggactacaggcatgcaccaccacacccagctagtttttgtattttttagtagagacagagtttcactatatgttggccaggctggtctcgaactcctgacctcagctgatccacctgcctcggcctcccagagtgctgggattacagacgtaagccaccatgcccggctggaatcattcatttcttttcaagtgggtatcttatggtattttagggcatggctgggagcagttttgttttctcttctcaagactgagtgtttgcaggatgtcatagagttcatgtctgcagctcacagtgtcattgcctgtgtccccagctccacgtactggcaggtgtgctgcaagctgggtaggtgccctgtgtccctgggataccttaaccgacactcctggccctcctctgcaagctgtgccctgatcctccctgcagggactggggattgggtctgctcacctagaagccaggatacctggctgagggcacttctctccctcttctctttgaacagagtggccacaaactcaaaggtgcgggagcaagtgcggctggagctgagcttcgtcaactcagacctgcagatgctcaaggaagagctggaggggctgaacatctcggtgggcgtctatcagaacacagaggaggcatttacgattcccctgattcctcttggcctgaaggaaacgaaagacgtcgactttgcagtcgtcctcaaggattttatcctggaacattacagtgaagatggctatttatatgaagatgaaattgcagatcttatggatctgagacaagtatgactctctcaccggggttccggtcagccagcagaacctgctgctggagaaggccagtgtcctgttcaacactggggccctctacacccagattgggacccggtgtgatcggcagacgcaggctgggctggagagtgccatagatgcctttcagagagccgcaggggttttaaattacctgaaagacacatttacccatactccaagttacgacatgagccctgccatgctcagcgtgctcgtcaaaatgatgcttgcacaagcccaagaaagcgtgtttgagaaaatcagccttcctgggatccggaatgaattcttcatgctggtgaaggtggctcaggaggctgctaaggtgggagaggtctaccaacagctacacgcagccatgagccaggcgccggtgaaagagaacatcccctactcctgggccagcttagcctgcgtgaaggcccaccactacgcggccctggcccactacttcactgccatcctcctcatcgaccaccaggtgaagccaggcacggatctggaccaccaggagaagtgcctgtcccagctctacgaccacatgccagaggggctgacacccttggccacactgaagaatgatcagcagcgccgacagctggggaagtcccacttgcgcagagccatggctcatcacgaggagtcggtgcgggaggccagcctctgcaagaagctgcggagcattgaggtgctacagaaggtgctgtgtgccgcacaggaacgctcccggctcacgtacgcccagcaccaggaggaggatgacctgctgaacctgatcgacgcccccagtgttgttgctaaaactgagcaagaggttgacattatattgccccagttctccaagctgacagtcacggacttcttccagaagctgggccccttatctgtgttttcggctaacaagcggtggacgcctcctcgaagcatccgcttcactgcagaagaaggggacttggggttcaccttgagagggaacgcccccgttcaggttcacttcctggatccttactgctctgcctcggtggcaggagcccgggaaggagattatattgtctccattcagcttgtggattgtaagtggctgacgctgagtgaggttatgaagctgctgaagagctttggcgaggacgagatcgagatgaaagtcgtgagcctcctggactccacatcatccatgcataataagagtgccacatactccgtgggaatgcagaaaacgtactccatgatctgcttagccattgatgatgacgacaaaactgataaaaccaagaaaatctccaagaagctttccttcctgagttggggcaccaacaagaacagacagaagtcagccagcaccttgtgcctcccatcggtcggggctgcacggcctcaggtcaagaagaagctgccctcccctttcagccttctcaactcagacagttcttggtactaatgtgaggaaacaaacatgttcaggccctgaacatttccggtgctgactcggccttaaacgtttgtgccataatggaaaatatctatctatctgttctcaaatcctgtttttctcatagtgtaaactcacatttgatgtgtttttatgaaggaaagtaaccaagaaacctctaggaattagtgaaaaaagaacttttttgaggtgtgttactatactgctgtaagttatttattatataaagtattgtaaatagaatagtgttgaagatatgaaatatggctatttttaatggtgacaattatgacttttagtcactattaaattggggttacctatatcagtacaatttgtagttgtttccaggtttggctaataatcattccttaacctagaattcagatgatcctggaattaaggcaggtcagaggactgtaatgatagaattaaattagtgtcactaaaaactgtcccaaagtgctgcttcctaataggaattcattaacctaaaacaagatgttactattatatcgatagactatgaatgctatttctagaaaaagtctagtgccaaatttgtcttattaaataaaaacaatgtaggagcagcttttcttctagtttgatgtcatttaagaattactaacacagtggcagtgttagatgaagatgctgtctacaaggtagataatatactgtttgatactcaaaacatttttcattttgtttaaagtagaagttacataattctatattttaagtcttgggtaaaaaagtagttttacattttataaagtaaagatgtaaatgattcaggtttaaagctctatttgacttcctttttttgtttgagatagcgtcttgctgtgttgcccaggctggagtgcagtggtgtgatctcagctcagtgcaacctccgccccctgggatcaagcgattctcctacctcagcctcccaaatagctgggactacaaggtgccctccagcatgcctggctgatttttgtatttttagttgaggtgaggtttcaccatgttggccaggcgggtttcgaaatcctgacctcaaatgatccacccacctcagcctcccaaagtgctgggattacaggcatgagccaccacaaccgtcccactattttactttttaaaatgacattcctactgattgatttttatcttgctataagttcgatgacaccgtgaatctaataaggttcactgttgacacagtacaagttacatagctaaaatacatagcattgaagactaattttaaggattgacaagagtttattttctattgtgcaatatcttaaaggaagcaaccacctttgggaaagtgtatctgctgctcctagggccatgcttgtatacatatttaaataaacatattcatttacccg

SEQ ID NO: 227130 - DNA, 2061 bp, Artificial Sequence
  derived and/or modified sequence
atgaccgacgccctgctgcccgccgccccccagcccctggagaaggagaacgacggctacttcagaaagggctgcaaccccctggcccagaccggcagaagcaagctgcagaaccagagagccgccctgaaccagcagatcctgaaggccgtgagaatgagaaccggcgccgagaacctgctgaaggtggccaccaacagcaaggtgagagagcaggtgagactggagctgagcttcgtgaacagcgacctgcagatgctgaaggaggagctggagggcctgaacatcagcgtgggcgtgtaccagaacaccgaggaggccttcaccatccccctgatccccctgggcctgaaggagaccaaggacgtggacttcgccgtggtgctgaaggacttcatcctggagcactacagcgaggacggctacctgtacgaggacgagatcgccgacctgatggacctgagacaggcctgcagaacccccagcagagacgaggccggcgtggagctgctgatgacctacttcatccagctgggcttcgtggagagcagattcttcccccccaccagacagatgggcctgctgttcacctggtacgacagcctgaccggcgtgcccgtgagccagcagaacctgctgctggagaaggccagcgtgctgttcaacaccggcgccctgtacacccagatcggcaccagatgcgacagacagacccaggccggcctggagagcgccatcgacgccttccagagagccgccggcgtgctgaactacctgaaggacaccttcacccacacccccagctacgacatgagccccgccatgctgagcgtgctggtgaagatgatgctggcccaggcccaggagagcgtgttcgagaagatcagcctgcccggcatcagaaacgagttcttcatgctggtgaaggtggcccaggaggccgccaaggtgggcgaggtgtaccagcagctgcacgccgccatgagccaggcccccgtgaaggagaacatcccctacagctgggccagcctggcctgcgtgaaggcccaccactacgccgccctggcccactacttcaccgccatcctgctgatcgaccaccaggtgaagcccggcaccgacctggaccaccaggagaagtgcctgagccagctgtacgaccacatgcccgagggcctgacccccctggccaccctgaagaacgaccagcagagaagacagctgggcaagagccacctgagaagagccatggcccaccacgaggagagcgtgagagaggccagcctgtgcaagaagctgagaagcatcgaggtgctgcagaaggtgctgtgcgccgcccaggagagaagcagactgacctacgcccagcaccaggaggaggacgacctgctgaacctgatcgacgcccccagcgtggtggccaagaccgagcaggaggtggacatcatcctgccccagttcagcaagctgaccgtgaccgacttcttccagaagctgggccccctgagcgtgttcagcgccaacaagagatggaccccccccagaagcatcagattcaccgccgaggagggcgacctgggcttcaccctgagaggcaacgcccccgtgcaggtgcacttcctggacccctactgcagcgccagcgtggccggcgccagagagggcgactacatcgtgagcatccagctggtggactgcaagtggctgaccctgagcgaggtgatgaagctgctgaagagcttcggcgaggacgagatcgagatgaaggtggtgagcctgctggacagcaccagcagcatgcacaacaagagcgccacctacagcgtgggcatgcagaagacctacagcatgatctgcctggccatcgacgacgacgacaagaccgacaagaccaagaagatcagcaagaagctgagcttcctgagctggggcaccaacaagaacagacagaagagcgccagcaccctgtgcctgcccagcgtgggcgccgccagaccccaggtgaagaagaagctgcccagccccttcagcctgctgaacagcgacagcagctggtactag

SEQ ID NO: 227131 - protein, 116 aa, Artificial Sequence
  derived and/or modified sequence
MAPPSVPLVLLLVLLLSLAETPASAPAHRGRGGWTLNSAGYLLGPVLHLPQMGDQDGKRETALEILDLWKAIDGLPYSHPPQPSKRNVMETFAKPEIGDLGMLSMKIPKEEDVLKS

SEQ ID NO: 227132 - DNA, 351 bp, Artificial Sequence
  derived and/or modified sequence
atggcccctccaagcgtaccactggtacttttactagtattgctgctcagcttggctgagacccctgcttcagcaccagctcacaggggtagaggcggttggacccttaattcagccggttacctactgggccctgtgctgcacctcccacagatgggggaccaggatgggaagcgtgagaccgctctagaaatcctggatctctggaaagcaatcgatgggctgccatactctcatcccccacaaccctctaagcgcaatgtgatggagactttcgctaagccagagataggagatctgggaatgctaagtatgaaaatcccgaaagaggaggacgtcctcaagtcctag

SEQ ID NO: 227133 - DNA, 351 bp, Artificial Sequence
  derived and/or modified sequence
atggcccctcctagtgtgccacttgtgctcctgcttgtcctgctgctcagtctggccgaaactccagccagcgcacccgcccaccgaggccgcggcggttggacgctcaattctgcgggctatttactaggcccagtactacacctgccgcagatgggtgatcaagacgggaaaagagagaccgcacttgaaattctggacctctggaaggcaattgacggtctgccatactcgcacccaccccaacccagtaagagaaacgtgatggagacatttgctaagcctgagatcggagatcttgggatgctgtccatgaagataccaaaggaggaagacgtattaaaatcctag

SEQ ID NO: 227134 - DNA, 889 bp, Artificial Sequence
  derived and/or modified sequence
gaggagccagagagagctgcggagagctgccagctgcagcgggcgtgttccgcagctgtaggcacctgtcgtcctgccttcgatggctcctccctccgtccccctggtcctcctcctcgtcctcttgctgagcctggcagagactccagcatccgcacctgcccaccggtcctccaccttccccaaatgggtgaccaagacggaaagagggagacagcccttgagatcctagacctgtggaaggccatcgacgggctcccctactcccaccctccacagccctccaagaggaatgtgatggagacgtttgccaaaccagagattggagatctgggcatgctcagcatgaaaattcccaaggaggaagatgtcctgaagtcatagatgtcttcaaatccctgttcctatccttcttctccagctcctcctgctccctctgaaaccttttctaggtaccctatgctgagactaagatcctgaagttaaatacccaggtctcatgaagacattgtaaagcatttgaattattctaaaaaatttctggagtttcttaggttttattgattcatccttgaaatcagtataatgtgctattaatggaaccaatagtaattcgaggactagttgggagattctggggtaatcagggaatattcctgcaacacatttaaaggaattgtgttcttttggaatcatcccaattataacacgagctattgcataatacaaataaccctcttaagtctgagagtctgtgtctttatttgaaaagattcttcaaattgcgtacttactcctccatattctttcaacccacatgagtctcctcgagaagtgaggagaggcagtttggagcagaatggagagaataaaatgtttcttgtcaaac

SEQ ID NO: 227135 - DNA, 351 bp, Artificial Sequence
  derived and/or modified sequence
atggcccctccttctgtacccctcgtcctcctcctcgtcctcctgctcagtctggcagagactccagccagcgcccccgctcatcgaggcagagggggctggacgttaaattccgccggctatctactgggacctgtcttacacttgccacaaatgggggaccaggatgggaagagagaaacagccctcgagattctcgacctgtggaaggccattgatgggctcccttactcgcacccaccacaaccctctaagcgcaacgtcatggaaacctttgccaagcccgaaataggcgacctggggatgctctccatgaagatacctaaagaagaagacgttttgaagtcctag

SEQ ID NO: 227136 - DNA, 351 bp, Artificial Sequence
  derived and/or modified sequence
atggccccccccagcgtgcccctggtgctgctgctggtgctgctgctgagcctggccgagacccccgccagcgcccccgcccacagaggcagaggcggctggaccctgaacagcgccggctacctgctgggccccgtgctgcacctgccccagatgggcgaccaggacggcaagagagagaccgccctggagatcctggacctgtggaaggccatcgacggcctgccctacagccaccccccccagcccagcaagagaaacgtgatggagaccttcgccaagcccgagatcggcgacctgggcatgctgagcatgaagatccccaaggaggaggacgtgctgaagagctag

SEQ ID NO: 227137 - DNA, 351 bp, Artificial Sequence
  derived and/or modified sequence
atggcacctcctagcgttccactggtgctcttgctcgtgttactcctctccctagccgaaacccccgcaagcgctccagcacatcggggccgtgggggatggaccctgaattctgcagggtacctcctcgggcctgttctccatcttccccagatgggtgatcaggacggcaagagggagacagcattagagattctcgatctatggaaagctatcgatggacttccatattcgcacccacctcaacctagcaaacgtaacgtcatggaaacctttgctaaacccgagatcggtgatctgggtatgctgtcaatgaaaatccctaaggaggaagacgtactcaaatcttag

SEQ ID NO: 227138 - DNA, 938 bp, Artificial Sequence
  derived and/or modified sequence
gaggagccagagagagctgcggagagctgccagctgcagcgggcgtgttccgcagctgtaggcacctgtcgtcctgccttcgatggctcctccctccgtccccctggtcctcctcctcgtcctcttgctgagcctggcagagactccagcatccgcacctgcccaccggggacgaggaggctggaccctcaatagtgctggctaccttctgggtcccgtcctccaccttccccaaatgggtgaccaagacggaaagagggagacagcccttgagatcctagacctgtggaaggccatcgacgggctcccctactcccaccctccacagccctccaagaggaatgtgatggagacgtttgccaaaccagagattggagatctgggcatgctcagcatgaaaattcccaaggaggaagatgtcctgaagtcatagatgtcttcaaatccctgttcctatccttcttctccagctcctcctgctccctctgaaaccttttctaggtaccctatgctgagactaagatcctgaagttaaatacccaggtctcatgaagacattgtaaagcatttgaattattctaaaaaatttctggagtttcttaggttttattgattcatccttgaaatcagtataatgtgctattaatggaaccaatagtaattcgaggactagttgggagattctggggtaatcagggaatattcctgcaacacatttaaaggaattgtgttcttttggaatcatcccaattataacacgagctattgcataatacaaataaccctcttaagtctgagagtctgtgtctttatttgaaaagattcttcaaattgcgtacttactcctccatattctttcaacccacatgagtctcctcgagaagtgaggagaggcagtttggagcagaatggagagaataaaatgtttcttgtcaaac

SEQ ID NO: 227139 - DNA, 351 bp, Artificial Sequence
  derived and/or modified sequence
atggcccctccttctgtgcccctggtgctgctgctggtgctgctgctgagcctggccgagaccccagccagcgccccagcccaccggggccggggcggctggaccctgaacagcgctggctacctgctgggccctgtgctgcacctgccccagatgggagaccaggacggcaagcgggagacagccctggagatcctggacctgtggaaggccattgatggcctgccctacagccaccccccccagcccagcaagagaaatgtgatggagacctttgccaagccagaaattggagacctgggcatgctgtccatgaagatccccaaggaggaggatgtgctgaagagctag

SEQ ID NO: 227140 - DNA, 351 bp, Artificial Sequence
  derived and/or modified sequence
atggccccccccagcgtgcccctggtgctgctgctggtgctgctgctgagcctggccgaaacacccgcatctgcccccgcacatcggggacgtgggggctggacccttaatagcgctgggtatctgctgggcccagttcttcatttgccgcagatgggggatcaggatggtaaaagagaaaccgctctggaaatcctggatctttggaaggccatcgacggtttgccgtattcacatccaccccagccctcaaaaagaaatgtgatggaaacatttgccaagcccgaaatcggagatctggggatgctcagtatgaagatcccaaaagaggaagacgttctcaagtcatag

SEQ ID NO: 227141 - RNA, 351 nt, Artificial Sequence
  derived and/or modified sequence
auggccccuccuagugugccacuugugcuccugcuuguccugcugcucagucuggccgaaacuccagccagcgcacccgcccaccgaggccgcggcgguuggacgcucaauucugcgggcuauuuacuaggcccaguacuacaccugccgcagaugggugaucaagacgggaaaagagagaccgcacuugaaauucuggaccucuggaaggcaauugacggucugccauacucgcacccaccccaacccaguaagagaaacgugauggagacauuugcuaagccugagaucggagaucuugggaugcuguccaugaagauaccaaaggaggaagacguauuaaaauccuag

SEQ ID NO: 227142 - RNA, 351 nt, Artificial Sequence
  derived and/or modified sequence
auggccccuccuucuguaccccucguccuccuccucguccuccugcucagucuggcagagacuccagccagcgcccccgcucaucgaggcagagggggcuggacguuaaauuccgccggcuaucuacugggaccugucuuacacuugccacaaaugggggaccaggaugggaagagagaaacagcccucgagauucucgaccuguggaaggccauugaugggcucccuuacucgcacccaccacaacccucuaagcgcaacgucauggaaaccuuugccaagcccgaaauaggcgaccuggggaugcucuccaugaagauaccuaaagaagaagacguuuugaaguccuag

SEQ ID NO: 227143 - protein, 783 aa, Artificial Sequence
  derived and/or modified sequence
MAACRYCCSCLRLRPLSDGPFLLPRRDRALTQLQVRALWSSAGSRAVAVDLGNRKLEISSGKLARFADGSAVVQSGDTAVMVTAVSKTKPSPSQFMPLVVDYRQKAAAAGRIPTNYLRREIGTSDKEILTSRIIDRSIRPLFPAGYFYDTQVLCNLLAVDGVNEPDVLAINGASVALSLSDIPWNGPVGAVRIGIIDGEYVVNPTRKEMSSSTLNLVVAGAPKSQIVMLEASAENILQQDFCHAIKVGVKYTQQIIQGIQQLVKETGVTKRTPQKLFTPSPEIVKYTHKLAMERLYAVFTDYEHDKVSRDEAVNKIRLDTEEQLKEKFPEADPYEIIESFNVVAKEVFRSIVLNEYKRCDGRDLTSLRNVSCEVDMFKTLHGSALFQRGQTQVLCTVTFDSLESGIKSDQVITAINGIKDKNFMLHYEFPPYATNEIGKVTGLNRRELGHGALAEKALYPVIPRDFPFTIRVTSEVLESNGSSSMASACGGSLALMDSGVPISSAVAGVAIGLVTKTDPEKGEIEDYRLLTDILGIEDYNGDMDFKIAGTNKGITALQADIKLPGIPIKIVMEAIQQASVAKKEILQIMNKTISKPRASRKENGPVVETVQVPLSKRAKFVGPGGYNLKKLQAETGVTISQVDEETFSVFAPTPSAMHEARDFITEICKDDQEQQLEFGAVYTATITEIRDTGVMVKLYPNMTAVLLHNTQLDQRKIKHPTALGLEVGQEIQVKYFGRDPADGRMRLSRKVLQSPATTVVRTLNDRSSIVMGEPISQSSSNSQ

SEQ ID NO: 227144 - DNA, 2352 bp, Artificial Sequence
  derived and/or modified sequence
atggccgcctgcagatactgctgcagctgcctgagactgagacccctgagcgacggccccttcctgctgcccagaagagacagagccctgacccagctgcaggtgagagccctgtggagcagcgccggcagcagagccgtggccgtggacctgggcaacagaaagctggagatcagcagcggcaagctggccagattcgccgacggcagcgccgtggtgcagagcggcgacaccgccgtgatggtgaccgccgtgagcaagaccaagcccagccccagccagttcatgcccctggtggtggactacagacagaaggccgccgccgccggcagaatccccaccaactacctgagaagagagatcggcaccagcgacaaggagatcctgaccagcagaatcatcgacagaagcatcagacccctgttccccgccggctacttctacgacacccaggtgctgtgcaacctgctggccgtggacggcgtgaacgagcccgacgtgctggccatcaacggcgccagcgtggccctgagcctgagcgacatcccctggaacggccccgtgggcgccgtgagaatcggcatcatcgacggcgagtacgtggtgaaccccaccagaaaggagatgagcagcagcaccctgaacctggtggtggccggcgcccccaagagccagatcgtgatgctggaggccagcgccgagaacatcctgcagcaggacttctgccacgccatcaaggtgggcgtgaagtacacccagcagatcatccagggcatccagcagctggtgaaggagaccggcgtgaccaagagaaccccccagaagctgttcacccccagccccgagatcgtgaagtacacccacaagctggccatggagagactgtacgccgtgttcaccgactacgagcacgacaaggtgagcagagacgaggccgtgaacaagatcagactggacaccgaggagcagctgaaggagaagttccccgaggccgacccctacgagatcatcgagagcttcaacgtggtggccaaggaggtgttcagaagcatcgtgctgaacgagtacaagagatgcgacggcagagacctgaccagcctgagaaacgtgagctgcgaggtggacatgttcaagaccctgcacggcagcgccctgttccagagaggccagacccaggtgctgtgcaccgtgaccttcgacagcctggagagcggcatcaagagcgaccaggtgatcaccgccatcaacggcatcaaggacaagaacttcatgctgcactacgagttccccccctacgccaccaacgagatcggcaaggtgaccggcctgaacagaagagagctgggccacggcgccctggccgagaaggccctgtaccccgtgatccccagagacttccccttcaccatcagagtgaccagcgaggtgctggagagcaacggcagcagcagcatggccagcgcctgcggcggcagcctggccctgatggacagcggcgtgcccatcagcagcgccgtggccggcgtggccatcggcctggtgaccaagaccgaccccgagaagggcgagatcgaggactacagactgctgaccgacatcctgggcatcgaggactacaacggcgacatggacttcaagatcgccggcaccaacaagggcatcaccgccctgcaggccgacatcaagctgcccggcatccccatcaagatcgtgatggaggccatccagcaggccagcgtggccaagaaggagatcctgcagatcatgaacaagaccatcagcaagcccagagccagcagaaaggagaacggccccgtggtggagaccgtgcaggtgcccctgagcaagagagccaagttcgtgggccccggcggctacaacctgaagaagctgcaggccgagaccggcgtgaccatcagccaggtggacgaggagaccttcagcgtgttcgcccccacccccagcgccatgcacgaggccagagacttcatcaccgagatctgcaaggacgaccaggagcagcagctggagttcggcgccgtgtacaccgccaccatcaccgagatcagagacaccggcgtgatggtgaagctgtaccccaacatgaccgccgtgctgctgcacaacacccagctggaccagagaaagatcaagcaccccaccgccctgggcctggaggtgggccaggagatccaggtgaagtacttcggcagagaccccgccgacggcagaatgagactgagcagaaaggtgctgcagagccccgccaccaccgtggtgagaaccctgaacgacagaagcagcatcgtgatgggcgagcccatcagccagagcagcagcaacagccagtag

SEQ ID NO: 227145 - DNA, 2352 bp, Artificial Sequence
  derived and/or modified sequence
atggcggcatgcaggtactgctgtagctgcctccgcctccgccccctgagtgacggcccctttctgctgccaagacgtgatagagctctgacccaactgcaagtcagagcactgtggtcaagtgccgggagccgagcagtcgcagtggacctcggaaatcggaagctggagatttcttccggtaagctggcacggttcgcagacggctcagctgttgttcagtccggagacaccgcggtgatggtgacagccgtgtccaagactaagcccagtccaagccagttcatgcctttggtggtcgactatagacagaaagccgctgcagccggacgcatacctaccaactacctgcggcgcgaaatcggtaccagcgataaagagatcctgacttcccgcatcattgatcgttctatcaggccactgttccccgcgggatacttctacgacacacaagtcctgtgcaaccttttggccgtcgacggcgttaatgaacctgacgtgttggccatcaacggggccagcgtcgctctctctttatcagacattccctggaatggcccagttggcgccgttcgaatcgggattattgacggtgaatacgtggtcaacccgacgagaaaagaaatgtccagctctacactgaatctcgtggtcgcaggggctccgaagagccaaattgtgatgcttgaggctagcgcggaaaacattcttcagcaggacttttgtcacgctattaaggttggtgtgaaatatacacagcagatcatccaaggtatccagcagctagttaaagagactggcgtgaccaagaggactcctcagaaactgttcacgccaagtcccgagatcgttaaatatacccataagctggctatggagcgactgtacgccgtatttactgactacgagcacgataaagtgtcacgggacgaggccgtcaacaaaatacgcctcgacacagaggagcagttaaaggaaaagtttcccgaagccgacccttacgaaataattgaatccttcaatgtggtggccaaggaagtgttcagatctatcgtacttaatgaatataaaagatgtgacgggcgggatctgacttcactgcggaatgtctcatgtgaggtagacatgttcaagacactgcacggctccgccctctttcagcgtggtcagacccaggttctctgcaccgttacgtttgatagcctggaaagcggaatcaagtctgaccaggtcataacagctattaacggcattaaggacaaaaactttatgctgcattatgaattccccccctatgccaccaacgagatcggcaaggtcaccggccttaacaggagggaactgggccatggtgcgcttgcagagaaagcactttaccccgtgatccccagagactttcctttcacaatcagggtaacctccgaggtgctagagagcaacgggtcttcaagcatggcatccgcttgcgggggctccctcgcccttatggactcaggcgtccccattagtagtgccgtggccggagtggccatcggcctcgtcaccaagaccgaccccgagaagggcgagatcgaggactacagacttctaacggatatcctggggattgaggattacaacggggacatggacttcaagatcgctgggacaaacaagggaatcacagctttgcaggcagacatcaagctgccaggtattccaatcaaaatcgtgatggaagctatacagcaggcctcagtggccaagaaggagatcctgcagattatgaataaaacaattagcaagcctagggcatccaggaaggagaacgggcctgtggtggagacagtgcaggttccgctctccaaaagggcaaaattcgtcggcccagggggatataacctgaaaaagcttcaggccgagactggtgtcactatctctcaggtggatgaggagaccttttctgtgtttgccccgacaccatccgcgatgcatgaagcacgtgactttatcaccgagatttgtaaggatgatcaggagcagcagcttgaatttggcgccgtgtacactgcaactattacagaaatacgcgacaccggggtgatggtaaaactgtacccaaacatgaccgccgtgctactgcataatacccagctggatcagcgaaagataaagcaccccaccgcactgggactcgaggtgggccaggagatccaggtaaaatacttcggccgggatcccgccgacgggcgcatgcgattaagtagaaaagtgctgcagtcacccgccaccacagtggtgagaactcttaacgataggtccagtatagtgatgggggaacccattagccaatcgtcctctaactcacagtag

SEQ ID NO: 227146 - DNA, 2352 bp, Artificial Sequence
  derived and/or modified sequence
atggcggcctgccggtactgttgcagctgcttacgcctgaggcccttatctgacggcccgtttctcctgcctcgacgcgacagagcccttacccagcttcaagtccgcgccctctggtcctcagctggttcccgcgctgttgccgtcgacttgggaaatagaaagcttgaaatctcgtccgggaaactggcccgcttcgcggatggatctgccgtagtacagtcgggggatactgcggtcatggtgactgccgtgtcgaagacaaaaccatccccttctcaatttatgccactggtggtggactacaggcagaaggctgccgccgctggccgcatccccactaattatcttaggagggagatcggcacttctgataaagagatacttacttcacgaatcattgatcgatcaataaggccattgtttcctgccggctatttttacgatacccaagtattatgcaatctgctcgctgtagacggggtcaacgagccagatgttctcgccataaatggagcctctgtcgcacttagcctgtcagatattccttggaacgggcccgtcggggcagtgaggattgggatcatagacggggaatatgtggttaacccgacaaggaaggagatgtccagttccacgctgaatctcgtcgtggcaggagctcctaagtcccagattgtcatgttagaggcctcggccgagaatatcctccagcaggatttttgccacgctatcaaggtcggggttaagtatacccagcagataatccagggcatacagcagttagtcaaggagaccggcgtgacaaagcgtactccccagaaactatttacgcccagtcccgagatcgtaaagtacacacacaagctggcaatggagaggctgtacgccgtctttaccgattatgaacacgataaagttagtagggatgaagcagttaataagattcgcctggacacggaagaacagctgaaagaaaagttcccggaagcagatccctacgaaatcattgaatcgttcaacgtggtcgctaaggaagtattcagaagcattgtgctcaatgaatataagaggtgcgacggcagagacctgacaagcctgaggaatgttagttgcgaagtggacatgtttaaaaccctccacggttcggcactgtttcagcgtggccagacccaagtgttatgcacagtaacgttcgactcactggagagtggtattaaatccgaccaggttatcactgcaattaatggcattaaggacaaaaacttcatgctgcactatgaattccctccttatgccaccaacgaaatcggcaaggtgaccgggctcaaccgccgcgagctcggtcatggagcactggcggaaaaggccctgtatccagtgatccccagggacttccctttcaccatccgcgtaacatcagaggtgctggagagcaatggatctagcagcatggcatccgcctgcggaggaagcctggccctcatggactcgggggtcccaatatcctctgcagtggcgggcgtcgccatcggcctggtaacgaagaccgatcccgagaaaggtgaaatagaagactaccgattgcttacggatattcttggcatcgaggattacaatggggatatggacttcaaaatcgcgggcacaaacaagggcatcactgcgctgcaagctgatataaagctgcccggaatccccataaaaattgtgatggaagcaatccagcaggcttctgttgcaaaaaaagagatcctgcagattatgaataagacgatttcaaaacccagggcctctagaaaggaaaatggaccggtggtggagaccgtccaggtgcccctctcaaagcgggcaaaattcgtaggtccgggcggatacaacttgaagaaactgcaggccgagactggggtgactattagtcaggtcgatgaagaaaccttctccgtctttgctccaactccgtccgcgatgcacgaggctagggatttcatcactgagatctgcaaagatgatcaggaacagcagctcgagttcggggccgtctacaccgccaccattaccgagatcagagataccggggtgatggtcaaactgtaccctaacatgacggctgtgcttctgcataatacccagctggaccagcgtaaaattaaacatcccacggctctcggtcttgaggtgggccaggagattcaggtcaagtatttcggacgtgatccagcagatggccgcatgagactgtctagaaaggtgctgcagagtcccgctaccacagtcgtgagaacactgaacgaccggagttcaatcgtcatgggggaacccattagccagagctcttctaactctcagtag

SEQ ID NO: 227147 - DNA, 2352 bp, Artificial Sequence
  derived and/or modified sequence
atggccgcctgccgctactgctgcagctgcctgcggctgcggcccctgagtgatggccccttcctgctgccccggcgggaccgggccctgacccagctgcaggtgcgggccctgtggagcagcgctggcagcagagctgtggccgtggacctgggcaacaggaagctggagatcagcagcggcaagctggccaggtttgctgatggcagcgctgtggtgcagagcggggacacagctgtgatggtgacagctgtgtccaagaccaagcccagccccagccagttcatgcccctggtggtggactaccggcagaaggctgctgctgctggccgcatccccaccaactacctgcggcgggagatcggcaccagtgacaaggagatcctgaccagccgcatcatcgacaggagcatccggcccctcttccctgctggctacttctatgacacccaggtgctgtgcaacctgctggccgtggatggagtgaatgaaccagatgtgctggccatcaatggagcctctgtggccctgagcctgagtgacatcccctggaatggacctgtgggcgctgtgagaattggcatcattgatggagaatatgtggtgaaccccaccaggaaggagatgagcagcagcaccctgaacctggtggtggccggggcccccaagagccagatcgtgatgctggaggccagcgctgagaacatcctgcagcaggacttctgccacgccatcaaggtgggcgtgaagtacacccagcagatcatccagggcatccagcagctggtgaaggagaccggggtgaccaagaggaccccccagaagctgttcacccccagccctgagatcgtgaagtacacccacaagctggccatggagcggctgtatgctgtgttcacagattatgaacatgacaaggtgtccagagatgaggccgtgaacaagatccggctggacacagaggagcagctgaaggagaagtttcctgaggccgacccctatgagatcatcgagagcttcaacgtggtggccaaggaggtgttccgcagcatcgtgctgaatgagtacaagagatgtgatggccgggacctgaccagcctgagaaatgtgtcctgtgaggtggacatgttcaagaccctgcacggcagcgccctcttccagaggggccagacccaggtgctgtgcaccgtgacctttgacagcctggagagcggcatcaagagtgaccaggtgatcacagccatcaatggcatcaaggacaagaacttcatgctgcactatgagttccccccctatgccaccaatgaaattggcaaggtgacaggcctgaacagaagagagctgggccacggggccctggccgagaaggccctgtaccctgtgatcccccgggacttccccttcaccatccgggtgaccagcgaggtgctggagagcaatggcagcagctccatggccagcgcctgtggcggcagcctggccctgatggacagcggcgtgcccatcagcagcgctgtggccggcgtggccatcggcctggtgaccaagacagatcctgagaagggggagattgaggactaccgcctgctgacagacatcctgggcatcgaggactacaacggggacatggacttcaagattgctggcaccaacaagggcatcacagccctgcaggccgacatcaagctgcccggcatccccatcaagatcgtgatggaggccatccagcaggcctctgtggccaagaaggagatcctgcagatcatgaacaagaccatcagcaagccccgggccagcaggaaagaaaatggacctgtggtggagaccgtgcaggtgcccctgagcaagagggccaagtttgtgggccctgggggctacaacctgaagaagctgcaggccgagactggagtgaccatcagccaggtggatgaggagaccttctctgtgtttgcccccaccccatctgccatgcatgaggcccgggacttcatcacagagatctgcaaggatgaccaggagcagcagctggagtttggagctgtgtacacagccaccatcacagagatccgggacaccggggtgatggtgaagctgtaccccaacatgacagctgtgctgctgcacaacacccagctggaccagaggaagatcaagcaccccacagccctgggcctggaggtgggccaggagatccaggtgaagtacttcggccgggaccctgcagatggccgcatgaggctgagcaggaaggtgctgcagagccctgccaccaccgtggtgaggaccctgaatgacaggagcagcatcgtgatgggagagcccatcagccagagcagcagcaacagccagtag

SEQ ID NO: 227148 - DNA, 2352 bp, Artificial Sequence
  derived and/or modified sequence
atggccgcctgccggtactgctgcagctgcctgcggctgcggcccctgtctgatggaccctttctccttccgcggcgtgaccgtgctttgacacaacttcaggttagagcactgtggagctcagctgggagccgggccgtggccgtggatctgggaaatcgcaagcttgaaatctccagcggcaagctggcccgattcgccgacggttctgctgtagtgcagtccggcgacaccgccgtaatggttaccgccgtgagcaaaaccaaacctagccctagtcagttcatgcctctcgtggtagactatcgacagaaagccgccgctgccggtcgaattcccacaaactatctccggcgagagataggcactagcgacaaagagatattgacatcccgtatcattgatagatccatccgtccgctcttccctgcgggttatttctatgacacacaagtcctgtgtaatcttctggccgttgatggggtaaatgaaccagacgtgctggccatcaacggtgcctcagtcgccctttccttaagtgatatcccttggaacggccctgtcggggccgtccggatcgggattatcgacggggaatatgtggtgaaccctaccagaaaagagatgtcatcgtcgactttaaacctcgttgtcgccggagcccctaagtcccagatagtgatgttagaggcttctgccgagaatattctgcagcaggatttctgtcatgcgatcaaggtgggggttaagtatacccaacagattatccaaggtatccaacagttggtgaaagaaaccggggtgaccaaaagaacaccgcagaagctattcacaccaagtcctgagatcgtcaaatacacccacaaactggccatggaacgactgtatgctgtttttactgactatgaacatgacaaagtgtcccgggacgaggcagtgaataagattcgcttggacaccgaggaacagttgaaggagaagttccccgaagcagacccttatgaaattatcgaatccttcaacgtggtcgcaaaagaggtgtttcgctccatcgttctcaacgaatataagagatgtgatgggcgtgatctgacttctctgagaaatgtatcatgtgaagttgacatgttcaagacattgcatggtagtgctctctttcagcgaggccagacccaggtcctctgcactgtcacctttgactccctggaatccggcatcaaatccgaccaggttatcacagccatcaacgggatcaaagacaagaacttcatgcttcactacgagttccctccgtatgccaccaacgagatcggcaaagtgaccggactaaataggcgtgagctcggccacggagccctcgcagaaaaggcactctacccggtgatcccccgcgacttcccgtttaccatccgtgtgacctccgaggtcctggagagcaacgggagctcgagcatggcttccgcatgtggagggagtcttgccctcatggatagcggcgtcccaataagcagtgctgtcgcaggagtcgccattggccttgtcactaagaccgatccggaaaagggcgagattgaggactatagactcttaacggatatcttgggcatcgaggactacaacggcgacatggacttcaagatcgcgggaactaacaagggaatcaccgctcttcaggccgacattaaactgccggggatccccatcaaaatcgtaatggaagccattcagcaggcatctgtggcgaagaaggagatactacaaatcatgaataagactatctctaaacctagggcaagcaggaaggagaacgggccagtcgttgaaacagtgcaggtgccactgtccaagcgggcgaagtttgttggcccaggcggctacaatttgaagaagttgcaggccgagaccggagttactataagccaggtggacgaagagaccttctccgtgtttgcgcctacgcccagtgctatgcacgaggccagagattttattacagaaatctgtaaagacgaccaggaacagcagcttgaattcggcgcagtgtacacagcaacgatcaccgaaatccgggatacaggggttatggtgaaactgtatcctaatatgaccgctgtacttctgcacaatactcagctggatcagaggaaaatcaagcacccgactgccttggggcttgaggttggccaggaaatccaagttaaatacttcggaagagacccagcggatgggagaatgcgactttctcgtaaagtgcttcagtctccagccacaacagtcgtcaggaccctgaacgatcggtcttcaatcgttatgggcgaacccatttcccagagcagttcaaatagccagtag

SEQ ID NO: 227149 - DNA, 2352 bp, Artificial Sequence
  derived and/or modified sequence
atggccgcctgccggtactgctgcagctgcctgcggctgcggcccctgtcagatggtccttttctgctcccaagacgcgaccgcgctcttactcagcttcaagtgcgcgccctgtggtcttccgctggaagccgcgctgttgcggtcgatctaggcaatagaaaactggagatatccagcggaaagctggcccggttcgctgacggctccgctgtggtccagagcggcgataccgccgtgatggttactgccgtttcaaagaccaaaccatctccttcacagttcatgcccctggtggtagattaccgccagaaagccgcagccgccggtaggattcccacaaactatctccggcgggagatcggcacctccgacaaagaaattttgacttcccgcattatcgaccgctctatccggcctttgtttcccgccggatacttctacgatactcaggtgctctgcaacttgcttgccgtcgatggagttaatgagcctgatgtacttgccattaacggagcgagtgtggctctttcactctcggacatcccatggaacggcccagtcggcgccgtgaggattgggataatagatggagagtatgtcgtgaaccccacccgaaaagagatgtcaagctctacattaaacttagtcgtagcaggcgcccccaagtctcaaatcgttatgttggaggctagcgcagagaatatcctccagcaggatttttgtcacgcaattaaagtgggagtgaaatacacacaacagatcatccaggggattcagcagctggttaaggagacaggtgtgactaaaagaaccccccagaagctctttacccctagcccagagatagtgaaatacactcataaattggccatggagagattatacgctgtgttcactgattacgaacacgacaaggtgtccagagacgaagcagtcaacaagatcaggctggataccgaagagcagcttaaggaaaaatttccagaagccgatccctatgaaatcattgagagctttaatgtcgttgccaaagaagtgttcagaagcatagtcctgaatgagtataagagatgtgacgggcgcgacctgacctcactcaggaacgtgtcgtgcgaggtggatatgtttaaaaccctgcacggtagcgcactgtttcaacggggacagactcaggttctgtgcactgtcacgtttgactctctggagagtggaatcaagtctgatcaggtgatcacagccatcaacgggattaaggacaagaattttatgcttcattacgaattcccaccttatgctaccaacgaaattggcaaagttactggtctgaatcgaagagagctcggacacggagcactggccgagaaggccctgtatccggtaattccacgcgatttcccatttacgattcgagtcacttccgaggtcctggaaagcaatgggtcgtcaagcatggccagcgcctgtggcggaagtctggcattaatggattctggggtccccatttcgtccgccgtggcaggggtcgccattgggcttgtcactaaaactgaccccgagaaaggcgagatcgaggattacagactactgacagacatcctaggcattgaggattataacggcgatatggatttcaaaatcgccgggacgaataaggggattacagccctccaagccgatattaagctgcccgggattcctattaagatcgtgatggaggctattcaacaagctagtgtagcgaaaaaggaaatattgcagattatgaacaaaacaatctctaaaccccgcgcctcacgaaaggagaacggccccgtagtggagacagtccaggtgcctcttagcaaacgggctaaatttgtcggtccaggaggatataacctgaaaaagctgcaggccgaaacaggagtgacaatctcacaggtggacgaggagacattcagcgtctttgctcctactcccagtgctatgcacgaggctcgcgactttattaccgagatttgcaaagacgaccaggaacaacaactcgagtttggggctgtatacaccgcgacaattaccgagatccgcgataccggagtaatggttaagctgtatcccaacatgacagctgtgctgctgcacaacacccagcttgaccagcggaaaattaaacacccaactgctttaggcctagaagttggacaggaaatccaggtgaaatattttggaagagaccccgccgacggccgaatgcgtctgtcacgcaaagttctccagagtccagccacaaccgttgtgcgaactctgaacgacaggagcagcatcgtgatgggcgagcccatctcccaaagcagctccaattcacagtag

SEQ ID NO: 227150 - DNA, 3308 bp, Artificial Sequence
  derived and/or modified sequence
atggcggcctgcaggtactgctgctcgtgcctccggctccggcccctgagcgatggtcctttccttctgccacggcgggatcgggcactcacccagttgcaagtgcgagcactatggagtagcgcagggtctcgagctgtggccgtggacttaggcaacaggaaattagaaatatcttctggaaagctggccagatttgcagatggctctgctgtagtacagtcaggtgacactgcagtaatggtcacagcggtcagtaaaacaaaaccttccccttcccagtttatgcctttggtggttgactacagacaaaaagctgctgcagcaggtagaattcccacaaactatctgagaagagagattggtacttctgataaagaaattctaacaagtcgaataatagatcgttcaattagaccgctctttccagctggctacttctatgatacacaggttctgtgtaatctgttagcagtagatggtgtaaatgagcctgatgtcctagcaattaatggcgcttccgtagccctctcattatcagatattccttggaatggacctgttggggcagtacgaataggaataattgatggagaatatgttgttaacccaacaagaaaagaaatgtcttctagtactttaaatttagtggttgctggagcacctaaaagtcagattgtcatgttggaagcctctgcagagaacattttacagcaggacttttgccatgctatcaaagtgggagtgaaatatacccaacaaataattcagggcattcagcagttggtaaaagaaactggtgttaccaagaggacacctcagaagttatttaccccttcgccagagattgtgaaatatactcataaacttgctatggagagactctatgcagtttttacagattacgagcatgacaaagtttccagagatgaagctgttaacaaaataagattagatacggaggaacaactaaaagaaaaatttccagaagccgatccatatgaaataatagaatccttcaatgttgttgcaaaggaagtttttagaagtattgttttgaatgaatacaaaaggtgcgatggtcgggatttgacttcacttaggaatgtaagttgtgaggtagatatgtttaaaacccttcatggatcagcattatttcaaagaggacaaacacaggtgctttgtaccgttacatttgattcattagaatctggtattaagtcagatcaagttataacagctataaatgggataaaagataaaaatttcatgctgcactacgagtttcctccttatgcaactaatgaaattggcaaagtcactggtttaaatagaagagaacttgggcatggtgctcttgctgagaaagctttgtatcctgttattccccgagattttcctttcaccataagagttacatctgaagtcctagagtcaaatgggtcatcttctatggcatctgcatgtggcggaagtttagcattaatggattcaggggttccaatttcatctgctgttgcaggcgtagcaataggattggtcaccaaaaccgatcctgagaagggtgaaatagaagattatcgtttgctgacagatattttgggaattgaagattacaatggtgacatggacttcaaaatagctggcactaataaaggaataactgcattacaggctgatattaaattacctggaataccaataaaaattgtgatggaggctattcaacaagcttcagtggcaaaaaaggagatattacagatcatgaacaaaactatttcaaaacctcgagcatctagaaaagaaaatggacctgttgtagaaactgttcaggttccattatcaaaacgagcaaaatttgttggacctggtggctataacttaaaaaaacttcaggctgaaacaggtgtaactattagtcaggtggatgaagaaacgttttctgtatttgcaccaacacccagtgctatgcatgaggcaagagacttcattactgaaatctgcaaggatgatcaggagcagcaattagaatttggagcagtatataccgccacaataactgaaatcagagatactggtgtaatggtaaaattatatccaaatatgactgcggtactgcttcataacacacaacttgatcaacgaaagattaaacatcctactgccctaggattagaagttggccaagaaattcaggtgaaatactttggacgtgacccagccgatggaagaatgaggctttctcgaaaagtgcttcagtcgccagctacaaccgtggtcagaactttgaatgacagaagtagtattgtaatgggagaacctatttcacagtcatcatctaattctcagtgatttttttttttaaagagaattctagaattctattttgtctagggtgatgtgctgtagagcaacattttagtagtatcttccattgtgtagatttctatataatataaatacattttaattatttgtactaaaatgctcatttacatgtgccatttttttaattcgagtaacccatatttgtttaattgtatttacattataaatcaagaaatatttattattaaaagtaagtcatttatacatcttagaaaaaattacatagttttgtttttacaattctgaaatatatgaaaaacttagatagaatatgtcatatgttattataacagatctcttcctacatcttatttttcttctttgtatacagtagtgacagtttaccttcagtcatcctacaggtcacctctgtgcccaacaactttacttgcctacaacggttcacaaactggaacaggccatattcaaagccagtgcctatttcttcagaactgttaacagatatagtgagttgagggagctaatctgatacacttttgataatataatgcctttcaaattagttaccaaatcataaacagagtggaataaatataaatgagattctaactaggatgaatgtggtagtaatgatgtatatttttcaaatttacctaaacagaaagattattggctaaggcatggtggctcacacctgtaatcccaacactttgggaggtcaaggcgggtagatcacctgaggtcaggagttcgagaccagcctggccaacatggtgaaaccccatctctactaaaaatacaaaaattagctgggtgtggtggcgggcgcctgtaatcccagctactcaggaggctgaggcaggagaatctcttgaacctgggaggcagaggtggcagtgagctgagatcgcaccactgcactccagcctgggcaaaaagagtaaaactccatctcaaaa

SEQ ID NO: 227151 - DNA, 4411 bp, Artificial Sequence
  derived and/or modified sequence
ggaaacgaaactccatcaggctccgccccacggtctgcggagtgagccaatcagggcacagcctgcgttgaccgcgtgccgggtgtcatggcggcctgcaggtactgctgctcgtgcctccggctccggcccctgagcgatggtcctttccttctgccacggcgggatcgggcactcacccagttgcaagtgcgagcactatggagtagcgcagggtctcgagctgtggccgtggacttaggcaacaggaaattagaaatatcttctggaaagctggccagatttgcagatggctctgctgtagtacagtcaggtgacactgcagtaatggtcacagcggtcagtaaaacaaaaccttccccttcccagtttatgcctttggtggttgactacagacaaaaagctgctgcagcaggtagaattcccacaaactatctgagaagagagattggtacttctgataaagaaattctaacaagtcgaataatagatcgttcaattagaccgctctttccagctggctacttctatgatacacaggttctgtgtaatctgttagcagtagatggtgtaaatgagcctgatgtcctagcaattaatggcgcttccgtagccctctcattatcagatattccttggaatggacctgttggggcagtacgaataggaataattgatggagaatatgttgttaacccaacaagaaaagaaatgtcttctagtactttaaatttagtggttgctggagcacctaaaagtcagattgtcatgttggaagcctctgcagagaacattttacagcaggacttttgccatgctatcaaagtgggagtgaaatatacccaacaaataattcagggcattcagcagttggtaaaagaaactggtgttaccaagaggacacctcagaagttatttaccccttcgccagagattgtgaaatatactcataaacttgctatggagagactctatgcagtttttacagattacgagcatgacaaagtttccagagatgaagctgttaacaaaataagattagatacggaggaacaactaaaagaaaaatttccagaagccgatccatatgaaataatagaatccttcaatgttgttgcaaaggaagtttttagaagtattgttttgaatgaatacaaaaggtgcgatggtcgggatttgacttcacttaggaatgtaagttgtgaggtagatatgtttaaaacccttcatggatcagcattatttcaaagaggacaaacacaggtgctttgtaccgttacatttgattcattagaatctggtattaagtcagatcaagttataacagctataaatgggataaaagataaaaatttcatgctgcactacgagtttcctccttatgcaactaatgaaattggcaaagtcactggtttaaatagaagagaacttgggcatggtgctcttgctgagaaagctttgtatcctgttattccccgagattttcctttcaccataagagttacatctgaagtcctagagtcaaatgggtcatcttctatggcatctgcatgtggcggaagtttagcattaatggattcaggggttccaatttcatctgctgttgcaggcgtagcaataggattggtcaccaaaaccgatcctgagaagggtgaaatagaagattatcgtttgctgacagatattttgggaattgaagattacaatggtgacatggacttcaaaatagctggcactaataaaggaataactgcattacaggctgatattaaattacctggaataccaataaaaattgtgatggaggctattcaacaagcttcagtggcaaaaaaggagatattacagatcatgaacaaaactatttcaaaacctcgagcatctagaaaagaaaatggacctgttgtagaaactgttcaggttccattatcaaaacgagcaaaatttgttggacctggtggctataacttaaaaaaacttcaggctgaaacaggtgtaactattagtcaggtggatgaagaaacgttttctgtatttgcaccaacacccagtgctatgcatgaggcaagagacttcattactgaaatctgcaaggatgatcaggagcagcaattagaatttggagcagtatataccgccacaataactgaaatcagagatactggtgtaatggtaaaattatatccaaatatgactgcggtactgcttcataacacacaacttgatcaacgaaagattaaacatcctactgccctaggattagaagttggccaagaaattcaggtgaaatactttggacgtgacccagccgatggaagaatgaggctttctcgaaaagtgcttcagtcgccagctacaaccgtggtcagaactttgaatgacagaagtagtattgtaatgggagaacctatttcacagtcatcatctaattctcagtgatttttttttttaaagagaattctagaattctattttgtctagggtgatgtgctgtagagcaacattttagtagtatcttccattgtgtagatttctatataatataaatacattttaattatttgtactaaaatgctcatttacatgtgccatttttttaattcgagtaacccatatttgtttaattgtatttacattataaatcaagaaatatttattattaaaagtaagtcatttatacatcttagaaaaaattacatagttttgtttttacaattctgaaatatatgaaaaacttagatagaatatgtcatatgttattataacagatctcttcctacatcttatttttcttctttgtatacagtagtgacagtttaccttcagtcatcctacaggtcacctctgtgcccaacaactttacttgcctacaacggttcacaaactggaacaggccatattcaaagccagtgcctatttcttcagaactgttaacagatatagtgagttgagggagctaatctgatacacttttgataatataatgcctttcaaattagttaccaaatcataaacagagtggaataaatataaatgagattctaactaggatgaatgtggtagtaatgatgtatatttttcaaatttacctaaacagaaagattattggctaaggcaggcggatcatgagatcaggagatcgagaccatcctggctaacacggtgaaaccccgtctctactaaaagtgcaaaaattagccgggcgtggtggcgcatgcctgtaatcctagctactcaggaggctgaggcagaagaatcacttcaacccaggaggtggaggttgtagtgagccgagattgcgccattgcactccagctcaggcaacaagagcaaaactccgtctcaaaaaaaaaaaaaaaattgtttacttatcaaattgaactaggtcaatttgaatatgtgtattgctctaatgtatggaagttcttagtataagagctgaaggatcatgactttcggttaatagatgtttgaaatagatgtttagaggttactgatacacatgtcaagttgttcattcccatcatttaaaatatcaccttataattccacagaaaagtaaatggtatgtggacgtcataatttagaatgtgtaatcttttttaaaatcttataaaaatacactggactcagtggtacgtgcctgtagtcccagctacttggaaggctgaagtgggaaggtcactagagcccagaagttcgacactgtagtgtgcaacaatcatacctgtgaatagctactgtactccagcctgggcaacatagcaggactcttatctctaaaaaaaattttaaatcttataaaaatgtaggtatatctggccaggcatggtggctcacacctgtaatcccaacactttgggaggtcaaggcgggtagatcacctgaggtcaggagttcgagaccagcctggccaacatggtgaaaccccatctctactaaaaatacaaaaattagctgggtgtggtggcgggcgcctgtaatcccagctactcaggaggctgaggcaggagaatctcttgaacctgggaggcagaggtggcagtgagctgagatcgcaccactgcactccagcctgggcaaaaagagtaaaactccatctcaaaaaaaaaaatggtgggcacagaagctcatgcctgtaattccagcactttgggaggccgaggcgggtggattacatgaggtcaggaattcaagaccagcctggccaacacggtaaaaccccatctctactaaaaatacaaaaattagctgggcatggtggcaggcacctgtaatcctagctactcgggaggctgaggcaggagaatcacttgagcctgggaaatggaggttgcagtgagccgagattgcgccattgcactccagcctgggcgacagagcaagactccgtctccagaaaaaaaaaaaa

SEQ ID NO: 227152 - DNA, 2352 bp, Artificial Sequence
  derived and/or modified sequence
atggccgcttgccgttattgctgtagttgcctcaggttgaggcctctgagcgacggcccattcctccttccacggagggacagagctctcactcagctgcaggtacgagctctctggtcctcagctgggtcccgggcagtggcagtggaccttggcaaccgcaaactcgagatcagcagtggcaagttggcacggttcgcagatggctctgctgtggtccagtccggcgacacagccgtgatggtcactgccgtctcaaagaccaagccttccccctcccagtttatgcctctggtcgttgattatcgacagaaagcagccgcagccggtagaattcccaccaactatttgcggagggagattggtacatccgacaaggagatcttgacctctaggatcatagaccggagtatacgccctctgttccctgccggttatttctacgatactcaagtgctgtgtaacctgttggctgttgacggggtaaacgagcctgatgttttagctattaatggagcgtcggtagccctgagcctcagcgatatcccctggaatggccctgtgggagctgtgaggatcgggataatcgatggtgagtacgtagtgaatcctaccaggaaagagatgtcatcctctaccctcaatctggtggtcgcgggagcaccaaagtctcagattgtgatgttggaggcctcggctgagaacatcctccagcaggatttctgccacgctattaaggttggtgtcaaatacacgcagcaaattattcaggggatccaacagcttgtcaaggagactggagtgacaaaacgaaccccgcagaaactcttcacgccttcacctgaaatcgtcaaatatacacacaaactcgctatggagcgcctgtacgctgtattcactgactacgaacacgataaagtgtccagggatgaggcagtgaataagattagattagacactgaggagcagttgaaagaaaagtttcccgaggctgacccatacgaaattattgagagctttaatgtcgtcgccaaagaagtcttcagatcaatcgtactgaacgagtacaagcgctgcgacgggagggacctcacatctctgcgaaacgtgtcatgcgaggtggatatgtttaaaacacttcacgggtcagcactcttccagaggggacagacgcaggtgctctgtaccgtaacctttgactccctcgaaagcggtataaagtccgaccaggtgatcactgcgatcaatggcattaaggacaaaaatttcatgctgcattacgaattcccgccttacgctaccaatgagattggtaaagtgaccgggctgaatcgcagagagttgggccatggagctctggcagaaaaagctctgtatcccgtgattccacgagattttccattcacaattcgcgtgacctcggaagtactcgaatccaacggcagcagttccatggcaagtgcatgcggaggaagtctggccctgatggacagtggcgtgcctataagctccgccgttgctggcgtcgctattggactcgtgaccaagaccgatcctgagaagggcgaaatcgaagactatcgcctgctgaccgacatcttgggtatcgaggattataatggcgacatggattttaaaatagccggaactaacaagggaataaccgccctccaggccgatattaagttgcctgggattccaatcaaaattgtgatggaagcaatccagcaagcttctgtcgctaagaaggagatactgcagatcatgaacaagacaattagtaagcctcgggcttcccgcaaggaaaacggacccgtggtagagaccgtgcaggttccgctgtctaaacgcgcaaaattcgtcggacctggagggtataacctaaagaagttgcaggcggagaccggtgtcactatctcccaggtggacgaagaaacgttcagtgtcttcgccccaactccaagtgctatgcacgaagcgagagatttcataaccgaaatttgcaaagatgatcaggagcagcagctagagttcggagctgtatataccgcgaccatcacagagatcagagataccggcgtgatggtgaaactatacccaaacatgaccgccgtgctgctgcataacacacagctggaccagaggaagatcaagcaccctaccgcacttggcctggaggtcggccaagagatacaggtaaagtacttcggcagggatcctgcagatggacgaatgcgcctttcacgcaaggttctacaatcaccggcaacaacagtggtccgcacgctaaatgacaggtcctctattgtaatgggagagcctatttctcagtcttcctccaacagccaatag

SEQ ID NO: 227153 - DNA, 2352 bp, Artificial Sequence
  derived and/or modified sequence
atggccgcttgccggtactgctgtagctgtcttcggctccgtcctctgagtgacggaccctttctcctgcccagacgagaccgggcactcacccagttacaagtccgggcactttggtcctcagccggaagtagagccgtagctgtggatctggggaaccggaaactggagatcagttctgggaagctggcccgattcgccgacggaagcgcggtggtgcaatccggggatactgcagtgatggttacagccgtgtcgaagactaagccctctccaagtcagtttatgccactagtggtggactatcgacagaaggccgcagctgccggaagaattccaacgaattatctcagacgcgagataggcacatcagacaaagagattcttacgtcgcggattattgatcgttctatccgaccgctctttccggctggctacttttatgacactcaagtactgtgtaacctgctggctgtggacggagtcaacgagcccgatgtccttgccataaacggggcttcagttgctctcagtctcagcgacatcccttggaacgggccagtgggagccgtccgaatcggaattatcgacggcgagtatgtggtgaatccaactcggaaagagatgtcatctagcaccctcaacttggtcgtggcaggagctcccaaaagtcaaatagtcatgctcgaagccagcgctgagaatatcctgcagcaggacttctgccacgccatcaaagtgggcgtgaagtacacacagcagattatacagggcatacagcagttggtcaaagagaccggggtgacaaagagaactccccaaaaactttttacccccagtcccgagatagttaagtatactcataagttagcgatggagcgactctacgccgtcttcactgattatgagcacgacaaggtatctcgggacgaggccgttaacaaaatacgtctggacaccgaggagcaactgaaggagaagttcccagaagccgacccatatgaaatcattgaaagtttcaacgtcgttgccaaagaggtctttagatcgattgtgttaaacgagtacaagaggtgcgacggccgagatttgacatcactgcgcaacgtgagctgcgaagtcgatatgttcaaaaccctccatgggagtgcactctttcagcggggacaaacccaggttctttgtactgtaactttcgatagtctagagtccggcattaagtccgaccaggttatcaccgcaattaatggtataaaggataagaattttatgctgcattatgaattcccgccttacgccactaatgaaatcggaaaggtgaccgggctcaatagacgggaacttggccacggggctctggccgagaaagccctgtaccctgttatacctcgtgatttcccctttacaatccgtgtgacttcagaggttctagaatccaacggatcctcctctatggcttctgcctgtgggggttcccttgccctgatggattccggtgtgccaatatctagcgcggtcgccggagtagccattggactggtcactaagactgatccggagaaaggcgagatcgaagattataggctactcaccgatattttaggcatcgaagattataacggggacatggatttcaaaatagcaggcactaacaaaggcattaccgctctccaggccgacataaagttgcccggaatcccaattaaaattgtcatggaagccatccaacaagcatccgtcgcaaaaaaggaaatcctgcaaatcatgaataaaaccatcagcaagcccagagccagccggaaagaaaacggcccagtggtggagaccgtccaggtgcctctgtctaagcgcgctaagttcgtgggcccaggcggttacaacctgaaaaaactgcaggcagagacaggtgttaccatatcacaggtagacgaagaaacattcagcgtgttcgccccaacccctagcgcaatgcacgaagcgagggattttatcacagaaatctgcaaggacgatcaggagcagcagctggagtttggcgcagtttacaccgctaccataacagagattagggacacgggagtgatggtgaagttgtaccctaatatgacagccgtgctgttacacaacacacaattggaccagagaaagatcaagcacccaacagccctcggtctcgaggttggccaggaaatccaggtaaaatattttggccgtgatccagctgatggccgaatgcggttgagcagaaaggtgcttcaatccccagctacgacagtggtgaggacactgaatgaccgttcaagcattgtgatgggagaaccgataagccaatcttcttccaacagccagtag

SEQ ID NO: 227154 - protein, 153 aa, Artificial Sequence
  derived and/or modified sequence
MALVFVYGTLKRGQPNHRVLRDGAHGSAAFRARGRTLEPYPLVIAGEHNIPWLLHLPGSGRLVEGEVYAVDERMLRFLDDFESCPALYQRTVLRVQLLEDRAPGAEEPPAPTAVQCFVYSRATFPPEWAQLPHHDSYDSEGPHGLRYNPRENR

SEQ ID NO: 227155 - DNA, 462 bp, Artificial Sequence
  derived and/or modified sequence
atggcacttgtgttcgtgtatgggactctcaagagaggccagcctaaccatcgcgtgctgagagatggcgcccatggaagcgctgccttcagagctcgcggacggacactggagccatacccgctggtgattgccggcgaacacaacattccttggttgttgcaccttcctggaagcggtcgattagtggagggcgaggtctatgccgtggatgagagaatgctgcgctttttggatgacttcgagagctgtccagccttatatcagaggaccgttctccgggtccagctcctggaggatcgcgcgcctggggccgaagagcctcctgctcccaccgccgtgcagtgttttgtttacagccgagccacatttccacccgagtgggcacagttgccccaccatgactcatacgattccgaaggacctcacggactgcgctacaacccaagggagaaccggtag

SEQ ID NO: 227156 - DNA, 462 bp, Artificial Sequence
  derived and/or modified sequence
atggccctggtcttcgtgtatggtacattgaagcggggccagcctaaccacagagtgctgagggacggagctcatgggtccgcagcctttcgagcacggggaaggactctcgaaccttatccccttgtcatcgctggcgagcacaatataccctggctcctgcacctcccagggtcaggaaggctggtggaaggagaggtttacgcagtggacgaaagaatgctgcggttcctagacgattttgagtcctgtccggcactctaccagagaacggtgctgcgcgtccagctgcttgaagatcgcgcccccggcgctgaggagccccctgccccaacggcagtgcaatgcttcgtatattcaagggccacatttccccccgaatgggcccagttacctcaccatgacagttacgacagcgaagggccccatggcttacgatacaacccccgtgaaaaccggtag

SEQ ID NO: 227157 - DNA, 462 bp, Artificial Sequence
  derived and/or modified sequence
atggccctggtgtttgtgtatggcaccctgaagaggggccagcccaaccaccgggtgctgagagatggagcccacggcagcgctgccttccgggcccggggccgcaccctggagccctaccccctggtgattgctggggagcacaacatcccctggctgctgcacctgcccggcagcggccgcctggtggagggggaggtgtatgctgtggatgagaggatgctgcgcttcctggatgactttgagagctgcccagccctgtaccagaggacagtgctgcgggtgcagctgctggaggaccgggcccctggagctgaggagcccccagcccccacagctgtgcagtgctttgtgtacagccgggccaccttccccccagagtgggcccagctgccccaccacgacagctatgattctgagggcccccacggcctgcgctacaaccccagagaaaatagatag

SEQ ID NO: 227158 - DNA, 1440 bp, Artificial Sequence
  derived and/or modified sequence
gactgaaaactggatatttggtccccatggactttctggtcaccctgtgaagtggacttaactttttcttgaatcatgtggaaggattctgaagtcaaaagtttttaagactctcaggcttactgtggatctggattctaaggcaacacttccttgaagaaacaagcttacagtctgtggcccagacccaggcaagtggtaaatatttaccttcacgctggagccaagatcgctgcggggagtcccgtgaagcaccactgccctctaagaccttggaaggggaaacaccagaaggtgtgggtgctgagctccgctgcgtcagactgccaggacctgagtggaactcagtgctgaaacctgggttctcactgcagctggatagcagctctgcccggatggccctagtcttcgtgtacggcaccctgaagcggggtcagcccaaccacagggtcctgcgggacggcgcccacggctccgcagcctttcgggcgcgcggccgcacgctggagccctacccgttggtgatcgcgggggagcacaacatcccgtggctgctgcacctgcccggctcggggcgcctcgtggagggcgaggtctacgcggtagacgagcggatgctgcgctttctggatgacttcgagagttgcccggccctgtaccagcgcacggtgctgcgggtacagctgctggaggaccgggccccgggcgcagaggagccgccagcgcccaccgcggtgcagtgcttcgtgtacagcagggccaccttcccgccggagtgggcccagctcccgcaccatgacagctacgactccgaggggccgcacgggctgcgctacaacccccgggagaacagataagggggacgggcagggtgggcctaggtttgagagccctggggctccaagatgcgcccagcccatgctgggtgaaggcggaagccgaacagggccctttccaatgaatctgccggaaaggaaccaatctttcagtggcagctgattttacaaataatgttgagatacgaatagcaaggtgcttccctcccatctttctacctggtaagaaaaatttaggattttaactcccctaaatgacatttagagaactcgtgttatgcctaattcttcttcctcctcgtgttgtttctgctgttggctctgctttgagctcaagataataataaatatttaggatcagtgtaaagacttggtgttgccgctagattttagcagccctactatactgattctggcctgtaacccctgagaaagccgattttacacggctgggtagaatttgtagaaaagatccacagggcaagcatgctgtatatcagagtgcgtatagcaccattcttcctaattttcagatcaagcttcacagcaaatattaaagattatttaaatttgaagtcgatgttttgggaaatcagatataaaa

SEQ ID NO: 227159 - DNA, 1226 bp, Artificial Sequence
  derived and/or modified sequence
atttaccttcacgctggagccaagatcgctgcggggagtcccgtgaagcaccactgccctctaagaccttggaaggggaaacaccagaaggtgtgggtgctgagctccgctgcgtcagactgccaggacctgagtggaactcagtgctgaaacctgggttctcactgcagctggatagcagctctgcccggatggccctagtcttcgtgtacggcaccctgaagcggggtcagcccaaccacagggtcctgcgggacggcgcccacggctccgcagcctttcgggcgcgcggccgcacgctggagccctacccgttggtgatcgcgggggagcacaacatcccgtggctgctgcacctgcccggctcggggcgcctcgtggagggcgaggtctacgcggtagacgagcggatgctgcgctttctggatgacttcgagagttgcccggccctgtaccagcgcacggtgctgcgggtacagctgctggaggaccgggccccgggcgcagaggagccgccagcgcccaccgcggtgcagtgcttcgtgtacagcagggccaccttcccgccggagtgggcccagctcccgcaccatgacagctacgactccgaggggccgcacgggctgcgctacaacccccgggagaacagataagggggacgggcagggtgggcctaggtttgagagccctggggctccaagatgcgcccagcccatgctgggtgaaggcggaagccgaacagggccctttccaatgaatctgccggaaaggaaccaatctttcagtggcagctgattttacaaataatgttgagatacgaatagcaaggtgcttccctcccatctttctacctggtaagaaaaatttaggattttaactcccctaaatgacatttagagaactcgtgttatgcctaattcttcttcctcctcgtgttgtttctgctgttggctctgctttgagctcaagataataataaatatttaggatcagtgtaaagacttggtgttgccgctagattttagcagccctactatactgattctggcctgtaacccctgagaaagccgattttacacggctgggtagaatttgtagaaaagatccacagggcaagcatgctgtatatcagagtgcgtatagcaccattcttcctaattttcagatcaagcttcacagcaaatattaaagattatttaaatttgaagtcgatgttttgggaaatc

SEQ ID NO: 227160 - DNA, 462 bp, Artificial Sequence
  derived and/or modified sequence
atggccctggtgttcgtgtacggcaccctgaagcggggccagcccaaccacagggtgttgagggatggcgcgcacggctcagcagccttcagggcccgggggcggaccctggaaccataccctctagtgattgccggtgagcataacattccttggctgctgcacttgcctggctccggccgcctggtggagggcgaggtgtatgccgtggacgaacgaatgctacgattcttggacgacttcgagtcctgtcccgccctgtaccaaaggaccgtgctgcgcgtgcagctcctggaggatcgtgccccaggggctgaagaaccacccgctcctactgctgtacagtgttttgtctactctagagcaaccttcccaccagagtgggcacagctcccacatcacgattcttacgactccgaaggcccccacggattacgatacaatccacgcgagaaccggtag

SEQ ID NO: 227161 - DNA, 462 bp, Artificial Sequence
  derived and/or modified sequence
atggccctggtgttcgtgtacggcaccctgaagcggggccagcccaatcaccgggtcttgcgcgacggcgcccacgggtccgccgcttttcgggcccgtggaagaaccctcgagccgtaccccctggtgatcgcaggggaacacaacatcccctggttactccacctaccaggtagtgggcgcctggtcgagggtgaggtgtacgcagttgatgagaggatgttgagatttttggatgacttcgaaagctgccctgccctctatcaacggacagtactccgggtgcagttactcgaagacagggcacctggagccgaggagcctccggcgcctacagctgttcagtgtttcgtctattcccgggcaacgtttcctcctgagtgggctcagctgccccatcatgattcttacgattcagaaggcccgcacggcctccggtataaccctcgcgagaacaggtag

SEQ ID NO: 227162 - DNA, 462 bp, Artificial Sequence
  derived and/or modified sequence
atggcattggtttttgtgtacggaaccctgaaaagggggcagccaaatcatcgggtccttcgggatggggcacacggttcggcagcattcagagctcgcggtcgtactttggagccctaccccctggttatagccggagagcacaacatcccctggctgctgcacctgcctggatccggtagactggttgaaggcgaggtgtacgccgtcgacgaacggatgctccgttttctggacgattttgaatcttgccccgctctttatcaacggaccgtgcttcgggtgcagctcctcgaagacagggcccctggagcagaggagcccccagctcccacagctgtccagtgctttgtctactccagagccacttttccccctgaatgggcccagctgccccatcacgattcctacgactctgaaggcccacatgggctgcggtacaatccaagagaaaaccggtag

SEQ ID NO: 227163 - DNA, 462 bp, Artificial Sequence
  derived and/or modified sequence
atggcgctggtcttcgtctacggcacactgaagcggggacagccaaaccatcgcgtcctccgagacggtgcacatgggtcggcggcatttcgggctagaggtagaaccctcgaaccttatccacttgtgatcgctggcgaacacaacattccctggctcctgcatctgcctggaagtggcagacttgtcgagggggaagtgtacgctgtcgatgaacggatgcttcgctttctcgatgactttgagtcttgtccggcactctaccagaggacagtcctacgcgtgcagctgcttgaggatagggccccaggtgctgaagaaccccctgctccgactgccgtccagtgtttcgtgtattcccgagctaccttcccgcctgaatgggctcagctgcctcaccacgattcttacgacagtgaaggaccacatggtctgaggtacaacccacgggagaacagatag

SEQ ID NO: 227164 - DNA, 462 bp, Artificial Sequence
  derived and/or modified sequence
atggccctggtgttcgtgtacggcaccctgaagagaggccagcccaaccacagagtgctgagagacggcgcccacggcagcgccgccttcagagccagaggcagaaccctggagccctaccccctggtgatcgccggcgagcacaacatcccctggctgctgcacctgcccggcagcggcagactggtggagggcgaggtgtacgccgtggacgagagaatgctgagattcctggacgacttcgagagctgccccgccctgtaccagagaaccgtgctgagagtgcagctgctggaggacagagcccccggcgccgaggagccccccgcccccaccgccgtgcagtgcttcgtgtacagcagagccaccttcccccccgagtgggcccagctgccccaccacgacagctacgacagcgagggcccccacggcctgagatacaaccccagagagaacagatag

SEQ ID NO: 227165 - protein, 752 aa, Artificial Sequence
  derived and/or modified sequence
MSYGEIEEFCLVRIVMALCSALMTIFTIKMGTAKQAIDQGRSPVIIDNTNIQAWEMKPYVEVAIGKGYRVEFHEPETWWKFDPEELEKRNKHGVSRKKIAQMLDRYEYQMSISIVMNSVEPSHKSTQRPPPPQGRQRERVLKKTGHRLSKTKQKRNRKRNKKQNSQNRIMEENSLEFLSDLTPGDQDPSQSEEEDIEKTRRESEYPFIDGLQNEVGDFVTGYKEKRWKNKDPKDSFQNVMSIVELDNTPKNYLSKEGDNLFVSLLLRPNEISVTCPILTQNLSCVTTDDCSGMKVEKHIRNRHTIALDTQDLSAETSCLFMKKREIVDKNLSHEPILCHQHGIRMSDKVLREEQVYTTKINHWAFFTTNLSDEDLQLGSDRQPYFGSWPAGPHKFICEQRPKKDRACKLAGPDSRGQWIQMIFTSVAASEPGNNPEILTDKLLIGNEDFSPPPETMDSFIETNLFRSCLPQPDIPKNALESTKNKKRRKKRIFNLVPNFDLLGQSRIGVKEREKCDLLTKNHGLKITLGEEKDRISERNSEEENKQKLMTFDHHPLWFYLDIIKATPLNIDGQRYSHCLSFNRLRCSASLYKNYIPSFVLHNLSSIWKPSFTNKKLFLTFESQTRVGNKLNDAGFISPEILHSHPDTSCSLGVTSDFHFLNERFDRKLKRWEEPKELPAEDSQDLTSTDYRSLELPLSQGFAFQLVKLFGSPGVPMESLLPDDYVVPLDWKTLKMIYLQWKMSVEKRQKKIG

SEQ ID NO: 227166 - DNA, 2214 bp, Artificial Sequence
  derived and/or modified sequence
atggccctgtgcagcgccctgatgaccatcttcaccatcaagatgggcaccgccaagcaggccatcgaccagggcagaagccccgtgatcatcgacaacaccaacatccaggcctgggagatgaagccctacgtggaggtggccatcggcaagggctacagagtggagttccacgagcccgagacctggtggaagttcgaccccgaggagctggagaagagaaacaagcacggcgtgagcagaaagaagatcgcccagatgctggacagatacgagtaccagatgagcatcagcatcgtgatgaacagcgtggagcccagccacaagagcacccagagacccccccccccccagggcagacagagagagagagtgctgaagaagaccggccacagactgagcaagaccaagcagaagagaaacagaaagagaaacaagaagcagaacagccagaacagaatcatggaggagaacagcctggagttcctgagcgacctgacccccggcgaccaggaccccagccagagcgaggaggaggacatcgagaagaccagaagagagagcgagtaccccttcatcgacggcctgcagaacgaggtgggcgacttcgtgaccggctacaaggagaagagatggaagaacaaggaccccaaggacagcttccagaacgtgatgagcatcgtggagctggacaacacccccaagaactacctgagcaaggagggcgacaacctgttcgtgagcctgctgctgagacccaacgagatcagcgtgacctgccccatcctgacccagaacctgagctgcgtgaccaccgacgactgcagcggcatgaaggtggagaagcacatcagaaacagacacaccatcgccctggacacccaggacctgagcgccgagaccagctgcctgttcatgaagaagagagagatcgtggacaagaacctgagccacgagcccatcctgtgccaccagcacggcatcagaatgagcgacaaggtgctgagagaggagcaggtgtacaccaccaagatcaaccactgggccttcttcaccaccaacctgagcgacgaggacctgcagctgggcagcgacagacagccctacttcggcagctggcccgccggcccccacaagttcatctgcgagcagagacccaagaaggacagagcctgcaagctggccggccccgacagcagaggccagtggatccagatgatcttcaccagcgtggccgccagcgagcccggcaacaaccccgagatcctgaccgacaagctgctgatcggcaacgaggacttcagccccccccccgagaccatggacagcttcatcgagaccaacctgttcagaagctgcctgccccagcccgacatccccaagaacgccctggagagcaccaagaacaagaagagaagaaagaagagaatcttcaacctggtgcccaacttcgacctgctgggccagagcagaatcggcgtgaaggagagagagaagtgcgacctgctgaccaagaaccacggcctgaagatcaccctgggcgaggagaaggacagaatcagcgagagaaacagcgaggaggagaacaagcagaagctgatgaccttcgaccaccaccccctgtggttctacctggacatcatcaaggccacccccctgaacatcgacggccagagatacagccactgcctgagcttcaacagactgagatgcagcgccagcctgtacaagaactacatccccagcttcgtgctgcacaacctgagcagcatctggaagcccagcttcaccaacaagaagctgttcctgaccttcgagagccagaccagagtgggcaacaagctgaacgacgccggcttcatcagccccgagatcctgcacagccaccccgacaccagctgcagcctgggcgtgaccagcgacttccacttcctgaacgagagattcgacagaaagctgaagagatgggaggagcccaaggagctgcccgccgaggacagccaggacctgaccagcaccgactacagaagcctggagctgcccctgagccagggcttcgccttccagctggtgaagctgttcggcagccccggcgtgcccatggagagcctgctgcccgacgactacgtggtgcccctggactggaagaccctgaagatgatctacctgcagtggaagatgagcgtggagaagagacagaagaagatcggctag

SEQ ID NO: 227167 - DNA, 2259 bp, Artificial Sequence
  derived and/or modified sequence
atgagctacggcgagatcgaggagttctgcctggtgagaatcgtgatggccctgtgcagcgccctgatgaccatcttcaccatcaagatgggcaccgccaagcaggccatcgaccagggcagaagccccgtgatcatcgacaacaccaacatccaggcctgggagatgaagccctacgtggaggtggccatcggcaagggctacagagtggagttccacgagcccgagacctggtggaagttcgaccccgaggagctggagaagagaaacaagcacggcgtgagcagaaagaagatcgcccagatgctggacagatacgagtaccagatgagcatcagcatcgtgatgaacagcgtggagcccagccacaagagcacccagagacccccccccccccagggcagacagagagagagagtgctgaagaagaccggccacagactgagcaagaccaagcagaagagaaacagaaagagaaacaagaagcagaacagccagaacagaatcatggaggagaacagcctggagttcctgagcgacctgacccccggcgaccaggaccccagccagagcgaggaggaggacatcgagaagaccagaagagagagcgagtaccccttcatcgacggcctgcagaacgaggtgggcgacttcgtgaccggctacaaggagaagagatggaagaacaaggaccccaaggacagcttccagaacgtgatgagcatcgtggagctggacaacacccccaagaactacctgagcaaggagggcgacaacctgttcgtgagcctgctgctgagacccaacgagatcagcgtgacctgccccatcctgacccagaacctgagctgcgtgaccaccgacgactgcagcggcatgaaggtggagaagcacatcagaaacagacacaccatcgccctggacacccaggacctgagcgccgagaccagctgcctgttcatgaagaagagagagatcgtggacaagaacctgagccacgagcccatcctgtgccaccagcacggcatcagaatgagcgacaaggtgctgagagaggagcaggtgtacaccaccaagatcaaccactgggccttcttcaccaccaacctgagcgacgaggacctgcagctgggcagcgacagacagccctacttcggcagctggcccgccggcccccacaagttcatctgcgagcagagacccaagaaggacagagcctgcaagctggccggccccgacagcagaggccagtggatccagatgatcttcaccagcgtggccgccagcgagcccggcaacaaccccgagatcctgaccgacaagctgctgatcggcaacgaggacttcagccccccccccgagaccatggacagcttcatcgagaccaacctgttcagaagctgcctgccccagcccgacatccccaagaacgccctggagagcaccaagaacaagaagagaagaaagaagagaatcttcaacctggtgcccaacttcgacctgctgggccagagcagaatcggcgtgaaggagagagagaagtgcgacctgctgaccaagaaccacggcctgaagatcaccctgggcgaggagaaggacagaatcagcgagagaaacagcgaggaggagaacaagcagaagctgatgaccttcgaccaccaccccctgtggttctacctggacatcatcaaggccacccccctgaacatcgacggccagagatacagccactgcctgagcttcaacagactgagatgcagcgccagcctgtacaagaactacatccccagcttcgtgctgcacaacctgagcagcatctggaagcccagcttcaccaacaagaagctgttcctgaccttcgagagccagaccagagtgggcaacaagctgaacgacgccggcttcatcagccccgagatcctgcacagccaccccgacaccagctgcagcctgggcgtgaccagcgacttccacttcctgaacgagagattcgacagaaagctgaagagatgggaggagcccaaggagctgcccgccgaggacagccaggacctgaccagcaccgactacagaagcctggagctgcccctgagccagggcttcgccttccagctggtgaagctgttcggcagccccggcgtgcccatggagagcctgctgcccgacgactacgtggtgcccctggactggaagaccctgaagatgatctacctgcagtggaagatgagcgtggagaagagacagaagaagatcggctag

SEQ ID NO: 227168 - DNA, 2214 bp, Artificial Sequence
  derived and/or modified sequence
atggccctgtgtagtgccctgatgactatatttacaattaagatgggtacagctaagcaggccatagaccagggtcggtcgcctgtaattatcgacaacacaaacattcaggcttgggagatgaaaccctatgttgaggtggctattgggaagggatatcgagtggagtttcatgaacccgagacatggtggaagttcgatcccgaggagttggagaaacgcaataaacacggggtaagccgaaagaagattgcgcagatgctagacaggtacgaataccagatgagtatttctatcgtgatgaacagcgttgagccgagccacaaatcgactcagagaccccccccaccgcaggggaggcagagagagcgagtgctcaagaagactggacaccgactctctaaaacaaagcagaagaggaataggaaacggaataagaaacagaactcgcaaaacagaatcatggaagaaaactccctggagttcctatcagatcttaccccaggggatcaggacccgagccaatctgaggaagaagatatagaaaagacaaggcgggaatctgagtacccgttcatcgatggcttgcaaaacgaggtcggggacttcgtgaccgggtacaaggaaaagcgatggaagaataaggaccccaaagatagctttcagaatgtgatgagcatcgtggagttggataacacgccaaagaactacctgtcaaaggaaggcgacaacctatttgtgagtctgctgctccggccaaatgaaatctctgtcacatgtccaattctgacccagaacctctcttgtgttaccaccgacgattgttccggcatgaaggtggagaagcacataagaaaccggcacaccatcgcacttgacacccaggatctcagtgcagaaacaagctgtctctttatgaaaaaacgtgagatagtcgataagaatctttctcacgagcccattttatgtcaccagcatggtatcaggatgagtgataaagtgctgcgcgaggagcaagtgtacacaacaaagattaaccactgggccttctttaccacaaacctgtcagatgaggatctacaacttggctctgacagacaaccctacttcgggagttggcccgccggccctcataaatttatctgcgaacagagacctaagaaggaccgggcatgtaagctagcgggacccgatagccggggccagtggatacagatgattttcacctccgttgcagcatctgaacctgggaacaaccctgaaatcctgaccgataagttgttgattggtaacgaagatttcagcccacccccggagaccatggatagcttcattgagactaaccttttcagatcttgtttaccacagcctgatatcccgaagaacgcactcgaatccactaagaacaagaagaggaggaagaaaaggatctttaacctggttcctaacttcgacctcctggggcagagcagaatcggggtgaaagagagggaaaagtgcgacttgctgactaaaaaccacggcctgaagatcacgttaggtgaggagaaggacagaatatcggagaggaactccgaagaagaaaacaaacagaagcttatgacattcgaccatcatcctctgtggttttatctcgacattatcaaggcgacccctctgaatatcgacggacagcgctattcacattgcctctcattcaacagactccgttgttccgcaagtctgtataaaaactatatcccgagcttcgtgttgcacaacctcagttccatatggaaaccatcattcacgaacaagaagctgttcctgacttttgagagccagactcgagtgggcaataaacttaatgacgccggctttatctcacctgaaatcttacactcacatcccgacactagctgttcactgggcgtaacctcagattttcatttcctaaatgagagatttgatcgtaagttgaaacgctgggaagagccgaaagagctgcctgcggaggactcccaggacttgacttctactgactacaggtccctggaactgccactaagtcaaggtttcgcatttcagcttgtgaagctgttcggaagcccaggcgtgcccatggagagtctgctaccggatgactatgtcgtccctttggactggaaaactctgaagatgatatatcttcagtggaaaatgtctgtcgagaagagacagaagaaaattggctag

SEQ ID NO: 227169 - DNA, 2259 bp, Artificial Sequence
  derived and/or modified sequence
atgtcctacggcgaaatagaagagttctgcctggtgcgaattgttatggcgctgtgcagcgccctcatgacgatcttcaccatcaagatgggtacagcgaagcaagccatagaccagggtagatcccctgttatcatcgataatactaacattcaggcttgggaaatgaagccctatgtggaggttgccatcgggaaaggctacagagtcgaattccacgagcccgagacgtggtggaaatttgacccagaagagctggaaaaaagaaataagcatggagtgtccaggaagaagattgcccagatgttggatagatacgaatatcagatgtcaatctccattgttatgaactcagtggaaccttcccataagagcacacagaggcctccccctccgcagggaagacagagagagcgggtgctgaagaagaccgggcaccgcctgtcaaagactaagcaaaagaggaatcggaagcggaacaaaaagcaaaattcccagaatcgcatcatggaggagaattcacttgaatttctgagcgacctgacaccgggtgatcaggatccctcccagagcgaggaggaagacattgagaagacccgccgggaatccgaatatccctttatagacgggctgcagaacgaagtgggtgacttcgtaaccggatataaagagaagcgctggaaaaacaaggacccaaaggactccttccagaacgtcatgtctatcgtagagctggacaacacacccaaaaactatctctcaaaggagggggacaatctgttcgtatccttactgctccgtccaaatgaaatttcagtgacttgccctattctgacacagaacctgtcgtgcgttaccacggatgactgttccggcatgaaggttgagaagcacatacgcaatagacacactatcgccttagatacacaggacttatcagcagagaccagctgtctttttatgaaaaaacgggagatagttgataagaatttgtcccacgagcctatcttgtgtcaccagcatggaatccggatgagtgacaaggtgctgagggaagaacaggtctatacgaccaaaattaatcactgggccttcttcaccacaaatttgtctgatgaggatctgcagctcgggtctgaccgacaaccctatttcggcagctggcccgccggtcctcacaagtttatttgtgaacaaagacctaagaaggaccgggcatgtaaactggctggccctgattcgaggggccagtggattcagatgattttcacctccgttgccgcatcagagcccggcaataaccctgaaatcttgaccgataagctgctgattggaaatgaggacttcagcccgcctcctgagactatggattcttttatcgagactaacctgtttcggagctgcctcccacaacccgacattccaaagaacgcactggagtcgactaagaacaaaaagcgacgcaaaaaaaggatctttaatctagtgcctaatttcgatctcttaggtcagtctcgcattggggtgaaagagagagagaagtgcgatctcttgaccaagaaccacgggctgaagataacactgggagaggagaaagataggatttctgaacgtaactcagaagaggagaacaaacagaagctgatgacatttgaccaccatcctctgtggttctatctcgatatcatcaaagctacacccttgaatattgacggtcagaggtactcccattgcctgagtttcaatagactaaggtgtagcgcatcactgtataaaaattatattcccagtttcgtgctccacaacctgtcatctatatggaagccatcctttaccaataagaagttgttcctgactttcgagtcccagactcgggtggggaacaagcttaacgatgcaggcttcatcagtcctgagatcttgcatagccacccagacacaagctgctcattgggcgtgacaagcgactttcatttccttaatgaacgattcgatcgcaaactaaaaaggtgggaggagcccaaggagctgcccgctgaagatagccaggatctgacgagcacagattatcgtagccttgagctgcctctgagtcaaggttttgctttccagctcgtgaagttgttcgggagtccgggagtgccgatggagtcgctactacccgatgactatgttgtgccactggactggaagaccttaaagatgatttacctccagtggaagatgtccgtggagaagcggcagaagaaaatcggatag

SEQ ID NO: 227170 - DNA, 2214 bp, Artificial Sequence
  derived and/or modified sequence
atggccctgtgcagcgccctgatgaccatcttcaccatcaagatgggcacagccaagcaggccatcgaccagggccgcagccctgtgatcatcgacaacaccaacatccaggcctgggagatgaagccctacgtggaggtggccatcggcaagggctacagagtggagttccacgagcctgagacctggtggaagtttgatcctgaggagctggagaagaggaacaagcatggagtgtccaggaagaagatcgcccagatgctggacagatatgagtaccagatgagcatcagcatcgtgatgaacagcgtggagcccagccacaagagcacccagaggcctcctccaccccagggccggcagcgggagcgggtgctgaagaagacaggccaccggctgagcaagaccaagcagaagaggaacaggaagaggaacaagaagcagaacagccagaaccgcatcatggaggagaacagcctggagttcctgagtgacctgacccctggggaccaggaccccagccagagcgaggaggaggacatcgagaagacccggcgggagagcgagtaccccttcattgatggcctgcagaatgaggtgggggactttgtgacaggctacaaggagaagcgctggaagaacaaggaccccaaggacagcttccagaatgtgatgagcatcgtggagctggacaacacccccaagaactacctgagcaaggagggggacaacctgtttgtgtccctgctgctgcggcccaatgagatctctgtgacctgccccatcctgacccagaacctgagctgtgtgaccacagatgactgcagcggcatgaaggtggagaagcacatccggaacagacacaccatcgccctggacacccaggacctgtctgctgagaccagctgcctcttcatgaagaagcgggagatcgtggacaagaacctgagccatgagcccatcctgtgccaccagcacggcatccgcatgtctgacaaggtgctgcgggaggagcaggtgtacaccaccaagatcaaccactgggccttcttcaccaccaacctgagtgatgaggacctgcagctgggcagtgaccggcagccctacttcggctcctggccagctggcccccacaagttcatctgtgagcagaggcccaagaaggaccgggcctgcaagctggccggccctgacagccggggccagtggatccagatgatcttcacctctgtggccgccagcgagcccggcaacaaccctgagatcctgacagacaagctgctgattggaaatgaagacttcagccccccacctgagaccatggacagcttcatcgagaccaacctcttccgcagctgcctgccccagcctgacatccccaagaatgccctggagagcaccaagaacaagaagaggaggaagaagaggatcttcaacctggtgcccaactttgacctgctgggccagagccgcatcggcgtgaaggagcgggagaagtgtgacctgctgaccaagaaccacggcctgaagatcaccctgggggaggagaaggaccgcatcagcgagagaaattctgaggaggagaacaagcagaagctgatgacctttgaccaccaccccctgtggttctacctggacatcatcaaggccacccccctgaacattgatggccagcgctacagccactgcctgtccttcaaccggctgcgctgcagcgccagcctgtacaagaactacatccccagctttgtgctgcacaacctgagcagcatctggaagcccagcttcaccaacaagaagctgttcctgacctttgagagccagaccagggtgggcaacaagctgaatgatgctggcttcatcagccctgagatcctgcacagccacccagacaccagctgcagcctgggcgtgaccagtgacttccacttcctgaatgaaagatttgacaggaagctgaagcgctgggaggagcccaaggagctgcctgctgaggacagccaggacctgaccagcacagactaccgcagcctggagctgcccctgagccagggctttgccttccagctggtgaagctgtttggcagccctggggtgcccatggagagcctgctgcctgatgattatgtggtgcccctggactggaagaccctgaagatgatctacctgcagtggaagatgtctgtggagaagaggcagaagaagattggatag

SEQ ID NO: 227171 - DNA, 2259 bp, Artificial Sequence
  derived and/or modified sequence
atgtcctatggagaaattgaggagttctgcctggtgcgcatcgtgatggccctgtgcagcgccctgatgaccatcttcaccatcaagatgggcacagccaagcaggccatcgaccagggccgcagccctgtgatcatcgacaacaccaacatccaggcctgggagatgaagccctacgtggaggtggccatcggcaagggctacagagtggagttccacgagcctgagacctggtggaagtttgatcctgaggagctggagaagaggaacaagcacggcgtgtccaggaagaagatcgcccagatgctggacagatatgagtaccagatgagcatcagcatcgtgatgaacagcgtggagcccagccacaagagcacccagaggcctcctccaccccagggccggcagcgggagcgggtgctgaagaagacaggccaccggctgagcaagaccaagcagaagaggaacaggaagaggaacaagaagcagaacagccagaaccgcatcatggaggagaacagcctggagttcctgagtgacctgacccctggggaccaggaccccagccagagcgaggaggaggacatcgagaagacccggcgggagagcgagtaccccttcattgatggcctgcagaatgaggtgggggactttgtgacaggctacaaggagaagcgctggaagaacaaggaccccaaggacagcttccagaatgtgatgagcatcgtggagctggacaacacccccaagaactacctgagcaaggagggggacaacctgtttgtgtccctgctgctgcggcccaatgagatctctgtgacctgccccatcctgacccagaacctgagctgtgtgaccacagatgactgcagcggcatgaaggtggagaagcacatccggaacagacacaccatcgccctggacacccaggacctgtctgctgagaccagctgcctcttcatgaagaagcgggagatcgtggacaagaacctgagccatgagcccatcctgtgccaccagcacggcatccgcatgtctgacaaggtgctgcgggaggagcaggtgtacaccaccaagatcaaccactgggccttcttcaccaccaacctgagtgatgaggacctgcagctgggcagtgaccggcagccctacttcggctcctggccagctggcccccacaagttcatctgtgagcagaggcccaagaaggaccgggcctgcaagctggccggccctgacagccggggccagtggatccagatgatcttcacctctgtggccgccagcgagcccggcaacaaccctgagatcctgacagacaagctgctgattggaaatgaagacttcagccccccacctgagaccatggacagcttcatcgagaccaacctcttccgcagctgcctgccccagcctgacatccccaagaatgccctggagagcaccaagaacaagaagaggaggaagaagaggatcttcaacctggtgcccaactttgacctgctgggccagagcagaattggagtgaaggagcgggagaagtgtgacctgctgaccaagaaccacggcctgaagatcaccctgggggaggagaaggaccgcatcagcgagaggaacagcgaggaggagaacaagcagaagctgatgacctttgaccaccaccccctgtggttctacctggacatcatcaaggccacccccctgaacattgatggccagcgctacagccactgcctgtccttcaaccggctgcgctgcagcgccagcctgtacaagaactacatccccagctttgtgctgcacaacctgagcagcatctggaagcccagcttcaccaacaagaagctgttcctgacctttgagagccagaccagggtgggcaacaagctgaatgatgctggcttcatcagccctgagatcctgcacagccacccagacaccagctgcagcctgggcgtgaccagtgacttccacttcctgaatgaaagatttgacaggaagctgaagcgctgggaggagcccaaggagctgcctgctgaggacagccaggacctgaccagcacagactaccgcagcctggagctgcccctgagccagggctttgccttccagctggtgaagctgtttggcagccctggggtgcccatggagagcctgctgcctgatgattatgtggtgcccctggactggaagaccctgaagatgatctacctgcagtggaagatgtctgtggagaagaggcagaagaagattggatag

SEQ ID NO: 227172 - DNA, 2214 bp, Artificial Sequence
  derived and/or modified sequence
atggccctgtgcagcgccctgatgaccatcttcaccatcaagatgggcacagccaagcaggcaatcgatcagggccgaagccccgttataatcgataatactaacattcaagcctgggagatgaagccatatgtggaggtcgcgattggaaagggatatagagtcgagtttcacgagcccgagacatggtggaaatttgacccggaagagcttgaaaagagaaacaagcatggcgtaagtagaaagaagatagcgcagatgctggatcgctatgagtaccagatgagtattagcatcgtgatgaacagcgtcgagccgtctcataagtccacccagcgccctccaccccctcagggtagacagcgggaaagagtgctgaagaagaccggtcaccgactgtccaagacaaaacagaaacggaatcgcaagcgtaataaaaaacaaaactcccagaatcggattatggaggagaactcgctggagttcttatccgatctgacccccggagaccaggatccctcccagtccgaggaggaggacatcgaaaagacacgtagggagagcgaatatccatttattgatggcctgcagaacgaagtgggcgactttgtcacaggctacaaggagaagcgctggaagaacaaagaccccaaggatagcttccagaatgtgatgtcaatagttgaattagacaatacacccaagaactatctgtcaaaggagggcgacaacctgtttgtcagtctgctgctccggcccaacgaaatctctgtgacttgtccaattctcacgcagaacctgagttgtgtcacgaccgacgactgttccgggatgaaggtggagaagcacatccgtaacagacacactattgcgctggacacacaggacctgtcagcagagacaagctgtcttttcatgaagaagcgtgagatcgtggacaaaaatctctctcacgagcctatcctgtgtcaccaacacggaatacggatgagtgacaaggttctgagggaggaacaggtctataccacaaagatcaaccattgggcatttttcaccacgaatttgtctgacgaggacctgcaactaggctctgacagacaaccttatttcggctcctggccagccggtccgcataagtttatttgcgagcaacgtccaaaaaaggatagggcgtgtaagttggcgggcccagacagtagagggcagtggatccagatgatctttaccagtgtagctgccagtgagcctggtaacaacccggagatcctcacagacaagttactcataggcaatgaggatttctcaccgccacctgagaccatggactcgttcatcgagaccaatctgtttaggtcttgcctgcctcagcccgatattcccaagaatgcactggagagtaccaagaacaagaaacggcgcaagaaaagaatctttaacctggtccctaatttcgacctgcttgggcagtcgcgcatcggagtgaaagagcgggaaaaatgcgaccttctgactaagaaccacggactgaaaatcaccctcggagaagaaaaagatcgaatctctgagagaaactctgaggaggagaataaacaaaaacttatgactttcgaccatcatcccctgtggttctatttagacatcatcaaggctacccccctcaacatcgacggccagcgctactctcattgcctctcgttcaataggctccgttgtagcgctagtttgtacaaaaattacataccatcctttgtgctgcataacctcagcagcatatggaagcccagttttactaataaaaaattattcttgacgtttgaaagtcagactagagtcggtaataagctcaatgatgccggattcatttcccctgaaatcttgcatagccacccagatacatcttgctcattgggcgtaacatcggattttcatttcctgaacgaacgatttgatcgaaagttgaaaagatgggaagaaccgaaggagctcccggcagaagactcccaggacctgacaagtactgattaccgttcgttggagctaccactgtcccagggatttgcattccagttggtgaagctgttcggttcccctggagtgcccatggagtccctgctgcccgatgactacgttgtgccattagactggaaaactctgaaaatgatctatctccagtggaagatgtctgtggaaaaacgccagaagaaaatcgggtag

SEQ ID NO: 227173 - DNA, 2259 bp, Artificial Sequence
  derived and/or modified sequence
atgagctacggcgagatcgaggagttctgcctggtgcggatcgtgatggcgctttgttccgcgctgatgaccatctttactatcaaaatgggcacagctaagcaggcaattgatcagggtagaagccctgtgatcattgacaacacaaacatccaggcgtgggagatgaaaccgtatgtcgaggtggcaatcggtaaaggataccgcgtggaattccacgaacccgagacgtggtggaagtttgacccagaagagctcgagaaaaggaacaaacacggcgtttctcgaaaaaaaatcgcccagatgttggataggtatgagtatcaaatgagtatttcaatcgtaatgaatagtgtggagccatcacacaagagcacccagcggccaccgccccctcagggaaggcagagggagagggtgctaaagaaaaccggccataggttgagcaagaccaaacaaaaaaggaatagaaagagaaataagaagcagaacagccagaatcgcattatggaggagaattccctggaattccttagcgacttgacccccggcgatcaggacccctctcagagcgaagaagaagatattgaaaaaacacgcagagagagcgaatacccattcatagacgggctccagaatgaagtgggggacttcgtgaccggctacaaggaaaaacggtggaagaataaagaccctaaagactccttccagaacgtgatgtctatcgtcgagctggacaacaccccaaaaaattacctttccaaagagggagataatctctttgtgtccctactgctgcggcctaacgagataagcgtcacttgtcccattctaacacagaatctgtcatgtgttactactgatgattgctccggcatgaaggtggaaaagcacattcgtaacaggcacacaattgctctggacacccaggacctgagtgctgaaactagttgtttatttatgaagaagcgggagattgtcgataagaatctaagtcatgagccgatcctgtgccaccagcacggcattcgcatgagcgataaagtcctcagggaggagcaggtttacaccaccaagatcaatcactgggcctttttcaccacaaatcttagcgacgaagacttacaactgggctccgatagacagccttactttggctcatggcctgcaggcccccacaagttcatttgcgagcagcgccctaagaaggatcgcgcttgcaaacttgctgggccagacagccggggtcagtggatacagatgatttttacatccgttgctgcttccgaaccaggcaacaacccagaaattcttaccgataaactgttgatcggcaacgaagatttcagccccccaccagaaacaatggattcatttatcgagaccaacctgttccgatcttgtcttccgcaacccgatatccctaagaatgccttggaatctaccaaaaacaagaagagaaggaagaaaagaattttcaacctggtccctaatttcgacctcctgggccagagtcggattggggtcaaagaaagagagaagtgtgacctgctgaccaaaaatcatgggctcaaaatcacattaggagaggagaaagatcggatctcagagagaaactctgaggaagagaacaagcagaagctcatgaccttcgaccatcacccactgtggttctatctggacataattaaagcaacccctctgaacattgatgggcagaggtactcccactgtctgagctttaacagacttcggtgcagtgcctccctctacaaaaattatatcccatctttcgtactgcataacctttctagcatctggaagccaagcttcaccaacaagaaactatttctgacgtttgagagccagactagggtcggcaataaattaaatgatgcagggttcatatcacctgaaatcctgcactcccaccccgacacatcttgcagcctgggagtcaccagcgatttccatttcctgaatgagagattcgatcgcaaactcaagcgatgggaggagcccaaggagctgccagctgaggattctcaggatttgacctcaactgattaccgcagtctggagctgccactgagccaggggttcgcattccagctcgttaagttattcggcagcccaggcgtgccgatggaaagtttgctacccgacgattacgtggtccccctggattggaagaccctgaaaatgatttacttgcagtggaagatgtctgtggaaaaaagacagaaaaaaatcggatag

SEQ ID NO: 227174 - DNA, 2526 bp, Artificial Sequence
  derived and/or modified sequence
atcttgcgtacggagaggttcgtgtcttcctaaaagaaggttttattgggaggtaaaggtcaatgcgtaggggtagagtaagaattctgcttggtcagaatcgtgatggcattgtgttcagcactgatgactattttcaccatcaagatgggtacagcaaaacaagctatcgatcagggaagatctccagttataatagataacactaatatacaagcttgggaaatgaagccatatgtggaagtggccataggaaaaggatacagagtagagtttcatgaacctgaaacttggtggaaatttgatcctgaagaattagaaaagaggaataaacatggtgtgtctcgaaagaagattgctcagatgttggatcgttatgaatatcaaatgtccatttctattgtaatgaattcagtggaaccatcacacaaaagcacacaaagacctcctcctccacaggggagacagagagaaagagttttgaagaaaactgggcataggctcagcaaaaccaaacagaagaggaacagaaaaagaaacaaaaagcagaacagtcagaatagaatcatggaggaaaactcattagaattcttaagtgatcttacaccgggagatcaggacccatctcagagtgaagaggaagacattgaaaagaccagaagagaatcagaatatcccttcattgatggtctacaaaatgaagtcggagattttgtgactggatataaagaaaaaagatggaaaaataaagatcctaaagacagtttccaaaacgttatgtctatagttgaattagacaacacaccaaagaattacctctctaaggaaggtgataacttgtttgtaagtttgttactgaggccaaatgaaatctccgttacttgtccaatactgactcaaaacctttcctgtgtaacaactgatgactgctctggcatgaaggtagaaaagcatattagaaataggcataccatagcattagacacccaggacctttctgcggaaacttcatgcttatttatgaagaagagagaaatagtagataaaaatctctcacatgaacccattctgtgccatcaacatggaatcagaatgtcagataaagttttaagagaggaacaagtgtatacaactaaaatcaatcactgggcttttttcacaaccaatttatctgatgaagatttacagctgggctctgacagacagccctattttggtagctggcctgcaggacctcataagtttatatgtgaacagagaccaaagaaagatagagcatgtaagttggctggtcctgacagcagggggcaatggattcaaatgatcttcacttcggtggcagcatcagaaccaggaaacaatccagaaatattgacagacaaactactgataggaaatgaagatttttcacctccacctgaaactatggattcattcatagaaacaaacctcttcagaagctgcttacctcaaccggatataccaaagaatgccttagaatcaacaaaaaataagaaaaggaggaagaaaaggattttcaatttggtaccaaattttgacttattaggacagagtcgtatcggtgtaaaagaaagggagaaatgtgacctgttaacaaaaaaccatggactaaaaattactttgggagaagaaaaagatagaatttcagaaaggaacagtgaagaggagaataaacaaaaacttatgacctttgatcatcatccattgtggttttaccttgatattatcaaagctacccctttaaatattgatggacagcgttattctcattgcctgtcatttaacagactaaggtgctctgcatctttatacaaaaattatattccttcttttgtgctacataatttatctagtatttggaagccatcttttacaaacaagaaactgtttttgactttcgaatctcagacaagagtaggtaataaactaaatgatgcagggtttatttctccagaaattttacatagtcatcctgatacttcgtgctctttgggagtcacttctgattttcactttttaaatgaaaggtttgatagaaagctgaaaagatgggaagaacctaaggaattaccagctgaggacagccaagacttaacaagcactgactaccgttcccttgagctaccattatcacaagggtttgcctttcaattagtaaagctttttggatctccaggcgttccaatggaatccttgttgcctgatgactatgtggttccccttgactggaagacactaaagatgatctacttgcaatggaagatgtcagtggagaaaagacagaagaagattggttgaaaaatgaaaattccttgaactttgagttctgctgtcttcatggtactgctgaagatcatgatcacggagaaaagtcagagtgctcagtgccaacccaagggattctttccagagacgtacccgttggataccaaaattagtttggataatctgttcaaccattcttgataagttatctgaataataaaaaaactcaacagaggaggt

SEQ ID NO: 227175 - DNA, 2482 bp, Artificial Sequence
  derived and/or modified sequence
gaccgccatcttgcgtacggagatgtcttatggtgaaattgaagaattctgcttggtcagaatcgtgatggcattgtgttcagcactgatgactattttcaccatcaagatgggtacagcaaaacaagctatcgatcagggaagatctccagttataatagataacactaatatacaagcttgggaaatgaagccatatgtggaagtggccataggaaaaggatacagagtagagtttcatgaacctgaaacttggtggaaatttgatcctgaagaattagaaaagaggaataaacatggtgtgtctcgaaagaagattgctcagatgttggatcgttatgaatatcaaatgtccatttctattgtaatgaattcagtggaaccatcacacaaaagcacacaaagacctcctcctccacaggggagacagagagaaagagttttgaagaaaactgggcataggctcagcaaaaccaaacagaagaggaacagaaaaagaaacaaaaagcagaacagtcagaatagaatcatggaggaaaactcattagaattcttaagtgatcttacaccgggagatcaggacccatctcagagtgaagaggaagacattgaaaagaccagaagagaatcagaatatcccttcattgatggtctacaaaatgaagtcggagattttgtgactggatataaagaaaaaagatggaaaaataaagatcctaaagacagtttccaaaacgttatgtctatagttgaattagacaacacaccaaagaattacctctctaaggaaggtgataacttgtttgtaagtttgttactgaggccaaatgaaatctccgttacttgtccaatactgactcaaaacctttcctgtgtaacaactgatgactgctctggcatgaaggtagaaaagcatattagaaataggcataccatagcattagacacccaggacctttctgcggaaacttcatgcttatttatgaagaagagagaaatagtagataaaaatctctcacatgaacccattctgtgccatcaacatggaatcagaatgtcagataaagttttaagagaggaacaagtgtatacaactaaaatcaatcactgggcttttttcacaaccaatttatctgatgaagatttacagctgggctctgacagacagccctattttggtagctggcctgcaggacctcataagtttatatgtgaacagagaccaaagaaagatagagcatgtaagttggctggtcctgacagcagggggcaatggattcaaatgatcttcacttcggtggcagcatcagaaccaggaaacaatccagaaatattgacagacaaactactgataggaaatgaagatttttcacctccacctgaaactatggattcattcatagaaacaaacctcttcagaagctgcttacctcaaccggatataccaaagaatgccttagaatcaacaaaaaataagaaaaggaggaagaaaaggattttcaatttggtaccaaattttgacttattaggacagagtcgtatcggtgtaaaagaaagggagaaatgtgacctgttaacaaaaaaccatggactaaaaattactttgggagaagaaaaagatagaatttcagaaaggaacagtgaagaggagaataaacaaaaacttatgacctttgatcatcatccattgtggttttaccttgatattatcaaagctacccctttaaatattgatggacagcgttattctcattgcctgtcatttaacagactaaggtgctctgcatctttatacaaaaattatattccttcttttgtgctacataatttatctagtatttggaagccatcttttacaaacaagaaactgtttttgactttcgaatctcagacaagagtaggtaataaactaaatgatgcagggtttatttctccagaaattttacatagtcatcctgatacttcgtgctctttgggagtcacttctgattttcactttttaaatgaaaggtttgatagaaagctgaaaagatgggaagaacctaaggaattaccagctgaggacagccaagacttaacaagcactgactaccgttcccttgagctaccattatcacaagggtttgcctttcaattagtaaagctttttggatctccaggcgttccaatggaatccttgttgcctgatgactatgtggttccccttgactggaagacactaaagatgatctacttgcaatggaagatgtcagtggagaaaagacagaagaagattggttgaaaaatgaaaattccttgaactttgagttctgctgtcttcatggtactgctgaagatcatgatcacggagaaaagtcagagtgctcagtgccaacccaagggattctttccagagacgtacccgttggataccaaaattagtttggataatctgttcaaccattcttgataagttatctgaataataaaaaaactcaacaga

SEQ ID NO: 227176 - DNA, 2214 bp, Artificial Sequence
  derived and/or modified sequence
atggcactatgtagtgccctcatgaccattttcacgatcaaaatggggacagcaaaacaggctatcgaccaaggcagatctcctgttatcattgataacacaaacatccaggcatgggagatgaagccatatgtggaggtggcgattgggaagggataccgagtggaattccacgagcctgagacctggtggaagttcgacccggaagagctcgaaaagaggaacaaacacggagtctcaagaaaaaagatcgcccaaatgctggatagatacgaatatcaaatgtcaataagtatcgtgatgaattccgtcgagccatcccataaatctacacaaagaccaccgcctccccaggggcgacagagggagcgggtcctcaaaaaaacaggccacagactctccaaaaccaagcaaaaacgtaataggaagcggaacaaaaagcagaattcacaaaacagaatcatggaggaaaattccttggaattcctgtccgatctcacacccggtgaccaggacccctcacagagcgaggaagaagatattgaaaaaactcgacgcgaaagcgagtacccattcatcgatggtctccagaatgaggttggcgactttgttaccggctacaaggagaaaaggtggaaaaacaaggatccgaaggactcgttccagaatgtgatgtcaattgttgaattggataatacaccaaaaaactacctgagcaaagaaggggacaatctgttcgtgagcctgctccttaggcccaacgaaatttcagtaacttgtccgatcctgacacagaacctgtcctgtgtcacgacagacgattgctccgggatgaaagtagaaaagcatattcgaaatcgccacacgattgccctcgacactcaggatctgtcagcagaaacatcatgcctctttatgaaaaagcgagagatagtcgataagaatctgagccacgagcctatattgtgccaccagcacggtattagaatgtccgataaggtattgcgagaggagcaggtttataccacaaaaataaatcactgggcattcttcaccactaacctgagcgatgaggatctccagttgggtagtgaccgccaaccctacttcggctcttggcccgcaggtcctcacaagtttatttgtgaacagagaccaaaaaaagatcgcgcatgcaagttagcaggccctgattcacgtggtcaatggatacagatgattttcaccagcgtggccgcaagcgagcctggtaacaatccagaaatcctgactgataagctgcttatcggcaatgaagatttctctcctcctccggagactatggacagcttcatcgagacgaacttattccggagctgtctcccccagccagatataccgaagaacgccctggaatctaccaaaaataagaagaggcgtaaaaagcgcatctttaacctggtgccaaacttcgacctactggggcagagcagaatcggtgtgaaggagcgcgagaaatgcgacctcctgaccaaaaaccacggcttgaagataaccctcggcgaggagaaggaccggatatcagaacggaattctgaagaggaaaacaagcaaaaactcatgacctttgaccatcaccctctgtggttttaccttgacatcattaaagccacccctttgaatatcgatggccagagatacagtcactgcttgagctttaaccgacttaggtgtagcgccagtctgtataagaactatatccccagttttgtgttgcacaacctctcttccatctggaaaccttcctttacaaacaagaagctgttcctaacttttgaatcccagactagggtgggtaacaagctgaacgacgccggattcataagtcccgaaattctccactcccacccagacacttcctgttcgctgggagtgacaagcgacttccacttcttgaacgagcggttcgatcgcaaactcaaacgatgggaggaaccaaaggaactcccagccgaggacagccaagatctgacatctaccgactaccgttcgctcgagttgcccctctcccagggcttcgccttccagctcgttaaattattcggctctcccggagtgcccatggaatctctgctgccagatgactacgtggtccctctggattggaagacactgaaaatgatatatttgcagtggaagatgtctgtcgagaaacgacagaaaaaaattggttag

SEQ ID NO: 227177 - DNA, 2259 bp, Artificial Sequence
  derived and/or modified sequence
atgagctacggcgaaatcgaagaattctgtttagttcgtatagtaatggccttatgttccgccctgatgactatatttaccatcaagatgggtaccgccaaacaggcaatagatcagggccgaagccccgtgattattgataataccaacatccaagcctgggaaatgaagccatacgtcgaagtcgccatcggcaaaggctaccgagtggagttccacgaaccagagacatggtggaaattcgaccccgaggaactcgagaagagaaacaaacacggggtatctcggaaaaagattgctcaaatgcttgatcgatacgagtaccagatgtcaatttccatcgtaatgaattcagtggagccgtctcacaaatccacgcagagaccgccaccgcctcaggggagacagagggagagagtgctgaagaagacagggcaccgattgagtaagaccaaacaaaagcgtaatagaaaacggaataagaagcaaaactcacagaatcggatcatggaggaaaattccttggagtttctcagcgatcttacacccggagaccaggacccatctcagtccgaagaggaggacatcgagaaaacacgtagggagtctgagtaccccttcattgacggactacagaatgaagtgggtgactttgtcacaggctacaaagaaaaaaggtggaagaacaaggatccaaaggacagcttccagaacgtcatgagcatagttgagcttgataacacacctaagaattacctttcgaaagagggtgacaacttgtttgtctcactgctgctgcgcccaaatgagatttctgttacatgccctattttgacacagaacttgagttgtgtgactacagatgactgcagcgggatgaaggtggaaaagcatatccgaaaccgtcacacaatcgctcttgatactcaggacctgagtgctgagacatcctgtttgttcatgaagaagcgcgaaattgtggataagaacctgtctcacgagccaattctgtgccatcagcacggcatccgaatgagcgacaaggtcctccgggaggagcaggtgtacacaacgaagattaaccactgggctttcttcacgactaacctctcagacgaggacctgcaactgggcagtgaccgacaaccttatttcggcagctggcccgctggccctcacaaattcatctgcgagcagcgacccaagaaagatcgggcatgtaaattggccggtccggactcccgagggcagtggattcaaatgatctttacgagcgtggcggcttccgagccaggcaataaccccgaaatactcaccgacaagctgttgattggtaacgaggacttctcacctcctccagaaactatggactcctttattgagacaaacctgtttcgcagttgtctcccacagcccgacatcccaaagaacgcgctggaaagcactaagaataaaaagcgcagaaaaaagcggatttttaaccttgtgccaaactttgatctcctgggccagtcgagaattggtgtgaaagaacgggagaagtgtgatctcctgacaaaaaaccatggcctaaaaatcacacttggagaggaaaaagacaggatctccgagcggaactctgaggaggaaaacaaacaaaaactgatgacttttgatcaccaccccctgtggttctacctcgatatcattaaagccacgcctctcaacattgatggccagcgctactcacactgcctgagttttaatagactcaggtgctctgccagtctgtacaagaactatatcccttccttcgtgctgcacaatctatcatctatctggaagccttccttcacgaataagaagcttttcctgacgtttgaaagccagactcgtgttgggaataagctaaacgacgctggtttcataagtcctgagatccttcatagtcaccctgatacgtcatgttccctcggcgtcacatctgacttccatttcctaaatgagcgctttgaccgcaaactgaagagatgggaagagccaaaggagctgcctgccgaagacagccaagatttgacatccactgattatcggtctctggagttgcccttgagccaggggttcgcctttcagttagtcaaactcttcggatcacctggtgtccccatggaaagtttacttcctgatgattacgtggtcccactggattggaagactctgaaaatgatttatctccagtggaagatgtctgttgaaaaaaggcagaagaagattggctag

SEQ ID NO: 227178 - protein, 217 aa, Artificial Sequence
  derived and/or modified sequence
MSGGLAPSKSTVYVSNLPFSLTNNDLYRIFSKYGKVVKVTIMKDKDTRKSKGVAFILFLDKDSAQNCTRAINNKQLFGRVIKASIAIDNGRAAEFIRRRNYFDKSKCYECGESGHLSYACPKNMLGEREPPKKKEKKKKKKAPEPEEEIEEVEESEDEGEDPALDSLSQAIAFQQAKIEEEQKKWKPSSGVPSTSDDSRRPRIKKSTYFSDEEELSD

SEQ ID NO: 227179 - DNA, 1827 bp, Artificial Sequence
  derived and/or modified sequence
gcccggatctcaaacagtcgggaagaagcaccgtggctgctattatctgctctccgcgcctgacccctcccaggactcgtgatgccaaggccgctgcgagcggctacgaagagtcggggttgagccccagctgagccgagggctcgcactcttctggtctcccaggcccaacccacctgaagaaatgagtggtggattggctccaagtaagagcacagtgtatgtatccaacttgcctttttccctgacaaacaatgacttgtaccggatattttccaagtatggcaaagttgtaaaggttaccatcatgaaagataaagataccaggaagagtaaaggggttgcatttattttatttttggataaagactctgcacaaaactgtaccagggcaataaacaacaaacagttatttggtagagtgataaaagcaagcattgctattgacaatggaagagcagctgagttcatccgaaggcgaaactactttgataaatctaagtgttatgaatgtggggaaagtggacacttaagttatgcctgtccgaaaaatatgctcggagaacgtgagcctccaaagaagaaagaaaaaaagaaaaaaaagaaagctcctgaaccagaagaagaaattgaggaagtagaagaaagtgaagatgaaggggaggatcctgctcttgacagcctcagtcaggccatagcattccagcaagccaaaattgaagaagaacaaaaaaaatggaaacccagttcaggagtcccctcaacatcagatgattcaagacgcccaaggataaagaaaagcacatatttcagtgatgaggaagaacttagtgattaaaatcttgccccagcacagtaataaaaatcaagatttgttagtaacaatcttgaagagctaattttaataaaaataagaaaaattaatactatcatgttaatactattattgtcatcccaagaaaaaagatattttaaaaatttatttgaaaagttcattataagggctttattcatgcctgatttgtttacatgaggacttctgaaattaatccttaaaacaaacttcctgaagaccgaaaagttgaatgatttattgttacttatattaataaacttttcaagagaattttgtctttaaatatgggtgttttgtcatcatatttcttgtagctttatcccaatctggataaattgtaaatacctataaaataaattataaatacctataaaatataaagtaacatagctctaaaaggcttaaaatcaaacacaggtgttatttgtctgccctacccatagcaccaaattccattccctagaagaaactacttacatgtgcacacatgtagctaaataaagtacatatatttcagtcacttaataaaagaataaaggagaattattcaatctcttatacttctcctaccttcctcaatattcccaatgtggctgtattaaaaatttgggggaatccatatatatcttttttaataaccaagtaaatacttttcatttctgagccaaggaatatgctatgattacgttttttcctagagttaataattgtctattttttttccatgtattgtctttgtatttatgactaaatcttcccattctgtctgcaggtgggtatatggtaatgggattagagagcctttaattttctgctttgtatatttctatattgtttaactttgtaagaatgcccattacttttttaactagtaaaagcaatagaaataagttaatactatcatagtaatattattattgtcatcccaagaaaaaatatattaaaaagatatttgaaatttcattataaaa

SEQ ID NO: 227180 - DNA, 654 bp, Artificial Sequence
  derived and/or modified sequence
atgagcggcggcctggcccccagcaagagcaccgtgtacgtgagcaacctgcccttcagcctgaccaacaacgacctgtacagaatcttcagcaagtacggcaaggtggtgaaggtgaccatcatgaaggacaaggacaccagaaagagcaagggcgtggccttcatcctgttcctggacaaggacagcgcccagaactgcaccagagccatcaacaacaagcagctgttcggcagagtgatcaaggccagcatcgccatcgacaacggcagagccgccgagttcatcagaagaagaaactacttcgacaagagcaagtgctacgagtgcggcgagagcggccacctgagctacgcctgccccaagaacatgctgggcgagagagagccccccaagaagaaggagaagaagaagaagaagaaggcccccgagcccgaggaggagatcgaggaggtggaggagagcgaggacgagggcgaggaccccgccctggacagcctgagccaggccatcgccttccagcaggccaagatcgaggaggagcagaagaagtggaagcccagcagcggcgtgcccagcaccagcgacgacagcagaagacccagaatcaagaagagcacctacttcagcgacgaggaggagctgagcgactag

SEQ ID NO: 227181 - DNA, 654 bp, Artificial Sequence
  derived and/or modified sequence
atgtctgggggcctggcccctagcaaaagcaccgtttatgtatccaatttgccttttagccttactaataacgacctgtacagaatttttagcaagtacgggaaggtggtcaaggtgactattatgaaagataaggatacaagaaagagcaagggggtggcgtttatattattcctggacaaagactcagctcaaaactgcacgagggcaatcaacaacaagcagctgtttggaagagttatcaaggcgtccatcgctatcgataacggtcgagctgcggagttcattcggcgacgtaactacttcgacaagtctaaatgttatgagtgcggggagtccggtcatttatcctatgcctgcccaaaaaacatgttaggggaaagggagcccccaaagaaaaaagagaagaaaaagaagaaaaaagccccagagcccgaggaagagatcgaagaggtggaagagagtgaggacgagggagaagacccggctctggattctctgtcacaggccatcgccttccagcaggctaaaatcgaggaagaacaaaagaaatggaagccgtcctccggagtgccatcaacctccgacgattcgaggaggccgaggatcaaaaagtcgacctatttttcggacgaagaggagctcagcgattag

SEQ ID NO: 227182 - DNA, 654 bp, Artificial Sequence
  derived and/or modified sequence
atgtctgggggcctggcccccagcaagagcacagtgtatgtgagcaacctgcccttcagcctgaccaacaatgacctgtaccgcatcttcagcaaatatggcaaggtggtgaaggtgaccatcatgaaggacaaggacaccaggaagagcaaaggagtggccttcatcctcttcctggacaaggacagcgcccagaactgcacccgggccatcaacaacaagcagctgtttggccgggtcatcaaggccagcatcgccatcgacaatggccgggctgctgagttcatcagaagaagaaactactttgacaagagcaagtgctatgaatgtggggagagcggccacctgtcctatgcctgccccaagaacatgctgggggagcgggagccccccaagaagaaggagaagaagaagaagaagaaggcccctgagcctgaggaggagattgaggaggtggaggagagtgaagatgaaggagaggaccctgccctggacagcctgagccaggccatcgccttccagcaggccaagattgaggaggagcagaagaagtggaagcccagcagtggagtgcccagcaccagtgatgacagcagaagaccccgcatcaagaagagcacctacttcagtgatgaggaggagctgagtgactag

SEQ ID NO: 227183 - DNA, 654 bp, Artificial Sequence
  derived and/or modified sequence
atgagcggcggcctggcccccagcaagagcaccgtgtacgtgagcaatcttcccttctccctcactaacaacgacctgtatagaatcttttccaaatatggaaaggtcgtgaaggtcaccattatgaaggacaaggacacaagaaaaagtaaaggagtcgccttcattctgtttctggataaggattcagcgcagaattgtacacgtgcaatcaacaacaagcagctattcggtagggttatcaaggcaagcatagcaatcgacaatggtagggccgcggagtttatcagacggcggaattactttgataagtctaagtgctacgaatgtggagaaagtggccacctcagctacgcttgccccaaaaacatgctgggtgaacgcgaaccccccaagaaaaaggaaaagaagaagaagaagaaagcacctgagcctgaagaagaaattgaggaagtggaggagagcgaggatgaaggggaggaccccgctctggatagtctgagccaggcaattgcttttcagcaggctaagatcgaagaagaacaaaaaaaatggaagcctagttctggcgttccctcaacaagcgacgattcccgcagacctagaatcaagaagtcaacctacttctccgatgaggaagagttgagcgattag

SEQ ID NO: 227184 - DNA, 654 bp, Artificial Sequence
  derived and/or modified sequence
atgtccgggggattggccccaagcaaaagcacagtctatgtgtctaatttgcccttcagtctgactaataacgatctttaccgtattttctctaagtatggaaaagtggtaaaggtgacgattatgaaggacaaggatacgaggaaatccaagggtgttgcgttcatattgtttttagataaagacagtgcccagaattgcaccagggctattaataataaacagctatttggaagggttattaaagcatccattgcgattgacaacggcagagcagcagagttcatacgtagacgcaattattttgataaatcgaagtgttatgagtgcggagagagcggccatctctcttacgcttgcccaaagaacatgctaggcgagagagaacctccaaagaagaaggagaaaaagaaaaaaaaaaaagctccagagccggaagaggaaatagaagaagtggaagaatcggaggatgaaggagaagaccctgcgctcgatagtctaagtcaggcaatcgctttccagcaagcaaaaattgaagaagagcagaagaagtggaaacccagctcaggcgtcccttcaaccagcgatgattcccgcagaccaaggattaagaaaagcacctacttcagtgatgaggaggagctgtctgactag

SEQ ID NO: 227185 - protein, 979 aa, Artificial Sequence
  derived and/or modified sequence
MSVLGEYERHCDSINSDFGSESGGCGDSSPGPSASQGPRAGGGAAEQEELHYIPIRVLGRGAFGEATLYRRTEDDSLVVWKEVDLTRLSEKERRDALNEIVILALLQHDNIIAYYNHFMDNTTLLIELEYCNGGNLYDKILRQKDKLFEEEMVVWYLFQIVSAVSCIHKAGILHRDIKTLNIFLTKANLIKLGDYGLAKKLNSEYSMAETLVGTPYYMSPELCQGVKYNFKSDIWAVGCVIFELLTLKRTFDATNPLNLCVKIVQGIRAMEVDSSQYSLELIQMVHSCLDQDPEQRPTADELLDRPLLRKRRREMEEKVTLLNAPTKRPRSSTVTEAPIAVVTSRTSEVYVWGGGKSTPQKLDVIKSGCSARQVCAGNTHFAVVTVEKELYTWVNMQGGTKLHGQLGHGDKASYRQPKHVEKLQGKAIRQVSCGDDFTVCVTDEGQLYAFGSDYYGCMGVDKVAGPEVLEPMQLNFFLSNPVEQVSCGDNHVVVLTRNKEVYSWGCGEYGRLGLDSEEDYYTPQKVDVPKALIIVAVQCGCDGTFLLTQSGKVLACGLNEFNKLGLNQCMSGIINHEAYHEVPYTTSFTLAKQLSFYKIRTIAPGKTHTAAIDERGRLLTFGCNKCGQLGVGNYKKRLGINLLGGPLGGKQVIRVSCGDEFTIAATDDNHIFAWGNGGNGRLAMTPTERPHGSDICTSWPRPIFGSLHHVPDLSCRGWHTILIVEKVLNSKTIRSNSSGLSIGTVFQSSSPGGGGGGGGGEEEDSQQESETPDPSGGFRGTMEADRGMEGLISPTEAMGNSNGASSSCPGWLRKELENAEFIPMPDSPSPLSAAFSESEKDTLPYEELQGLKVASEAPLEHKPQVEASSPRLNPAVTCAGKGTPLTPPACACSSLQVEVERLQGLVLKCLAEQQKLQQENLQIFTQLQKLNKKLEGGQQVGMHSKGTQTAKEEMEMDPKPDLDSDSWCLLGTDSCRPSL

SEQ ID NO: 227186 - DNA, 2940 bp, Artificial Sequence
  derived and/or modified sequence
atgtctgtgctcggagaatacgagcgccactgcgattcaataaacagcgattttggtagcgaatccggcgggtgcggagatagcagccctgggccatctgcatctcaaggaccaagggcaggcggtggtgcagccgagcaggaggagttacactacattcctattcgggttctgggcagaggcgcgtttggagaagccacgttgtatcgcaggactgaggatgactctctggtggtgtggaaagaggtcgacctcacccggctcagcgagaaggagcgtagggacgccctgaatgagatagtaattttggctctcctccagcacgacaatataatcgcttactataaccattttatggacaacacaacacttctcatcgaattggaatactgtaatggcggcaacctgtacgataagatactccgccagaaggacaagctgttcgaagaagaaatggtcgtgtggtacctttttcagatagtttccgccgtgagctgtattcataaggcaggcatactccacagagacatcaaaactttgaacattttcctgacaaaagctaacctgattaagctaggcgattacggactagccaagaagctcaattctgagtatagtatggccgagactctcgtgggaacgccatattacatgtctccggagttgtgccagggcgttaagtataactttaaatcagatatctgggcggtcggctgtgtgatctttgaactgcttactctcaagcggacctttgacgcaaccaacccactgaacctctgcgtgaagatcgtgcaggggatcagggcaatggaagtagactcctcacagtactctctggagctcatccaaatggtgcactcctgtcttgatcaggatccggagcagcggccaaccgcggatgagctgctggatcgcccgttactgcgaaagaggcgtcgggaaatggaggaaaaagtaacactgttgaatgcccctaccaaaaggccaagaagttcaacggtgacagaagcccctattgccgtcgtgacctctcgaacatctgaagtgtacgtgtggggcggcgggaaatcaacgccacagaagctggatgtaattaaaagcggctgcagcgcacgccaggtctgtgcagggaatacacattttgcggtggtcaccgtggagaaagaactgtacacatgggtcaatatgcagggtggaaccaagctccacgggcagctcggccacggagacaaggcatcctacaggcagccaaagcacgtggagaagctccagggaaaggcgatcagacaggtgtcctgtggagatgactttaccgtttgtgtcactgacgaaggccagctgtacgccttcggctccgactactatggctgtatgggagtggacaaggtagcaggccccgaagtgttagaacccatgcaactgaatttcttcttgtcaaatccagttgaacaagtctcttgcggggacaatcatgtcgtagtcctgacccggaacaaggaagtctatagttggggctgcggagagtacggaagactcgggctggactctgaggaggattattataccccacagaaagtggacgttcctaaggctctgataatcgtggcggtgcagtgtgggtgtgatggcacgttcctgctcacccagtcaggcaaggtgttggcttgtggcctcaatgagtttaacaaactcggtttgaaccagtgcatgagcggcataataaaccacgaggcgtaccacgaggtgccttataccacttcattcacactggctaaacagctgagcttctataagatcagaaccatcgctcctggaaaaacgcacacagctgcgatagacgagagaggacggttgctcacatttggctgcaataaatgcggtcagctgggtgtgggcaactataaaaaacgcctgggcattaacctgctgggtggccccctcggcggcaaacaggtaattagggtatcatgtggagatgaatttacaatcgccgccacggacgataaccacatcttcgcctgggggaacggtggaaatggacgcctggctatgactcctacagaacgtcctcacggaagtgatatatgcacttcatggcccagacctattttcggatccctccaccacgtgcctgacttgtcctgtagagggtggcataccattttgattgtggagaaggtgttaaacagcaagaccatacgatctaatagctctggactctctatcggcacagtgttccagagttctagccctggcggcggtggcggaggtggaggtggggaggaggaggacagccaacaggaaagcgaaacccccgacccctccggtggttttcggggaaccatggaggcagatcgaggcatggagggcctaatctcgcctacagaggctatgggtaacagtaacggtgcaagttcatcctgtccaggatggctccgcaaggaactggaaaatgccgaatttatccctatgccagatagccctagtcccctctctgctgcattctcagagagcgagaaagacacgctcccttacgaggaactccaggggctgaaggtggctagcgaggctccccttgagcataagccccaggtggaagctagctccccccgtcttaatccagctgtaacttgcgcaggcaagggcaccccactcacaccaccagcgtgcgcttgcagttctctgcaggttgaagtagagaggctgcagggcctagtactgaagtgcttggccgaacagcagaagcttcagcaggaaaacctgcaaattttcacacagctccaaaagctcaataagaagcttgagggagggcagcaggtagggatgcactctaaggggactcagacggcaaaggaggagatggaaatggaccccaagccagatcttgattccgatagctggtgcttgctcggcaccgattcatgccggccttcgttgtag

SEQ ID NO: 227187 - DNA, 2940 bp, Artificial Sequence
  derived and/or modified sequence
atgtctgtgctgggggagtatgagcggcactgtgacagcatcaacagcgactttggcagcgagagcggcggctgtggggacagcagccctggccccagcgccagccagggcccccgggccggcggcggcgctgctgagcaggaggagctgcactacatccccatccgggtgctgggccgcggggcctttggagaggccaccctgtacagaagaacagaagatgacagcctggtggtgtggaaggaggtggacctgacccggctgtctgagaaggagaggagagatgccctgaatgagatcgtcatcctggccctgctgcagcacgacaacatcatcgcctactacaaccacttcatggacaacaccaccctgctgattgagctggagtactgcaatggaggcaacctgtatgacaagatcctgcggcagaaggacaagctgtttgaggaggagatggtggtgtggtacctgttccagatcgtgtctgctgtgtcctgcatccacaaggccggcatcctgcaccgggacatcaagaccctgaacatcttcctgaccaaggccaacctgatcaagctgggggactatggcctggccaagaagctgaacagcgagtacagcatggccgagaccctggtgggcaccccctactacatgagccctgagctgtgccagggcgtgaagtacaacttcaagagtgacatctgggccgtgggctgtgtgatctttgagctgctgaccctgaagaggacctttgatgccaccaaccccctgaacctgtgtgtgaagatcgtgcagggcatccgggccatggaggtggacagcagccagtacagcctggagctgatccagatggtgcacagctgcctggaccaggaccctgagcagaggcccacagcagatgagctgctggaccggcccctgctgaggaagagaagaagagagatggaggagaaggtgaccctgctgaatgcccccaccaagaggcccaggagcagcacagtgacagaggcccccatcgctgtggtgaccagcaggaccagcgaggtgtatgtgtggggcggcggcaagagcaccccccagaagctggatgtgatcaagagcggctgcagcgcccggcaggtgtgtgccggcaacacccactttgctgtggtgacagtggagaaggagctgtacacctgggtgaacatgcagggcggcaccaagctgcacggccagctgggccacggggacaaggccagctaccggcagcccaagcacgtggagaagctgcagggcaaggccatccggcaggtgtcctgtggagatgacttcaccgtgtgtgtgacagatgagggccagctgtatgccttcggcagtgactactacggctgcatgggcgtggacaaggtggccggccctgaggtgctggagcccatgcagctgaacttcttcctgagcaaccctgtggagcaggtgtcctgtggggacaaccacgtggtggtgctgaccaggaacaaggaggtgtacagctggggctgtggggagtatggccgcctgggcctggacagcgaggaggactactacaccccccagaaggtggatgtgcccaaggccctgatcatcgtggccgtgcagtgtggctgtgatggcaccttcctgctgacccagagcggcaaggtgctggcctgtggcctgaatgagttcaacaagctgggcctgaaccagtgcatgagcggcatcatcaaccacgaggcctaccacgaggtgccctacaccaccagcttcaccctggccaagcagctgtccttctacaagatccgcaccatcgcccctgggaagacccacacagctgccattgatgagcggggccgcctgctgaccttcggctgcaacaagtgtggccagctgggcgtgggcaactacaagaagaggctgggcatcaacctgctgggcggccccctgggcggcaagcaggtgatccgggtgtcctgtggagatgagttcaccatcgccgccacagatgacaaccacatctttgcctggggcaatggaggaaatggccgcctggccatgacccccacagagcggccccacggcagtgacatctgcacctcctggccccggcccatcttcggcagcctgcaccacgtgcctgacctgagctgccggggctggcacaccatcctgattgtggagaaggtgctgaacagcaagaccatccgcagcaacagcagcggcctgagcatcggcaccgtcttccagagcagcagccctgggggcggcggcggcggcggcggcggggaggaggaggacagccagcaggagagcgagaccccagaccccagcggcggcttccggggcaccatggaggccgaccggggcatggagggcctcatcagccccacagaggccatgggcaacagcaatggagccagcagcagctgccccggctggctgaggaaggagctggagaatgctgagttcatccccatgccagacagccccagccccctgtctgctgccttcagcgagagcgagaaggacaccctgccctatgaggagctgcagggcctgaaggtggccagcgaggcccccctggagcacaagccccaggtggaggccagcagcccccggctgaacccagctgtgacctgtgccggcaagggcacccccctgaccccaccagcctgtgcctgcagcagcctgcaggtggaggtggagcggctgcagggcctggtgctgaagtgcctggccgagcagcagaagctgcagcaggagaacctgcagatcttcacccagctgcagaagctgaacaagaagctggagggcggccagcaggtgggcatgcacagcaagggcacccagacagccaaggaggagatggagatggaccccaagccagacctggacagcgacagctggtgcctgctgggcacagacagctgccggcccagcctgtag

SEQ ID NO: 227188 - DNA, 2940 bp, Artificial Sequence
  derived and/or modified sequence
atgagcgtgctgggcgagtacgagcggcactgcgacagcatcaacagcgacttcggcagcgaatccggaggttgcggggattctagccccgggccctctgcgtcacaaggacctagagcaggaggcggggcggccgaacaggaagaactgcactatatccccattcgtgtacttggcaggggagcctttggggaggcgaccctgtaccggaggacagaagatgattcgcttgtcgtatggaaagaggtcgacctgactagactgtccgagaaggaaaggagagatgccttgaatgagatcgtgatccttgccctccttcagcacgataacataattgcatattacaatcatttcatggacaacacaactctgcttatcgaattggagtattgtaacggaggtaacctgtatgacaaaatactccggcagaaggacaaattattcgaagaggagatggttgtgtggtacctctttcaaatcgtgagtgccgtttcatgtatccacaaggcaggaatcctgcacagagatatcaagactctcaatatcttcttgactaaagcgaatctgattaaactaggagactatggacttgctaagaagctgaacagcgaatattccatggctgaaaccttggtcggtaccccttactatatgtccccagaactgtgccagggggtgaagtacaatttcaaatctgacatatgggcagtcggctgcgttatcttcgagcttctgacactaaagcgcacttttgacgctaccaacccgctgaatttgtgcgtgaagatcgtccagggaatacgagctatggaagtcgatagcagccagtactccctggagctgatccagatggtccacagctgcctggaccaggacccagagcaacggcctaccgccgacgaactccttgaccggcctctgctccgcaagcgcagacgcgagatggaagagaaggttaccttgctgaatgctcctacgaagcgccccaggagtagcaccgttactgaagctcccattgccgtagtcacgagtcgaacctccgaagtgtacgtatgggggggaggaaaatctacccctcagaagctggatgtcattaagtccggctgttcggctcggcaggtctgtgccgggaacacacacttcgctgttgtcactgtggaaaaagaactgtacacatgggtcaacatgcaggggggtacaaaacttcacggacaattgggacacggagacaaggcatcttacagacagccgaaacacgtggagaaactccagggaaaagccatccgtcaagtgagttgcggggatgattttaccgtctgtgtgacagacgaagggcagctatacgcgtttgggtccgactattatggatgcatgggagtggataaggtcgcgggccctgaggttctagagccaatgcagctcaatttctttttgtccaatccagtagagcaagtctcttgcggtgacaaccacgtggtggtgctcactcgcaacaaagaagtctacagttggggctgtggtgagtacggacggttgggtctagactccgaggaagactattataccccccaaaaagttgatgttccaaaggcattaataattgtggctgtccagtgtggttgcgatggcacatttcttctcacccaatccggcaaagtcttagcctgcggcttaaatgaatttaataaattaggcctcaaccagtgtatgagtggaatcattaatcatgaagcctaccacgaggtgccttacactacatcattcaccctggcaaagcagctttcattctataaaatacgtactatcgcgcctggaaaaactcacactgccgccatcgatgaaagaggcagactgctaacctttggatgtaataaatgtgggcagcttggtgtggggaattacaagaaacggctggggattaatctgctaggcggcccactgggaggcaagcaggtcatccgggtctcatgtggcgacgaattcactatcgccgccacagatgataaccacatcttcgcctggggcaatggcgggaacggacgcctggccatgacacctaccgagcgcccacacgggtccgatatttgcacttcttggcctcgtcccatcttcggtagcctccatcacgtgccagacttatcctgtcgtggatggcacaccattcttatcgtggagaaggtgctgaatagcaagaccataaggtcgaattctagcggtctttcaattggcacggtgtttcagtcttcctctcccggtggaggaggggggggcgggggtggcgaagaggaggattcccagcaggagtcagaaacccccgaccctagtggggggtttcggggaacgatggaagcggatagaggtatggagggactcatttctccaacagaagccatggggaactccaacggcgcttctagctcctgtccaggttggcttagaaaggaactagaaaacgctgaattcatccctatgcccgacagccctagccctctgtcggcagctttctccgagagcgagaaggacacccttccatacgaggagctgcagggcctcaaagtcgcctctgaggctcctctggagcataagccgcaggtggaagcaagctcaccccggttgaacccagctgttacatgtgccggcaaaggtacccctcttacaccgcccgcatgcgcttgttcctcccttcaggttgaagtggagcggctccagggactggtcctgaagtgcctggcagagcagcaaaagttgcagcaggaaaacctgcagatattcacccaattgcagaagctgaacaagaagttagagggtggccaacaggtgggcatgcactctaaggggactcaaaccgccaaggaagaaatggagatggatcctaaaccagacttggatagcgattcctggtgtcttctgggaaccgactcgtgtaggccgtccctttag

SEQ ID NO: 227189 - DNA, 5544 bp, Artificial Sequence
  derived and/or modified sequence
gagaactgtttccgggtcggggggcaggagccaccatcgagcttcgcggggttgctgggctgacggatccgcgggccggcatctgaagcgagcgggacgcagcgcggccagggcctccgggcatacgcaggctggtccccaaggcccgcggccgccgccatgtcggtgctgggcgagtacgagcgacactgcgattccatcaactcggactttgggagcgagtccgggggttgcggggactcgagtccggggcctagcgccagtcaggggccgcgagccggcggcggcgcggcggagcaggaggaactgcactacatccccatccgcgtcctgggccgcggcgccttcggggaagccacgctgtaccgccgcaccgaggatgactcactggttgtgtggaaggaagtcgatttgacccggctgtctgagaaggaacgtcgtgatgccttgaatgagattgttattctggcactgctgcagcacgacaacattattgcctactacaatcacttcatggacaataccacgctgctgattgagctggaatattgtaatggagggaacctgtatgacaaaatccttcgtcagaaggacaagttgtttgaggaagagatggtggtgtggtacctatttcagattgtttcagcagtgagctgcatccataaagctggaatccttcatagagatataaagacattaaatatttttctgaccaaggcaaacctgataaaacttggagattatggcctagcaaagaaacttaattctgagtattccatggctgagacgcttgtgggaaccccatattacatgtctccagagctctgtcaaggagtaaagtacaatttcaagtctgatatctgggcagttggctgcgtcatttttgaactgcttaccttaaagaggacgtttgatgctacaaacccacttaacctgtgtgtgaagatcgtgcaaggaattcgggccatggaagttgactctagccagtactctttggaattgatccaaatggttcattcgtgccttgaccaggatcctgagcagagacctactgcagatgaacttctagatcgccctcttctcaggaaacgcaggagagagatggaggaaaaagtcactctgcttaatgcacctacaaagagaccaaggtcaagcactgtgactgaagcacccattgctgtagtaacatcacgaaccagtgaagtctatgtttggggtggtggaaaatccaccccccagaaactggatgttatcaagagtggctgtagtgcccggcaggtctgtgcagggaatacccactttgctgtggtcacagtggagaaggaactgtacacttgggtgaacatgcaaggaggcactaaactccatggtcagctgggccatggagacaaagcctcctatcgacagccaaagcatgtggaaaagttgcaaggcaaagctatccgtcaggtgtcatgtggtgatgatttcactgtctgtgtgactgatgagggtcagctctatgccttcggatcagattattatggctgcatgggggtggacaaagttgctggccctgaagtgctagaacccatgcagctgaacttcttcctcagcaatccagtggagcaggtctcctgtggagataatcatgtggtggttctgacacgaaacaaggaagtctattcttggggctgtggcgaatatggacgactgggtttggattcagaagaggattattatacaccacaaaaggtggatgttcccaaggccttgattattgttgcagttcaatgtggctgtgatgggacatttctgttgacccagtcaggcaaagtgctggcctgtggactcaatgaattcaataagctgggtctgaatcagtgcatgtcgggaattatcaaccatgaagcataccatgaagttccctacacaacgtcctttaccttggccaaacagttgtccttttataagatccgtaccattgccccaggcaagactcacacagctgctattgatgagcgaggccggctgctgacctttggctgcaacaagtgtgggcagctgggcgttgggaactacaagaagcgtctgggaatcaacctgttggggggaccccttggtgggaagcaagtgatcagggtctcctgcggtgatgagtttaccattgctgccactgatgataatcacatttttgcctggggcaatggtggtaatggccgcctggcaatgacccccacagagagaccacatggctctgatatctgtacctcatggcctcggcctatttttggatctctgcatcatgtcccggacctgtcttgccgtggatggcataccattctcatcgttgagaaagtattgaattctaagaccatccgttccaatagcagtggcttatccattggaactgtgtttcagagctctagcccgggaggaggcggcgggggcggcggtggtgaagaagaggacagtcagcaggaatctgaaactcctgacccaagtggaggcttccgaggaacaatggaagcagaccgaggaatggaaggtttaatcagtcccacagaggccatggggaacagtaatggggccagcagctcctgtcctggctggcttcgaaaggagctggaaaatgcagaatttatccccatgcctgacagcccatctcctctcagtgcagcgttttcagaatctgagaaagataccctgccctatgaagagctgcaaggactcaaagtggcctctgaagctcctttggaacacaaaccccaagtagaagcctcgtcacctcggctgaatcctgcagtaacctgtgctgggaagggaacaccactgactcctcctgcgtgtgcgtgcagctctctgcaggtggaggttgagagattgcagggtctggtgttaaagtgtctggctgaacaacagaagctacagcaagaaaacctccagatttttacccaactgcagaagttgaacaagaaattagaaggagggcagcaggtggggatgcattccaaaggaactcagacagcaaaggaagagatggaaatggatccaaagcctgacttagattcagattcctggtgcctcctgggaacagactcctgtagacccagcctctagtctcctgagcctgtagagcccccaggagactgggacccaaagaacttcacagcacacttaccgaatgcagagagcagctttcctggctttgttcacttgcagaaaaggagcgcaaggcagaggctctgaagcactttccttgtacatttggagagtggcattgccttttagataggatctaggagtgattttattgttttggagaatggaagggcccccatggccctggctttgtcatcagtgactgccatagcaacagcagctctgtacctcatctgttgatcccacctttgaagaggagacacagtgctcaccttaattgcgctggtagcagcttatatcccatgtatcattttcaccattgattggaagctgccttgggaattcagtaccaggcattacccctctgggtgggagagggagaagtgtaaagttggagtgggctggaatcaggtgtggcccgcccagtgtcctctgcagagtggtgaagtagtctggccctcttgggagccctgagtccaggaaaatatgtctgatggagtcaatctagggcttgtttcgaaaaagttcagttactctgtgcagctaaatgctttaggaggaaaggtaggcttaggttgcttttcctctgagggttgattgaaatttcttcagtgaggaatagagaaagggcaggaccctcctcatcacacagctggtgtttcaggctgtgaccaatgcagggtgggatttcctaactgtggatgaggggatgaggtgtctctgagggatgaggtgtctcagagaattgagtccatggggcagtcagaatagccttaagagaaaatcatgaaggagaagaggtcctcctttagctgcctctacttggtatcttagagagggcttagagggctctcagtcttctgcccatgaaaagacttctttgagcctctgccttcatggctcttagggttctgatcttgatatcagcagccccaaccactttctttctgaatgtctagtcagtatttttccccttttggtgttttatgaagccatgtggtaacgaatgaatctgtatcatttttcctacctgagtggcccaaagccagcaccaaaccctgggagtccctgaagcctaacagaacaggtagaacttgcaaaaggaatttggctgagagctcacttctaatcctgtactcactgtgtctttgtagatagaaacaagctagctttaccaaagagaaatagtgtcatagaagaacaaaacttcatatagaaagttctaggcaagtatttgatggtttccttaaggatgtgagctttgtatttccacctagccttgtaaaatgttcctgtggtattttgtgtcacacatcctacctttgatgagtctcacatcccaccttcctataaacagctaaattaattttgtttcatcttccccagaccaaaatgtttgataatcttatcaacattgtgggaggtcttgtgcaatggaaattttgccatttctccaaaactggtggcataaaggctgatgcttggggagaaccccattgctcgggacaggcaactctgttcaatgggatcttctttggtttgatgttcccattgttttctcagttctgggaagcctagtacattagtactaatgtaatcactgaaaccttttcttgaaataagggaagcagccaaactttgattaaagttgcaagttctggggacttgcgggggttgtcataaactgtaacagtgggttttggttcagcatgtaaatgcaactttgattttcttgaggaccgattgacctgtcatgtccctgtatcctcatgctcatcatctcagcaggcctgagaggctgggtcagtttgggtgttcatcatgaggattgcttctgccatggagctgatggacatgggcaggttgctgagaaggtggggtgaaagtgagtgccgggggtgggtgagtgccctggtcttgttcataggggagcctttccctagcagtggaacgctgtggtcattttctctagcatattcccttgggaagtctagatttgctattaatctggctgagaatctaagttctgtgccttagagacagtttgcactttcccatattgtgcctgggacagccatatgattttttttcccaccaaacaagtatgcaaacagaaaccagttcaaagggggatggagtaaaagatgaggcagtagaaatgcctttgaatggttttctgtagctaattctctttaaattttgtcctgctttttttctttatgcagtgctaggtgttttaagttttctagtagtattgcttttgagttacagtataacctgagttactcctctgctctaacattgttgcagaagaactagtttattgttagccaggttgcttgaaaggttgagagtggagtggtttggcatttctgttttaaataaacatttaagctcttaatc

SEQ ID NO: 227190 - DNA, 2940 bp, Artificial Sequence
  derived and/or modified sequence
atgagcgtgctcggcgagtacgaacgacattgcgatagcattaactctgatttcgggtctgaatcaggaggctgtggcgattcaagcccaggacccagcgcgtcccaaggtccgagggcgggagggggagctgccgagcaagaagaacttcactatatacctatcagggtcttgggcagaggcgctttcggagaggcaacactgtataggagaaccgaggatgattccttagtcgtgtggaaggaagttgatctgactcggctgtccgagaaggaacggcgagacgccctgaacgagattgtcatcttggccttgttgcagcacgataatatcattgcctactacaaccatttcatggacaatacaactttgctcattgaattggagtattgcaacggagggaacttgtacgacaaaatactccgtcagaaggacaagctgtttgaggaggagatggtcgtatggtacctattccagattgtctcagctgttagctgtatccataaagcaggtatactgcatcgtgacatcaaaacactgaatatattcctgaccaaagcaaacctcatcaagctgggcgactacggactagcaaagaagctcaacagcgagtacagcatggcagagacactggtcggtaccccatactacatgtctcctgaattgtgccagggggtgaagtataatttcaagagcgacatctgggccgttggctgtgtgattttcgagttgctgacactgaagcggactttcgacgcaactaacccactgaatttgtgtgtgaaaatcgtgcaggggatccgggcaatggaagtggatagttcccaatacagtctcgagttgattcagatggtgcacagttgtctagaccaggaccctgagcaacggccaactgccgacgagctgctggacagacccctgctgcgcaaacggcgtagggagatggaggaaaaagtgaccctgcttaacgcacccactaaacggcctcggagctctacggttacggaagctccaatcgcggtggtgacatcacggacttctgaagtctacgtgtgggggggaggcaaaagcactccccagaagctcgacgttattaaatctggctgcagcgcacgccaagtctgtgccggaaatacacactttgccgtggtgactgtagagaaggagctttatacgtgggtaaacatgcagggaggaacaaagttgcacggacagcttgggcacggggacaaagcatcctatcggcagcccaagcacgtggagaagctccaaggaaaagctatccgccaggtatcatgcggtgacgactttaccgtctgtgtgacagacgaaggacagctttatgcatttggtagcgactattacggttgcatgggcgtggacaaagtggcgggtcctgaggtgcttgagcccatgcagctgaatttcttcctatctaatcctgtggagcaggtttcctgcggtgataaccatgtagttgtattaaccagaaacaaagaagtgtactcctggggatgtggagagtacgggcgactgggcctggacagtgaagaggattactatactccacagaaagtggatgttccgaaggcgttaataatagtggcggtccaatgtggctgcgatggtaccttcttgcttacgcagtccgggaaagtcctggcttgtgggctcaatgagttcaacaaacttggcttgaatcaatgcatgagtggcataatcaaccatgaagcctaccacgaagtgccttacaccacctctttcacattggctaagcagctgtcattttataagatacgcacaatcgcacctggcaagacccatacagcagccatcgatgaacgcggacggctgctaacttttgggtgtaataagtgtgggcaacttggagttggaaactataagaagagattgggcattaacctgttaggtgggccactgggtggcaaacaggtgatcagggtctcttgcggcgatgagttcaccattgccgcaacagacgataatcatatcttcgcttggggaaatggtggaaatggcaggttagctatgacacccaccgaacgtccacatggctccgacatctgcactagctggccaagacctatcttcggatcgttgcatcatgtgcccgatctttcctgccgcggatggcacacgatactaatcgtcgaaaaggttctgaatagtaagaccataaggtctaactccagcggcctttccattgggactgtgttccagagttcttctccaggcggaggaggcggtggcggtggcggagaggaagaggactcacagcaggaatcagagaccccggatccctctggagggttccgaggcacgatggaggccgacaggggcatggagggcctgatctctccgaccgaggccatgggcaattctaacggagccagcagctcttgtcccggatggttgcggaaggaacttgaaaatgcggaattcatacctatgccggacagcccgagccctttgtctgccgcattctccgagtctgagaaagacacactgccctatgaagagctgcagggacttaaggtggcatccgaggctccactcgagcataaaccccaagtagaagccagctccccacggcttaaccctgccgtgacatgcgccggaaaagggactccactgactcctccagcctgtgcatgctcttcactccaggtggaggtagagagacttcagggactggttctcaaatgtctcgccgaacagcagaaattacagcaggaaaacctccagatctttactcagctccagaaactgaataagaagctcgaaggcggtcagcaggtcggtatgcatagtaaagggacccagaccgctaaagaggagatggagatggaccccaagccagacctggattcagatagctggtgtttactggggacagacagctgtaggccatctctctag

SEQ ID NO: 227191 - DNA, 2940 bp, Artificial Sequence
  derived and/or modified sequence
atgagcgtgctgggcgagtacgagagacactgcgacagcatcaacagcgacttcggcagcgagagcggcggctgcggcgacagcagccccggccccagcgccagccagggccccagagccggcggcggcgccgccgagcaggaggagctgcactacatccccatcagagtgctgggcagaggcgccttcggcgaggccaccctgtacagaagaaccgaggacgacagcctggtggtgtggaaggaggtggacctgaccagactgagcgagaaggagagaagagacgccctgaacgagatcgtgatcctggccctgctgcagcacgacaacatcatcgcctactacaaccacttcatggacaacaccaccctgctgatcgagctggagtactgcaacggcggcaacctgtacgacaagatcctgagacagaaggacaagctgttcgaggaggagatggtggtgtggtacctgttccagatcgtgagcgccgtgagctgcatccacaaggccggcatcctgcacagagacatcaagaccctgaacatcttcctgaccaaggccaacctgatcaagctgggcgactacggcctggccaagaagctgaacagcgagtacagcatggccgagaccctggtgggcaccccctactacatgagccccgagctgtgccagggcgtgaagtacaacttcaagagcgacatctgggccgtgggctgcgtgatcttcgagctgctgaccctgaagagaaccttcgacgccaccaaccccctgaacctgtgcgtgaagatcgtgcagggcatcagagccatggaggtggacagcagccagtacagcctggagctgatccagatggtgcacagctgcctggaccaggaccccgagcagagacccaccgccgacgagctgctggacagacccctgctgagaaagagaagaagagagatggaggagaaggtgaccctgctgaacgcccccaccaagagacccagaagcagcaccgtgaccgaggcccccatcgccgtggtgaccagcagaaccagcgaggtgtacgtgtggggcggcggcaagagcaccccccagaagctggacgtgatcaagagcggctgcagcgccagacaggtgtgcgccggcaacacccacttcgccgtggtgaccgtggagaaggagctgtacacctgggtgaacatgcagggcggcaccaagctgcacggccagctgggccacggcgacaaggccagctacagacagcccaagcacgtggagaagctgcagggcaaggccatcagacaggtgagctgcggcgacgacttcaccgtgtgcgtgaccgacgagggccagctgtacgccttcggcagcgactactacggctgcatgggcgtggacaaggtggccggccccgaggtgctggagcccatgcagctgaacttcttcctgagcaaccccgtggagcaggtgagctgcggcgacaaccacgtggtggtgctgaccagaaacaaggaggtgtacagctggggctgcggcgagtacggcagactgggcctggacagcgaggaggactactacaccccccagaaggtggacgtgcccaaggccctgatcatcgtggccgtgcagtgcggctgcgacggcaccttcctgctgacccagagcggcaaggtgctggcctgcggcctgaacgagttcaacaagctgggcctgaaccagtgcatgagcggcatcatcaaccacgaggcctaccacgaggtgccctacaccaccagcttcaccctggccaagcagctgagcttctacaagatcagaaccatcgcccccggcaagacccacaccgccgccatcgacgagagaggcagactgctgaccttcggctgcaacaagtgcggccagctgggcgtgggcaactacaagaagagactgggcatcaacctgctgggcggccccctgggcggcaagcaggtgatcagagtgagctgcggcgacgagttcaccatcgccgccaccgacgacaaccacatcttcgcctggggcaacggcggcaacggcagactggccatgacccccaccgagagaccccacggcagcgacatctgcaccagctggcccagacccatcttcggcagcctgcaccacgtgcccgacctgagctgcagaggctggcacaccatcctgatcgtggagaaggtgctgaacagcaagaccatcagaagcaacagcagcggcctgagcatcggcaccgtgttccagagcagcagccccggcggcggcggcggcggcggcggcggcgaggaggaggacagccagcaggagagcgagacccccgaccccagcggcggcttcagaggcaccatggaggccgacagaggcatggagggcctgatcagccccaccgaggccatgggcaacagcaacggcgccagcagcagctgccccggctggctgagaaaggagctggagaacgccgagttcatccccatgcccgacagccccagccccctgagcgccgccttcagcgagagcgagaaggacaccctgccctacgaggagctgcagggcctgaaggtggccagcgaggcccccctggagcacaagccccaggtggaggccagcagccccagactgaaccccgccgtgacctgcgccggcaagggcacccccctgaccccccccgcctgcgcctgcagcagcctgcaggtggaggtggagagactgcagggcctggtgctgaagtgcctggccgagcagcagaagctgcagcaggagaacctgcagatcttcacccagctgcagaagctgaacaagaagctggagggcggccagcaggtgggcatgcacagcaagggcacccagaccgccaaggaggagatggagatggaccccaagcccgacctggacagcgacagctggtgcctgctgggcaccgacagctgcagacccagcctgtag

SEQ ID NO: 227192 - protein, 596 aa, Artificial Sequence
  derived and/or modified sequence
MATENGAVELGIQNPSTDKAPKGPTGERPLAAGKDPGPPDPKKAPDPPTLKKDAKAPASEKGDGTLAQPSTSSQGPKGEGDRGGGPAEGSAGPPAALPQQTATPETSVKKPKAEQGASGSQDPGKPRVGKKAAEGQAAARRGSPAFLHSPSCPAIISSSEKLLAKKPPSEASELTFEGVPMTHSPTDPRPAKAEEGKNILAESQKEVGEKTPGQAGQAKMQGDTSRGIEFQAVPSEKSEVGQALCLTAREEDCFQILDDCPPPPAPFPHRMVELRTGNVSSEFSMNSKEALGGGKFGAVCTCMEKATGLKLAAKVIKKQTPKDKEMVLLEIEVMNQLNHRNLIQLYAAIETPHEIVLFMEYIEGGELFERIVDEDYHLTEVDTMVFVRQICDGILFMHKMRVLHLDLKPENILCVNTTGHLVKIIDFGLARRYNPNEKLKVNFGTPEFLSPEVVNYDQISDKTDMWSMGVITYMLLSGLSPFLGDDDTETLNNVLSGNWYFDEETFEAVSDEAKDFVSNLIVKDQRARMNAAQCLAHPWLNNLAEKAKRCNRRLKSQILLKKYLMKRRWKKNFIAVSAANRFKKISSSGALMALGV

SEQ ID NO: 227193 - DNA, 1791 bp, Artificial Sequence
  derived and/or modified sequence
atggctacagaaaacggcgccgttgaattgggcatccaaaaccctagtaccgacaaggcccctaagggaccaacaggtgaacgccccctcgccgctggcaaggaccctgggccccccgatccgaaaaaagcaccagaccctccaacgcttaagaaggatgcgaaagcccccgcttccgaaaaaggggatgggaccctggcacaaccaagcacgtcgtctcagggccccaaaggtgagggggacaggggaggaggaccagcggaggggtccgctggaccacctgccgccctgcctcagcaaaccgctactccagagaccagcgtgaagaaaccgaaggcggaacagggcgcctcaggctctcaggacccaggcaaacctcgggtaggtaagaaggccgctgaggggcaggccgccgccagaaggggctcgccagcattcctgcacagtccctcatgtcctgctatcataagttctagcgagaaactgctcgccaagaaaccccccagtgaagcaagcgaactaactttcgaaggcgttcctatgactcacagcccgaccgatccgaggccagctaaggcagaagagggcaagaacatcttagccgagtcacagaaagaggtgggcgagaagacacccggtcaagcaggacaggccaagatgcaaggagatacaagcagagggatcgaatttcaggccgtgcctagcgaaaaatccgaggtagggcaggcactgtgcctcacagcacgggaagaggactgctttcaaatcttggatgattgtccacctcctcctgctccctttccccatagaatggtggaactccgtacagggaatgtaagctccgaattttccatgaatagtaaggaggcccttggaggaggcaagttcggggcagtgtgcacttgtatggagaaagcgaccgggctaaagctagccgctaaggtgatcaagaaacagacccccaaggataaagaaatggttttgctggagattgaggtgatgaatcagcttaatcaccgcaatctgatccagctctatgcagctatagaaaccccacacgaaatcgttctttttatggagtatatcgaaggcggggagttattcgagaggattgttgacgaagactaccacctgaccgaagtcgatacaatggtgtttgtgcgccaaatctgtgacggaattttgtttatgcacaaaatgcgagtgctgcacctggatctcaagccagagaatattctgtgtgtcaacacaacgggacacctcgtcaaaattatcgactttggtctggcccggcggtacaacccaaatgagaagctaaaggtgaacttcggtacacctgagtttctgagcccagaagtggtgaattatgatcagattagtgataaaactgatatgtggtctatgggcgtaatcacatatatgctcttgagcggtctctctcccttcttgggtgacgatgacacggagacactgaataacgttttatctgggaactggtattttgatgaggagacattcgaggctgtctcagacgaagccaaggattttgtttccaacttaatcgttaaggaccaaagagcacgcatgaatgccgctcagtgtctggcccatccgtggcttaacaatctcgcagagaaagctaaacgttgtaaccgacgcctaaagtcacaaatcctgcttaaaaagtacctcatgaagcggcgttggaaaaaaaatttcattgctgtgtcagctgctaacagatttaaaaaaattagtagttctggtgccctgatggcgcttggggtgtag

SEQ ID NO: 227194 - DNA, 1791 bp, Artificial Sequence
  derived and/or modified sequence
atggcgactgagaatggtgcagtggaactgggtattcagaatcctagtacagacaaagctcccaagggtcctactggcgagcgtcccctggcggcagggaaagaccccggtccaccggaccctaagaaggcgccagatcctccgactctgaaaaaagatgctaaagcgcctgcgagtgagaagggagatgggacactagcccagccatctacatcaagccaaggccccaaaggggagggagacagaggcggcggtcccgccgaaggcagtgctggccctccggctgccttgcctcagcagactgctacaccggaaaccagcgtgaagaagccaaaggccgagcagggagcctccggttcccaggacccaggaaagccccgggtcggcaagaaagccgcggaaggtcaggcagccgcccggcgtgggtcacccgcctttcttcacagtcccagctgtccagcgatcatcagctcttctgagaaactcctggctaaaaagccgcctagcgaagcctctgaactgaccttcgaaggggtgcccatgacccactctcccactgacccaaggcccgcgaaagccgaggagggtaagaacatactcgcagagtctcaaaaagaggtaggtgaaaagacgcctgggcaggccggccaggcaaagatgcagggcgatactagcagagggatcgagtttcaggcagttcctagcgagaagtccgaggtcggacaggcactctgcctgaccgccagagaggaagattgctttcaaattctcgatgattgccctccaccccccgccccgttccctcataggatggtggaactgaggaccggcaacgtgtcctcagagtttagcatgaattcaaaagaggctcttggcggtggcaaatttggcgcagtttgtacttgcatggaaaaggccactggcctgaaactggcagccaaagtgattaaaaagcagacacctaaggacaaagagatggtgctgctcgaaatagaggtgatgaatcaattgaaccatcgcaaccttatccagctgtacgccgccatagaaaccccccatgagattgttttatttatggaatatatcgaggggggcgaactgttcgagcggatcgtggacgaggactaccacctgactgaagttgacaccatggtatttgtgcgacaaatttgtgacggaatcttgttcatgcacaagatgcgcgttctgcacctcgacctgaaacctgagaatattctctgcgtaaatactaccggacatctggtgaagatcatagactttggactggctcggagatataatcccaacgagaaactcaaggtcaacttcggaactcctgaattcctctctccagaagtggtgaactacgatcagatttccgacaaaaccgacatgtggagcatgggggtgatcacctacatgctgctgtccggcctgtcccccttcctgggagatgacgacacagagacactaaacaacgtgctctcgggcaattggtactttgatgaagagacttttgaggcagtttcagatgaggccaaggattttgtatccaacctaatcgtgaaagaccagagggcccgtatgaacgccgcacagtgtttggctcacccatggttgaataacctcgccgaaaaggctaaaaggtgcaatagaagacttaaatcccagatcctactgaagaaatacctgatgaagaggcgctggaagaagaattttatagccgtgtcagcagcaaataggtttaaaaaaatctcatcatctggcgctctgatggctctgggggtgtag

SEQ ID NO: 227195 - DNA, 1791 bp, Artificial Sequence
  derived and/or modified sequence
atggccacagaaaatggagctgtggagctgggcatccagaaccccagcacagacaaggcccccaagggccccactggagagcggcccctggccgccggcaaggaccccggccccccagaccccaagaaggccccagacccccccaccctgaagaaggatgccaaggccccagccagcgagaagggagatggcaccctggcccagcccagcaccagcagccagggccccaagggggagggggacagaggaggcggccctgctgagggcagcgctggccccccagctgccctgccccagcagacagccaccccagagacctctgtgaagaagcccaaggccgagcagggcgccagcggcagccaggaccccgggaagccccgggtgggcaagaaggctgctgagggccaggccgccgcccggcggggcagccctgccttcctgcacagccccagctgcccagccatcatcagcagcagcgagaagctgctggccaagaagcccccatctgaggccagcgagctgacctttgagggcgtgcccatgacccacagccccacagaccccaggcctgccaaggccgaggagggcaagaacatcctggccgagagccagaaggaggtgggggagaagaccccaggccaggccggccaggccaagatgcagggcgacaccagccggggcatcgagttccaggccgtgcccagcgagaagtctgaggtgggccaggccctgtgcctgacagcccgggaggaggactgcttccagatcctggatgactgccccccacctccagcccccttcccccacaggatggtggagctgaggactggaaatgtgtcctctgagttctccatgaacagcaaggaggccctgggcggcggcaagtttggagctgtgtgcacctgcatggagaaggccaccggcctgaagctggccgccaaggtgatcaagaagcagacccccaaggacaaggagatggtgctgctggagattgaggtgatgaaccagctgaaccacaggaacctgatccagctgtatgctgccatcgagacccctcatgaaattgtgctcttcatggagtacatcgagggcggggagctgtttgaaagaattgtggatgaggactaccacctgacagaggtggacaccatggtgtttgtgcggcagatctgtgatggcatcctcttcatgcacaagatgagggtgctgcacctggacctgaagccagagaacatcctgtgtgtgaacaccaccggccacctggtgaagatcatcgactttggcctggcccggcgctacaaccccaatgagaagctgaaggtgaactttggcaccccagagttcctgagccctgaggtggtgaactatgaccagatcagtgacaagacagacatgtggagcatgggcgtcatcacctacatgctgctgagcggcctgagccccttcctgggagatgatgacacagagaccctgaacaacgtgctgagcggcaactggtactttgatgaggagacctttgaggccgtgtctgatgaggccaaggactttgtgagcaacctgattgtgaaggaccagagggccaggatgaatgctgcccagtgcctggcccacccctggctgaacaacctggccgagaaggccaagcgctgcaacagaaggctgaagagccagatcctgctgaagaagtacctgatgaagaggcgctggaagaagaacttcatcgctgtgtctgctgccaaccgcttcaagaagatcagcagcagcggggccctgatggccctgggcgtgtag

SEQ ID NO: 227196 - DNA, 2787 bp, Artificial Sequence
  derived and/or modified sequence
ctcctgagcagccgctgggagacagacggcaaccaggttgcccctctttgctccagctagaaagacttgagttagacaagcagcagcacacgcctccctacctcatggcgacagaaaatggagcagttgagctgggaattcagaacccatcaacagacaaggcacctaaaggtcccacaggtgaaagacccctggctgcagggaaagaccctggccccccagacccaaagaaagctccggatccacccaccctgaagaaagatgccaaagcccctgcctcagagaaaggggatggtaccctggcccaaccctcaactagcagccaaggccccaaaggagagggtgacaggggcggggggcccgcggagggcagtgctgggcccccggcagccctgccccagcagactgcgacacctgagaccagcgtcaagaagcccaaggctgagcagggagcctcaggcagccaggatcctggaaagcccagggtgggcaagaaggcagcagagggccaagcagcagccaggaggggctcacctgcctttctgcatagccccagctgtcctgccatcatctccagttctgagaagctgctggccaagaagcccccaagcgaggcatcagagctcacctttgaaggggtgcccatgacccacagccccacggatcccaggccagccaaggcagaagaaggaaagaacatcctggcagagagccagaaggaagtgggagagaaaaccccaggccaggctggccaggctaagatgcaaggggacacctcgagggggattgagttccaggctgttccctcagagaaatccgaggtggggcaggccctctgtctcacagccagggaggaggactgcttccagattttggatgattgcccgccacctccggcccccttccctcaccgcatggtggagctgaggaccgggaatgtcagcagtgaattcagtatgaactccaaggaggcgctcggaggtggcaagtttggggcagtctgtacctgcatggagaaagccacaggcctcaagctggcagccaaggtcatcaagaaacagactcccaaagacaaggaaatggtgttgctggagattgaggtcatgaaccagctgaaccaccgcaatctgatccagctgtatgcagccatcgagactccgcatgagatcgtcctgttcatggagtacatcgagggcggagagctcttcgagaggattgtggatgaggactaccatctgaccgaggtggacaccatggtgtttgtcaggcagatctgtgacgggatcctcttcatgcacaagatgagggttttgcacctggacctcaagccagagaacatcctgtgtgtcaacaccaccgggcatttggtgaagatcattgactttggcctggcacggaggtataaccccaacgagaagctgaaggtgaactttgggaccccagagttcctgtcacctgaggtggtgaattatgaccaaatctccgataagacagacatgtggagtatgggggtgatcacctacatgctgctgagcggcctctcccccttcctgggagatgatgacacagagaccctaaacaacgttctatctggcaactggtactttgatgaagagacctttgaggccgtatcagacgaggccaaagactttgtctccaacctcatcgtcaaggaccagagggcccggatgaacgctgcccagtgtctcgcccatccctggctcaacaacctggcggagaaagccaaacgctgtaaccgacgccttaagtcccagatcttgcttaagaaatacctcatgaagaggcgctggaagaaaaacttcattgctgtcagcgctgccaaccgcttcaagaagatcagcagctcgggggcactgatggctctgggggtctgagccctgggcgcagctgaagcctggacgcagccacacagtggccggggctgaagccacacagcccagaaggccagaaaaggcagccagatccccagggcagcctcgttaggacaaggctgtgccaggctgggaggctcggggctccccacgcccccatgcagtgaccgcttccccgatgtgagccgcctcggagtgtggcctggatccatcctgctagcacctccccagacagggctccagcctgtcggccacaccccagactccaggcccccgttgaagccgctcccggttccctccccagctcctcgtctttgaactgccgccgccgtggtgacccctgctttgccccactgggagagtccttagcctgggcctcctcctagctggagtgccatggctggggggtctcagcatgtagggcttctgtggttgtggatgggaggctcctggtggggcagaaaggctgcaacgctgattcctaaggcccagctgccagggaagacagagcaggctttgtgagagaggacctccatgcccccgccacctccccactccagcagataaggccgagcccacaccatctggcccaggctggcccccacccaccttccttgcgaccaccaacacacaggaactctgtgtgagagagagggcgcccagcccaggcctggtggagggggaggggagaagccaagggacacaggagaccacccccgagcttgcctcagggccaagccggcccaacccaaccactcggggcccccatcttgggggtcacccatggcctcagatgatggggtcagcaggcccaggagaattaggaaggccatggggcagcctccagtctgctctcagcttgtgccttgtaaataaatgtacaggttggatgtgg

SEQ ID NO: 227197 - DNA, 2956 bp, Artificial Sequence
  derived and/or modified sequence
actgcccacacccctgcctccgcctctgcccacccggcccaatcccttacaactgcccaggactgctcctgagcagccgctgggagacagacggcaaccaggttgcccctctttgctccaggtacctctctcccctcagttagcaggcctcggcttcctgtctcactgcagccagacgagaggggaaattggacagcctgacacactccactcttgtttctgcagctagaaagacttgagttagacaagcagcagcacacgcctccctacctcatggcgacagaaaatggagcagttgagctgggaattcagaacccatcaacagacaaggcacctaaaggtcccacaggtgaaagacccctggctgcagggaaagaccctggccccccagacccaaagaaagctccggatccacccaccctgaagaaagatgccaaagcccctgcctcagagaaaggggatggtaccctggcccaaccctcaactagcagccaaggccccaaaggagagggtgacaggggcggggggcccgcggagggcagtgctgggcccccggcagccctgccccagcagactgcgacacctgagaccagcgtcaagaagcccaaggctgagcagggagcctcaggcagccaggatcctggaaagcccagggtgggcaagaaggcagcagagggccaagcagcagccaggaggggctcacctgcctttctgcatagccccagctgtcctgccatcatctccagttctgagaagctgctggccaagaagcccccaagcgaggcatcagagctcacctttgaaggggtgcccatgacccacagccccacggatcccaggccagccaaggcagaagaaggaaagaacatcctggcagagagccagaaggaagtgggagagaaaaccccaggccaggctggccaggctaagatgcaaggggacacctcgagggggattgagttccaggctgttccctcagagaaatccgaggtggggcaggccctctgtctcacagccagggaggaggactgcttccagattttggatgattgcccgccacctccggcccccttccctcaccgcatggtggagctgaggaccgggaatgtcagcagtgaattcagtatgaactccaaggaggcgctcggaggtggcaagtttggggcagtctgtacctgcatggagaaagccacaggcctcaagctggcagccaaggtcatcaagaaacagactcccaaagacaaggaaatggtgttgctggagattgaggtcatgaaccagctgaaccaccgcaatctgatccagctgtatgcagccatcgagactccgcatgagatcgtcctgttcatggagtacatcgagggcggagagctcttcgagaggattgtggatgaggactaccatctgaccgaggtggacaccatggtgtttgtcaggcagatctgtgacgggatcctcttcatgcacaagatgagggttttgcacctggacctcaagccagagaacatcctgtgtgtcaacaccaccgggcatttggtgaagatcattgactttggcctggcacggaggtataaccccaacgagaagctgaaggtgaactttgggaccccagagttcctgtcacctgaggtggtgaattatgaccaaatctccgataagacagacatgtggagtatgggggtgatcacctacatgctgctgagcggcctctcccccttcctgggagatgatgacacagagaccctaaacaacgttctatctggcaactggtactttgatgaagagacctttgaggccgtatcagacgaggccaaagactttgtctccaacctcatcgtcaaggaccagagggcccggatgaacgctgcccagtgtctcgcccatccctggctcaacaacctggcggagaaagccaaacgctgtaaccgacgccttaagtcccagatcttgcttaagaaatacctcatgaagaggcgctggaagaaaaacttcattgctgtcagcgctgccaaccgcttcaagaagatcagcagctcgggggcactgatggctctgggggtctgagccctgggcgcagctgaagcctggacgcagccacacagtggccggggctgaagccacacagcccagaaggccagaaaaggcagccagatccccagggcagcctcgttaggacaaggctgtgccaggctgggaggctcggggctccccacgcccccatgcagtgaccgcttccccgatgtgagccgcctcggagtgtggcctggatccatcctgctagcacctccccagacagggctccagcctgtcggccacaccccagactccaggcccccgttgaagccgctcccggttccctccccagctcctcgtctttgaactgccgccgccgtggtgacccctgctttgccccactgggagagtccttagcctgggcctcctcctagctggagtgccatggctggggggtctcagcatgtagggcttctgtggttgtggatgggaggctcctggtggggcagaaaggctgcaacgctgattcctaaggcccagctgccagggaagacagagcaggctttgtgagagaggacctccatgcccccgccacctccccactccagcagataaggccgagcccacaccatctggcccaggctggcccccacccaccttccttgcgaccaccaacacacaggaactctgtgtgagagagagggcgcccagcccaggcctggtggagggggaggggagaagccaagggacacaggagaccacccccgagcttgcctcagggccaagccggcccaacccaaccactcggggcccccatcttgggggtcacccatggcctcagatgatggggtcagcaggcccaggagaattaggaaggccatggggcagcctccagtctgctctcagcttgtgccttgtaaataaatgtacaggttggatgtgg

SEQ ID NO: 227198 - DNA, 1791 bp, Artificial Sequence
  derived and/or modified sequence
atggccaccgagaacggcgccgtggagctgggcatccagaacccctctacagacaaggccccgaagggtcctacgggggagcggccacttgcagctgggaaggatcctggaccccctgacccaaaaaaggcacctgacccgcccacactgaagaaggacgccaaggcacctgcctcggagaagggcgacgggactctcgcccagccttctactagcagtcagggacctaagggcgagggggatcggggcgggggtccagccgagggctcagccggcccccctgctgctctgccccagcagacggctactcccgagacatctgtgaaaaaacccaaggctgaacagggtgcctcaggaagccaggatcccgggaaaccacgtgtgggcaagaaggccgctgagggtcaagccgccgcccgccgcgggagccctgcatttctgcacagcccaagttgcccagcaattatctcttcctctgaaaagctgctggcaaaaaaacctcctagcgaggccagcgaactcaccttcgagggggtgccgatgacccactcccccacagacccgagaccagctaaggccgaagaaggtaagaatatactggcagagtcccagaaggaggtaggcgagaaaacccccgggcaggccgggcaggcaaagatgcagggtgacacatcacgggggatcgaatttcaagcagtccctagcgagaagtctgaagtgggccaggctttgtgcctaacagcccgggaagaggattgctttcagattttagacgactgtccacctccccctgccccatttccccaccgcatggtcgagttacggactggcaatgtcagttctgaatttagcatgaatagtaaggaagccctgggcgggggaaagttcggcgccgtgtgcacttgtatggaaaaggcaaccggcctgaagctggcggctaaagtaatcaagaaacagactcccaaggacaaggaaatggtgctcttggaaattgaggtcatgaaccaactaaatcaccggaatctgatacagctatatgctgcaattgagacaccacatgaaatcgtcctttttatggagtatattgagggaggagagctcttcgaacgtatcgtggatgaagattatcacctgacagaagttgacacaatggtgttcgtcaggcaaatctgcgacgggatcctattcatgcacaagatgcgggtgttgcacctcgacctgaaaccagaaaacattctgtgtgtgaacacaactggtcacttggtgaagatcatagacttcggcctggctcgccgatacaacccgaatgaaaaactaaaagtgaactttggtaccccggaatttcttagtcccgaggtggtcaactacgatcagatctcagataaaacggatatgtggtcaatgggagtaatcacttacatgctactttctggcctgagcccattccttggcgacgatgacacagagaccctgaacaatgttctgtccggcaattggtattttgacgaagaaacattcgaggctgttagcgacgaggccaaagacttcgtgtccaacttaatcgtgaaagatcaacgcgctcggatgaacgccgcacagtgcctggcccacccctggctgaacaacttagccgaaaaagccaagcggtgcaatcggaggctgaagtcccagatcctccttaagaagtacctgatgaagagaaggtggaagaagaactttatagcggtatcagccgcaaatcggttcaagaagattagttcttctggtgccttgatggccctgggtgtatag

SEQ ID NO: 227199 - DNA, 1791 bp, Artificial Sequence
  derived and/or modified sequence
atggccaccgagaacggcgccgtggagctgggcatccagaacccctctactgacaaagcacccaaggggcccactggggaacgtcccctagcagcaggaaaggatccaggacctcctgatccaaaaaaagcaccagatccgcctacactgaaaaaagacgccaaggccccagccagtgagaaaggagatggcaccttggctcagccgagcaccagttctcagggacccaaaggggaaggggaccgcggcggcggtcccgctgaggggagcgctggaccacctgcagctctgccccagcaaaccgcaaccccagagacgtccgtcaagaagcccaaagccgagcagggggccagtggatcccaggaccccggaaagccacgagtggggaagaaggccgccgaaggacaggctgccgcaagacgcggatcaccagcattccttcacagtccaagctgtcctgccatcatatcttcctcggagaaactgctggccaaaaagccccccagtgaggccagtgagcttactttcgagggggttcccatgactcattcccccacggatcccagaccagcaaaagccgaagaaggcaagaatatcctggcagaaagccagaaggaagtgggggagaaaacacctggccaggcaggacaagcgaagatgcagggagacaccagccgagggatagaattccaggctgttccctcagaaaagagcgaagtgggccaggcgttatgcctgactgctcgggaagaggattgcttccagatccttgacgactgcccccctccgccagctcctttccctcaccggatggtggagcttcggacaggcaacgtgtcatccgagttctctatgaacagtaaagaggccctaggaggaggcaaattcggtgccgtctgtacctgcatggaaaaggcaaccgggctgaagttggccgcaaaggtcatcaagaagcagaccccgaaagataaggaaatggtgctgctggagatagaagtgatgaaccagctgaaccaccggaacctcatccagctgtacgctgcgatcgaaacaccccatgagatcgtcctgttcatggagtatatagaggggggtgaactatttgaacgtattgtagacgaggactaccacctaactgaggtggatacaatggtgtttgtccgtcagatctgtgatgggatactgtttatgcacaaaatgagagtactgcacctcgacctgaagccggagaacattctgtgcgtgaacaccacagggcaccttgtgaagatcatcgacttcggtcttgctcgccgttacaatcctaacgaaaagttaaaagtgaattttggtacgccagagtttctgtcgccagaggtagtgaactacgatcagatctctgacaaaactgacatgtggtcaatgggcgtaatcacatatatgcttctcagcgggctcagccccttccttggcgacgacgatacagaaactctcaataatgttctctctggaaactggtatttcgatgaggaaacgttcgaggccgtatctgacgaagctaaggattttgttagcaacttaatcgtgaaggaccaacgcgcccggatgaacgccgctcaatgcctagcgcatccatggcttaataaccttgccgaaaaggccaagaggtgtaacagaaggctgaaatcccaaattcttctgaagaaatacctgatgaagaggagatggaagaaaaactttatcgccgtgtctgccgcaaaccggttcaagaagatttcgtcttcaggagcgctgatggctctgggcgtgtag

SEQ ID NO: 227200 - DNA, 1791 bp, Artificial Sequence
  derived and/or modified sequence
atggcaaccgagaatggagcagtcgagctggggattcaaaaccccagcacggacaaagcccctaaagggccaactggcgagaggccacttgcggcaggaaaggatccaggcccacccgaccccaagaaagctcccgacccacctaccctgaagaaagatgcgaaggctccggcttcagaaaagggcgacggcacactggcacagccgagcacctcgagtcagggtcctaagggtgagggtgatagagggggaggacccgcagagggaagtgcaggtcctcccgcagctctgcctcaacagaccgccaccccagagacaagcgtaaagaagccgaaggctgagcagggcgcaagcggctctcaagatccaggcaaacctagggtgggaaaaaaagctgcagaaggtcaggctgccgcacggaggggcagtcccgcatttctccattcaccaagctgccccgctatcatatcaagcagtgagaaactcctggcgaaaaagcccccttctgaagcttcagaactgacattcgaaggcgttccaatgactcactcccccactgacccaaggccagccaaggccgaggaaggaaaaaatatacttgctgaaagccaaaaagaagtcggggaaaagacccctggccaggcaggccaggccaaaatgcagggagacacaagtcggggaattgagtttcaggcagtgcctagtgaaaagagcgaggtgggtcaggcgctatgcttgaccgcccgagaggaagattgcttccagatactggacgactgcccccctccgcctgccccttttccccatcgaatggtagaattacgaactgggaatgtgagctcggagttctctatgaattcaaaggaggcccttggaggcggtaagttcggggcagtttgcacgtgcatggaaaaagcaacagggctcaaactggccgctaaggtgataaaaaaacagactcccaaggacaaggagatggtgctgctagaaatcgaggtcatgaaccaattgaaccatagaaacctgatccaactgtacgccgctattgagactccacacgaaatagttcttttcatggagtacattgagggcggtgagctgttcgaaaggatcgttgacgaagactatcatctgacggaggtggacacaatggtcttcgtgcgtcaaatttgcgatggaattctgttcatgcacaaaatgcgggtgctgcacttagacctgaaacccgaaaatattctgtgcgtgaacacaaccgggcacctggtgaaaattattgacttcgggttggccaggaggtacaatcctaacgaaaagctgaaggtaaattttggtaccccagaattcctgtcccctgaggtagtcaattatgatcagatctctgacaaaaccgacatgtggtccatgggggtgatcacgtacatgttattgtcaggtctaagcccattcctgggggacgacgatacggaaacattgaacaacgtcctaagcggcaactggtattttgacgaggaaacgttcgaagcagtgtccgatgaagctaaagactttgtgagcaatctgatagttaaggatcagcgagccaggatgaacgctgcacagtgcctcgcgcatccctggcttaataatctcgcagaaaaggcgaaaagatgcaaccgcagactgaagtctcagattcttctgaaaaaatacctgatgaagagaaggtggaaaaagaactttatcgccgtgagtgcagcaaacagatttaaaaagatctcgtcctccggcgctctaatggctctgggcgtatag

SEQ ID NO: 227201 - DNA, 1791 bp, Artificial Sequence
  derived and/or modified sequence
atggccacggaaaatggcgctgtggaattggggattcagaatcctagtacagacaaagctcctaaggggcctacgggggagaggccactcgctgccggaaaagacccaggcccaccagacccaaagaaggcacctgaccctcccacgctgaagaaggatgcgaaagcccctgcctcagaaaagggagatgggactctggcccaaccctcaacatcctcacaagggcctaagggcgaaggagatagaggcggaggtcctgccgaaggcagcgctggaccccctgccgctcttcctcagcagacagccactccagaaacatctgtcaaaaagccaaaagccgagcagggcgcatcaggctctcaggaccctgggaagcccagggtaggtaagaaggccgctgagggccaggctgcagccaggcgcggatccccagccttcttacattcaccgtcatgccccgctatcatttcaagctcagagaaactacttgctaagaaacccccttccgaagcaagcgaactgacgttcgaaggggtgccgatgacccacagccccactgatcccaggcccgcaaaagccgaggaggggaaaaacattctagcagagtctcagaaggaagtcggcgaaaagactcccggacaggctggccaagccaaaatgcagggagatacttcccggggaatcgagttccaggcggtcccgtctgagaagagcgaagtagggcaggcgctctgtctgaccgccagagaggaggactgtttccagattctggacgattgtcctcctccccctgctccattcccgcatcgaatggtggagctgaggacagggaacgtgtcaagtgagttctcgatgaatagcaaggaggccctgggcggtgggaaatttggggctgtctgcacatgcatggagaaggccaccggcctcaagcttgctgccaaggtgattaagaaacaaactcctaaggataaagagatggtactgctggagattgaagtgatgaatcaactcaaccatcgcaatctgattcaattgtacgccgctatcgagacccctcacgagatcgtcctcttcatggagtacatcgagggcggagaactgtttgagaggatcgtggacgaagactatcacctcactgaggtggatacgatggtgttcgtgcgccagatatgtgacggaatcctgtttatgcataagatgcgggtgctccatcttgatctgaagccagagaacatcctctgtgtgaacacaaccggccatcttgtgaaaataatcgatttcggtttagctcgccgatataatcccaacgagaagctgaaggtcaattttggcacgccggaattcctgagtcctgaagttgtaaattatgatcagatctcagacaaaacagacatgtggagtatgggggttattacatacatgctcctgtctggtcttagccccttccttggcgacgacgacaccgagaccctcaacaacgtgttatctggcaactggtattttgatgaggagacctttgaagccgtgagtgacgaggcgaaagatttcgtttccaaccttatagtcaaggaccagcgggctagaatgaatgcagctcaatgtctggcacatccctggcttaataacctggctgagaaggcgaagcggtgcaatcgccgattgaagtcccagattctcttgaagaaatacctcatgaagcgtaggtggaagaaaaacttcattgccgtgagcgcagccaacagatttaagaaaattagtagttctggcgctttaatggcccttggcgtatag

SEQ ID NO: 227202 - DNA, 1791 bp, Artificial Sequence
  derived and/or modified sequence
atggccaccgagaacggcgccgtggagctgggcatccagaaccccagcaccgacaaggcccccaagggccccaccggcgagagacccctggccgccggcaaggaccccggcccccccgaccccaagaaggcccccgacccccccaccctgaagaaggacgccaaggcccccgccagcgagaagggcgacggcaccctggcccagcccagcaccagcagccagggccccaagggcgagggcgacagaggcggcggccccgccgagggcagcgccggcccccccgccgccctgccccagcagaccgccacccccgagaccagcgtgaagaagcccaaggccgagcagggcgccagcggcagccaggaccccggcaagcccagagtgggcaagaaggccgccgagggccaggccgccgccagaagaggcagccccgccttcctgcacagccccagctgccccgccatcatcagcagcagcgagaagctgctggccaagaagccccccagcgaggccagcgagctgaccttcgagggcgtgcccatgacccacagccccaccgaccccagacccgccaaggccgaggagggcaagaacatcctggccgagagccagaaggaggtgggcgagaagacccccggccaggccggccaggccaagatgcagggcgacaccagcagaggcatcgagttccaggccgtgcccagcgagaagagcgaggtgggccaggccctgtgcctgaccgccagagaggaggactgcttccagatcctggacgactgcccccccccccccgcccccttcccccacagaatggtggagctgagaaccggcaacgtgagcagcgagttcagcatgaacagcaaggaggccctgggcggcggcaagttcggcgccgtgtgcacctgcatggagaaggccaccggcctgaagctggccgccaaggtgatcaagaagcagacccccaaggacaaggagatggtgctgctggagatcgaggtgatgaaccagctgaaccacagaaacctgatccagctgtacgccgccatcgagaccccccacgagatcgtgctgttcatggagtacatcgagggcggcgagctgttcgagagaatcgtggacgaggactaccacctgaccgaggtggacaccatggtgttcgtgagacagatctgcgacggcatcctgttcatgcacaagatgagagtgctgcacctggacctgaagcccgagaacatcctgtgcgtgaacaccaccggccacctggtgaagatcatcgacttcggcctggccagaagatacaaccccaacgagaagctgaaggtgaacttcggcacccccgagttcctgagccccgaggtggtgaactacgaccagatcagcgacaagaccgacatgtggagcatgggcgtgatcacctacatgctgctgagcggcctgagccccttcctgggcgacgacgacaccgagaccctgaacaacgtgctgagcggcaactggtacttcgacgaggagaccttcgaggccgtgagcgacgaggccaaggacttcgtgagcaacctgatcgtgaaggaccagagagccagaatgaacgccgcccagtgcctggcccacccctggctgaacaacctggccgagaaggccaagagatgcaacagaagactgaagagccagatcctgctgaagaagtacctgatgaagagaagatggaagaagaacttcatcgccgtgagcgccgccaacagattcaagaagatcagcagcagcggcgccctgatggccctgggcgtgtag

SEQ ID NO: 227203 - protein, 470 aa, Artificial Sequence
  derived and/or modified sequence
MGKLHSKPAAVCKRRESPEGDSFAVSAAWARKGIEEWIGRQRCPGGVSGPRQLRLAGTIGRSTRELVGDVLRDTLSEEEEDDFRLEVALPPEKTDGLGSGDEKKMERVSEPCPGSKKQLKFEELQCDVSMEEDSRQEWTFTLYDFDNNGKVTREDITSLLHTIYEVVDSSVNHSPTSSKMLRVKLTVAPDGSQSKRSVLVNQADLQSARPRAETKPTEDLRSWEKKQRAPLRFQGDSRLEQSGCYHHCVDENIERRNHYLDLAGIENYTSQFGPGSPSVAQKSELPPRTSNPTRSRSHEPEAIHIPHRKPQGVDPASFHFLDTPIAKVSELQQRLRGTQDGSKHFVRSPKAQGKSVGVGHVARGARNKPPLGPAIPAVSPSAHLAASPALLPSLAPLGHKKHKHRAKESQQGCRGLQAPLASGGPVLGREHLRELPALVVYESQAGQPVQRHEHHHHHEHHHHYHHFYQT

SEQ ID NO: 227204 - DNA, 1413 bp, Artificial Sequence
  derived and/or modified sequence
atgggcaagctgcacagcaagcccgccgccgtgtgcaagagaagagagagccccgagggcgacagcttcgccgtgagcgccgcctgggccagaaagggcatcgaggagtggatcggcagacagagatgccccggcggcgtgagcggccccagacagctgagactggccggcaccatcggcagaagcaccagagagctggtgggcgacgtgctgagagacaccctgagcgaggaggaggaggacgacttcagactggaggtggccctgccccccgagaagaccgacggcctgggcagcggcgacgagaagaagatggagagagtgagcgagccctgccccggcagcaagaagcagctgaagttcgaggagctgcagtgcgacgtgagcatggaggaggacagcagacaggagtggaccttcaccctgtacgacttcgacaacaacggcaaggtgaccagagaggacatcaccagcctgctgcacaccatctacgaggtggtggacagcagcgtgaaccacagccccaccagcagcaagatgctgagagtgaagctgaccgtggcccccgacggcagccagagcaagagaagcgtgctggtgaaccaggccgacctgcagagcgccagacccagagccgagaccaagcccaccgaggacctgagaagctgggagaagaagcagagagcccccctgagattccagggcgacagcagactggagcagagcggctgctaccaccactgcgtggacgagaacatcgagagaagaaaccactacctggacctggccggcatcgagaactacaccagccagttcggccccggcagccccagcgtggcccagaagagcgagctgccccccagaaccagcaaccccaccagaagcagaagccacgagcccgaggccatccacatcccccacagaaagccccagggcgtggaccccgccagcttccacttcctggacacccccatcgccaaggtgagcgagctgcagcagagactgagaggcacccaggacggcagcaagcacttcgtgagaagccccaaggcccagggcaagagcgtgggcgtgggccacgtggccagaggcgccagaaacaagccccccctgggccccgccatccccgccgtgagccccagcgcccacctggccgccagccccgccctgctgcccagcctggcccccctgggccacaagaagcacaagcacagagccaaggagagccagcagggctgcagaggcctgcaggcccccctggccagcggcggccccgtgctgggcagagagcacctgagagagctgcccgccctggtggtgtacgagagccaggccggccagcccgtgcagagacacgagcaccaccaccaccacgagcaccaccaccactaccaccacttctaccagacctag

SEQ ID NO: 227205 - DNA, 1413 bp, Artificial Sequence
  derived and/or modified sequence
atgggcaaactgcatagtaaaccggcagcagtctgcaagcgcagagagtctcccgagggggattccttcgccgtgagcgcggcatgggcaagaaaaggtatcgaagagtggattggaagacagcgctgtccaggtggcgtttctgggcccagacagctacgcctcgccggcacaattgggcgttccacacgagaactagtgggggacgttcttagagataccttatctgaagaagaagaggatgactttcgtctggaagtggccctgcccccagaaaagacagacggcctggggagcggtgacgaaaagaagatggaaagggtgagcgagccttgtcctggctccaagaaacagttaaaatttgaagagctacagtgtgatgtgtctatggaagaggattctcgtcaggagtggacctttacactttatgattttgataacaatgggaaggtgactagagaggacataacttcgctgctccacaccatttatgaagtagtggatagttcagtgaaccactcacctacaagttccaaaatgcttcgagtcaagctcactgtcgcacccgatggctctcagtcaaaacgcagcgtcttggtgaatcaggcagacctgcagtcagcacgcccacgggctgagacaaaacccacggaagatctgagatcctgggaaaagaagcagcgggctcccctgagatttcaaggtgattcccgcctcgagcagtccggctgttaccaccactgcgtggatgagaacattgagcgccgaaaccactacctagacttagcaggcatagagaattacacctctcagttcggcccaggcagccccagcgtggctcagaaatccgaactgccgccccgcacatctaatccgaccagaagcaggagccacgagcctgaagctatccacatcccacaccggaagcctcagggggtggacccagcttctttccactttctcgacacccccattgctaaggtttctgagctccagcagagactccgcgggacccaggatggatccaaacacttcgtgagatcacccaaagcacagggcaaatcggtcggggtgggccacgtggcacgcggggcgcgcaacaaaccaccccttggtcccgccatcccagcggtttcccctagcgctcatctggccgcctcgcccgccctcttacctagtctagcacccctgggccataaaaagcacaagcacagggcaaaggaatctcaacaggggtgcaggggccttcaggcacctctcgctagtggaggccccgttctagggcgggagcacctgcgtgagctgcccgccctggtcgtgtacgagagtcaggcaggacagcccgtgcaaagacacgaacaccaccatcatcacgaacatcaccatcactatcaccacttttaccagacatag

SEQ ID NO: 227206 - DNA, 1413 bp, Artificial Sequence
  derived and/or modified sequence
atgggcaagctgcacagcaagccagctgctgtgtgcaagaggcgggagagccctgagggggacagctttgctgtgtctgctgcctgggccaggaagggcatcgaggagtggattggccggcagcgctgccctgggggcgtgtctggcccccggcagctgcggctggccggcaccatcggccgcagcacccgggagctggtgggagatgtgctgcgggacaccctgtctgaggaggaggaggatgacttccggctggaggtggccctgcccccagagaagacagatggcctgggcagcggagatgagaagaagatggagcgggtgtctgagccctgccccggcagcaagaagcagctgaagtttgaggagctgcagtgtgatgtgtccatggaggaggacagccggcaggagtggaccttcaccctgtatgactttgacaacaacgggaaggtgacccgggaggacatcaccagcctgctgcacaccatctatgaggtggtggacagctctgtgaaccacagccccaccagcagcaagatgctgcgggtgaagctgactgtggccccagatggcagccagagcaagaggtctgtgctggtgaaccaggccgacctgcagagcgcccggcccagggctgagaccaagcccacagaggacctgcgctcctgggagaagaagcagagggcccccctgcgcttccagggcgacagccggctggagcagagcggctgctaccaccactgtgtggatgaaaatattgaaagaagaaaccactacctggacctggccggcatcgagaactacaccagccagtttggacctggcagccccagcgtggcccagaagtctgagctgccccccaggaccagcaaccccaccaggagccgcagccatgagcctgaggccatccacatcccccacaggaagccccagggcgtggaccctgccagcttccacttcctggacacccccatcgccaaggtgtctgagctgcagcagaggctgcggggcacccaggacggcagcaagcactttgtgcgcagccccaaggcccagggcaagtctgtgggcgtgggccacgtggcccggggggccaggaacaagccacccctgggccctgccatcccagctgtgagccccagcgcccacctggccgccagccctgccctgctgcccagcctggcccccctgggccacaagaagcacaagcaccgggccaaggagagccagcagggctgccggggcctgcaggcccccctggccagcggcggccctgtgctgggccgggagcacctgcgggagctgcctgccctggtggtgtatgagagccaggccggccagcctgtgcagagacatgagcaccaccaccaccacgagcaccaccaccactaccaccacttctaccagacctag

SEQ ID NO: 227207 - DNA, 4592 bp, Artificial Sequence
  derived and/or modified sequence
gccaatgggcgcgcggggaggcgcgggccgcggcggcgggctgggggctcggcgctcccgggcgtcagtcgggccgcggcgacggcggcaggagcgcgtcccggcgccgcctcgggctccgctcggctcgggggctgcttcgggaggaggagagccaagggaggcgccaggcccgcgggccgggcgcatggcttagggacgctcccggccgccgcagccccagcatggggaaacttcactccaagccggccgccgtgtgcaagcgcagggagagcccggaaggtgacagcttcgccgtgagcgctgcctgggctcggaagggcatcgaggagtggatcgggagacagcgctgcccgggcggtgtctcgggaccccgacagctgcggttggcgggcaccataggccgaagcacccgggagctcgtgggcgacgtgttgagagacacgctcagcgaggaagaggaggacgactttcggctggaagtggccctgcctcctgagaagactgacgggctgggcagcggagatgagaagaagatggagagagtgagcgaaccctgcccaggctccaagaagcagctgaagtttgaagagctccagtgcgacgtgtccatggaggaggacagccggcaggagtggaccttcaccctgtatgactttgacaacaacggcaaggtcacccgagaggacatcaccagcttgctgcacaccatctatgaggtggtggactcctctgtcaaccactccccaacatccagcaagatgctgcgggtaaagctcaccgtggcccccgatggcagccagagcaagaggagcgtccttgtcaatcaggctgacctgcagagcgcaaggccccgagcagagaccaagcccactgaggacctgcggagctgggagaagaagcagcgagccccgctcaggttccagggtgacagccgcctggagcagtctggctgctaccaccattgcgtagatgagaacatcgagaggagaaaccactacttagatctcgccgggatagaaaactacacgtcccaatttgggcctggctccccttccgtggcccagaagtcagaactgcccccccgcacctccaatcccactcgatctcgctcccatgagccggaagccatccacatcccacaccgaaagccccaaggcgtggacccggcctccttccacttccttgacaccccaatcgccaaggtctcagagctccagcaacggctccggggcacccaggacgggagcaagcactttgtgaggtcccccaaggcccagggcaagagtgtgggtgtgggccacgtggccagaggggcaagaaacaagccccctctgggacccgccatccctgcggtgtccccctccgcccacctggctgccagcccggccctcctcccctccctagcccccctcgggcacaagaagcacaagcaccgagccaaggagagccagcagggctgccggggcctgcaggcaccactggcctcaggtggccctgtcctggggcgggagcacctgcgggagctgcccgccttggtggtgtatgagagccaggccgggcagccggtccagagacatgagcaccaccaccaccatgaacatcaccaccattaccaccacttctaccagacatagagcccctccccagggccccaccctgccatatgaaggaccccacccccgacaccacaaggcattattattctattaattattgttattatgatgattattgttattaataattattgttactccactaatatttagctagcctacatgtagaagatctatggaaacacagaactaaacttttatttatatgttgtggggactgcataactagcccaggaaatgactctggttttgagtggcctgtaatgggcagaggctccctcggggctcgggatctgcagcatctatgtggatcagcccacacccttcccagagccagggagcccttagcctcaactctgccccaccccagcctcttccaggagagcacccttacttggcccggcttccagagaccctcgaaatctccgagaagataaacagctgctacctcttagtattattctgattttattttgcccttaactgattgttatatgctacaagggatttcagtggactgcagagtgcgaacgtcttgctgttgtgtttttatgtcccaacctagaaaccttagctgtcttttctggagttgtctttcatgcttttccagtgggatcaagcccttttccccaagagtcccatctcttctgccatgcacgacatgaaaatccacttctcttccttctccttcttctctctctactttacagtgatacacacacgtatttaaggactatccctgagaccatccttctcattttggaaactgctagggagggaaccaaccacttaaacaagcgtggttttccaagatccaggcaattgtgtgctgttggttgtggtggaggatgtggcacatatatacgtacctacacggttctctaacagagctttctgtatctatagatagatgccatctgtccatttctatgtatctttctataaatatacactctcaggtatcttttctggtgtgtataaatcagtggtttgcttccctggatgcttctggaacccagatgtgaccctgcttgtctccttttggggctggacggctctcagatgctttcatcagaggtccattctcgggttttggggtctgatggattttggagagaactgctggggtacagaaacttggtgggaaaaggggactgtggccagagttgggaccctggagcagcatcctctgcagagaaggattttgtctggccagagcctggagaaacctgaaaaagaaccagtcagctagccagggtctcagagaaaagcagattacacactcaaattgggtaatttgagcagagcttaataaaggcagtatttacaaagtgtgggctaagcctcccatgagagtgcagaaccctggggctagcagtgtggggcgctattcccacccctgggcctgagtggggaaggagttatctttagcagacagaggattgctggaggagtgagaggggcacctgaaggagctgtgacctttgcttaaaggatgcagccagtcatggggaccctccagggaaattaatatcctgacctgctttcctgccccccagccccctcaatccattggctgaggccgctggaagccaccgggccaagggagcttgttgatgtgggtcacacgggcatgttcccaggtcagagaggagagtggagagtgaatctagggagactcaagagggagaagtgactccagctaccttcctttctgccgttttgtctcccagctggcattctcttttccagagcctcgagtttgggtttaatgtagttagtaaggagttacttccaaaggtagtgggcttagttgtcaccgtattcttaattttattaatgactgatgtgcctgggattggattaatacattaatccttaggacagccccatgaggcagcttggtggcagctcaggaagcatgtctaaggctcagaagttcataactcccttgaggccgcacagagggcggagctggaattctggtctcccactcgatcccttcgccactggtgcagagcttaatcacggccatgggctgcccttgttttgggttgtgggtttctgttcagtgagaacgcaactcaatccaaagtgaatgaaaccaagttggaaggcagggagggaactggctttgagatgacagggtccaggatgtgaatgcagctgagactggttcttgtccctccctcttgtccctcggattgataacttgtactcaactacatgcttttgtcagggaaccctggctgctggccttctgggtcccctaaccataagaaaaaggaccttccgttagtgtaaagcccaaggcaggattctgcttggctgggcttcgatctggtacccatagctggaccaatcatgacatcccagatggggtcacgtggccaacctgccgcaagggggtggggtctgtaccggaagacaggaggggaggggtgcagatcggacaggaagtaatggcatcccaggccccgaattgctgcaaccctggaggccagcccggagttgagactactggttttagagcagttcctctgcctccctaagctccacacctgtcaggattctgttacttcttggtaactgggacttgcccaactttaaaaacattatttaaaaaaatagtaatgtgcacatgtaaaagattcaaatagtatatatacaaggtgtacagtaaaaagtaaacttccctccatcccaggcctgccagcatccctgatgccgactttctgggtgtggcctagggcccctcagtgtaatgtaggggttgtgagcacagactttggtgccagtttgctaggttcgaatcctgactccctctttgtagctctgtgcttcaattgaaatactgtgcctcagtttctcctttataaaggcagggatcatgagagtgcctgtcccttgtgagcactatgaaagtgttagctgttctttaccagaataaatgcatttctatatcttcccata

SEQ ID NO: 227208 - DNA, 1413 bp, Artificial Sequence
  derived and/or modified sequence
atgggcaagctgcacagcaagcccgccgccgtgtgcaagcggcgggaaagccccgaaggggactcattcgcagtgtcggcagcctgggcaaggaagggcatcgaggagtggattggccgtcaacgatgtccgggcggagtttcaggaccccggcagctcaggctggctggaaccattggccgcagtaccagggaactagtcggtgatgtcctgagggacaccctgagcgaagaagaggaggatgatttcaggcttgaggttgctctgcctccagaaaagacagatggactcggtagcggagatgagaagaagatggagagggtctctgagccgtgtcctgggtctaaaaaacagctgaagttcgaagaacttcagtgcgatgtcagcatggaggaggactcacggcaagaatggacatttaccctgtatgattttgataataacggaaaagtgacacgcgaagatattacttctttgctccataccatttatgaagtggtcgacagcagcgttaaccattcccctacgagcagcaaaatgctgcgagtcaaattgaccgtggccccggatggaagtcagtcaaagcgatcagttctcgtgaatcaagcggaccttcaaagcgcccgaccaagggctgagaccaagccgacagaggatctgaggtcatgggagaagaaacagcgggccccactgaggttccagggcgattcaaggctggaacagtccggatgctaccatcactgcgttgatgagaacatagaacggcgcaaccactacctggatctcgcagggatcgagaattacaccagccagtttggacccgggagtcccagcgtcgctcagaaaagcgagctcccccctcgaacatccaaccccacacgaagcaggtcacacgaacccgaggcaatccatataccccacaggaaaccccaaggcgtggaccccgcatcctttcatttcctcgatacccccatagccaaggttagcgagctacagcagcgcctgagggggactcaggacggctccaagcacttcgttagatcccccaaggcacaaggcaagagcgtcggagtaggacacgtggccagaggggcacggaataaacctccactcggcccagctatacccgctgtctcgccatccgcacacctggctgcgtccccagccctgctacctagcctcgcacctctgggccataaaaaacataaacaccgcgcaaaagagagtcagcaggggtgtcgaggactacaggcaccattggcctcaggaggcccggtcctggggagggagcacctccgcgaactgccggcccttgtggtatacgagtcccaggccggacagccagtgcagaggcatgagcatcatcaccaccacgagcaccaccatcactaccaccacttctatcagacctag

SEQ ID NO: 227209 - DNA, 1413 bp, Artificial Sequence
  derived and/or modified sequence
atgggcaaacttcactccaaaccagccgcagtctgtaagcgcagagaatcaccggagggggattctttcgcggttagcgcggcttgggccaggaaaggaatcgaggaatggattggccgtcagaggtgcccaggcggagtgtctggccctcgtcaactccggctcgccggaacaataggccgaagcaccagagaattagttggggacgtcctccgtgacactttaagcgaggaagaagaggacgatttccggctggaggtcgcccttcctcccgaaaagactgatggcctgggaagcggagacgagaaaaaaatggagcgggttagcgagccatgcccaggatccaagaagcagctgaagttcgaggaacttcagtgcgatgtgtccatggaggaggattcccggcaggagtggacatttaccctgtatgatttcgacaacaatggcaaagttacacgagaagatattactagcttgctgcatacgatctatgaggtcgtggactctagcgtaaaccactcccctacatcaagcaaaatgcttcgtgtcaagctcaccgtggctccagacggctctcagagtaagagaagcgttctggttaatcaggctgatctgcagagtgctcggccaagggcagagacaaagcctaccgaagatctgcgctcctgggagaagaaacagcgcgcaccgttacggttccagggcgattcccgactcgaacagagcgggtgttatcaccattgcgtcgacgaaaacatagagcgcaggaaccactatcttgatctggccggtattgagaattacacctcacagttcggacccggaagtccatcggtcgcacaaaagagcgagcttcctccacgcacctctaaccccaccaggtcgcgttctcatgagcccgaggcgatccatatcccacaccgaaaaccccagggggtggacccagcaagcttccattttctcgacacaccgatcgctaaagtgagcgagctgcagcaacggcttagagggacacaggatggcagtaaacacttcgtgaggtcccctaaggcccagggaaaaagcgtaggagttggtcatgtggcacgaggcgcaaggaataagccccctttgggacccgcaattccagctgttagtcctagcgctcacctggcagcatcacccgcattactgccctccctggcacctttggggcataaaaaacacaaacatagggcaaaggaaagtcaacaggggtgcagagggcttcaggcccctctggcctcgggaggacctgtgctcggaagggagcacctgagggagttacccgctctcgttgtttatgaatcccaagccggtcaacccgtgcaaagacacgaacaccatcaccatcacgagcatcatcatcactaccatcatttttatcagacatag

SEQ ID NO: 227210 - protein, 451 aa, Artificial Sequence
  derived and/or modified sequence
MGKLQSKHAAAARKRRESPEGDSFVASAYASGRKGAEEAERRARDKQELPNGDPKEGPFREDQCPLQVALPAEKAEGREHPGQLLSADDGERAANREGPRGPGGQRLNIDALQCDVSVEEDDRQEWTFTLYDFDNCGKVTREDMSSLMHTIYEVVDASVNHSSGSSKTLRVKLTVSPEPSSKRKEGPPAGQDREPTRCRMEGELAEEPRVADRRLSAHVRRPSTDPQPCSERGPYCVDENTERRNHYLDLAGIENYTSRFGPGSPPVQAKQEPQGRASHLQARSRSQEPDTHAVHHRRSQVLVEHVVPASEPAARALDTQPRPKGPEKQFLKSPKGSGKPPGVPASSKSGKAFSYYLPAVLPPQAPQDGHHLPQPPPPPYGHKRYRQKGREGHSPLKAPHAQPATVEHEVVRDLPPTPAGEGYAVPVIQRHEHHHHHEHHHHHHHHHFHPS

SEQ ID NO: 227211 - DNA, 1356 bp, Artificial Sequence
  derived and/or modified sequence
atgggcaagctgcagagcaagcacgccgccgccgccagaaagagaagagagagccccgagggcgacagcttcgtggccagcgcctacgccagcggcagaaagggcgccgaggaggccgagagaagagccagagacaagcaggagctgcccaacggcgaccccaaggagggccccttcagagaggaccagtgccccctgcaggtggccctgcccgccgagaaggccgagggcagagagcaccccggccagctgctgagcgccgacgacggcgagagagccgccaacagagagggccccagaggccccggcggccagagactgaacatcgacgccctgcagtgcgacgtgagcgtggaggaggacgacagacaggagtggaccttcaccctgtacgacttcgacaactgcggcaaggtgaccagagaggacatgagcagcctgatgcacaccatctacgaggtggtggacgccagcgtgaaccacagcagcggcagcagcaagaccctgagagtgaagctgaccgtgagccccgagcccagcagcaagagaaaggagggcccccccgccggccaggacagagagcccaccagatgcagaatggagggcgagctggccgaggagcccagagtggccgacagaagactgagcgcccacgtgagaagacccagcaccgacccccagccctgcagcgagagaggcccctactgcgtggacgagaacaccgagagaagaaaccactacctggacctggccggcatcgagaactacaccagcagattcggccccggcagcccccccgtgcaggccaagcaggagccccagggcagagccagccacctgcaggccagaagcagaagccaggagcccgacacccacgccgtgcaccacagaagaagccaggtgctggtggagcacgtggtgcccgccagcgagcccgccgccagagccctggacacccagcccagacccaagggccccgagaagcagttcctgaagagccccaagggcagcggcaagccccccggcgtgcccgccagcagcaagagcggcaaggccttcagctactacctgcccgccgtgctgcccccccaggccccccaggacggccaccacctgccccagccccccccccccccctacggccacaagagatacagacagaagggcagagagggccacagccccctgaaggccccccacgcccagcccgccaccgtggagcacgaggtggtgagagacctgccccccacccccgccggcgagggctacgccgtgcccgtgatccagagacacgagcaccaccaccaccacgagcaccaccaccaccaccaccaccaccacttccaccccagctag

SEQ ID NO: 227212 - DNA, 1356 bp, Artificial Sequence
  derived and/or modified sequence
atgggtaagctgcagagtaagcatgcagcggctgcccgaaaacggcgggaaagccctgagggggattcatttgtggctagcgcgtacgcctcaggcagaaagggtgctgaggaggcagagagaagagcgcgcgacaaacaggagctccctaatggagatccgaaagaaggccctttccgcgaggatcagtgccctcttcaggtcgccctgccggccgaaaaagccgagggcagagagcatccagggcagctgctttctgctgacgatggtgagcgagcagctaatcgggaaggaccccgggggcccgggggtcagcggctcaatattgacgctttacaatgcgatgtgagcgttgaagaggacgatcgccaagagtggacgtttactctgtacgactttgacaactgcggaaaagttacccgcgaggacatgtcctcactgatgcatacaatttatgaagttgtggatgcgtcagtcaatcatagtagtggctcttcaaaaactctacgagtaaaactgacagtgagccctgagccttctagcaagcgcaaagagggaccgcctgcgggccaagaccgtgaaccgaccaggtgtagaatggagggggaactggccgaggaacctagggtggccgatcggcgcttgagtgcacatgtcagacgcccgagcacagacccccaaccttgttcggagcgcggaccgtactgcgtcgatgaaaacacagagcgacggaaccactacctcgacctcgcaggcattgaaaattatacttctaggttcggacccggatcaccgcctgttcaggctaagcaggagccccagggccgcgcgtcgcaccttcaggcccggtccagaagtcaggaacctgacactcacgccgttcatcaccgacgcagccaggttcttgttgagcacgtagttccagccagcgagccagctgcgagagcgctcgatacccaaccccggccgaaaggaccagagaagcagtttcttaaaagcccaaaaggcagcggtaaaccaccgggagtaccagcatcctcaaagtccggcaaggccttcagttattaccttcccgccgtgttacctccacaggcccctcaggatggacaccatttgccacagcctcccccccctccctatggccacaaacgttaccggcaaaagggccgggaaggccattcacccctgaaggccccccatgcccaacctgcaaccgttgagcatgaggtagtgcgagacctcccacccactcccgccggcgaaggatatgctgtgcccgtgatacagagacatgaacatcatcatcaccatgagcaccaccaccatcatcaccatcatcatttccacccctcctag

SEQ ID NO: 227213 - DNA, 1356 bp, Artificial Sequence
  derived and/or modified sequence
atgggcaagctgcagagcaagcatgctgctgctgccaggaagagaagagagagccctgagggggacagctttgtggccagcgcctatgccagcggcaggaaaggagctgaggaggccgagcggcgggcccgggacaagcaggagctgcccaatggagaccccaaggagggccccttccgggaggaccagtgccccctgcaggtggccctgcctgctgagaaggccgagggccgggagcaccctggccagctgctgtctgcagatgatggagagagagctgccaaccgggagggcccccggggccctgggggccagaggctgaacattgatgccctgcagtgtgatgtgtctgtggaggaggatgaccggcaggagtggaccttcaccctgtatgactttgacaactgtgggaaggtgacccgggaggacatgagcagcctgatgcacaccatctatgaggtggtggatgcctctgtgaaccacagcagcggcagcagcaagaccctgcgggtgaagctgactgtgtccccagagcccagcagcaagaggaaggagggccccccagctggccaggaccgggagcccacccgctgcaggatggagggggagctggccgaggagccccgggtggccgaccggcggctgagcgcccacgtgcggcggcccagcacagacccccagccctgcagcgagcggggcccctactgtgtggatgaaaatacagaaagaagaaaccactacctggacctggccggcatcgagaactacaccagccgcttcggccctggcagcccccctgtgcaggccaagcaggagccccagggccgggccagccacctgcaggcccggagccgcagccaggagccagacacccatgctgtgcaccacagaagaagccaggtgctggtggagcacgtggtgcctgccagcgagcctgctgcccgggccctggacacccagccccggcccaagggccctgagaagcagttcctgaagagccccaagggcagcggcaagcccccaggagtgcctgccagcagcaagagcggcaaggccttctcctactacctgcctgctgtgctgcccccccaggccccccaggacggccaccacctgccccagcccccacctccaccctacggccacaagcgctaccggcagaagggccgggagggccacagccccctgaaggccccccacgcccagcctgccaccgtggagcacgaggtggtgcgggacctgccccccaccccagctggggagggctatgctgtgcctgtgatccagagacatgagcaccaccaccaccacgagcaccaccaccaccaccaccaccaccacttccaccccagctag

SEQ ID NO: 227214 - DNA, 2155 bp, Artificial Sequence
  derived and/or modified sequence
gccgctgtccccgcgccctgcgcccggtggccccccacctccgccccgcggccgtacctggcgccccctggctcccccggcccccgcgcggcgtggagccatcttccctcacctcctaccggcaccctagcttgctcccggcccatgcggcccccgcgggctcccggccccggcttcagaactcagccctgcacctgagcgcggggcccggcggggcgtggcggcggcgatggggaaactgcagtcgaagcacgccgccgccgcccgcaagcggagagagagcccggaaggggacagcttcgtggcgtccgcgtacgcgagcggccgcaaaggcgcggaggaagcggagcggcgcgcgcgggacaagcaggagctgcccaatggggaccccaaggaggggcctttccgggaggaccagtgtcccctacaggtggcactccccgctgagaaagctgagggccgcgagcacccgggacaactcctcagcgcagatgacggagagagggcagcaaaccgcgagggcccgcgaggaccgggcgggcagcgcctcaacattgacgcactccagtgcgatgtctcggtggaggaggacgaccgccaggagtggacgttcacgctctatgactttgacaactgcgggaaggtcaccagggaggacatgtccagcctcatgcacaccatctatgaggtcgtggatgcctcggtcaaccactcctcgggcagcagcaagaccctccgtgtgaagctaaccgtcagccctgagccctccagcaagaggaaggagggtcctcctgctggccaggaccgggagcccacccgttgcaggatggagggtgaactggcagaggagccaagggtggctgacaggaggttgtctgcacacgtcaggaggcccagtactgacccccagccctgctcggagcgggggccctactgcgtggacgagaacacggagcgcagaaaccactacctggacctcgccgggattgagaactacacgtccagattcggccctgggtcccctcctgtgcaagcaaagcaggagccccagggcagggcctcgcacctccaggcccggtcccgctcccaggagccagatacacatgccgtacaccaccgcaggtcacaggtgctggtggaacacgtcgtgccagcctcggagcctgctgcccgggccctggacacgcagccccggccgaaggggccggagaagcagttcctcaagtcccccaagggctccgggaagccgcctggggtgccagccagcagcaagtccgggaaagccttcagctactacctgccggccgtcctgccgccccaggcccctcaggacggccaccacctcccgcagcccccaccgccaccctacggccacaagcggtaccgccaaaagggcagggagggccactcgccactcaaggccccacacgctcagcctgccacagtggagcacgaggtggtgcgggacctgccgcccacgccagcaggagagggctacgcggtgccagtgatccagcggcacgagcaccaccaccaccacgagcaccaccaccaccaccaccaccaccacttccacccgtcctagcgccactgccaagcacacctcgctcccagcacaccacagcccgcgacctcagggcagggagcagagcagctgccggctgtgtgcccatggggagcccagcccccaccccccacctccgacagcaaacagcaactgactgcaggtgctggcatgatggaggtggtgcaccttggacacgtggacaaggcccaggcgccctctgctcttctgccctcgatgccacatggcggtgaacacatctgaagccactatgtttcctggctctaaggctcgtctgtgtaacccataaaacctgctttgattccaaaatgaggccctggagtgcgcaaggagtgcccggatgcttggggtgggtgttcctcccggggcttcaaggggtgactgctgtaggctgtcccagtgcgaggccgggagcgaatggaaaagctgaggctttgcctggcttgtgcatcatgaagtgagaggggacagggccggtggggggaagcagcttgtgcttagcagggagcatccgcggctccccgcaggaggccaagcagcagaaggcagcagtgctagaaagagaagtgc

SEQ ID NO: 227215 - DNA, 507 bp, Artificial Sequence
  derived and/or modified sequence
atggccggcagtgtggacaacaggcagtgtggacggcagggcaggcagtgtggacaacagacagtgtcgacagcaggcagtgtggatggcaggcaggcagtgtggatggcgggcagtgtggatgcctgccacagtggagcacgaggtggtgcgggacctgccgcccacgccagcaggagagggctacgcggtgccagtgatccagcggcacgagcaccaccaccaccacgagcaccaccaccaccaccaccaccaccacttccacccgtcctagcgccactgccaagcacacctcgctcccagcacaccacagcccgcgacctcagggcagggagcagagcagctgccggctgtgtgcccatggggagcccagcccccaccccccacctccgacagcaaacagcaactgactgcaggtgctggcatgatggaggtggtgcaccttggacacgtggacaaggcccaggcgccctctgctcttctgccctcgatgccacatggcggtga

SEQ ID NO: 227216 - DNA, 1356 bp, Artificial Sequence
  derived and/or modified sequence
atgggcaagctgcagagcaagcacgccgccgccgcccggaagcggcgcgaatctccagaaggcgactcatttgtagcctctgcctatgccagtggcaggaaaggcgccgaggaggctgagcgccgagcccgcgacaagcaagagctgccgaatggagatcctaaagaaggaccttttcgtgaggaccagtgccctctacaagttgccctccccgctgagaaggccgagggtagggagcaccctgggcaacttctatctgccgatgacggcgaacgggccgccaatcgagagggcccaagaggcccgggtggccagagacttaatattgatgcactccagtgcgacgtctctgtggaggaagatgatcgtcaggagtggacattcaccctgtatgatttcgacaactgcggcaaggtcactagagaggacatgagcagtctcatgcacaccatttacgaagtggtggacgcaagcgtaaaccacagctctggctcctctaagaccctccgagtcaagctgactgtcagccctgagccctcgagtaagcggaaagagggtcctcctgccgggcaagatcgggaacccacccgctgcagaatggaaggagaattggcggaagaaccccgagtcgctgatcgccgcctgtctgcacatgtgcgccgaccctccacagatccccaaccatgcagtgagcgcgggccttactgtgtggatgaaaatacagagcgccgcaaccactatctcgatctggccggcatcgagaactacacgagcagatttggtcccggctcaccgcctgtccaggcaaaacaggagccgcaggggcgagcatcacacttgcaggctagatctaggtctcaggagcctgatactcacgccgtgcatcaccgtagatcccaggtgttggtcgaacatgtggtccccgcctccgaacccgccgccagggctctggatacacagccacggcccaaaggtcctgagaaacaatttctgaaatcacccaagggcagtggcaagccccctggagtgcctgcatcatcaaagagtgggaaagctttctcctactacctccctgcagtgcttcctccccaggcaccccaggatggccaccatctcccccaaccccccccacctccctacgggcataagcgctatcgccagaaagggcgtgaagggcattcaccgttaaaagcgccccacgcccagccggctactgtcgagcacgaagtggtacgggacctcccccccactcccgcgggtgagggttacgccgtaccagtgatacagagacatgagcaccaccaccatcacgagcaccaccatcaccatcatcatcatcattttcatcccagttag

SEQ ID NO: 227217 - DNA, 1356 bp, Artificial Sequence
  derived and/or modified sequence
atgggaaagctacagtcaaagcatgccgctgctgctcggaagcggcgtgagtcccccgagggggactcatttgtggcctctgcttatgcctccggacggaaaggggctgaagaggctgagcgcagggcacgcgacaagcaggagttgcctaatggagatcccaaggaggggccatttcgggaggatcagtgcccactccaggtggcattacctgcggaaaaagcagagggccgtgagcaccctggacagctactgtcagcagacgatggcgaaagagctgcaaaccgagaaggcccacggggaccaggaggtcagaggctgaatatcgatgccctgcaatgcgacgtttccgtcgaagaagatgatagacaggagtggacttttacactgtatgacttcgataactgcgggaaagtgaccagggaagacatgtcctccctgatgcacacgatttacgaagtagtggacgcgagtgtgaaccacagctcgggttccagtaagacgctccgggtaaagctcactgtgagccctgagccctcttctaaacgcaaggaggggcctcctgcgggacaggaccgagagcccacaaggtgtagaatggagggagagctagccgaggaacccagggtagcagaccgcaggttgtccgcccatgtacgcagaccatccactgatcctcagccatgttcagaacgagggccttattgcgtggacgagaacactgagagacgaaaccactatcttgacttagctggaatcgaaaattacacaagcagatttggcccaggatctccacccgtccaggcgaagcaggagccccaggggagagcatcccatcttcaggcccgatccaggagccaagaacccgacacacatgccgtgcatcataggcgaagtcaggtacttgtcgaacatgttgtgccagcatctgagccggctgcgagggccttggatacacaaccacgtccgaaaggccctgagaagcagttcctgaaatctcctaagggatcaggaaagccacctggcgtgcctgccagctccaagagtggaaaagcattcagctactatttgcccgcagtgctgccacctcaggcccctcaggatgggcaccatctgccccagccaccccctcctccttacggacacaaacggtataggcagaaaggtagggaagggcattctccgctgaaagcccctcatgcccagccagccaccgtagaacatgaggtggtgagggacctgccacccacgcctgctggcgaaggctacgccgtccccgtgattcagcgccatgagcaccatcatcatcatgagcatcaccaccaccaccatcatcatcacttccaccccagctag

SEQ ID NO: 227218 - protein, 395 aa, Artificial Sequence
  derived and/or modified sequence
MAEDGLPKIYSHPPTESSKTPTAATIFFGADNAIPKSETTITSEGDHVTSVNEYMLESDFSTTTDNKLTAKKEKLKSEDDMGTDFIKSTTHLQKEITSLTGTTNSITRDSITEHFMPVKIGNISSPVTTVSLIDFSTDIAKEDILLATIDTGDAEISITSEVSGTLKDSSAGVADAPAFPRKKDEADMSNYNSSIKSNVPADEAVQVTDSTIPEAEIPPAPEESFTTIPDITALEEEKITEIDLSVLEDDTSAVATLTDSDEKFITVFELTTSAEKDKDKREDTLLTDEETTEGASIWMERDTANEAETHSVLLTAVESRYDFVVPASIATNLVEESSTEEDLSETDNTETVPKITEPFSGTTSVLDTPDYKEDTSTTETDIFELLKEEPDEFMI

SEQ ID NO: 227219 - DNA, 1188 bp, Artificial Sequence
  derived and/or modified sequence
atggctgaagatggactgcctaagatttatagccatcctccaacggaaagctctaagacccccaccgctgctactatcttttttggagcagacaacgccatccccaagtccgagacaacgattacttctgagggcgaccacgtgacatcagtgaatgagtatatgctggagtccgatttttccactacgacagacaataagctcacggcaaagaaggagaagttgaagtcggaggatgacatgggaacggattttatcaaatctactactcacctgcagaaggagatcacatccttgaccggaaccaccaattcaataacacgagattccataaccgaacacttcatgcctgtgaaaattgggaacatctcatctccggttacaactgtttcactgatagattttagcacggacatcgcaaaagaagatatcttactggcaacgattgacaccggcgatgctgaaatttcgattacttccgaagtcagtggaaccctcaaagattccagcgccggcgtggccgatgcacccgcatttcctaggaagaaggacgaagccgatatgtccaactataacagctcgatcaagtccaatgtgccagccgatgaagctgtacaagtaaccgatagtactatacccgaagcagagatccctccagcacctgaggagtcctttactacaataccagatatcaccgccctggaagaggagaaaatcaccgagatcgacctgagcgtgctcgaagatgacacaagcgctgtggctacgctgaccgacagtgacgagaaattcatcacggtatttgaactcacaaccagcgcggaaaaagataaggacaagcgggaagatacactacttactgatgaagaaactacggagggggcatccatttggatggagcgagatactgctaacgaggcagagacccattccgttctgttgaccgccgttgagagccgctatgacttcgtggtgcccgcaagcattgccacaaacttagtcgaggagtcttccaccgaagaagacctgtctgagacagacaacaccgagaccgtgcctaaaatcacagagcccttttccggcacaacgtccgttctggatacaccagattataaggaggatacaagcacaaccgagacagatattttcgaacttctcaaggaagaacctgacgagttcatgatttag

SEQ ID NO: 227220 - DNA, 1188 bp, Artificial Sequence
  derived and/or modified sequence
atggctgaagatggcctgcccaagatctacagccaccccccaacagagagcagcaagacccccacagctgccaccatcttcttcggggctgacaatgccatccccaagtctgagaccaccatcaccagcgagggggaccacgtgacctctgtgaatgagtacatgctggagagtgacttcagcaccaccacagacaacaagctgacagccaagaaggagaagctgaagtcagaagatgacatgggcacagacttcatcaagagcaccacccacctgcagaaggagatcaccagcctgaccggcaccaccaacagcatcacccgggacagcatcacagagcacttcatgcctgtgaagattggcaacatcagcagccctgtgaccaccgtgtccctgattgacttcagcacagacatcgccaaggaggacatcctgctggccaccatcgacacaggagatgctgagatcagcatcaccagcgaggtgtctggcaccctgaaggacagcagcgctggggtggctgatgccccagccttccccaggaagaaggatgaggccgacatgagcaactacaacagcagcatcaagagcaatgtgcctgcagatgaggccgtgcaggtgacagacagcaccatccctgaggccgagatccccccagcccctgaggagagcttcaccaccatcccagacatcacagccctggaggaggagaagatcacagaaattgacctgtctgtgctggaggatgacaccagcgctgtggccaccctgacagacagtgatgagaagttcatcaccgtgtttgagctgaccaccagcgctgagaaggacaaggacaagcgggaggacaccctgctgacagatgaggagaccacagagggcgccagcatctggatggagcgggacacagccaatgaagctgagacccacagcgtgctgctgacagctgtggagagccgctatgactttgtggtgcctgccagcatcgccaccaacctggtggaggagagcagcacagaggaggacctgtctgaaacagacaacacagaaacagtgcccaagatcacagagcccttcagcggcaccacctctgtgctggacaccccagactacaaggaggacaccagcaccacagaaacagacatctttgagctgctgaaggaggagccagatgagttcatgatctag

SEQ ID NO: 227221 - DNA, 1188 bp, Artificial Sequence
  derived and/or modified sequence
atggccgaggacggcctgcccaagatctacagccacccccccaccgaatctagcaaaacacctaccgctgctaccatttttttcggcgccgataatgccatccctaaatctgagactaccatcactagcgagggcgaccacgtgacgtctgtcaacgagtacatgttagaatctgattttagcacaacaacagataataaactaacggccaaaaaggaaaagcttaagtccgaggatgacatggggaccgacttcatcaaaagcaccactcatctccagaaagaaatcacctctctgaccgggaccacaaactccatcacaagggattctataacggagcacttcatgcccgtgaagatcgggaacatttctagtcctgtcaccactgtgtctctgatcgacttttccacagatatcgccaaggaagatatcctcttagccaccattgacactggtgacgccgagataagcatcacgagtgaggtgtcaggcactctgaaagatagctcagctggggtcgccgatgcccctgctttccccagaaaaaaggacgaggctgacatgagcaactataattcttcaatcaaaagtaatgtcccagctgatgaagccgtccaagtgaccgattcaacgattcccgaggccgagatcccgcctgcgccagaggagagttttaccactatcccagacattactgcattagaggaagaaaagatcactgagatagatttgtctgtgctggaggatgacacaagtgcagtggcaactttgacagatagtgacgagaagtttattaccgtgttcgagctcacaacatccgctgaaaaagacaaagacaagagggaggacacactgctgactgatgaagaaactactgagggcgcctcaatctggatggaaagagatacagccaatgaagccgagactcactctgtcctgctcaccgctgtggagtctagatacgatttcgttgttccagctagcatcgccaccaacttagtcgaagagagttctacggaggaggacctgtcagagaccgacaatacggagaccgtgcctaaaataaccgaacccttttctggaacgactagcgtgctggatactccagattataaagaagatacctccactacagagaccgatatattcgagctcctcaaagaggagccagatgaattcatgatttag

SEQ ID NO: 227222 - DNA, 1188 bp, Artificial Sequence
  derived and/or modified sequence
atggccgaggatggcctgccaaaaatctacagccaccctcccacggagtccagcaaaacccccactgctgctactattttctttggagccgacaatgcaatccctaaaagtgaaactacaattacttctgaaggtgatcacgtgacaagcgttaatgaatacatgttggaatctgatttctcgaccaccaccgataacaagttgactgcaaagaaggagaaattaaaatcggaagatgacatggggaccgacttcattaaatcgaccactcacctgcagaaggagataacttccctgactgggaccacgaacagtataacacgtgattcaattactgagcactttatgcctgtgaagataggtaatataagctctccagtcaccacagtgtccctaatcgatttcagcaccgatatcgccaaggaggatattttgctggctacaatcgatacgggcgatgcggaaatttctattacctccgaggtgtcaggcacacttaaggactcaagcgccggtgtggccgacgctccagccttcccccgtaagaaggacgaggcagacatgagtaactacaattcttctatcaagtcgaatgtgccagctgacgaagctgtgcaagtgaccgattccactatccccgaggcagaaatccccccagcacctgaagaatccttcaccacgatccccgatatcacggcactggaggaggaaaagatcaccgaaatagatctgagcgtgttggaagatgacactagcgctgtggccaccttgactgactcagacgaaaaattcatcaccgttttcgaactgacaacctctgcggagaaggacaaggacaagagggaggatactttgttgaccgatgaggagacaaccgaaggcgcttccatctggatggagagagacactgctaatgaagcggagacacacagcgtgctgctgaccgcggtagaatctcggtacgacttcgtggttcccgctagcattgctaccaacttggtggaagagagctctactgaagaagacctctctgaaactgataatacagagaccgtgcccaagattaccgaacccttttcggggacgacatctgtgttagacaccccggattacaaagaggatacctctacgactgagaccgacatttttgagttgctgaaggaggagcctgatgagttcatgatctag

SEQ ID NO: 227223 - DNA, 1517 bp, Artificial Sequence
  derived and/or modified sequence
agagataccactgagtccagaagcaagacctgtgagagtgcacagtgccacttcgccccatggctgaagatggtttgcccaaaatttattctcatcctccaacagaaagcagtaaaacaccaactgcagcaaccattttctttggggctgacaatgctattcccaaatcagaaacaactattacttcagaaggagaccacgtcacttcagtaaatgaatatatgctagaaagcgatttttcaacaactacagacaacaaactgacagctaaaaaggaaaaactcaaatcagaagatgatatggggaccgactttattaagtcaacaactcacctacagaaagaaattacctctctgactggcactacaaactccataacaagagactctattaccgaacatttcatgccagtgaaaattgggaatatttcatcaccagttactactgtttctttaatagatttttccactgacatagcaaaagaagatatcctcttagctaccattgacacaggagatgcagagatctcaataacctctgaagtctctggcacactaaaggacagcagtgctggtgttgctgacgctcctgcctttccacgtaaaaaggatgaagctgatatgagcaattataattcctccatcaaatccaatgtccctgctgatgaggctgtccaggtcactgattccactattcctgaggctgaaatccctcctgctcctgaagaaagcttcactactattccagacataactgcccttgaagaagagaaaataaccgaaattgacctaagtgttttagaagatgacaccagtgctgtggctacattaactgactctgatgagaagtttatcactgtgtttgaactcactacctctgctgaaaaagacaaagataaacgggaagatactctgctaactgatgaagaaactaccgagggagccagtatttggatggagagagatactgcaaatgaagcagagacccattctgttttgcttactgctgttgaatccagatatgacttcgttgtccctgcatcaatagctacaaacctagtggaagaatcatctacagaagaagatttgtctgaaactgataatacagagactgtacctaagatcactgagccattttctggaactacctctgtattagataccccagactataaggaagacacctccacaactgaaacggatatctttgaactactgaaagaagaacccgatgagttcatgatttaaaagcaacaaaagggataccatgtagaattgtgcaatagtctagccagctagccttaacatctaagaaatttttccaacaagcaaaaacctttagaaatgaaagaatgtgggcatttaaggtcttaaacactgaatatcacactcttcttatgactcttgttagcgattcaaggacataaatcttcattcttttctggcacagactacttaaatgggtctgttttcactttgctcatttttcttcaataaatctttttggcaagcaactga

SEQ ID NO: 227224 - DNA, 1188 bp, Artificial Sequence
  derived and/or modified sequence
atggccgaggacggcctgcccaagatctacagccacccccccaccgagagcagcaagacccccaccgccgccaccatcttcttcggcgccgacaacgccatccccaagagcgagaccaccatcaccagcgagggcgaccacgtgaccagcgtgaacgagtacatgctggagagcgacttcagcaccaccaccgacaacaagctgaccgccaagaaggagaagctgaagagcgaggacgacatgggcaccgacttcatcaagagcaccacccacctgcagaaggagatcaccagcctgaccggcaccaccaacagcatcaccagagacagcatcaccgagcacttcatgcccgtgaagatcggcaacatcagcagccccgtgaccaccgtgagcctgatcgacttcagcaccgacatcgccaaggaggacatcctgctggccaccatcgacaccggcgacgccgagatcagcatcaccagcgaggtgagcggcaccctgaaggacagcagcgccggcgtggccgacgcccccgccttccccagaaagaaggacgaggccgacatgagcaactacaacagcagcatcaagagcaacgtgcccgccgacgaggccgtgcaggtgaccgacagcaccatccccgaggccgagatcccccccgcccccgaggagagcttcaccaccatccccgacatcaccgccctggaggaggagaagatcaccgagatcgacctgagcgtgctggaggacgacaccagcgccgtggccaccctgaccgacagcgacgagaagttcatcaccgtgttcgagctgaccaccagcgccgagaaggacaaggacaagagagaggacaccctgctgaccgacgaggagaccaccgagggcgccagcatctggatggagagagacaccgccaacgaggccgagacccacagcgtgctgctgaccgccgtggagagcagatacgacttcgtggtgcccgccagcatcgccaccaacctggtggaggagagcagcaccgaggaggacctgagcgagaccgacaacaccgagaccgtgcccaagatcaccgagcccttcagcggcaccaccagcgtgctggacacccccgactacaaggaggacaccagcaccaccgagaccgacatcttcgagctgctgaaggaggagcccgacgagttcatgatctag

SEQ ID NO: 227225 - protein, 608 aa, Artificial Sequence
  derived and/or modified sequence
MEMRWFLSKIQDDFRGGKINLEKTQRLLEKLDIRCSYIHVKQIFKDNDRLKQGRITIEEFRAIYRIITHREEIIEIFNTYSENRKILLASNLAQFLTQEQYAAEMSKAIAFEIIQKYEPIEEVRKAHQMSLEGFTRYMDSRECLLFKNECRKVYQDMTHPLNDYFISSSHNTYLVSDQLLGPSDLWGYVSALVKGCRCLEIDCWDGAQNEPVVYHGYTLTSKLLFKTVIQAIHKYAFMTSDYPVVLSLENHCSTAQQEVMADNLQATFGESLLSDMLDDFPDTLPSPEALKFKILVKNKKIGTLKETHERKGSDKRGDNQDKETGVKKLPGVMLFKKKKTRKLKIALALSDLVIYTKAEKFKSFQHSRLYQQFNENNSIGETQARKLSKLRVHEFIFHTRKFITRIYPKATRADSSNFNPQEFWNIGCQMVALNFQTPGLPMDLQNGKFLDNGGSGYILKPHFLRESKSYFNPSNIKEGMPITLTIRLISGIQLPLTHSSSNKGDSLVIIEVFGVPNDQMKQQTRVIKKNAFSPRWNETFTFIIHVPELALIRFVVEGQGLIAGNEFLGQYTLPLLCMNKGYRRIPLFSRMGESLEPASLFVYVWYVR

SEQ ID NO: 227226 - protein, 606 aa, Artificial Sequence
  derived and/or modified sequence
MRWFLSKIQDDFRGGKINLEKTQRLLEKLDIRCSYIHVKQIFKDNDRLKQGRITIEEFRAIYRIITHREEIIEIFNTYSENRKILLASNLAQFLTQEQYAAEMSKAIAFEIIQKYEPIEEVRKAHQMSLEGFTRYMDSRECLLFKNECRKVYQDMTHPLNDYFISSSHNTYLVSDQLLGPSDLWGYVSALVKGCRCLEIDCWDGAQNEPVVYHGYTLTSKLLFKTVIQAIHKYAFMTSDYPVVLSLENHCSTAQQEVMADNLQATFGESLLSDMLDDFPDTLPSPEALKFKILVKNKKIGTLKETHERKGSDKRGDNQDKETGVKKLPGVMLFKKKKTRKLKIALALSDLVIYTKAEKFKSFQHSRLYQQFNENNSIGETQARKLSKLRVHEFIFHTRKFITRIYPKATRADSSNFNPQEFWNIGCQMVALNFQTPGLPMDLQNGKFLDNGGSGYILKPHFLRESKSYFNPSNIKEGMPITLTIRLISGIQLPLTHSSSNKGDSLVIIEVFGVPNDQMKQQTRVIKKNAFSPRWNETFTFIIHVPELALIRFVVEGQGLIAGNEFLGQYTLPLLCMNKGYRRIPLFSRMGESLEPASLFVYVWYVR

SEQ ID NO: 227227 - protein, 403 aa, Artificial Sequence
  derived and/or modified sequence
MDSRECLLFKNECRKVYQDMTHPLNDYFISSSHNTYLVSDQLLGPSDLWGYVSALVKGCRCLEIDCWDGAQNEPVVYHGYTLTSKLLFKTVIQAIHKYAFMTSDYPVVLSLENHCSTAQQEVMADNLQATFGESLLSDMLDDFPDTLPSPEALKFKILVKNKKIGTLKETHERKGSDKRGDNQDKETGVKKLPGVMLFKKKKTRKLKIALALSDLVIYTKAEKFKSFQHSRLYQQFNENNSIGETQARKLSKLRVHEFIFHTRKFITRIYPKATRADSSNFNPQEFWNIGCQMVALNFQTPGLPMDLQNGKFLDNGGSGYILKPHFLRESKSYFNPSNIKEGMPITLTIRLISGIQLPLTHSSSNKGDSLVIIEVFGVPNDQMKQQTRVIKKNGQGNMVIIPA

SEQ ID NO: 227228 - DNA, 1827 bp, Artificial Sequence
  derived and/or modified sequence
atggaaatgaggtggttcctgagcaagattcaggatgacttcaggggcggaaaaattaatctggaaaaaacgcagagacttctagaaaagcttgatattagatgtagctacatccacgtgaaacagatttttaaggacaatgacagactgaagcagggtagaatcaccattgaggagtttcgggctatttacaggattataacccaccgggaggagatcatagagatctttaacacatatagcgaaaataggaaaatcctgctggcgtccaacctcgcccagtttttgacgcaggaacagtacgccgccgaaatgtcaaaagccatagcatttgaaataatacagaagtacgagcctattgaggaggtccgcaaggctcaccagatgtcactggaggggttcacacgatatatggacagccgcgagtgcctgctctttaagaacgagtgccggaaagtgtatcaggatatgacgcatccactgaacgattactttattagcagctctcacaacacttatctggtgtcggaccagctcttaggtcctagcgatctgtgggggtatgtcagtgcgttggtcaaggggtgcaggtgtctggaaatagactgttgggacggagcccaaaatgagcccgttgtctatcatggatatacgctgacatcaaaactgcttttcaaaaccgtgatccaggcgatccataagtatgcatttatgacttccgattaccccgttgtgttgagcctggagaaccactgttccaccgcccaacaagaggtaatggccgataacctgcaagctacattcggagagagccttctgtctgatatgctggatgattttcctgatacacttccaagcccagaggcattaaaattcaagatcctggtaaagaacaagaagatcgggacattaaaagagacccatgaacggaagggatccgacaaacggggcgataaccaggataaggaaaccggcgtgaaaaaactgcccggcgtaatgctttttaagaagaagaagactaggaagctgaaaatcgccttggccctctctgaccttgtgatctataccaaggccgagaaattcaagagttttcagcattctcggctctaccaacagttcaacgaaaacaattctattggtgagacccaggccagaaagttgtctaagctgcgggtgcatgagtttatttttcataccagaaagttcatcactcgcatttacccaaaggcgactagggccgatagctctaattttaacccacaggagttttggaatattggatgccagatggttgctttgaacttccagactcccggactgccaatggatctacagaatgggaagtttttagataacgggggttctgggtatattctgaagccacattttctccgcgagtctaaatcgtactttaaccctagtaacattaaggaaggtatgcctataaccctcacgattaggctgatatctgggatccaattacctcttacacattcttcgtccaacaagggtgactctctggtgatcatcgaagttttcggcgtgcctaatgaccaaatgaagcagcagactcgggtcatcaagaagaacgcgtttagcccaaggtggaatgaaacttttacttttatcattcatgtgccggagctggccctgattcgcttcgtggtggaaggacaggggttgattgccggtaatgagtttctgggccagtacacccttccacttctgtgcatgaataaaggatatcgacgaatcccccttttctcaaggatgggagagtccctggagcccgcctctctattcgtatacgtgtggtacgtgcgatag

SEQ ID NO: 227229 - DNA, 1821 bp, Artificial Sequence
  derived and/or modified sequence
atgaggtggttccttagcaagatacaggatgattttcggggcgggaaaatcaacctggagaaaacccaacgcctcctggaaaagcttgatatcagatgcagctacattcacgtgaaacagatattcaaggacaacgataggctcaaacaaggaaggataaccattgaggaattcagagcaatttaccgaatcatcacacatcgggaggagattatagaaatatttaacacctatagcgagaacagaaagatacttcttgcgagcaatcttgcccagttcctgacccaggaacagtacgccgcagagatgtccaaagctattgcattcgagatcatccaaaagtacgaacccatcgaggaggtgaggaaagcacatcagatgtccctagagggctttacccggtatatggactccagagaatgtcttctgttcaaaaacgaatgcaggaaagtttatcaggacatgacccacccacttaatgactactttatttcatcgtcccacaacacctatcttgtttctgatcagctcctgggcccgtccgatttatggggctacgtgagcgcactggtgaaaggatgtcgatgtttggagatcgattgttgggatggagcccagaatgaaccagtcgtgtatcacggctacactcttacttctaaactgttgttcaagaccgtgattcaggccattcataaatatgccttcatgacctcagattaccctgtggtgctgtcattagaaaaccactgctcgactgcacagcaggaagtgatggccgacaacctgcaggcgacatttggagagtccctgcttagcgacatgctggacgacttcccagatactctgccctcccctgaggcactcaaattcaagatccttgtgaaaaataagaaaataggcacgcttaaagagactcacgagcggaaaggatccgacaagcgtggggataatcaagacaaagaaacaggtgtgaagaagttacccggtgtgatgctgtttaagaaaaaaaagacccgcaagctgaaaattgccttagccctctctgacttagtcatttacaccaaggccgaaaaatttaaaagcttccagcattctcgattgtaccagcaattcaatgaaaataacagcattggcgagactcaagcccggaaactgtccaagctcagagtgcacgaattcatctttcacactaggaagttcatcacaagaatttatcctaaggctacacgcgccgacagttccaacttcaacccccaggaattttggaatataggttgccagatggttgctctgaacttccagacccccgggttgccaatggatctccagaatggcaaattcctggataatggtggatccgggtacattttaaagccacactttttaagggagagcaaatcatactttaatcccagtaacataaaagagggaatgccgatcaccctgacgattcgcctgatctcaggaatacaattacctctcacacacagtagtagtaacaagggagactccctggtgatcatcgaggttttcggggtccctaatgaccagatgaaacaacagacacgcgtcatcaagaaaaacgcatttagccctagatggaacgagactttcacctttattatccacgtgccagaattagccttgatcagatttgtggtggaggggcaaggactgatcgctgggaacgaatttctgggtcagtatacactccccctgctgtgcatgaataagggctaccggcgtattcctttgttctcccgcatgggggagagcctggaaccggcctctctattcgtgtacgtttggtacgtccggtag

SEQ ID NO: 227230 - DNA, 1212 bp, Artificial Sequence
  derived and/or modified sequence
atggacagcagggaatgtctgttgtttaagaacgaatgcagaaaggtctatcaggacatgactcatccactgaacgactactttatcagcagtagtcacaacacatatctggtttccgaccaactgctgggcccctctgacctctgggggtacgtgagcgcacttgtcaaaggatgccgctgccttgagattgactgctgggatggggcacagaacgagccagtagtgtatcacggttacacgctaacctctaaattgctctttaaaaccgtgatccaggcgatccataagtatgcctttatgacaagcgactaccccgtcgtgttatctctggagaatcactgctccactgcgcagcaagaagtcatggccgacaatttgcaggccacgttcggcgagagtctgttgtccgatatgttggatgattttcctgacaccctgccaagccctgaggcccttaagttcaagatccttgtgaagaacaaaaagattggcaccctgaaagagacacacgagcggaagggatccgacaaaaggggcgataatcaagataaagagaccggtgttaagaagttacctggagtgatgttgttcaaaaagaagaagacgcgcaagctgaagattgcacttgcgctttcagacttggtgatctacacgaaggccgagaagttcaaaagttttcagcacagcaggctctatcagcagtttaatgagaataattccataggggagactcaggcccggaagttgagtaagctacgggttcatgagttcatctttcatactagaaaatttatcacacggatataccccaaggccacgcgggccgactctagcaatttcaatcctcaggagttctggaacatcggatgccagatggtggccttgaatttccagactccgggactgcccatggatttgcagaatggaaagtttctggacaacggtggctcaggatacattctcaagcctcatttcctccgggagagtaagtcatactttaacccatccaacattaaggaaggcatgcctatcacactcacaatcagactaatctctggaatccagctgccactcacacattcctccagcaacaagggtgattccttggtcatcatcgaggtgttcggcgtccccaatgaccagatgaaacagcagacgagagttatcaagaagaacggccagggaaacatggtgattatacccgcctag

SEQ ID NO: 227231 - DNA, 1827 bp, Artificial Sequence
  derived and/or modified sequence
atggagatgcgctggttcctgagcaagatccaggatgacttccggggcggcaagatcaacctggagaagacccagaggctgctggagaagctggacatccgctgcagctacatccacgtgaagcagatcttcaaggacaatgaccggctgaagcagggccgcatcaccatcgaggagttccgggccatctaccgcatcatcacccaccgggaggagatcatcgagatcttcaacacctacagcgagaacaggaagatcctgctggccagcaacctggcccagttcctgacccaggagcagtatgctgctgagatgagcaaggccatcgcctttgagatcatccagaagtatgagcccatcgaggaggtgaggaaggcccaccagatgagcctggagggcttcacccgctacatggacagccgggagtgcctgctcttcaagaatgaatgtaggaaggtgtaccaggacatgacccaccccctgaatgactacttcatcagcagcagccacaacacctacctggtgtctgaccagctgctgggccccagcgacctgtggggctacgtgtctgccctggtgaagggctgccgctgcctggagattgactgctgggatggagcccagaatgaacctgtggtgtaccacggctacaccctgaccagcaagctgctcttcaagacagtcatccaggccatccacaagtatgccttcatgaccagtgactaccctgtggtgctgagcctggagaaccactgcagcacagcccagcaggaggtgatggctgacaacctgcaggccaccttcggggagagcctgctgagtgacatgctggatgacttcccagacaccctgcccagccctgaggccctgaagttcaagatcctggtgaagaacaagaagattggcaccctgaaggagacccatgagaggaaaggaagtgacaagagaggagacaaccaggacaaggagaccggggtgaagaagctgcccggggtgatgctgttcaagaagaagaagaccaggaagctgaagatcgccctggccctgagtgacctggtgatctacaccaaggccgagaagttcaagagcttccagcacagccggctgtaccagcagttcaatgaaaacaacagcattggagagacccaggccaggaagctgagcaagctgcgggtgcatgagttcatcttccacaccaggaagttcatcacccgcatctaccccaaggccaccagggctgacagcagcaacttcaacccccaggagttctggaacatcggctgccagatggtggccctgaacttccagaccccaggcctgcccatggacctgcagaatggcaagttcctggacaatggaggcagcggctacatcctgaagccccacttcctgcgggagagcaagagctacttcaaccccagcaacatcaaggagggcatgcccatcaccctgaccatccgcctcatcagcggcatccagctgcccctgacccacagcagcagcaacaagggggacagcctggtgatcatcgaggtgtttggagtgcccaatgaccagatgaagcagcagaccagggtcatcaagaagaatgccttcagcccccgctggaatgagaccttcaccttcatcatccacgtgcctgagctggccctgatccgctttgtggtggagggccagggcctgattgctggaaatgagttcctgggccagtacaccctgcccctgctgtgcatgaacaagggctaccgccgcatccccctcttcagcaggatgggagagagcctggagcccgccagcctgtttgtgtatgtgtggtacgtgaggtag

SEQ ID NO: 227232 - DNA, 1821 bp, Artificial Sequence
  derived and/or modified sequence
atgcgctggttcctgagcaagatccaggatgacttccggggcggcaagatcaacctggagaagacccagaggctgctggagaagctggacatccgctgcagctacatccacgtgaagcagatcttcaaggacaatgaccggctgaagcagggccgcatcaccatcgaggagttccgggccatctaccgcatcatcacccaccgggaggagatcatcgagatcttcaacacctacagcgagaacaggaagatcctgctggccagcaacctggcccagttcctgacccaggagcagtatgctgctgagatgagcaaggccatcgcctttgagatcatccagaagtatgagcccatcgaggaggtgaggaaggcccaccagatgagcctggagggcttcacccgctacatggacagccgggagtgcctgctcttcaagaatgaatgtaggaaggtgtaccaggacatgacccaccccctgaatgactacttcatcagcagcagccacaacacctacctggtgtctgaccagctgctgggccccagcgacctgtggggctacgtgtctgccctggtgaagggctgccgctgcctggagattgactgctgggatggagcccagaatgaacctgtggtgtaccacggctacaccctgaccagcaagctgctcttcaagacagtcatccaggccatccacaagtatgccttcatgaccagtgactaccctgtggtgctgagcctggagaaccactgcagcacagcccagcaggaggtgatggctgacaacctgcaggccaccttcggggagagcctgctgagtgacatgctggatgacttcccagacaccctgcccagccctgaggccctgaagttcaagatcctggtgaagaacaagaagattggcaccctgaaggagacccatgagaggaaaggaagtgacaagagaggagacaaccaggacaaggagaccggggtgaagaagctgcccggggtgatgctgttcaagaagaagaagaccaggaagctgaagatcgccctggccctgagtgacctggtgatctacaccaaggccgagaagttcaagagcttccagcacagccggctgtaccagcagttcaatgaaaacaacagcattggagagacccaggccaggaagctgagcaagctgcgggtgcatgagttcatcttccacaccaggaagttcatcacccgcatctaccccaaggccaccagggctgacagcagcaacttcaacccccaggagttctggaacatcggctgccagatggtggccctgaacttccagaccccaggcctgcccatggacctgcagaatggcaagttcctggacaatggaggcagcggctacatcctgaagccccacttcctgcgggagagcaagagctacttcaaccccagcaacatcaaggagggcatgcccatcaccctgaccatccgcctcatcagcggcatccagctgcccctgacccacagcagcagcaacaagggggacagcctggtgatcatcgaggtgtttggagtgcccaatgaccagatgaagcagcagaccagggtcatcaagaagaatgccttcagcccccgctggaatgagaccttcaccttcatcatccacgtgcctgagctggccctgatccgctttgtggtggagggccagggcctgattgctggaaatgagttcctgggccagtacaccctgcccctgctgtgcatgaacaagggctaccgccgcatccccctcttcagcaggatgggagagagcctggagcccgccagcctgtttgtgtatgtgtggtacgtgaggtag

SEQ ID NO: 227233 - DNA, 1212 bp, Artificial Sequence
  derived and/or modified sequence
atggacagcagagaatgtctgctcttcaagaatgaatgtaggaaggtgtaccaggacatgacccaccccctgaatgactacttcatcagcagcagccacaacacctacctggtgtctgaccagctgctgggccccagcgacctgtggggctacgtgtctgccctggtgaagggctgccgctgcctggagattgactgctgggatggagcccagaatgaacctgtggtgtaccacggctacaccctgaccagcaagctgctcttcaagacagtcatccaggccatccacaagtatgccttcatgaccagtgactaccctgtggtgctgagcctggagaaccactgcagcacagcccagcaggaggtgatggctgacaacctgcaggccacctttggagagagcctgctgagtgacatgctggatgacttcccagacaccctgcccagccctgaggccctgaagttcaagatcctggtgaagaacaagaagattggcaccctgaaggagacccatgagaggaagggcagtgacaagagaggagacaaccaggacaaggagactggagtgaagaagctgcccggggtgatgctgttcaagaagaagaagaccaggaagctgaagatcgccctggccctgagtgacctggtgatctacaccaaggccgagaagttcaagagcttccagcacagccggctgtaccagcagttcaatgaaaacaacagcatcggggagacccaggccaggaagctgagcaagctgcgggtgcatgagttcatcttccacaccaggaagttcatcacccgcatctaccccaaggccaccagggctgacagcagcaacttcaacccccaggagttctggaacatcggctgccagatggtggccctgaacttccagaccccaggcctgcccatggacctgcagaatggcaagttcctggacaatggaggcagcggctacatcctgaagccccacttcctgcgggagagcaagagctacttcaaccccagcaacatcaaggagggcatgcccatcaccctgaccatccgcctcatcagcggcatccagctgcccctgacccacagcagcagcaacaagggggacagcctggtgatcatcgaggtgtttggagtgcccaatgaccagatgaagcagcagaccagggtcatcaagaagaatggccagggcaacatggtgatcatcccagcctag

SEQ ID NO: 227234 - DNA, 1827 bp, Artificial Sequence
  derived and/or modified sequence
atggagatgcggtggttcctgagcaagatccaggacgacttccgggggggaaagataaacctcgagaagacccagagactgctggagaaacttgacatccggtgctcctatatccacgtaaaacagatttttaaagacaacgataggcttaagcaaggaaggatcacaatcgaggaatttcgagctatatatcggataattacccatcgagaggagataatcgaaatattcaatacctactccgagaaccggaagatattattggcttccaatttagcgcagtttcttacccaagagcagtatgcagcagaaatgtccaaagcaatcgccttcgaaattatccagaagtacgaacccatagaggaagttagaaaagcgcaccagatgtccctggaggggtttacgaggtatatggactctcgggaatgcttactctttaagaacgaatgtaggaaggtgtatcaggacatgacccacccattgaatgactacttcatcagttcctcacataatacttatctagtgagcgaccaactccttggtccctctgacctgtggggatacgtgagcgccctggtcaaaggctgtaggtgtttggagattgactgctgggatggcgctcagaatgagcccgtcgtgtatcacggatacacactgacatcaaagctcttgtttaagacagtgatccaggcgatccacaaatacgcttttatgacttcggattatccagtggttctcagccttgaaaaccactgttcgacggcgcagcaggaggtgatggcagacaacctgcaggccacgttcggagaatctttgctctcagatatgctggatgatttcccagatacccttccatctcccgaagcgctgaaattcaagatcttagtgaagaacaagaagataggaactcttaaggagacccatgagcggaagggttcggataaacgcggagacaatcaggacaaagagactggggtgaagaaactgccgggcgtcatgctcttcaagaaaaagaagactagaaaactaaaaatcgccctagctctttcagacttggttatctatacaaaggcagagaaatttaagtcttttcaacacagcagactgtaccaacagttcaacgagaacaattccatcggcgagacacaagctagaaagctctccaagctccgagtgcatgagttcatttttcacactcgaaagttcattactcgcatatatcccaaggcaacacgtgcagatagcagcaactttaacccccaggaattctggaacattgggtgtcagatggtggccttgaactttcaaactccaggactgcctatggacttgcaaaatggaaaatttctcgacaacggagggagcggctatatcctaaagccgcactttcttagggaaagcaagtcttatttcaatcctagcaatatcaaagaaggcatgccaatcacattgacgatccgcttgatatcggggatccagctccccctgactcactcatcatccaacaagggcgactccttggtgattattgaagttttcggcgtgccgaacgatcagatgaaacagcaaacaagagtcataaagaagaatgcattctccccacgatggaatgagacttttacattcattatccatgtacccgagctagcactgatcagattcgttgtggaaggccaaggcctgatagcaggcaatgagttcctgggtcagtataccctccccctgctttgcatgaacaagggatatcgaaggatcccacttttcagcagaatgggggagtctctcgagcccgccagtctgtttgtgtatgtgtggtacgttagatag

SEQ ID NO: 227235 - DNA, 1821 bp, Artificial Sequence
  derived and/or modified sequence
atgcggtggttcctgagcaagatccaggacgacttccggggcggcaagattaacctcgaaaaaacccagcggcttctcgaaaaactcgacatcaggtgctcctacatccatgttaagcagatttttaaagataatgatcggctgaaacaggggagaatcacaatcgaggagtttagggcaatctacaggattattacgcaccgggaagagatcatcgagatctttaacacatactcagaaaatcgaaagatcctgctggcttcaaatttagcacaattcctcacacaagagcaatatgcagctgaaatgagtaaggcaatcgcattcgagattatccagaaatatgagccaattgaggaagtaagaaaggctcatcagatgagcctggagggcttcacccgctatatggattcaagagagtgtcttttatttaaaaacgagtgtcggaaggtgtaccaggacatgacccatccactgaatgactattttatctcttcatctcacaatacatacctggtgtctgatcaactgctgggcccctccgatctgtgggggtacgtcagtgcactggttaaaggctgccggtgtctggagattgactgctgggacggagctcaaaatgaaccagtggtgtatcacggctataccttaacatccaagctcctgtttaaaaccgtgattcaggccattcataaatatgcatttatgacgtccgattacccggtggtcctttccctggagaaccattgttcaacggcacagcaggaagtgatggccgataatcttcaggctaccttcggagagagtctcttgagtgacatgttggacgacttccctgacacactcccatctcccgaggctttaaagttcaaaattttagttaagaataagaagatcggcaccctgaaagagacccatgagcgtaaagggtccgacaagcggggtgataatcaggacaaggaaacaggtgtgaaaaaattacctggggtgatgctgttcaagaaaaaaaaaaccaggaagttaaaaatcgccttagctttgtctgatttggtgatctacacaaaggctgaaaagtttaagagctttcagcacagcaggttgtatcagcaatttaatgagaataattcaatcggggagacacaggccagaaagttgtctaaacttcgggttcatgagtttatctttcacacccgtaagtttataacgaggatctaccctaaggccacgagggccgattcgtccaatttcaacccccaagaattctggaatatcgggtgccagatggtcgctctgaacttccagaccccaggcctgcccatggatctccagaatgggaagttcctggataacggcggctctggatatatccttaagcctcatttcctgcgggagtcaaagagctacttcaatcctagtaacattaaggaagggatgcctattactctgactattagactcatctctgggatccaacttcctctgacacattctagcagcaataagggggacagtcttgtgattatagaggtcttcggcgtcccaaacgatcaaatgaagcagcagacccgcgtgatcaaaaagaatgccttctctccaagatggaacgagaccttcacatttatcatccatgttcccgaattggctctgattcggtttgtggtcgaaggccaaggcctgattgccgggaatgagtttctgggtcagtatactctccctcttctttgtatgaacaaaggataccgtaggataccattgtttagtcgcatgggggaaagccttgagccggccagtcttttcgtgtatgtttggtacgtcagatag

SEQ ID NO: 227236 - DNA, 1212 bp, Artificial Sequence
  derived and/or modified sequence
atggacagccgggagtgcctgctgttcaagaacgagtgccggaaggtgtaccaagacatgacacaccctctcaatgactatttcataagtagctcacataatacatatctcgtaagcgaccagcttctcgggcccagtgatttgtggggctacgtgagcgcactcgtgaagggttgtaggtgcctcgagattgactgttgggacggagctcagaatgagcctgtcgtgtaccatggttatacactcactagtaaactgctgttcaagaccgtgattcaggccattcataaatacgcctttatgacgagtgattacccagtggttctgtcacttgagaaccattgctccactgcccagcaggaggttatggccgataatcttcaagccaccttcggggagagccttcttagcgatatgctggacgacttcccagacactctacccagccctgaagctcttaaatttaagatcctggtgaagaacaaaaaaattgggaccctcaaggagacacatgaaagaaaagggagcgataaacggggcgacaatcaggacaaggagacaggcgtcaagaagctgccaggtgttatgctcttcaagaagaaaaaaactcggaaattgaaaattgccttggcactgtctgatttagtgatttacaccaaggccgagaagtttaagtccttccagcactcaagattgtatcaacaattcaacgagaataattctatcggggagacccaagctaggaaactcagtaagctgcgggtccacgaattcatattccatacacgcaaatttattacgcgcatataccccaaagccacgagagctgactcatcgaacttcaacccccaggagttctggaatattgggtgccagatggttgcactgaatttccagaccccaggcctacccatggatttgcagaatggcaagtttctcgacaacggcggaagcggctatatcctaaaaccccactttcttagggagagcaaatcttatttcaacccttccaatataaaggagggaatgcccattacactgacgatacgcctgatctccggtatccaattgccactcacccactcatcttccaataagggcgacagtctcgtgatcattgaggtgttcggcgttcctaatgatcagatgaaacagcagacacgggtgatcaaaaagaacggccagggaaatatggtcattatccctgcatag

SEQ ID NO: 227237 - DNA, 2148 bp, Artificial Sequence
  derived and/or modified sequence
acaatgggaattcagaccaaaaggaaaaaatgacagtcacctgacagtgtggtgcccagccaaccagctatacctcttttgaagattttaagaacttagcctcctgaacagtcttcttcgaaagtgaaaagtggtaacagctgatgagtatcaagaaattattttctgcaaaggggcagagttaattgtatttggaacccatgacagcacctactggggaaagacttctaagtgaggagaaacggctctacaggtcatgaaactatggaaatgagatggtttttgtcaaagattcaggatgacttcagaggtggaaaaattaacctagaaaaaactcagaggttacttgaaaaattagatattcggtgcagttatattcatgtgaaacagatttttaaggacaatgacaggctgaaacaaggaagaatcaccatagaagaatttagagcaatttatcgaattatcacgcacagagaagaaattattgagattttcaacacatattctgaaaaccggaaaattcttttagcaagtaatctggctcaatttctgacacaagaacaatatgcagctgagatgagtaaagctattgcttttgagatcattcagaaatacgagcctatcgaagaagttaggaaagcacaccaaatgtcattagaaggttttacaagatacatggattcacgtgaatgtctactgtttaaaaatgaatgtagaaaagtttatcaagatatgactcatccattaaatgattattttatttcatcttcacataacacatatttggtatctgatcaattattgggaccaagtgacctttggggatatgtaagtgcccttgtgaaaggatgccgttgtttggagattgactgctgggatggagcacaaaatgaacctgttgtatatcatggctacacactcacaagcaaacttctgtttaaaactgttatccaagctatacacaagtatgcattcatgacatctgactacccagtggtgctctctttagaaaatcactgctccactgcccaacaagaagtaatggcagacaatttgcaggctacttttggagagtccttgctttctgatatgcttgatgattttcctgatactctaccatcaccagaggcactaaaattcaaaatattagttaaaaataagaaaataggaaccttaaaggaaacccatgaaagaaaaggttctgataagcgtggagacaatcaagacaaggaaacaggggtaaaaaagttacctggagtaatgcttttcaagaaaaagaagaccaggaagctaaaaattgctctggccttatctgatcttgtcatttatacgaaagctgagaaattcaaaagctttcaacattcaagattatatcagcaatttaatgaaaataattctattggggagacacaagcccgaaaactttcaaaattgcgagtccatgagtttatttttcacaccaggaagttcattaccagaatatatcccaaagcaacaagagcagactcttctaattttaatccccaagaattttggaatataggttgtcaaatggtggctttaaatttccagacccctggtctgcccatggatctgcaaaatgggaaatttttggataatggtggttctggatatattttgaaaccacatttcttaagagagagtaaatcatactttaacccaagtaacataaaagagggtatgccaattacacttacaataaggctcatcagtggtatccagttgcctcttactcattcatcatctaacaaaggtgattcattagtaattatagaagtttttggtgttccaaatgatcaaatgaagcagcagactcgtgtaattaaaaaaaatgcttttagtccaagatggaatgaaacattcacatttattattcatgtcccagaattggcattgatacgttttgttgttgaaggtcaaggtttaatagcaggaaatgaatttcttgggcaatatactttgccacttctatgcatgaacaaaggttatcgtcgtattcctctgttttccagaatgggtgagagccttgagcctgcttcactgtttgtttatgtttggtacgtcagataacagctaatgataaatgacatatcattagctatgcatcgcaataaaacagccaaaatg

SEQ ID NO: 227238 - DNA, 1667 bp, Artificial Sequence
  derived and/or modified sequence
gtcattagaaggttttacaagatacatggattcacgtgaatgtctactgtttaaaaatgaatgtagaaaagtttatcaagatatgactcatccattaaatgattattttatttcatcttcacataacacatatttggtatctgatcaattattgggaccaagtgacctttggggatatgtaagtgcccttgtgaaaggatgccgttgtttggagattgactgctgggatggagcacaaaatgaacctgttgtatatcatggctacacactcacaagcaaacttctgtttaaaactgttatccaagctatacacaagtatgcattcatgacatctgactacccagtggtgctctctttagaaaatcactgctccactgcccaacaagaagtaatggcagacaatttgcaggctacttttggagagtccttgctttctgatatgcttgatgattttcctgatactctaccatcaccagaggcactaaaattcaaaatattagttaaaaataagaaaataggaaccttaaaggaaacccatgaaagaaaaggttctgataagcgtggagacaatcaagacaaggaaacaggggtaaaaaagttacctggagtaatgcttttcaagaaaaagaagaccaggaagctaaaaattgctctggccttatctgatcttgtcatttatacgaaagctgagaaattcaaaagctttcaacattcaagattatatcagcaatttaatgaaaataattctattggggagacacaagcccgaaaactttcaaaattgcgagtccatgagtttatttttcacaccaggaagttcattaccagaatatatcccaaagcaacaagagcagactcttctaattttaatccccaagaattttggaatataggttgtcaaatggtggctttaaatttccagacccctggtctgcccatggatctgcaaaatgggaaatttttggataatggtggttctggatatattttgaaaccacatttcttaagagagagtaaatcatactttaacccaagtaacataaaagagggtatgccaattacacttacaataaggctcatcagtggtatccagttgcctcttactcattcatcatctaacaaaggtgattcattagtaattatagaagtttttggtgttccaaatgatcaaatgaagcagcagactcgtgtaattaaaaaaaatggtcaaggtaatatggtcattattccagcatgagccaattagtttactatttctgtgggcatagactgcaccctagattgctatgtggtaaatgtgctcttgtgaccacaggtgaaccatagaaaacatagatatagtataattagaaattcatcagtgcttctggaaatcttttagtccaagatggaatgaaacattcacatttattattcatgtcccagaattggcattgatacgttttgttgttgaaggtcaaggtttaatagcaggaaatgaatttcttgggcaatatactttgccacttctatgcatgaacaaaggttatcgtcgtattcctctgttttccagaatgggtgagagccttgagcctgcttcactgtttgtttatgtttggtacgtcagataacagctaatgataaatgacatatcattagctatgcatcgcaataaaacagccaaaatg

SEQ ID NO: 227239 - DNA, 1827 bp, Artificial Sequence
  derived and/or modified sequence
atggaaatgcgctggttccttagcaaaatccaagacgactttcggggaggaaagatcaatcttgagaaaacgcagaggctactggaaaagttggatattaggtgttcttatattcacgttaagcagatttttaaggacaacgatcggctgaaacaaggtaggatcacaatagaggaattccgggcaatataccggatcattacccatagagaagagattattgaaatatttaatacgtatagtgagaaccgcaaaatcctcctagcctcaaacctcgctcagtttttgactcaggaacagtacgctgcagagatgtccaaggcaatagcctttgagatcatccaaaagtatgagcctatcgaagaggtacggaaggctcaccaaatgtctctagaaggttttacaagatacatggattcaagagagtgtttgttgtttaagaatgagtgcagaaaggtgtaccaagatatgacacaccctctgaatgattacttcatatcatccagccataacacatatttggtgtccgatcaattgcttggtccttctgatctctggggctatgtcagcgctctcgtgaagggctgtcgttgtctggagatcgactgctgggacggcgctcaaaatgaacctgtggtgtaccatggatatactctgacctctaagctgctcttcaagacagtcatacaagccatccataaatacgcattcatgacttctgactacccggtcgtgctgagcctggagaatcactgcagtacagcacagcaggaggtgatggccgacaacctccaggctacgttcggggaatcattactcagtgatatgcttgatgacttccccgacaccctgccttctccagaggctctcaagttcaagattttagttaagaacaaaaaaatcggaacgctgaaggagacacacgagcgcaagggatctgacaaaagaggagataatcaagataaggaaacaggtgttaaaaagctacctggggttatgctgtttaaaaaaaaaaaaacccggaagctcaagatcgcgttagctttgtctgatctggtgatttatactaaagctgaaaagttcaaatccttccaacacagcaggctgtaccagcagttcaatgaaaataattcgattggggagacccaagcacggaaactgtccaagctcagagtacacgaattcatcttccatactcggaaatttatcacacgaatttaccccaaggcgacgcgagcggactcgagtaactttaacccacaagaattctggaatatcggatgtcaaatggtggcgttaaactttcaaacccctggcctccccatggatttacagaatggcaagttcttggacaacggcggttcagggtatatacttaaaccacacttcctgagagaaagtaaatcgtactttaacccatctaatatcaaagagggcatgccaattaccttgaccattaggttgataagtgggatccaacttccactcacccatagctcttctaacaagggcgactcactggttataatcgaagtctttggcgtacccaacgatcagatgaaacagcagacacgagtcattaagaagaacgcttttagcccgagatggaacgagacctttacctttattatccatgtgcccgagctcgcacttattcgtttcgtggtggaggggcaggggctgatagctgggaatgaattcctgggacagtacaccctgccactgctgtgtatgaacaaaggatacagaaggatccccctgttcagccgaatgggcgagtctttggagccagcgtcacttttcgtgtacgtgtggtacgtgcgttag

SEQ ID NO: 227240 - DNA, 1821 bp, Artificial Sequence
  derived and/or modified sequence
atgaggtggtttctcagcaagatccaggatgattttaggggtggcaaaatcaacttggagaagactcaaaggctgctagagaaattggatataagatgtagctatatccacgtgaaacagatcttcaaggataacgatagactgaaacaggggcgaatcaccatcgaggaatttcgggcaatctatcgcatcatcacccacagagaagagattattgagatcttcaatacatactctgaaaatcggaagatccttctagctagcaacctcgcccagttcttgacccaggagcagtatgccgctgagatgagcaaagcaattgctttcgaaatcatccagaaatacgagcccatcgaggaagtgaggaaggcccatcagatgagcctcgagggcttcacccgatacatggattcccgggaatgcctgctgttcaagaatgagtgcagaaaagtctaccaagacatgacacatccgttaaacgattattttatctcctcctcacacaacacttatctggtgagtgatcaacttctcggtccctctgacttgtggggatacgtgagtgccctagtaaagggatgtcgctgtctggagattgactgctgggatggggctcagaatgaacccgtcgtttatcatggatataccctaacatcaaagcttctattcaaaacagtgattcaggccattcacaagtacgccttcatgacttcagactatccagtcgttctgagccttgagaatcattgctcaaccgcgcaacaagaggttatggcggacaacctgcaagcgacattcggagagtcgctcctgagcgatatgttggacgattttccagacaccctcccaagtccggaggccctgaaattcaagatccttgtgaagaataagaaaatcggaaccctcaaagagacacatgaacggaaggggtcagacaagcggggtgataatcaggataaggagaccggcgtgaagaagcttcctggtgtcatgctttttaagaagaagaaaacccggaaactgaaaatcgccttggcactctcagatttggttatttacacaaaagcagaaaaattcaaatcgttccagcattctaggctctatcagcagtttaacgaaaacaactcaatcggcgaaacacaggcacgaaaactgtctaagctgagggtgcacgagttcatttttcatacacgcaaatttattacacgcatctatccgaaggccacacgggcagactcgtcaaacttcaacccacaggagttctggaatattggatgtcagatggtggctctgaatttccagactcctggcctgcctatggatctgcagaatgggaaatttctggacaacggcggaagtggatacatcctgaagcctcactttttacgggagagcaagtcctatttcaatcctagtaacatcaaagagggcatgcctattactcttaccatccgccttatctcaggcatacagctaccgcttactcatagcagcagtaataaaggagattctctggttattatcgaggtgtttggggtccccaatgaccagatgaaacaacaaactagagtgatcaagaagaatgcctttagccctcgttggaacgagacctttactttcattattcacgtgcccgagctcgccttaattcggttcgtcgtggaggggcaaggcctgatcgccggaaacgagttcttgggccagtatactctgccactactgtgcatgaacaaaggatataggcgtatccccctgttcagtaggatgggtgagtcactggagcccgcaagtctgtttgtctatgtatggtacgtgcgctag

SEQ ID NO: 227241 - DNA, 1212 bp, Artificial Sequence
  derived and/or modified sequence
atggatagcagggaatgtctgctgttcaaaaatgagtgcaggaaggtgtatcaggacatgacccaccccttgaacgactatttcatcagcagctcccataatacatatttagtgagtgatcaactgctcggaccttccgatctctggggctacgtatccgccttggtcaaagggtgtcgctgcctcgagatcgattgttgggatggcgctcagaacgagcccgtcgtctatcacggatacacactgacttcaaaacttctgttcaaaaccgtaatacaggctatacacaaatacgctttcatgacaagcgattacccagtcgtcctaagccttgagaaccattgctccacggcccagcaggaggtgatggccgataatttacaggcaaccttcggtgagtctctgctgtccgatatgttagatgatttccccgatacactgccgtccccagaggccctcaagttcaagattctggtcaaaaataagaagataggaactttaaaggaaacgcacgagaggaaggggtccgacaaacgcggtgacaaccaggataaggaaaccggagtcaagaaactgcccggtgtcatgttattcaagaagaagaagacacggaagcttaaaattgccctggccctgtctgatctggtaatttacacgaaagcggagaagtttaagagttttcaacattcccgcctgtatcagcagttcaatgagaataattcgattggcgaaacccaggccaggaagctctcgaaattgcgcgtgcacgagttcatctttcacacacggaagtttatcactaggatctatcccaaggcaaccagagctgatagttcaaactttaatccacaagaattctggaatattggatgtcaaatggtggcgctcaacttccaaacccccggactgccaatggatctgcagaatggcaaattccttgacaacgggggaagcggttacatcctgaagccacattttctgcgagagtcaaaatcttacttcaaccctagcaacatcaaggagggcatgccaattaccttgaccataaggttaatttccgggattcagctgcctcttacacacagctccagcaataagggcgatagcctggttattatcgaggtgtttggcgtccctaatgaccagatgaagcagcagacccgggttattaaaaagaacggtcaagggaacatggtgattatcccagcgtag

SEQ ID NO: 227242 - DNA, 1827 bp, Artificial Sequence
  derived and/or modified sequence
atggagatgagatggttcctgagcaagatccaggacgacttcagaggcggcaagatcaacctggagaagacccagagactgctggagaagctggacatcagatgcagctacatccacgtgaagcagatcttcaaggacaacgacagactgaagcagggcagaatcaccatcgaggagttcagagccatctacagaatcatcacccacagagaggagatcatcgagatcttcaacacctacagcgagaacagaaagatcctgctggccagcaacctggcccagttcctgacccaggagcagtacgccgccgagatgagcaaggccatcgccttcgagatcatccagaagtacgagcccatcgaggaggtgagaaaggcccaccagatgagcctggagggcttcaccagatacatggacagcagagagtgcctgctgttcaagaacgagtgcagaaaggtgtaccaggacatgacccaccccctgaacgactacttcatcagcagcagccacaacacctacctggtgagcgaccagctgctgggccccagcgacctgtggggctacgtgagcgccctggtgaagggctgcagatgcctggagatcgactgctgggacggcgcccagaacgagcccgtggtgtaccacggctacaccctgaccagcaagctgctgttcaagaccgtgatccaggccatccacaagtacgccttcatgaccagcgactaccccgtggtgctgagcctggagaaccactgcagcaccgcccagcaggaggtgatggccgacaacctgcaggccaccttcggcgagagcctgctgagcgacatgctggacgacttccccgacaccctgcccagccccgaggccctgaagttcaagatcctggtgaagaacaagaagatcggcaccctgaaggagacccacgagagaaagggcagcgacaagagaggcgacaaccaggacaaggagaccggcgtgaagaagctgcccggcgtgatgctgttcaagaagaagaagaccagaaagctgaagatcgccctggccctgagcgacctggtgatctacaccaaggccgagaagttcaagagcttccagcacagcagactgtaccagcagttcaacgagaacaacagcatcggcgagacccaggccagaaagctgagcaagctgagagtgcacgagttcatcttccacaccagaaagttcatcaccagaatctaccccaaggccaccagagccgacagcagcaacttcaacccccaggagttctggaacatcggctgccagatggtggccctgaacttccagacccccggcctgcccatggacctgcagaacggcaagttcctggacaacggcggcagcggctacatcctgaagccccacttcctgagagagagcaagagctacttcaaccccagcaacatcaaggagggcatgcccatcaccctgaccatcagactgatcagcggcatccagctgcccctgacccacagcagcagcaacaagggcgacagcctggtgatcatcgaggtgttcggcgtgcccaacgaccagatgaagcagcagaccagagtgatcaagaagaacgccttcagccccagatggaacgagaccttcaccttcatcatccacgtgcccgagctggccctgatcagattcgtggtggagggccagggcctgatcgccggcaacgagttcctgggccagtacaccctgcccctgctgtgcatgaacaagggctacagaagaatccccctgttcagcagaatgggcgagagcctggagcccgccagcctgttcgtgtacgtgtggtacgtgagatag

SEQ ID NO: 227243 - DNA, 1821 bp, Artificial Sequence
  derived and/or modified sequence
atgagatggttcctgagcaagatccaggacgacttcagaggcggcaagatcaacctggagaagacccagagactgctggagaagctggacatcagatgcagctacatccacgtgaagcagatcttcaaggacaacgacagactgaagcagggcagaatcaccatcgaggagttcagagccatctacagaatcatcacccacagagaggagatcatcgagatcttcaacacctacagcgagaacagaaagatcctgctggccagcaacctggcccagttcctgacccaggagcagtacgccgccgagatgagcaaggccatcgccttcgagatcatccagaagtacgagcccatcgaggaggtgagaaaggcccaccagatgagcctggagggcttcaccagatacatggacagcagagagtgcctgctgttcaagaacgagtgcagaaaggtgtaccaggacatgacccaccccctgaacgactacttcatcagcagcagccacaacacctacctggtgagcgaccagctgctgggccccagcgacctgtggggctacgtgagcgccctggtgaagggctgcagatgcctggagatcgactgctgggacggcgcccagaacgagcccgtggtgtaccacggctacaccctgaccagcaagctgctgttcaagaccgtgatccaggccatccacaagtacgccttcatgaccagcgactaccccgtggtgctgagcctggagaaccactgcagcaccgcccagcaggaggtgatggccgacaacctgcaggccaccttcggcgagagcctgctgagcgacatgctggacgacttccccgacaccctgcccagccccgaggccctgaagttcaagatcctggtgaagaacaagaagatcggcaccctgaaggagacccacgagagaaagggcagcgacaagagaggcgacaaccaggacaaggagaccggcgtgaagaagctgcccggcgtgatgctgttcaagaagaagaagaccagaaagctgaagatcgccctggccctgagcgacctggtgatctacaccaaggccgagaagttcaagagcttccagcacagcagactgtaccagcagttcaacgagaacaacagcatcggcgagacccaggccagaaagctgagcaagctgagagtgcacgagttcatcttccacaccagaaagttcatcaccagaatctaccccaaggccaccagagccgacagcagcaacttcaacccccaggagttctggaacatcggctgccagatggtggccctgaacttccagacccccggcctgcccatggacctgcagaacggcaagttcctggacaacggcggcagcggctacatcctgaagccccacttcctgagagagagcaagagctacttcaaccccagcaacatcaaggagggcatgcccatcaccctgaccatcagactgatcagcggcatccagctgcccctgacccacagcagcagcaacaagggcgacagcctggtgatcatcgaggtgttcggcgtgcccaacgaccagatgaagcagcagaccagagtgatcaagaagaacgccttcagccccagatggaacgagaccttcaccttcatcatccacgtgcccgagctggccctgatcagattcgtggtggagggccagggcctgatcgccggcaacgagttcctgggccagtacaccctgcccctgctgtgcatgaacaagggctacagaagaatccccctgttcagcagaatgggcgagagcctggagcccgccagcctgttcgtgtacgtgtggtacgtgagatag

SEQ ID NO: 227244 - DNA, 1212 bp, Artificial Sequence
  derived and/or modified sequence
atggacagcagagagtgcctgctgttcaagaacgagtgcagaaaggtgtaccaggacatgacccaccccctgaacgactacttcatcagcagcagccacaacacctacctggtgagcgaccagctgctgggccccagcgacctgtggggctacgtgagcgccctggtgaagggctgcagatgcctggagatcgactgctgggacggcgcccagaacgagcccgtggtgtaccacggctacaccctgaccagcaagctgctgttcaagaccgtgatccaggccatccacaagtacgccttcatgaccagcgactaccccgtggtgctgagcctggagaaccactgcagcaccgcccagcaggaggtgatggccgacaacctgcaggccaccttcggcgagagcctgctgagcgacatgctggacgacttccccgacaccctgcccagccccgaggccctgaagttcaagatcctggtgaagaacaagaagatcggcaccctgaaggagacccacgagagaaagggcagcgacaagagaggcgacaaccaggacaaggagaccggcgtgaagaagctgcccggcgtgatgctgttcaagaagaagaagaccagaaagctgaagatcgccctggccctgagcgacctggtgatctacaccaaggccgagaagttcaagagcttccagcacagcagactgtaccagcagttcaacgagaacaacagcatcggcgagacccaggccagaaagctgagcaagctgagagtgcacgagttcatcttccacaccagaaagttcatcaccagaatctaccccaaggccaccagagccgacagcagcaacttcaacccccaggagttctggaacatcggctgccagatggtggccctgaacttccagacccccggcctgcccatggacctgcagaacggcaagttcctggacaacggcggcagcggctacatcctgaagccccacttcctgagagagagcaagagctacttcaaccccagcaacatcaaggagggcatgcccatcaccctgaccatcagactgatcagcggcatccagctgcccctgacccacagcagcagcaacaagggcgacagcctggtgatcatcgaggtgttcggcgtgcccaacgaccagatgaagcagcagaccagagtgatcaagaagaacggccagggcaacatggtgatcatccccgcctag

SEQ ID NO: 227245 - protein, 497 aa, Artificial Sequence
  derived and/or modified sequence
MPKKEKMAKTPLSDEKQLLLFQQKLLAEEEMAKKKERLLSQFLKDKLAKEEHNSALNLNKINTQWRTVLREVKTRELHKDIEILSQTFERVVDCKDNVIKSLAKDLSEAEEQYAHALRSHLHNVDQLLALQRHRLSLLEESYNMELEALTKEFETERKTIIDQHEKEIHYLQDIFMAMEQNYIDSEYESKLEFQSMWNDLKNMNLEEKHFLRLHLENRVEDLWRKFQDVLKNYTDATEDRKAAFETLQVKDEKSSKEIEVQMKKIQKLQDAITISKGKIMIHSRESEDENRYIRNDKELVLVQLRKLKAQRTQARAASQKNLVRLTLESNATLKALRKIVDKGEKILKLAEICRKFETEEEKVLPFYSSVLTPKEQEGIQKNNLEELTEELTKVMVDYIGMENFWKRYNKVKLEQLSLQHRRAQLLDINGKLREMLKQYLDGISVSDEVLSQLNPLFIVNYQSNLLQPLSIRIAHPGSTSPSAPWRDQRRSFFLGSS

SEQ ID NO: 227246 - protein, 484 aa, Artificial Sequence
  derived and/or modified sequence
MPKKEKMAKTPLSDEKQLLLFQQKLLAEEEMAKKKERLLSQFLKDKLAKEEHNSALNLNKINTQWRTVLREVKTRELHKDIEILSQTFERVVDCKDNVIKSLAKDLSEAEEQYAHALRSHLHNVDQLLALQRHRLSLLEESYNMELEALTKEFETERKTIIDQHEKEIHYLQDIFMAMEQNYIDSEYESKLEFQSMWNDLKNMNLEEKHFLRLHLENRVEDLWRKFQDVLKNYTDATEDRKAAFETLQVKDEKSSKEIEVQMKKIQKLQDAITISKGKIMIHSRESEDENRYIRNDKELVLVQLRKLKAQRTQARAASQKNLVRLTLESNATLKALRKIVDKGEKILKLAEICRKFETEEEKVLPFYSSVLTPKEQEGIQKNNLEELTEELTKVMVDYIGMENFWKRYNKVKLEQLSLQHRRAQLLDINGKLREMLKQYLDGISVSDEVLSQLNPLFIVNYQSNLLQPLSIRIAHPGDKQHPTT

SEQ ID NO: 227247 - DNA, 1494 bp, Artificial Sequence
  derived and/or modified sequence
atgcctaaaaaggaaaagatggccaaaacaccactaagtgatgaaaaacaactgctcctgttccagcaaaaactgctagcagaggaggagatggcaaagaagaaggagcggctattaagccaatttcttaaagacaagttggcgaaagaggaacataatagtgcactgaacctgaataaaataaatacccagtggcgaacggtgctacgcgaggttaaaacccgggaactacataaagacatcgagatcttgtctcaaacttttgaacgggtggtggattgtaaggacaacgtgattaaaagcctggccaaagatctgagcgaagctgaagagcagtacgctcacgcgctgagaagtcatctgcacaatgttgatcagctgcttgccttgcaaagacatagactgagtttactcgaggagtcatacaacatggaactggaggccctgaccaaagagtttgagaccgaacggaaaaccattatcgaccagcatgaaaaggagattcactacctgcaagacatctttatggccatggaacagaactacatcgactccgagtacgaaagcaaactggagtttcagagcatgtggaacgacctcaaaaatatgaacttggaggaaaaacactttctgagactgcacttagagaatagagtagaggacctctggcggaagtttcaggatgtgctcaagaattataccgatgcgaccgaggacagaaaggctgctttcgagacactgcaggtgaaagacgaaaaaagcagcaaggaaatcgaagtgcagatgaaaaagatccagaaactgcaagatgccattactataagcaaaggtaaaattatgattcacagccgcgaatctgaagatgagaaccggtacattaggaacgacaaggaactcgtgttagtgcagcttcgcaaactgaaggcccagagaacacaggcccgcgcagcatcacagaagaacctcgtgcggcttaccctagaatccaatgccactctgaaagcccttcggaaaatcgtcgacaaaggagagaagattctaaagctcgcagaaatatgccgtaagttcgaaacagaggaggaaaaggtgctacccttttattcttccgtcctgactcctaaagaacaggagggtatacaaaagaacaacctggaagagctcaccgaggagctgacgaaggtgatggtggactatatcggaatggaaaatttctggaagcgctacaataaagtgaaactggaacagctgtcacttcaacaccgcagggcccagcttttggacatcaacggtaagcttcgggagatgctgaaacagtacctggacggaatttctgtcagcgatgaggtcctctcccagcttaatcccttattcatcgttaattatcagtctaacttgctgcagccgctgtcaattaggatcgcacacccaggaagcacgagtcccagtgcgccctggcgcgatcaacggaggtccttttttctggggagctcatag

SEQ ID NO: 227248 - DNA, 1455 bp, Artificial Sequence
  derived and/or modified sequence
atgcccaagaaggagaagatggctaagacacccctgtccgatgaaaagcaactcctccttttccaacaaaagcttctcgcggaggaagagatggccaaaaaaaaggagcggctgctcagccagtttctgaaggacaagctggccaaggaggagcacaacagtgccttgaatttgaacaaaattaatacacagtggagaaccgtcctgagagaagtcaaaacccgtgagttgcacaaggacatcgaaatccttagccagactttcgagagggtggtcgactgtaaggacaacgtgatcaagagtttggcgaaagacttaagtgaggcagaggaacagtacgcccatgcactccgatctcacctgcacaatgttgatcagctgctggccttgcagaggcatagactttcactgcttgaggaaagttataatatggagctcgaagctttaaccaaagaatttgagaccgagcggaaaactataattgatcagcacgagaaggagattcattacttacaggacatttttatggcaatggagcagaactacatcgactctgaatatgagtctaagctggagtttcagtcaatgtggaacgacctcaagaacatgaacttggaggaaaaacacttcttacgtcttcaccttgagaatagagtggaggacttatggcggaagttccaggacgtgctcaagaactacacagatgcaactgaagataggaaggcagcatttgagaccttgcaggttaaggacgaaaagtcaagcaaagagatcgaagtgcagatgaagaagattcagaaactgcaagacgccatcacaatcagcaaggggaaaatcatgatccactcacgcgaatctgaggacgaaaacaggtacatccggaacgacaaggaattagttctagtgcagctgaggaagctgaaagcccaaaggactcaagctcgcgccgcaagtcagaaaaatctggtgaggcttacactggagagcaacgcaacactcaaggccctgagaaaaattgtggacaagggtgagaaaatcttgaaactggctgagatttgccgtaaattcgaaactgaggaggaaaaagtgctacccttctactcctctgtgcttacccccaaggagcaggagggaatacagaaaaataatctcgaagaactgacagaggaattaactaaggtgatggtagactatatcgggatggagaacttttggaagcgttataataaggtcaagttagagcagctgagcttgcagcacaggagagcacagctcctcgatattaatgggaagctgcgagaaatgttgaaacagtatctggatggcatttccgtcagtgacgaagtactgtctcagctcaatccactgtttattgtgaattaccagtctaacctgcttcaacctctgtccatacggattgcacaccctggagacaaacagcaccccactacatag

SEQ ID NO: 227249 - DNA, 1494 bp, Artificial Sequence
  derived and/or modified sequence
atgcccaagaaggagaagatggccaagacccccctgagtgatgagaagcagctgctgctcttccagcagaagctgctggccgaggaggagatggccaagaagaaggagcggctgctgagccagttcctgaaggacaagctggccaaggaggagcacaacagcgccctgaacctgaacaagatcaacacccagtggaggacagtgctgcgggaggtgaagacccgggagctgcacaaggacatcgagatcctgagccagacctttgagcgggtggtggactgcaaggacaacgtcatcaagagcctggccaaggacctgtctgaggccgaggagcagtatgcccacgccctgcggagccacctgcacaacgtggaccagctgctggccctgcagaggcaccggctgagcctgctggaggagagctacaacatggagctggaggccctgaccaaggagtttgaaacagagaggaagaccatcatcgaccagcacgagaaggagatccactacctgcaggacatcttcatggccatggagcagaactacattgattctgaatatgagagcaagctggagttccagagcatgtggaatgacctgaagaacatgaacctggaggagaagcacttcctgcggctgcacctggagaacagagtggaggacctgtggaggaagttccaggatgtgctgaagaactacacagatgccacagaggacaggaaggccgcctttgagaccctgcaggtgaaggatgagaagagcagcaaggagattgaggtgcagatgaagaagatccagaagctgcaggatgccatcaccatcagcaagggcaagatcatgatccacagccgggagagtgaagatgaaaatcgctacatcagaaatgacaaggagctggtgctggtgcagctgaggaagctgaaggcccagaggacccaggcccgggccgccagccagaagaacctggtgcggctgaccctggagagcaatgccaccctgaaggccctgaggaagatcgtggacaagggggagaagatcctgaagctggccgagatctgcaggaagtttgaaacagaggaggagaaggtgctgcccttctacagctctgtgctgacccccaaggagcaggagggcatccagaagaacaacctggaggagctgacagaggagctgaccaaggtgatggtggactacatcggcatggagaacttctggaagcgctacaacaaggtgaagctggagcagctgagcctgcagcacagaagagcccagctgctggacatcaatggcaagctgcgggagatgctgaagcagtacctggatggcatctctgtgtctgatgaggtgctgagccagctgaaccccctcttcatcgtgaactaccagagcaacctgctgcagcccctgagcatcagaattgcccaccctggcagcaccagccccagcgccccctggagggaccagaggaggagcttcttcctgggcagcagctag

SEQ ID NO: 227250 - DNA, 1455 bp, Artificial Sequence
  derived and/or modified sequence
atgcccaagaaggagaagatggccaagacccccctgagtgatgagaagcagctgctgctcttccagcagaagctgctggccgaggaggagatggccaagaagaaggagcggctgctgagccagttcctgaaggacaagctggccaaggaggagcacaacagcgccctgaacctgaacaagatcaacacccagtggaggacagtgctgcgggaggtgaagacccgggagctgcacaaggacatcgagatcctgagccagacctttgagcgggtggtggactgcaaggacaacgtcatcaagagcctggccaaggacctgtctgaggccgaggagcagtatgcccacgccctgcggagccacctgcacaacgtggaccagctgctggccctgcagaggcaccggctgagcctgctggaggagagctacaacatggagctggaggccctgaccaaggagtttgaaacagagaggaagaccatcatcgaccagcacgagaaggagatccactacctgcaggacatcttcatggccatggagcagaactacattgattctgaatatgagagcaagctggagttccagagcatgtggaatgacctgaagaacatgaacctggaggagaagcacttcctgcggctgcacctggagaacagagtggaggacctgtggaggaagttccaggatgtgctgaagaactacacagatgccacagaggacaggaaggccgcctttgagaccctgcaggtgaaggatgagaagagcagcaaggagattgaggtgcagatgaagaagatccagaagctgcaggatgccatcaccatcagcaagggcaagatcatgatccacagccgggagagtgaagatgaaaatcgctacatcagaaatgacaaggagctggtgctggtgcagctgaggaagctgaaggcccagaggacccaggcccgggccgccagccagaagaacctggtgcggctgaccctggagagcaatgccaccctgaaggccctgaggaagatcgtggacaagggggagaagatcctgaagctggccgagatctgcaggaagtttgaaacagaggaggagaaggtgctgcccttctacagctctgtgctgacccccaaggagcaggagggcatccagaagaacaacctggaggagctgacagaggagctgaccaaggtgatggtggactacatcggcatggagaacttctggaagcgctacaacaaggtgaagctggagcagctgagcctgcagcacagaagagcccagctgctggacatcaatggcaagctgcgggagatgctgaagcagtacctggatggcatctctgtgtctgatgaggtgctgagccagctgaaccccctcttcatcgtgaactaccagagcaacctgctgcagcccctgagcatcagaattgcccaccctggggacaagcagcaccccaccacctag

SEQ ID NO: 227251 - DNA, 1494 bp, Artificial Sequence
  derived and/or modified sequence
atgcccaagaaggagaagatggccaagacccccctgagcgacgagaagcagcttctgcttttccagcagaagttgctggccgaggaggaaatggcaaaaaagaaagagcgtttgctgtcccagtttctgaaggacaagctggctaaggaagagcacaactcggccttgaacctcaacaagatcaacacccagtggcgcaccgtgctgcgagaagtgaagactagagaattgcacaaggacatcgaaatactgtctcagacttttgaaagggttgttgactgcaaggataatgttatcaagtcacttgcgaaggacctatccgaggccgaagaacagtacgcacatgctctgcgatcgcacctgcacaatgtcgaccagcttctggccttgcagcggcaccgtctgtcattgctggaggagagctacaacatggagctcgaggccctaacaaaggagtttgagacggagcgcaagaccattattgatcagcatgagaaagaaattcattatctccaagacatattcatggccatggagcagaattatatcgatagcgaatacgagtccaagttggaattccagtcaatgtggaacgatctgaagaatatgaacctcgaagagaagcattttctgcgcctccacctggagaatcgagtggaagatttatggcggaaatttcaggatgtcttaaagaattacacagacgcaaccgaagaccggaaagccgcctttgagaccctacaggtgaaagatgagaagtctagtaaagaaattgaggttcagatgaagaagatccaaaagctgcaggacgcgatcacaatctccaaaggcaagattatgattcactcccgcgagtctgaggacgagaacagatatatcaggaacgacaaggagctcgtgttggtgcagctgaggaagctgaaggcccagcggacacaggcccgagcagcgtcccaaaagaacctggtgcgcctgactctggaatccaatgccacacttaaggccctccgcaaaatagtggataagggggagaagatcctgaaattggccgagatatgtcggaaattcgagacggaggaagagaaagtcctacccttctatagtagcgtactgactcctaaagagcaggaagggatccagaaaaataacctggaggaactgaccgaggaactgacgaaagtgatggtagattacataggcatggagaacttctggaagagatataataaggtgaagctggagcagttatccctgcaacatcggagggctcaacttctcgacattaacggtaaactgcgagaaatgttgaagcaatatctggatggcatcagcgtaagcgacgaggtgctgtctcagctgaaccctctgttcatcgtcaactatcagagcaatttgttgcagccactcagtatacggatcgcccatcctggcagcacctccccttctgctccctggagggatcagagacgctcctttttcctcggctcctcatag

SEQ ID NO: 227252 - DNA, 1455 bp, Artificial Sequence
  derived and/or modified sequence
atgcccaagaaggagaagatggccaagacccccctgagcgacgagaagcagctgctcctgttccagcagaaactattagccgaggaggagatggccaagaaaaaagagcgtcttctgagtcagttcttgaaagacaagctggctaaagaggaacacaactccgccctgaatctcaataaaatcaatacacagtggaggacagtgctgagggaggtcaagacacgggagttgcataaagacatcgagattctcagccagaccttcgagagagttgtggattgtaaggacaacgtgattaaatccctagcgaaggacttgtcagaggcagaggagcagtacgctcacgcgctgaggtcccatctgcataatgtcgaccaacttctggcccttcagaggcacaggctgagcctcctcgaggagtcttacaatatggaattggaggccctgactaaggagtttgaaacagagcggaaaacaataatcgatcagcacgaaaaggagattcattacctgcaggatatatttatggctatggaacagaactacattgactctgagtacgagagcaagcttgagtttcaaagtatgtggaacgatctcaagaacatgaatctcgaagaaaaacacttcctgcgccttcacttagagaaccgcgtggaggatttgtggagaaagttccaggacgtcctgaagaactatactgatgccaccgaggatagaaaggcagcgtttgaaacactgcaggttaaggacgagaaatccagcaaggaaatagaagtccaaatgaaaaaaatacagaagctgcaggatgccatcaccatcagcaaaggaaagattatgatccattcccgggaatcggaagacgaaaatcgttatatcaggaacgacaaagagctggtgctggtgcagctccgcaagcttaaagcccagcgcacccaagcccgcgctgcctcgcaaaagaatctagttcgcctcaccttagagtccaacgcaacactgaaggcattacgcaagatcgtagacaagggggagaagatactgaaactggccgaaatatgtcgtaaattcgagaccgaagaggagaaagtgttacccttttatagttctgtcctgacacccaaggaacaggaggggattcagaaaaataatctcgaagaacttaccgaagagcttactaaggtgatggtggattatatcggcatggagaacttttggaagcgctacaataaagttaagttagaacagttgagtttacagcaccgaagggcccagttactagacatcaacggaaaactgcgagaaatgctgaagcaatacctggatgggatcagcgtctcagatgaagtgttaagccagctcaaccccctatttattgtcaattatcagtctaacctgcttcagcccctgtccatcagaatagcacaccccggagacaagcaacacccaacaacttag

SEQ ID NO: 227253 - DNA, 1494 bp, Artificial Sequence
  derived and/or modified sequence
atgccaaaaaaggaaaagatggctaaaacccctctgagcgatgaaaagcagctactgcttttccagcagaagcttctcgcagaggaggagatggctaagaagaaggaaagacttcttagtcaattcttgaaagacaagctggcaaaagaggaacataatagtgcccttaacctgaataagatcaacacccagtggcgcactgtgctgagggaggtaaagacgagagagctgcacaaagacatcgagatcttgagtcaaacatttgaaagggtggttgactgcaaggacaatgtgattaaatcccttgcaaaagacttgtcggaggccgaagagcagtatgcccatgcactgaggtcacatctacacaacgtcgatcagttactagccttgcagcggcacaggctgagcctcctagaggaatcttataacatggagttggaggccctaaccaaggaatttgagacagagcgcaaaacgatcatcgaccagcacgaaaaagagattcattatttgcaagatatttttatggcaatggaacaaaattacatagatagtgagtatgagtccaaactggagttccaatccatgtggaatgacttaaaaaacatgaatttggaagaaaagcacttcttgcgcctacacctggagaacagggttgaggacctgtggcgtaaatttcaagatgtcctcaaaaactataccgacgctacggaggataggaaagcagctttcgaaacactgcaggtgaaagacgagaagtcaagcaaggaaatagaagtgcaaatgaagaagatccaaaagctccaggatgctataactattagcaaaggtaaaataatgatacattcacgggaatcagaagatgaaaaccgctacattcgtaacgataaggagctcgttctggtgcagctgcgcaaactgaaggcccagcggacgcaggcccgtgcagcttcccagaaaaacctggtgcgcctgacactggagtctaacgctaccttgaaagcgctgcggaaaatagttgataagggtgaaaaaatcttgaagctggccgagatctgtcgcaagtttgagacggaggaggaaaaggttttaccattctattcctcagtcctgaccccaaaggaacaggaaggcatccagaagaataatcttgaagaactgaccgaagagttaacaaaagtgatggtggactacatagggatggagaatttctggaagagatataataaagttaaactggaacagctatccctgcagcaccgacgagctcagctgctggatattaatggaaaactgagagagatgctcaagcagtatttggatggcatatccgtgtcggacgaggtactatctcagcttaatccactgttcatcgtaaattatcagtctaacctgctgcagcccctgagcataaggatcgcccaccctggaagcactagccctagcgccccttggagagaccagcgtcggagcttctttcttggaagctcctag

SEQ ID NO: 227254 - DNA, 1455 bp, Artificial Sequence
  derived and/or modified sequence
atgccgaagaaagaaaaaatggcaaaaacccctctgtcagatgaaaaacagctactgctcttccagcagaagctgctggccgaggaagaaatggcaaagaaaaaggaaaggttgctcagccagttcttgaaagacaagctcgcgaaggaggagcacaactctgcgctgaatcttaacaagattaatacacaatggcggactgtcttacgggaagttaaaacaagggagctgcacaaggatatagagattcttagtcagactttcgaacgcgtcgtggattgcaaggacaacgttataaaatcactagccaaggacctgtccgaggcagaggagcagtacgctcacgcacttcggtcccacctgcataacgtcgaccagctcttggcactgcaacggcataggctgtctctgttagaggagtcatataacatggagctggaggccctgactaaggagttcgagactgagagaaagacgattatcgaccagcacgagaaggaaattcactacctgcaggatatcttcatggccatggagcaaaactacatcgacagcgaatacgaatccaaactggagttccagagtatgtggaacgacctaaagaatatgaacctcgaggagaagcattttcttcgcctgcacctggaaaatagagtcgaggacttgtggcgcaaatttcaggatgtgctcaagaattataccgatgctacggaggaccgtaaagcagcatttgaaacactccaggttaaggatgagaaatcaagcaaggagatcgaagtccagatgaagaaaatccagaagttacaggatgctatcactatctccaagggaaagattatgattcactctagagagtctgaggacgagaaccggtacataagaaatgacaaggagctggtattggtgcaactacgtaagctgaaagcgcagcgaacccaggccagagccgcaagccagaaaaatcttgttaggctgaccttggagagcaatgctaccctgaaagcactgcgaaagatagtggataagggggagaaaatacttaagctggccgagatttgtagaaaatttgagacagaggaagagaaagttctgcccttttacagctccgtgctgactcctaaggagcaagagggaatccaaaaaaataacctggaagaactgaccgaagagctgacaaaagtgatggtggattacatcggcatggaaaatttttggaagcggtataataaggtgaagctggagcagttatccttacaacataggagggctcagttattggatatcaacggaaaattgcgcgagatgctcaaacagtatttagatggcatcagtgtgtccgacgaagtgttgagccagttgaatccactattcatcgtgaactaccagagcaatctactacagccactgtctattaggatcgctcaccccggagataaacagcaccctaccacctag

SEQ ID NO: 227255 - DNA, 2084 bp, Artificial Sequence
  derived and/or modified sequence
gatatcctcgttgctaggagactagacgcgtcttacagtgggagagctcagcctcactgatagccggggatctctcctgttcgagggctgagatctccggtcccacaaccgcccacaaccaggggcacttctggaagtcccctttctagggacatttttcttctaagctctgtaacgcgggccgaggcagaccgaggcttctttcccggatccaatcccctgcccccatgcctaagaaagaaaaaatggccaagacgcccctgtccgatgagaagcagctgcttctgtttcagcagaagttgctggcagaggaggagatggccaaaaagaaggagaggctcctcagccagttcttgaaggacaagctggccaaggaggaacacaacagtgctctgaaccttaataagattaacacacagtggagaactgtccttcgggaagtcaagaccagagaacttcataaggacattgagatcctcagccaaacatttgaacgagtggtggactgtaaggacaatgtcatcaagtctttagctaaagacctgtccgaagccgaggagcagtacgcccatgccctgcgcagccacttgcacaatgttgaccagctcttggccctgcagaggcaccggctcagtctcctggaggaaagttacaacatggagctggaagccctaaccaaggagtttgagacagaaaggaagacaattattgaccaacatgagaaagagattcactatctgcaagatatcttcatggccatggagcagaactatatagattctgagtatgaaagcaagctggagttccagagcatgtggaatgatctcaaaaacatgaatttagaagagaagcactttctaagactgcacctggagaacagagtagaagatctgtggagaaagttccaggatgtactcaagaattacactgatgccacagaggatcgaaaggctgcctttgagaccctgcaggtgaaggatgagaagagctccaaagagattgaagtacagatgaaaaaaatacagaaactacaggatgccataactatttcaaaaggcaagatcatgatacacagccgtgagagtgaagatgagaaccggtatatccgtaatgacaaggaattggtccttgtacaactgcgaaaacttaaggcccaaagaactcaggcccgggcagcatcccagaagaacttagtcagactcaccctggaaagtaatgccaccctcaaggccctgagaaagattgttgataagggtgaaaagatccttaaacttgctgaaatatgtaggaaatttgaaaccgaagaagaaaaagtgctgcctttttattcatcagtattgactcctaaggagcaggaggggattcagaagaataatctagaagagcttactgaggagctcaccaaggtgatggtggactacataggaatggagaatttctggaaaaggtacaacaaagtgaaactggagcaactgagcctccaacatagacgagcccagctgctagatatcaatgggaagctgcgggagatgctgaagcagtacttggatggcatctcagtgagtgacgaagtgctgagccagctcaacccactctttatagtcaactatcaaagcaacttactccagcccttgtccatacgtatagcccatccaggcagcacaagcccatctgcaccctggagggaccagagaaggagctttttccttggatcaagttagaagaaatccaaacaacagagaaaggtgagatgattcttggaaagataggagagttggcccacccctggctggagatacaacttaatcacagaaccattgctagaaaagcctccacactcaaaggtgtctctgtcagtgtgtaggagaaaccctaccacagtacctgggcttccaagactcatggggcacccaccatgcccagcttgattaaagacaatggtgtttattaattcatccatttgttcatcaaggttgcatgactattatgtgccaaagaataagcagaacactgctctttaaatgttcttaagtgtttatttataacaggttgttaataaagtaaaagcctgagttggcatatat

SEQ ID NO: 227256 - DNA, 1775 bp, Artificial Sequence
  derived and/or modified sequence
gggagagctcagcctcactgatagccggggatctctcctgttcgagggctgagatctccggtcccacaaccgcccacaaccaggggcacttctggaagtcccctttctagggacatttttcttctaagctctgtaacgcgggccgaggcagaccgaggcttctttcccggatccaatcccctgcccccatgcctaagaaagaaaaaatggccaagacgcccctgtccgatgagaagcagctgcttctgtttcagcagaagttgctggcagaggaggagatggccaaaaagaaggagaggctcctcagccagttcttgaaggacaagctggccaaggaggaacacaacagtgctctgaaccttaataagattaacacacagtggagaactgtccttcgggaagtcaagaccagagaacttcataaggacattgagatcctcagccaaacatttgaacgagtggtggactgtaaggacaatgtcatcaagtctttagctaaagacctgtccgaagccgaggagcagtacgcccatgccctgcgcagccacttgcacaatgttgaccagctcttggccctgcagaggcaccggctcagtctcctggaggaaagttacaacatggagctggaagccctaaccaaggagtttgagacagaaaggaagacaattattgaccaacatgagaaagagattcactatctgcaagatatcttcatggccatggagcagaactatatagattctgagtatgaaagcaagctggagttccagagcatgtggaatgatctcaaaaacatgaatttagaagagaagcactttctaagactgcacctggagaacagagtagaagatctgtggagaaagttccaggatgtactcaagaattacactgatgccacagaggatcgaaaggctgcctttgagaccctgcaggtgaaggatgagaagagctccaaagagattgaagtacagatgaaaaaaatacagaaactacaggatgccataactatttcaaaaggcaagatcatgatacacagccgtgagagtgaagatgagaaccggtatatccgtaatgacaaggaattggtccttgtacaactgcgaaaacttaaggcccaaagaactcaggcccgggcagcatcccagaagaacttagtcagactcaccctggaaagtaatgccaccctcaaggccctgagaaagattgttgataagggtgaaaagatccttaaacttgctgaaatatgtaggaaatttgaaaccgaagaagaaaaagtgctgcctttttattcatcagtattgactcctaaggagcaggaggggattcagaagaataatctagaagagcttactgaggagctcaccaaggtgatggtggactacataggaatggagaatttctggaaaaggtacaacaaagtgaaactggagcaactgagcctccaacatagacgagcccagctgctagatatcaatgggaagctgcgggagatgctgaagcagtacttggatggcatctcagtgagtgacgaagtgctgagccagctcaacccactctttatagtcaactatcaaagcaacttactccagcccttgtccatacgtatagcccatccaggtgataaacaacatccaaccacttaaaatataattgaagcagcccagatgatcttccacaacctgtgatctaaggaaaaaaatctttcaactcctagagatttttttttttttttgagaaatgtagggatgttgctattaaaaatttccatggagttt

SEQ ID NO: 227257 - DNA, 1494 bp, Artificial Sequence
  derived and/or modified sequence
atgcccaagaaggagaagatggccaagacccccctgagcgacgagaagcagctgctgctgttccagcagaagctgctggccgaggaggagatggccaagaagaaggagagactgctgagccagttcctgaaggacaagctggccaaggaggagcacaacagcgccctgaacctgaacaagatcaacacccagtggagaaccgtgctgagagaggtgaagaccagagagctgcacaaggacatcgagatcctgagccagaccttcgagagagtggtggactgcaaggacaacgtgatcaagagcctggccaaggacctgagcgaggccgaggagcagtacgcccacgccctgagaagccacctgcacaacgtggaccagctgctggccctgcagagacacagactgagcctgctggaggagagctacaacatggagctggaggccctgaccaaggagttcgagaccgagagaaagaccatcatcgaccagcacgagaaggagatccactacctgcaggacatcttcatggccatggagcagaactacatcgacagcgagtacgagagcaagctggagttccagagcatgtggaacgacctgaagaacatgaacctggaggagaagcacttcctgagactgcacctggagaacagagtggaggacctgtggagaaagttccaggacgtgctgaagaactacaccgacgccaccgaggacagaaaggccgccttcgagaccctgcaggtgaaggacgagaagagcagcaaggagatcgaggtgcagatgaagaagatccagaagctgcaggacgccatcaccatcagcaagggcaagatcatgatccacagcagagagagcgaggacgagaacagatacatcagaaacgacaaggagctggtgctggtgcagctgagaaagctgaaggcccagagaacccaggccagagccgccagccagaagaacctggtgagactgaccctggagagcaacgccaccctgaaggccctgagaaagatcgtggacaagggcgagaagatcctgaagctggccgagatctgcagaaagttcgagaccgaggaggagaaggtgctgcccttctacagcagcgtgctgacccccaaggagcaggagggcatccagaagaacaacctggaggagctgaccgaggagctgaccaaggtgatggtggactacatcggcatggagaacttctggaagagatacaacaaggtgaagctggagcagctgagcctgcagcacagaagagcccagctgctggacatcaacggcaagctgagagagatgctgaagcagtacctggacggcatcagcgtgagcgacgaggtgctgagccagctgaaccccctgttcatcgtgaactaccagagcaacctgctgcagcccctgagcatcagaatcgcccaccccggcagcaccagccccagcgccccctggagagaccagagaagaagcttcttcctgggcagcagctag

SEQ ID NO: 227258 - DNA, 1455 bp, Artificial Sequence
  derived and/or modified sequence
atgcccaagaaggagaagatggccaagacccccctgagcgacgagaagcagctgctgctgttccagcagaagctgctggccgaggaggagatggccaagaagaaggagagactgctgagccagttcctgaaggacaagctggccaaggaggagcacaacagcgccctgaacctgaacaagatcaacacccagtggagaaccgtgctgagagaggtgaagaccagagagctgcacaaggacatcgagatcctgagccagaccttcgagagagtggtggactgcaaggacaacgtgatcaagagcctggccaaggacctgagcgaggccgaggagcagtacgcccacgccctgagaagccacctgcacaacgtggaccagctgctggccctgcagagacacagactgagcctgctggaggagagctacaacatggagctggaggccctgaccaaggagttcgagaccgagagaaagaccatcatcgaccagcacgagaaggagatccactacctgcaggacatcttcatggccatggagcagaactacatcgacagcgagtacgagagcaagctggagttccagagcatgtggaacgacctgaagaacatgaacctggaggagaagcacttcctgagactgcacctggagaacagagtggaggacctgtggagaaagttccaggacgtgctgaagaactacaccgacgccaccgaggacagaaaggccgccttcgagaccctgcaggtgaaggacgagaagagcagcaaggagatcgaggtgcagatgaagaagatccagaagctgcaggacgccatcaccatcagcaagggcaagatcatgatccacagcagagagagcgaggacgagaacagatacatcagaaacgacaaggagctggtgctggtgcagctgagaaagctgaaggcccagagaacccaggccagagccgccagccagaagaacctggtgagactgaccctggagagcaacgccaccctgaaggccctgagaaagatcgtggacaagggcgagaagatcctgaagctggccgagatctgcagaaagttcgagaccgaggaggagaaggtgctgcccttctacagcagcgtgctgacccccaaggagcaggagggcatccagaagaacaacctggaggagctgaccgaggagctgaccaaggtgatggtggactacatcggcatggagaacttctggaagagatacaacaaggtgaagctggagcagctgagcctgcagcacagaagagcccagctgctggacatcaacggcaagctgagagagatgctgaagcagtacctggacggcatcagcgtgagcgacgaggtgctgagccagctgaaccccctgttcatcgtgaactaccagagcaacctgctgcagcccctgagcatcagaatcgcccaccccggcgacaagcagcaccccaccacctag

SEQ ID NO: 227259 - protein, 543 aa, Artificial Sequence
  derived and/or modified sequence
MRTLHAVSHPYSNSMRFQRVLYFICAFQNISCGIHYLASVFMGVTPHHVCRPPGNLQNGEIWELSRCSRNKRENTSSLGYEYTGSKKEFPCVDGYIYDQNTWKSTAVTQWNLVCDRKWLAMLIQPLFMFGVLLGSVTFGYFSDRLGRRVVLWATSSSMFLFGIAAAFAVDYYTFMAARFFLAMVASGYLVVGFVYVMEFIGMKSRTWASVHLHSFFAVGTLLVALTGYLVRTWWLYQMILSTVTVPFILCCWVLPETPFWLLSEGRYEEAQKIVDIMAKWNRASSCKLSELLSLDLQGPVSNSPTEVQKHNLSYLFYNWSITKRTLTVWLIWFTGSLGFYSFSLNSVNLGGNEYLNLFLLGVVEIPAYTFVCIAMDKVGRRTVLAYSLFCSALACGVVMVIPQKHYILGVVTAMVGKFAIGAAFGLIYLYTAELYPTIVRSLAVGSGSMVCRLASILAPFSVDLSSIWIFIPQLFVGTMALLSGVLTLKLPETLGKRLATTWEEAAKLESENESKSSKLLLTTNNSGLEKTEAITPRDSGLGE

SEQ ID NO: 227260 - protein, 577 aa, Artificial Sequence
  derived and/or modified sequence
MGSRHFEGIYDHVGHFGRFQRVLYFICAFQNISCGIHYLASVFMGVTPHHVCRPPGNVSQVVFHNHSNWSLEDTGALLSSGQKDYVTVQLQNGEIWELSRCSRNKRENTSSLGYEYTGSKKEFPCVDGYIYDQNTWKSTAVTQWNLVCDRKWLAMLIQPLFMFGVLLGSVTFGYFSDRLGRRVVLWATSSSMFLFGIAAAFAVDYYTFMAARFFLAMVASGYLVVGFVYVMEFIGMKSRTWASVHLHSFFAVGTLLVALTGYLVRTWWLYQMILSTVTVPFILCCWVLPETPFWLLSEGRYEEAQKIVDIMAKWNRASSCKLSELLSLDLQGPVSNSPTEVQKHNLSYLFYNWSITKRTLTVWLIWFTGSLGFYSFSLNSVNLGGNEYLNLFLLGVVEIPAYTFVCIAMDKVGRRTVLAYSLFCSALACGVVMVIPQKHYILGVVTAMVGKFAIGAAFGLIYLYTAELYPTIVRSLAVGSGSMVCRLASILAPFSVDLSSIWIFIPQLFVGTMALLSGVLTLKLPETLGKRLATTWEEAAKLESENESKSSKLLLTTNNSGLEKTEAITPRDSGLGE

SEQ ID NO: 227261 - protein, 199 aa, Artificial Sequence
  derived and/or modified sequence
MGSRHFEGIYDHVGHFGRFQRVLYFICAFQNISCGIHYLASVFMGVTPHHVCRPPGNVSQVVFHNHSNWSLEDTGALLSSGQKDYVTVQLQNGEIWELSRCSRNKRENTSSLGYEYTGSKKEFPCVDGYIYDQNTWKSTAVTQWNLVCDRKWLAMLIQPLFMFGVLLGSVTFGYFSDRVGFLTAWYKTSGFPTSSAPPL

SEQ ID NO: 227262 - DNA, 1632 bp, Artificial Sequence
  derived and/or modified sequence
atgcgaactctgcatgcagtgtcccatccatatagtaatagtatgcgctttcaaagagtcctctatttcatttgcgccttccaaaatatctcctgtgggattcattatcttgcttcagttttcatgggggtcacaccccatcacgtctgtcgccctcctggcaacctgcagaatggcgagatctgggagctgtcacgctgcagtagaaataaaagggagaatacttcttcactcgggtatgagtacaccgggagtaagaaagagttcccttgtgttgacggctatatttacgaccagaacacttggaaatctaccgcagttacccagtggaatctggtttgcgatcggaagtggctggcgatgctgatacaacctctttttatgttcggcgtgcttctgggaagtgtaaccttcgggtacttctcggatagactgggtcgaagagtggtcctgtgggctacatcatcgtcaatgttcctgttcggaatcgcagccgcatttgctgtggactactatacatttatggctgctcgcttcttccttgctatggtagccagcggatatctcgtggttgggtttgtgtacgtaatggaatttataggtatgaagtctcgaacctgggcttccgtccacctgcactctttctttgctgtgggaaccctcctcgtcgctctcactggttaccttgtgagaacctggtggctttaccagatgattctgagcaccgtgactgttccctttattctctgctgctgggtgctgccagagactcccttctggttgctgagcgagggccggtatgaagaagcccagaagatcgtggacataatggctaagtggaaccgcgctagttcttgtaaactgagtgagctgttatccctggacctacagggaccagtgtcgaatagtcctacggaagttcagaaacacaatcttagttacctgttctataattggtctattaccaagcgaactctgacggtctggctgatttggtttactggctctctcgggttctacagtttctctctcaatagcgtaaatctaggtggcaatgaatatctgaatctattcttactgggcgtggttgaaattccagcttacaccttcgtgtgcattgccatggacaaagtgggtagacgcacagtcctggcgtacagcctgttctgttccgcactcgcctgcggagtagttatggtaatcccccaaaaacattacattctgggcgtggtaacagccatggtgggcaagtttgccatcggggcagcgtttggcctgatctacctatatactgcagaactatatcccacgattgtccgaagtctggctgtgggcagcggaagcatggtatgtcgactggcatctattctggcccccttttctgtagatctttcttcaatttggatttttataccccagcttttcgtgggcacgatggctctactgagtggagtcctaacactgaagctaccagagaccttgggcaagagactggctactacgtgggaggaggcagcaaaactcgagagtgaaaatgagtccaagtcatcaaagctgttgctgaccactaataacagtgggcttgaaaagaccgaggcaataaccccacgcgattcgggacttggggaatag

SEQ ID NO: 227263 - DNA, 1734 bp, Artificial Sequence
  derived and/or modified sequence
atgggttcacgccacttcgagggcatctatgaccacgtcggacacttcgggcgtttccagagggttctgtactttatttgtgcctttcaaaatattagctgtggcattcactacttggcctcagtgttcatgggggtgaccccacatcacgtatgtagaccgccaggcaacgtctctcaagtcgttttccacaaccactccaactggtccctggaggatacaggggcccttctttcctcaggccagaaggactacgtcactgtacaacttcagaatggggagatttgggaactgagccgctgctccagaaataagcgggaaaatacatctagtctgggctacgagtacactggctctaaaaaagagtttccctgcgtggacggctacatctatgatcaaaacacctggaagagcaccgccgtgacacagtggaatcttgtgtgcgatcggaagtggctggccatgctgatccaacctctgtttatgtttggagtactgctggggtccgtgaccttcggatactttagtgaccgcctgggccgacgcgtagtcctatgggctacctcatcatcaatgtttctctttggtattgcagctgcatttgccgttgactactacacctttatggccgctcgcttcttcctggcaatggttgcctccgggtacctggtcgtcgggttcgtgtacgtcatggagttcatcggcatgaaaagtcgaacatgggctagtgtgcacctccattctttcttcgccgtcggcaccctgctggttgcccttaccggctatctggtgcgcacttggtggttgtaccagatgatactgtctaccgtgacagtgcccttcatactgtgctgttgggtactcccagaaacacccttctggctcctcagcgagggacgctatgaagaagcccagaaaatagtcgatatcatggccaagtggaatagggcctcgtcttgcaagctctccgaactcttaagcttggacctccagggtcctgtgtccaactctcccactgaagtacagaagcataatttgagctatctgttctacaactggtccatcactaagcgcaccctaaccgtgtggcttatttggttcaccgggtctctgggcttttattcgttctccctgaacagcgtgaatctgggcgggaacgagtatcttaatctctttctgttaggagtggtggaaatccccgcatatacatttgtgtgtatcgctatggataaagtggggaggcgtactgtgctagcatattcactgttttgttccgcccttgcctgcggagtggtgatggtgatcccccaaaaacattatatacttggggtcgtaacggcaatggtagggaaatttgccattggagccgcgtttggcctgatctatctgtatactgctgagctgtaccctacaatcgtgcgctcactcgctgttggtagcgggagtatggtctgtcgcctggcttcaatcctggcacctttctctgtggacctgtcctccatttggatttttattccccagttgtttgtgggcaccatggcgctgctttccggtgttttgactctaaaactgcctgagaccctagggaaaaggctggcaactacctgggaggaagccgctaagctggaatctgagaacgagtcaaaatcaagcaagctgctactgacaactaacaactctggtctggagaagacagaggccatcacacctcgggactcaggccttggggagtag

SEQ ID NO: 227264 - DNA, 1632 bp, Artificial Sequence
  derived and/or modified sequence
atgaggaccctgcatgctgtgagccacccctacagcaacagcatgaggttccagagggtgctgtacttcatctgtgccttccagaacatcagctgtggcatccactacctggcctctgtgttcatgggcgtgaccccccaccacgtgtgccggcccccaggcaacctgcagaatggagagatctgggagctgagccgctgcagcaggaacaagcgggagaacaccagcagcctgggctatgagtacacaggcagcaagaaggagttcccctgtgtggatggctacatctatgaccagaacacctggaagagcacagctgtgacccagtggaacctggtgtgtgacaggaagtggctggccatgctgatccagcccctcttcatgtttggagtgctgctgggctctgtgaccttcggctacttcagtgaccggctgggcagaagagtggtgctgtgggccaccagcagctccatgttcctgtttggaattgctgctgcctttgctgtggactactacaccttcatggccgcccgcttcttcctggccatggtggccagcggctacctggtggtgggctttgtgtatgtgatggagttcatcggcatgaagagcaggacctgggcctctgtgcacctgcacagcttctttgctgtgggcaccctgctggtggccctgaccggctacctggtgaggacctggtggctgtaccagatgatcctgagcacagtgacagtgcccttcatcctgtgctgctgggtgctgcctgagacccccttctggctgctgtctgagggccgctatgaggaggcccagaagatcgtggacatcatggccaagtggaacagagccagcagctgcaagctgtctgagctgctgagcctggacctgcagggccctgtgagcaacagccccacagaggtgcagaagcacaacctgagctacctgttctacaactggagcatcaccaagaggaccctgactgtgtggctgatctggttcaccggcagcctgggcttctacagcttcagcctgaacagcgtgaacctgggcggcaatgagtacctgaacctcttcctgctgggcgtggtggagatcccagcctacacctttgtgtgcatcgccatggacaaggtgggccgcaggacagtgctggcctacagcctcttctgcagcgccctggcctgtggggtggtgatggtgatcccccagaagcactacatcctgggcgtggtgacagccatggtgggcaagtttgccatcggggccgccttcggcctcatctacctgtacacagctgagctgtaccccaccatcgtgcgcagcctggccgtgggcagcggctccatggtgtgccgcctggccagcatcctggcccccttctctgtggacctgagcagcatctggatcttcatcccccagctgtttgtgggcaccatggccctgctgtctggagtgctgaccctgaagctgcctgagaccctgggcaagaggctggccaccacctgggaggaggccgccaagctggagagtgaaaatgaaagcaagagcagcaagctgctgctgaccaccaacaacagcggcctggagaagacagaggccatcaccccccgggacagcggcctgggggagtag

SEQ ID NO: 227265 - DNA, 1734 bp, Artificial Sequence
  derived and/or modified sequence
atgggcagccgccactttgagggcatctatgaccacgtgggccacttcggccgcttccagagggtgctgtacttcatctgtgccttccagaacatcagctgtggcatccactacctggcctctgtgttcatgggcgtgaccccccaccacgtgtgccggcccccaggaaatgtgtcccaggtggtgttccacaaccacagcaactggagcctggaggacaccggggccctgctgagcagcggccagaaggactatgtgacagtgcagctgcagaatggagagatctgggagctgagccgctgcagcaggaacaagcgggagaacaccagcagcctgggctatgagtacacaggcagcaagaaggagttcccctgtgtggatggctacatctatgaccagaacacctggaagagcacagctgtgacccagtggaacctggtgtgtgacaggaagtggctggccatgctgatccagcccctcttcatgtttggagtgctgctgggctctgtgaccttcggctacttcagtgaccggctgggcagaagagtggtgctgtgggccaccagcagctccatgttcctgtttggaattgctgctgcctttgctgtggactactacaccttcatggccgcccgcttcttcctggccatggtggccagcggctacctggtggtgggctttgtgtatgtgatggagttcatcggcatgaagagcaggacctgggcctctgtgcacctgcacagcttctttgctgtgggcaccctgctggtggccctgaccggctacctggtgaggacctggtggctgtaccagatgatcctgagcacagtgacagtgcccttcatcctgtgctgctgggtgctgcctgagacccccttctggctgctgtctgagggccgctatgaggaggcccagaagatcgtggacatcatggccaagtggaacagagccagcagctgcaagctgtctgagctgctgagcctggacctgcagggccctgtgagcaacagccccacagaggtgcagaagcacaacctgagctacctgttctacaactggagcatcaccaagaggaccctgactgtgtggctgatctggttcaccggcagcctgggcttctacagcttcagcctgaacagcgtgaacctgggcggcaatgagtacctgaacctcttcctgctgggcgtggtggagatcccagcctacacctttgtgtgcatcgccatggacaaggtgggccgcaggacagtgctggcctacagcctcttctgcagcgccctggcctgtggggtggtgatggtgatcccccagaagcactacatcctgggcgtggtgacagccatggtgggcaagtttgccatcggggccgccttcggcctcatctacctgtacacagctgagctgtaccccaccatcgtgcgcagcctggccgtgggcagcggctccatggtgtgccgcctggccagcatcctggcccccttctctgtggacctgagcagcatctggatcttcatcccccagctgtttgtgggcaccatggccctgctgtctggagtgctgaccctgaagctgcctgagaccctgggcaagaggctggccaccacctgggaggaggccgccaagctggagagtgaaaatgaaagcaagagcagcaagctgctgctgaccaccaacaacagcggcctggagaagacagaggccatcaccccccgggacagcggcctgggggagtag

SEQ ID NO: 227266 - DNA, 1632 bp, Artificial Sequence
  derived and/or modified sequence
atgcggaccctgcacgccgtgagccacccctacagcaacagcatgaggtttcagagagtgctgtatttcatatgtgcatttcagaatatatcttgcggaatacattaccttgccagcgtgttcatgggcgtgacacctcatcacgtgtgcaggccccccggaaatctccagaatggagagatttgggaattatctaggtgtagtagaaacaaaagggagaacacatcatcccttggctacgaatataccggaagcaagaaagaattcccttgtgttgacgggtacatctacgaccaaaacacctggaagtctactgcagtcacccagtggaatcttgtgtgcgacaggaagtggctcgcaatgctaatccagccactgtttatgtttggcgtgctgcttggctcagtcactttcgggtacttctccgaccggctgggcagacgtgttgtgctctgggcaacctcaagcagtatgtttctttttggaattgcagctgcatttgcagtcgactattatacttttatggccgcccgcttcttcctggccatggttgcaagtggatatttggtggttggatttgtatatgttatggagtttatcggaatgaagagtcggacatgggcctccgttcacctgcattcgtttttcgctgtgggaacacttttggtagccctgacaggctatctggtcagaacttggtggttataccagatgatcctttcaactgtgaccgttccgtttattctttgctgctgggtactaccagagactccattttggctcctgtccgagggcagatacgaggaggctcagaagattgttgatataatggccaagtggaatcgtgcctccagctgtaagttaagtgagctgctgtcattagatctgcagggcccagttagcaactctcccacagaggtccaaaagcataacctgtcctacctgttctacaattggagcattaccaaacggaccctaaccgtgtggctgatctggtttacaggttccttaggattctatagtttctccctgaacagcgtgaacctcgggggaaacgaatacctcaatctttttctccttggcgtggtggagatcccagcttataccttcgtttgtattgctatggacaaagtggggcgccgcaccgtgttggcttactccctgttctgtagcgctcttgcttgcggagttgtgatggtcatcccacagaaacattacattctgggcgtcgtgactgccatggtggggaaattcgcaataggcgccgcattcggcttgatttacctatatacagcagagctgtacccaacaatagttaggtctctggcggtgggatcaggtagcatggtctgcaggctggctagcatcctggcgcccttcagtgtggatctgtcctccatatggatcttcatccctcagctgtttgttggcactatggccttgctgagcggagtgctgacgcttaagctgccagaaactctgggcaaacggctggctaccacttgggaggaggctgccaagttggagtccgagaacgagtctaagtcctccaaactacttctcactacaaataattctggactcgagaagaccgaagccattacaccacgagattccgggctgggagaatag

SEQ ID NO: 227267 - DNA, 1734 bp, Artificial Sequence
  derived and/or modified sequence
atgggcagccggcacttcgagggcatctacgaccacgtgggccacttcggccgctttcaacgagtactctattttatttgtgcgtttcagaacatatcctgcggcatccactatttagcaagtgtgtttatgggcgtcaccccccaccacgtctgtaggcctccgggaaacgtaagtcaagtggtttttcacaaccacagcaactggagtctggaagacacaggtgcgctgctgtcctctggacaaaaggactacgtgacagtccagttgcagaacggcgagatctgggagctgtcaaggtgtagccgcaataagagggaaaacaccagcagtctgggatacgagtatactggctcaaagaaggagttcccatgcgtggacggctacatatacgatcaaaatacctggaagtctactgctgttactcagtggaacttagtgtgcgatagaaaatggttggctatgctgatccagcccctgtttatgttcggagtattgctgggttcagttacatttgggtacttctcggatagacttggtaggcgcgtggttctttgggcaacatcatcctccatgtttctgttcggcatagcggctgcttttgcagtggattactacacgttcatggctgcgcgttttttcctggctatggtggcctcagggtatctcgttgttggttttgtttatgtgatggagttcatcggcatgaagtctcgcacttgggctagtgtgcaccttcactcattttttgctgtggggaccttgctggtggcgctgaccggctaccttgtgcgcacgtggtggctatatcagatgattctatcaacagtcacagtgcctttcattttgtgctgctgggtactgcctgagacccctttttggctcctcagtgaggggcgatatgaggaggcccaaaagatcgtcgacatcatggccaagtggaatcgcgcaagctcatgtaagctgagtgagttgctgagtttggacttacaaggtcctgtgagcaacagtcctacggaggtccaaaagcataacctatcgtatctcttttataattggagtataaccaagcggactctcaccgtgtggctgatctggttcactggatctctgggcttttattccttctccctcaacagcgtcaatttaggcggaaatgaatacttgaatttgtttctgctgggggttgtagagatccccgcttataccttcgtgtgcattgccatggacaaggtcggtcggagaactgtgctggcttactccctgttctgctcagccttagcatgcggagtggttatggtcatcccccaaaagcactatatactgggggtggtgaccgctatggttggaaaatttgcgattggtgctgcctttgggctcatttacctttataccgcagagctgtatcctaccatcgtgcgctctttagcggtcgggtcaggttctatggtctgccgcctggcgtctattctcgcccctttttccgttgacctctcttctatatggatcttcataccacagctgtttgtaggcaccatggccctgttgtcaggagtgttgaccctgaaactgcccgaaacccttgggaaaagattggcgacaacctgggaggaggcagctaagctggaaagcgagaacgagagcaagtcatcgaaactgctgctcactaccaacaattcaggactggagaaaaccgaagctataacgccgagagattccggtctgggggagtag

SEQ ID NO: 227268 - DNA, 1632 bp, Artificial Sequence
  derived and/or modified sequence
atgcgtaccttgcacgccgtgtcacatccttatagcaacagcatgcgctttcaacgcgtgctttactttatctgtgctttccaaaatatcagctgcggcatccactatctagcaagtgtgttcatgggagtgacgcctcaccacgtgtgtcgccctccgggaaacttgcagaatggcgagatctgggagttatcacggtgcagccgaaacaaaagagagaatacgtcctccctggggtatgagtatactggttctaaaaaagaatttccatgtgtagatgggtatatctatgaccagaacacatggaaaagcactgccgtcacccagtggaaccttgtttgcgataggaaatggttagccatgctgattcagccattgttcatgttcggagtgctcttggggtctgtaacatttgggtacttctccgatcgtcttggtcgcagagtcgttttatgggccactagcagcagcatgttcctgttcggaatagcagccgcatttgctgtggattattatacatttatggccgcacgttttttcctcgctatggtggcgtccgggtaccttgtcgtgggttttgtctatgtaatggagttcatcggcatgaaatctcggacatgggcgtctgtacacctgcactcattttttgccgtgggaacactgcttgtcgcactcactggctacttggtgagaacttggtggttataccagatgattctcagtaccgtaacggtgccttttatcttatgttgttgggtgctaccggaaactccattctggctgctgtctgaggggcgatacgaagaagcccagaaaatcgtggacatcatggccaaatggaatagggcaagtagttgcaagctgagcgagctgctgtcactggatcttcaaggtccagtttcaaatagccccaccgaggtccagaagcataatcttagctatctcttctataattggtccatcacaaagaggacattgactgtgtggctaatctggttcacaggttctctgggtttttactcatttagcttgaattctgtcaacttaggcggaaacgagtatcttaacttatttctgcttggggtggtggagatacctgcttatacattcgtctgtattgccatggataaagtgggccgtcgaacggtgctggcctattctctgttctgttcagctctagcctgcggcgttgtgatggtaattccccagaagcactacatattgggtgtcgtgaccgccatggtcggtaaatttgctatcggagcagcttttggcttgatttatctttacaccgcagaactctatcccaccatagtgagatctctcgccgtgggatcgggctctatggtgtgccgcctcgcatcaatcttggctccgttctctgtggatctgagtagcatctggatttttattccccagctattcgtgggaaccatggctctcctgagcggcgtgctgaccctgaagttgcctgagacactaggaaaaagactcgccacgacgtgggaggaagcagccaaactggagagcgaaaatgaaagcaaatctagtaagctgctcctcactactaacaacagtggcctcgagaaaacagaagcgattacccctagagattctggattaggagagtag

SEQ ID NO: 227269 - DNA, 1734 bp, Artificial Sequence
  derived and/or modified sequence
atgggctcacggcactttgaagggatatacgatcatgtgggacactttggacgattccagcgggtcctgtacttcatttgtgctttccagaatatatcctgtggcatacactatcttgcttcagtattcatgggagtcacacctcatcacgtgtgccggcctccgggtaacgtctcacaggtggtgtttcataaccatagcaattggtcactggaagacaccggagcccttctcagcagtgggcaaaaagactacgtcacggtgcagctgcagaacggagagatctgggagctctcgaggtgctcaagaaataaaagagaaaatactagcagcctgggatatgagtacaccgggagcaaaaaggagttcccatgcgtcgatggatatatttacgaccagaatacctggaagtctaccgccgtgacccaatggaatctcgtctgcgacaggaagtggcttgccatgttgatccagcccctgtttatgttcggcgtgctgctcggttctgtcacgtttggctatttttccgacaggttggggagacgagttgtgttgtgggctacttcctctagcatgtttctatttggaattgctgcagcattcgccgtcgattactatacctttatggccgctcgattttttctggctatggttgcttctggttatctggtagtgggcttcgtgtacgtgatggaattcataggcatgaaatcccgcacatgggcatctgtgcacctccactcttttttcgcagtgggaacattgttggtcgcactcacaggatatctagttagaacctggtggctctatcagatgattctcagtaccgtcacggtgcctttcatcttgtgctgctgggtgctgcccgagacccccttttggttactgtccgagggccgatacgaggaagctcagaaaatcgtggacataatggccaagtggaatagagcctctagttgtaaacttagtgaattgctcagtctcgatctgcaggggccagtgagcaatagtcctaccgaagttcaaaaacacaacctatcatacctgttttataactggagcataaccaagaggacgctgaccgtctggcttatctggttcacaggatctctggggttctactccttcagcctgaactccgtcaatctgggagggaacgagtatctgaatctttttcttctgggcgtggttgagattcctgcttacacattcgtatgcattgccatggacaaagttgggaggagaaccgtcttggcatattccttgttctgcagtgcgttggcctgtggagtggtgatggtgattccacagaagcactatattctcggtgttgttacagctatggtcggcaaattcgccatcggagccgctttcggtcttatctatttgtataccgccgagctatatcccaccattgtccggtctctggcggtgggaagcgggagcatggtttgcagactggcaagtatactagcgcctttttcagtggatctatcaagcatctggatatttattccacagctgtttgtgggaactatggcgctcctcagtggcgtactgactctgaagctaccggaaactctgggaaagaggctagccaccacctgggaagaggccgctaagttagagtccgaaaacgagtcgaaatcgtctaaattactgctgaccacaaacaattcaggcttggagaagaccgaggcaatcactcccagagacagcgggttgggtgagtag

SEQ ID NO: 227270 - DNA, 1774 bp, Artificial Sequence
  derived and/or modified sequence
atgaggactctgcatgcagtttctcatccttacagtaactcaatgagattccagagagtcctctatttcatatgtgccttccagaacatctcttgtggtattcactacttggcttctgtgttcatgggagtcacccctcatcatgtctgcaggcccccaggcaatttgcagaatggtgagatctgggagctctcaaggtgtagcaggaataagagggagaacacatcgagtttgggctatgaatacactggcagtaagaaagagtttccttgtgtggatggctacatatatgaccagaacacatggaaaagcactgcggtgacccagtggaacctggtctgtgaccgaaaatggcttgcaatgctgatccagcccctatttatgtttggagtcctactgggatcggtgacttttggctacttttctgacaggctaggacgccgggtggtcttgtgggccacaagcagtagcatgtttttgtttggaatagcagcggcgtttgcagttgattattacaccttcatggctgctcgcttttttcttgccatggttgcaagtggctatcttgtggtggggtttgtctatgtgatggaattcattggcatgaagtctcggacatgggcgtctgtccatttgcattccttttttgcagttggaaccctgctggtggctttgacaggatacttggtcaggacctggtggctttaccagatgatcctctccacagtgactgtcccctttatcctgtgctgttgggtgctcccagagacacctttttggcttctctcagagggacgatatgaagaagcacaaaaaatagttgacatcatggccaagtggaacagggcaagctcctgtaaactgtcagaacttttatcactggacctacaaggtcctgttagtaatagccccactgaagttcagaagcacaacctatcatatctgttttataactggagcattacgaaaaggacacttaccgtttggctaatctggttcactggaagtttgggattctactcgttttccttgaattctgttaacttaggaggcaatgaatacttaaacctcttcctcctgggtgtagtggaaattcccgcctacaccttcgtgtgcatcgccatggacaaggtcgggaggagaacagtcctggcctactctcttttctgcagtgcactggcctgtggtgtcgttatggtgatcccccagaaacattatattttgggtgtggtgacagctatggttggaaaatttgccatcggggcagcatttggcctcatttatctttatacagctgagctgtatccaaccattgtaagatcgctggctgtgggaagcggcagcatggtgtgtcgcctggccagcatcctggcgccgttctctgtggacctcagcagcatttggatcttcataccacagttgtttgttgggactatggccctcctgagtggagtgttaacactaaagcttccagaaacccttgggaaacggctagcaactacttgggaggaggctgcaaaactggagtcagagaatgaaagcaagtcaagcaaattacttctcacaactaataatagtgggctggaaaaaacggaagcgattacccccagggattctggtcttggtgaataaatgtgccatgcctgctgtctagcacctgaaatattatttaccctaatgcctttgtattagaggaatcttattctcatctcccatatgttgtttgtatgtctttttaataaattttgtaagaaaattttaaagcaaatatgtt

SEQ ID NO: 227271 - DNA, 1987 bp, Artificial Sequence
  derived and/or modified sequence
ggggcggggcgcgctacccgcagtccccggagctcggctaactcggcgcccagtgcacggccgcaccatggggtcccgccacttcgaggggatttatgaccacgtggggcacttcggcagattccagagagtcctctatttcatatgtgccttccagaacatctcttgtggtattcactacttggcttctgtgttcatgggagtcacccctcatcatgtctgcaggcccccaggcaatgtgagtcaggttgttttccataatcactctaattggagtttggaggacaccggggccctgttgtcttcaggccagaaagattatgttacggtgcagttgcagaatggtgagatctgggagctctcaaggtgtagcaggaataagagggagaacacatcgagtttgggctatgaatacactggcagtaagaaagagtttccttgtgtggatggctacatatatgaccagaacacatggaaaagcactgcggtgacccagtggaacctggtctgtgaccgaaaatggcttgcaatgctgatccagcccctatttatgtttggagtcctactgggatcggtgacttttggctacttttctgacaggctaggacgccgggtggtcttgtgggccacaagcagtagcatgtttttgtttggaatagcagcggcgtttgcagttgattattacaccttcatggctgctcgcttttttcttgccatggttgcaagtggctatcttgtggtggggtttgtctatgtgatggaattcattggcatgaagtctcggacatgggcgtctgtccatttgcattccttttttgcagttggaaccctgctggtggctttgacaggatacttggtcaggacctggtggctttaccagatgatcctctccacagtgactgtcccctttatcctgtgctgttgggtgctcccagagacacctttttggcttctctcagagggacgatatgaagaagcacaaaaaatagttgacatcatggccaagtggaacagggcaagctcctgtaaactgtcagaacttttatcactggacctacaaggtcctgttagtaatagccccactgaagttcagaagcacaacctatcatatctgttttataactggagcattacgaaaaggacacttaccgtttggctaatctggttcactggaagtttgggattctactcgttttccttgaattctgttaacttaggaggcaatgaatacttaaacctcttcctcctgggtgtagtggaaattcccgcctacaccttcgtgtgcatcgccatggacaaggtcgggaggagaacagtcctggcctactctcttttctgcagtgcactggcctgtggtgtcgttatggtgatcccccagaaacattatattttgggtgtggtgacagctatggttggaaaatttgccatcggggcagcatttggcctcatttatctttatacagctgagctgtatccaaccattgtaagatcgctggctgtgggaagcggcagcatggtgtgtcgcctggccagcatcctggcgccgttctctgtggacctcagcagcatttggatcttcataccacagttgtttgttgggactatggccctcctgagtggagtgttaacactaaagcttccagaaacccttgggaaacggctagcaactacttgggaggaggctgcaaaactggagtcagagaatgaaagcaagtcaagcaaattacttctcacaactaataatagtgggctggaaaaaacggaagcgattacccccagggattctggtcttggtgaataaatgtgccatgcctgctgtctagcacctgaaatattatttaccctaatgcctttgtattagaggaatcttattctcatctcccatatgttgtttgtatgtctttttaataaattttgtaagaaaattttaaagcaaatatgttataaaagaaataaaaactaagatgaaaattctcagttttaaaaa

SEQ ID NO: 227272 - DNA, 1632 bp, Artificial Sequence
  derived and/or modified sequence
atgagaaccctgcacgccgtgagccacccctacagcaacagcatgagattccagagagtgctgtacttcatctgcgccttccagaacatcagctgcggcatccactacctggccagcgtgttcatgggcgtgaccccccaccacgtgtgcagaccccccggcaacctgcagaacggcgagatctgggagctgagcagatgcagcagaaacaagagagagaacaccagcagcctgggctacgagtacaccggcagcaagaaggagttcccctgcgtggacggctacatctacgaccagaacacctggaagagcaccgccgtgacccagtggaacctggtgtgcgacagaaagtggctggccatgctgatccagcccctgttcatgttcggcgtgctgctgggcagcgtgaccttcggctacttcagcgacagactgggcagaagagtggtgctgtgggccaccagcagcagcatgttcctgttcggcatcgccgccgccttcgccgtggactactacaccttcatggccgccagattcttcctggccatggtggccagcggctacctggtggtgggcttcgtgtacgtgatggagttcatcggcatgaagagcagaacctgggccagcgtgcacctgcacagcttcttcgccgtgggcaccctgctggtggccctgaccggctacctggtgagaacctggtggctgtaccagatgatcctgagcaccgtgaccgtgcccttcatcctgtgctgctgggtgctgcccgagacccccttctggctgctgagcgagggcagatacgaggaggcccagaagatcgtggacatcatggccaagtggaacagagccagcagctgcaagctgagcgagctgctgagcctggacctgcagggccccgtgagcaacagccccaccgaggtgcagaagcacaacctgagctacctgttctacaactggagcatcaccaagagaaccctgaccgtgtggctgatctggttcaccggcagcctgggcttctacagcttcagcctgaacagcgtgaacctgggcggcaacgagtacctgaacctgttcctgctgggcgtggtggagatccccgcctacaccttcgtgtgcatcgccatggacaaggtgggcagaagaaccgtgctggcctacagcctgttctgcagcgccctggcctgcggcgtggtgatggtgatcccccagaagcactacatcctgggcgtggtgaccgccatggtgggcaagttcgccatcggcgccgccttcggcctgatctacctgtacaccgccgagctgtaccccaccatcgtgagaagcctggccgtgggcagcggcagcatggtgtgcagactggccagcatcctggcccccttcagcgtggacctgagcagcatctggatcttcatcccccagctgttcgtgggcaccatggccctgctgagcggcgtgctgaccctgaagctgcccgagaccctgggcaagagactggccaccacctgggaggaggccgccaagctggagagcgagaacgagagcaagagcagcaagctgctgctgaccaccaacaacagcggcctggagaagaccgaggccatcacccccagagacagcggcctgggcgagtag

SEQ ID NO: 227273 - DNA, 1734 bp, Artificial Sequence
  derived and/or modified sequence
atgggcagcagacacttcgagggcatctacgaccacgtgggccacttcggcagattccagagagtgctgtacttcatctgcgccttccagaacatcagctgcggcatccactacctggccagcgtgttcatgggcgtgaccccccaccacgtgtgcagaccccccggcaacgtgagccaggtggtgttccacaaccacagcaactggagcctggaggacaccggcgccctgctgagcagcggccagaaggactacgtgaccgtgcagctgcagaacggcgagatctgggagctgagcagatgcagcagaaacaagagagagaacaccagcagcctgggctacgagtacaccggcagcaagaaggagttcccctgcgtggacggctacatctacgaccagaacacctggaagagcaccgccgtgacccagtggaacctggtgtgcgacagaaagtggctggccatgctgatccagcccctgttcatgttcggcgtgctgctgggcagcgtgaccttcggctacttcagcgacagactgggcagaagagtggtgctgtgggccaccagcagcagcatgttcctgttcggcatcgccgccgccttcgccgtggactactacaccttcatggccgccagattcttcctggccatggtggccagcggctacctggtggtgggcttcgtgtacgtgatggagttcatcggcatgaagagcagaacctgggccagcgtgcacctgcacagcttcttcgccgtgggcaccctgctggtggccctgaccggctacctggtgagaacctggtggctgtaccagatgatcctgagcaccgtgaccgtgcccttcatcctgtgctgctgggtgctgcccgagacccccttctggctgctgagcgagggcagatacgaggaggcccagaagatcgtggacatcatggccaagtggaacagagccagcagctgcaagctgagcgagctgctgagcctggacctgcagggccccgtgagcaacagccccaccgaggtgcagaagcacaacctgagctacctgttctacaactggagcatcaccaagagaaccctgaccgtgtggctgatctggttcaccggcagcctgggcttctacagcttcagcctgaacagcgtgaacctgggcggcaacgagtacctgaacctgttcctgctgggcgtggtggagatccccgcctacaccttcgtgtgcatcgccatggacaaggtgggcagaagaaccgtgctggcctacagcctgttctgcagcgccctggcctgcggcgtggtgatggtgatcccccagaagcactacatcctgggcgtggtgaccgccatggtgggcaagttcgccatcggcgccgccttcggcctgatctacctgtacaccgccgagctgtaccccaccatcgtgagaagcctggccgtgggcagcggcagcatggtgtgcagactggccagcatcctggcccccttcagcgtggacctgagcagcatctggatcttcatcccccagctgttcgtgggcaccatggccctgctgagcggcgtgctgaccctgaagctgcccgagaccctgggcaagagactggccaccacctgggaggaggccgccaagctggagagcgagaacgagagcaagagcagcaagctgctgctgaccaccaacaacagcggcctggagaagaccgaggccatcacccccagagacagcggcctgggcgagtag

SEQ ID NO: 227274 - protein, 788 aa, Artificial Sequence
  derived and/or modified sequence
THYLSPGLSDFYLNHSPASTCTLRRSLGSETGKCLPAHSLLPKFFPCREDVHKVDIMTFCQQKAAQSCKSETLGSRDSALLWQLLVLLCRQNGSMVGSDIAELLMQDCKKLEKYKRQPPVANLINLTDEDWPVLSSGTPNLLTGEIPPSVETPAQIVEKFTRLLYYGRKKEALEWAMKNHLWGHALFLSSKMDPQTYSWVMSGFTSTLALNDPLQTLFQLMSGRIPQAATCCGEKQWGDWRPHLAVILSNQAGDPELYQRAIVAIGDTLAGKGLVEAAHFCYLMAHVPFGHYTVKTDHLVLLGSSHSQEFLKFATTEAIQRTEIFEYCQMLGRPKSFIPSFQVYKLLYASRLADYGLVSQALHYCEAIGAAVLSQGESSHPVLLVELIKLAEKLKLSDPLVLERRSGDRDLEPDWLAQLRRQLEQKVAGDIGDPHPTRSDISGAGGTTTENTFYQDFSGCQGYSEAPGYRSALWLTPEQTCLLQPSPQQPFPLQPGSYPAGGGAGQTGTPRPFYSVPETHLPGTGSSVAVTEATGGTVWEEMLQTHLGPGENTVSQETSQPPDGQEVISKPQTPLAARPRSISESSASSAKEDEKESSDEADKNSPRNTAQRGKLGDGKEHTKSSGFGWFSWFRSKPTKNASPAGDEDSSDSPDSEQETPRASSPHQAGLGLSLTPSPESPPLPDVSAFSRGRGGGEGRGSASSGGAAAGAGVGGLSGPESVSFELCSNPGVLLPPPALKGAVPLYNPSQVPQLPTATSLNRPNRLSASLSHPAMLRINTRPRLISQD

SEQ ID NO: 227275 - protein, 1060 aa, Artificial Sequence
  derived and/or modified sequence
MELWAPQRLPQTRGKATAPSKDPDRGFRRDGHHRPVPHSWHNGERFHQWQDNRGSPQPQQEPRADHQQQPHYASRPGDWHQPVSGVDYYEGGYRNQLYSRPGYENSYQSYQSPTMREEYAYGSYYYHGHPQWLQEERVPRQRSPYIWHEDYREQKYLDEHHYENQHSPFGTNSETHFQSNSRNPCKDSPASNSGQEWPGELFPGSLLAEAQKNKPSLASESNLLQQRESGLSSSSYELSQYIRDAPERDDPPASAAWSPVQADVSSAGPKAPMKFYIPHVPVSFGPGGQLVHVGPSSPTDGQAALVELHSMEVILNDSEEQEEMRSFSGPLIREDVHKVDIMTFCQQKAAQSCKSETLGSRDSALLWQLLVLLCRQNGSMVGSDIAELLMQDCKKLEKYKRQPPVANLINLTDEDWPVLSSGTPNLLTGEIPPSVETPAQIVEKFTRLLYYGRKKEALEWAMKNHLWGHALFLSSKMDPQTYSWVMSGFTSTLALNDPLQTLFQLMSGRIPQAATCCGEKQWGDWRPHLAVILSNQAGDPELYQRAIVAIGDTLAGKGLVEAAHFCYLMAHVPFGHYTVKTDHLVLLGSSHSQEFLKFATTEAIQRTEIFEYCQMLGRPKSFIPSFQVYKLLYASRLADYGLVSQALHYCEAIGAAVLSQGESSHPVLLVELIKLAEKLKLSDPLVLERRSGDRDLEPDWLAQLRRQLEQKVAGDIGDPHPTRSDISGAGGTTTENTFYQDFSGCQGYSEAPGYRSALWLTPEQTCLLQPSPQQPFPLQPGSYPAGGGAGQTGTPRPFYSVPETHLPGTGSSVAVTEATGGTVWEEMLQTHLGPGENTVSQETSQPPDGQEVISKPQTPLAARPRSISESSASSAKEDEKESSDEADKNSPRNTAQRGKLGDGKEHTKSSGFGWFSWFRSKPTKNASPAGDEDSSDSPDSEETPRASSPHQAGLGLSLTPSPESPPLPDVSAFSRGRGGGEGRGSASSGGAAAGAGVGGLSGPESVSFELCSNPGVLLPPPALKGAVPLYNPSQVPQLPTATSLNRPNRLAQRRYPTQPC

SEQ ID NO: 227276 - protein, 745 aa, Artificial Sequence
  derived and/or modified sequence
MELWAPQRLPQTRGKATAPSKDPDRGFRRDGHHRPVPHSWHNGERFHQWQDNRGSPQPQQEPRADHQQQPHYASRPGDWHQPVSGVDYYEGGYRNQLYSRPVLSSGTPNLLTGEIPPSVETPAQIVEKFTRLLYYGRKKEALEWAMKNHLWGHALFLSSKMDPQTYSWVMSGFTSTLALNDPLQTLFQLMSGRIPQAATCCGEKQWGDWRPHLAVILSNQAGDPELYQRAIVAIGDTLAGKGLVEAAHFCYLMAHVPFGHYTVKTDHLVLLGSSHSQEFLKFATTEAIQRTEIFEYCQMLGRPKSFIPSFQVYKLLYASRLADYGLVSQALHYCEAIGAAVLSQGESSHPVLLVELIKLAEKLKLSDPLVLERRSGDRDLEPDWLAQLRRQLEQKVAGDIGDPHPTRSDISGAGGTTTENTFYQDFSGCQGYSEAPGYRSALWLTPEQTCLLQPSPQQPFPLQPGSYPAGGGAGQTGTPRPFYSVPETHLPGTGSSVAVTEATGGTVWEEMLQTHLGPGENTVSQETSQPPDGQEVISKPQTPLAARPRSISESSASSAKEDEKESSDEADKNSPRNTAQRGKLGDGKEHTKSSGFGWFSWFRSKPTKNASPAGDEDSSDSPDSEQETPRASSPHQAGLGLSLTPSPESPPLPDVSAFSRGRGGGEGRGSASSGGAAAGAGVGGLSGPESVSFELCSNPGVLLPPPALKGAVPLYNPSQVPQLPTATSLNRPNRLAQRRYPTQPC

SEQ ID NO: 227277 - DNA, 2367 bp, Artificial Sequence
  derived and/or modified sequence
acccactacctgagccccggcctgagcgacttctacctgaaccacagccccgccagcacctgcaccctgagaagaagcctgggcagcgagaccggcaagtgcctgcccgcccacagcctgctgcccaagttcttcccctgcagagaggacgtgcacaaggtggacatcatgaccttctgccagcagaaggccgcccagagctgcaagagcgagaccctgggcagcagagacagcgccctgctgtggcagctgctggtgctgctgtgcagacagaacggcagcatggtgggcagcgacatcgccgagctgctgatgcaggactgcaagaagctggagaagtacaagagacagccccccgtggccaacctgatcaacctgaccgacgaggactggcccgtgctgagcagcggcacccccaacctgctgaccggcgagatcccccccagcgtggagacccccgcccagatcgtggagaagttcaccagactgctgtactacggcagaaagaaggaggccctggagtgggccatgaagaaccacctgtggggccacgccctgttcctgagcagcaagatggacccccagacctacagctgggtgatgagcggcttcaccagcaccctggccctgaacgaccccctgcagaccctgttccagctgatgagcggcagaatcccccaggccgccacctgctgcggcgagaagcagtggggcgactggagaccccacctggccgtgatcctgagcaaccaggccggcgaccccgagctgtaccagagagccatcgtggccatcggcgacaccctggccggcaagggcctggtggaggccgcccacttctgctacctgatggcccacgtgcccttcggccactacaccgtgaagaccgaccacctggtgctgctgggcagcagccacagccaggagttcctgaagttcgccaccaccgaggccatccagagaaccgagatcttcgagtactgccagatgctgggcagacccaagagcttcatccccagcttccaggtgtacaagctgctgtacgccagcagactggccgactacggcctggtgagccaggccctgcactactgcgaggccatcggcgccgccgtgctgagccagggcgagagcagccaccccgtgctgctggtggagctgatcaagctggccgagaagctgaagctgagcgaccccctggtgctggagagaagaagcggcgacagagacctggagcccgactggctggcccagctgagaagacagctggagcagaaggtggccggcgacatcggcgacccccaccccaccagaagcgacatcagcggcgccggcggcaccaccaccgagaacaccttctaccaggacttcagcggctgccagggctacagcgaggcccccggctacagaagcgccctgtggctgacccccgagcagacctgcctgctgcagcccagcccccagcagcccttccccctgcagcccggcagctaccccgccggcggcggcgccggccagaccggcacccccagacccttctacagcgtgcccgagacccacctgcccggcaccggcagcagcgtggccgtgaccgaggccaccggcggcaccgtgtgggaggagatgctgcagacccacctgggccccggcgagaacaccgtgagccaggagaccagccagccccccgacggccaggaggtgatcagcaagccccagacccccctggccgccagacccagaagcatcagcgagagcagcgccagcagcgccaaggaggacgagaaggagagcagcgacgaggccgacaagaacagccccagaaacaccgcccagagaggcaagctgggcgacggcaaggagcacaccaagagcagcggcttcggctggttcagctggttcagaagcaagcccaccaagaacgccagccccgccggcgacgaggacagcagcgacagccccgacagcgagcaggagacccccagagccagcagcccccaccaggccggcctgggcctgagcctgacccccagccccgagagcccccccctgcccgacgtgagcgccttcagcagaggcagaggcggcggcgagggcagaggcagcgccagcagcggcggcgccgccgccggcgccggcgtgggcggcctgagcggccccgagagcgtgagcttcgagctgtgcagcaaccccggcgtgctgctgcccccccccgccctgaagggcgccgtgcccctgtacaaccccagccaggtgccccagctgcccaccgccaccagcctgaacagacccaacagactgagcgccagcctgagccaccccgccatgctgagaatcaacaccagacccagactgatcagccaggactag

SEQ ID NO: 227278 - DNA, 3183 bp, Artificial Sequence
  derived and/or modified sequence
atggagctgtgggccccccagagactgccccagaccagaggcaaggccaccgcccccagcaaggaccccgacagaggcttcagaagagacggccaccacagacccgtgccccacagctggcacaacggcgagagattccaccagtggcaggacaacagaggcagcccccagccccagcaggagcccagagccgaccaccagcagcagccccactacgccagcagacccggcgactggcaccagcccgtgagcggcgtggactactacgagggcggctacagaaaccagctgtacagcagacccggctacgagaacagctaccagagctaccagagccccaccatgagagaggagtacgcctacggcagctactactaccacggccacccccagtggctgcaggaggagagagtgcccagacagagaagcccctacatctggcacgaggactacagagagcagaagtacctggacgagcaccactacgagaaccagcacagccccttcggcaccaacagcgagacccacttccagagcaacagcagaaacccctgcaaggacagccccgccagcaacagcggccaggagtggcccggcgagctgttccccggcagcctgctggccgaggcccagaagaacaagcccagcctggccagcgagagcaacctgctgcagcagagagagagcggcctgagcagcagcagctacgagctgagccagtacatcagagacgcccccgagagagacgacccccccgccagcgccgcctggagccccgtgcaggccgacgtgagcagcgccggccccaaggcccccatgaagttctacatcccccacgtgcccgtgagcttcggccccggcggccagctggtgcacgtgggccccagcagccccaccgacggccaggccgccctggtggagctgcacagcatggaggtgatcctgaacgacagcgaggagcaggaggagatgagaagcttcagcggccccctgatcagagaggacgtgcacaaggtggacatcatgaccttctgccagcagaaggccgcccagagctgcaagagcgagaccctgggcagcagagacagcgccctgctgtggcagctgctggtgctgctgtgcagacagaacggcagcatggtgggcagcgacatcgccgagctgctgatgcaggactgcaagaagctggagaagtacaagagacagccccccgtggccaacctgatcaacctgaccgacgaggactggcccgtgctgagcagcggcacccccaacctgctgaccggcgagatcccccccagcgtggagacccccgcccagatcgtggagaagttcaccagactgctgtactacggcagaaagaaggaggccctggagtgggccatgaagaaccacctgtggggccacgccctgttcctgagcagcaagatggacccccagacctacagctgggtgatgagcggcttcaccagcaccctggccctgaacgaccccctgcagaccctgttccagctgatgagcggcagaatcccccaggccgccacctgctgcggcgagaagcagtggggcgactggagaccccacctggccgtgatcctgagcaaccaggccggcgaccccgagctgtaccagagagccatcgtggccatcggcgacaccctggccggcaagggcctggtggaggccgcccacttctgctacctgatggcccacgtgcccttcggccactacaccgtgaagaccgaccacctggtgctgctgggcagcagccacagccaggagttcctgaagttcgccaccaccgaggccatccagagaaccgagatcttcgagtactgccagatgctgggcagacccaagagcttcatccccagcttccaggtgtacaagctgctgtacgccagcagactggccgactacggcctggtgagccaggccctgcactactgcgaggccatcggcgccgccgtgctgagccagggcgagagcagccaccccgtgctgctggtggagctgatcaagctggccgagaagctgaagctgagcgaccccctggtgctggagagaagaagcggcgacagagacctggagcccgactggctggcccagctgagaagacagctggagcagaaggtggccggcgacatcggcgacccccaccccaccagaagcgacatcagcggcgccggcggcaccaccaccgagaacaccttctaccaggacttcagcggctgccagggctacagcgaggcccccggctacagaagcgccctgtggctgacccccgagcagacctgcctgctgcagcccagcccccagcagcccttccccctgcagcccggcagctaccccgccggcggcggcgccggccagaccggcacccccagacccttctacagcgtgcccgagacccacctgcccggcaccggcagcagcgtggccgtgaccgaggccaccggcggcaccgtgtgggaggagatgctgcagacccacctgggccccggcgagaacaccgtgagccaggagaccagccagccccccgacggccaggaggtgatcagcaagccccagacccccctggccgccagacccagaagcatcagcgagagcagcgccagcagcgccaaggaggacgagaaggagagcagcgacgaggccgacaagaacagccccagaaacaccgcccagagaggcaagctgggcgacggcaaggagcacaccaagagcagcggcttcggctggttcagctggttcagaagcaagcccaccaagaacgccagccccgccggcgacgaggacagcagcgacagccccgacagcgaggagacccccagagccagcagcccccaccaggccggcctgggcctgagcctgacccccagccccgagagcccccccctgcccgacgtgagcgccttcagcagaggcagaggcggcggcgagggcagaggcagcgccagcagcggcggcgccgccgccggcgccggcgtgggcggcctgagcggccccgagagcgtgagcttcgagctgtgcagcaaccccggcgtgctgctgcccccccccgccctgaagggcgccgtgcccctgtacaaccccagccaggtgccccagctgcccaccgccaccagcctgaacagacccaacagactggcccagagaagataccccacccagccctgctag

SEQ ID NO: 227279 - DNA, 2238 bp, Artificial Sequence
  derived and/or modified sequence
atggagctgtgggccccccagagactgccccagaccagaggcaaggccaccgcccccagcaaggaccccgacagaggcttcagaagagacggccaccacagacccgtgccccacagctggcacaacggcgagagattccaccagtggcaggacaacagaggcagcccccagccccagcaggagcccagagccgaccaccagcagcagccccactacgccagcagacccggcgactggcaccagcccgtgagcggcgtggactactacgagggcggctacagaaaccagctgtacagcagacccgtgctgagcagcggcacccccaacctgctgaccggcgagatcccccccagcgtggagacccccgcccagatcgtggagaagttcaccagactgctgtactacggcagaaagaaggaggccctggagtgggccatgaagaaccacctgtggggccacgccctgttcctgagcagcaagatggacccccagacctacagctgggtgatgagcggcttcaccagcaccctggccctgaacgaccccctgcagaccctgttccagctgatgagcggcagaatcccccaggccgccacctgctgcggcgagaagcagtggggcgactggagaccccacctggccgtgatcctgagcaaccaggccggcgaccccgagctgtaccagagagccatcgtggccatcggcgacaccctggccggcaagggcctggtggaggccgcccacttctgctacctgatggcccacgtgcccttcggccactacaccgtgaagaccgaccacctggtgctgctgggcagcagccacagccaggagttcctgaagttcgccaccaccgaggccatccagagaaccgagatcttcgagtactgccagatgctgggcagacccaagagcttcatccccagcttccaggtgtacaagctgctgtacgccagcagactggccgactacggcctggtgagccaggccctgcactactgcgaggccatcggcgccgccgtgctgagccagggcgagagcagccaccccgtgctgctggtggagctgatcaagctggccgagaagctgaagctgagcgaccccctggtgctggagagaagaagcggcgacagagacctggagcccgactggctggcccagctgagaagacagctggagcagaaggtggccggcgacatcggcgacccccaccccaccagaagcgacatcagcggcgccggcggcaccaccaccgagaacaccttctaccaggacttcagcggctgccagggctacagcgaggcccccggctacagaagcgccctgtggctgacccccgagcagacctgcctgctgcagcccagcccccagcagcccttccccctgcagcccggcagctaccccgccggcggcggcgccggccagaccggcacccccagacccttctacagcgtgcccgagacccacctgcccggcaccggcagcagcgtggccgtgaccgaggccaccggcggcaccgtgtgggaggagatgctgcagacccacctgggccccggcgagaacaccgtgagccaggagaccagccagccccccgacggccaggaggtgatcagcaagccccagacccccctggccgccagacccagaagcatcagcgagagcagcgccagcagcgccaaggaggacgagaaggagagcagcgacgaggccgacaagaacagccccagaaacaccgcccagagaggcaagctgggcgacggcaaggagcacaccaagagcagcggcttcggctggttcagctggttcagaagcaagcccaccaagaacgccagccccgccggcgacgaggacagcagcgacagccccgacagcgagcaggagacccccagagccagcagcccccaccaggccggcctgggcctgagcctgacccccagccccgagagcccccccctgcccgacgtgagcgccttcagcagaggcagaggcggcggcgagggcagaggcagcgccagcagcggcggcgccgccgccggcgccggcgtgggcggcctgagcggccccgagagcgtgagcttcgagctgtgcagcaaccccggcgtgctgctgcccccccccgccctgaagggcgccgtgcccctgtacaaccccagccaggtgccccagctgcccaccgccaccagcctgaacagacccaacagactggcccagagaagataccccacccagccctgctag

SEQ ID NO: 227280 - DNA, 2367 bp, Artificial Sequence
  derived and/or modified sequence
acccactacctgtcccccgggctgtcagacttttacttgaatcattcgcccgcctcgacttgcaccctcaggagatctctgggatctgagaccggtaaatgcctgccggctcactccctgctgcccaaatttttcccttgccgggaggatgttcataaagtggatatcatgaccttttgccaacaaaaggccgctcaatcctgtaaatctgaaaccctgggctcaagagacagcgcactgttatggcagctgctggtcctgttgtgccgccagaatggatccatggtgggtagtgacatcgcggagttgctgatgcaggactgcaagaaactcgagaagtacaagagacagccaccagtggccaacctgattaacctcaccgacgaagattggcctgtcctctcatccggcactccaaacctcctaacgggagaaattcccccttccgtggaaacacctgcccagatcgtcgagaagttcacacgcctgctgtactatggaagaaaaaaggaggccctggaatgggctatgaaaaatcacctctggggacatgctctgttcctgtccagcaagatggatcctcagacctattcctgggttatgtccgggttcaccagcactttggctctcaatgatccattgcaaactttatttcagttgatgtccggccggattccacaagcagccacttgttgcggggaaaagcagtggggagactggcgtcctcatcttgccgtcatactgtcaaaccaggctggcgacccggaactctatcagcgcgcaatcgtggcgattggcgacaccctggccggcaaaggattagtcgaggccgcgcatttttgttaccttatggctcacgtcccattcgggcactatacggttaaaaccgatcatctcgtgttgcttggcagtagtcacagtcaggagtttttgaaattcgcgaccactgaggccatccagcggacggaaatcttcgaatactgtcagatgctgggccgccctaaaagttttattccaagtttccaggtctacaagcttctgtatgcatcgcggttggccgactatggcttagtgtctcaagccctccactactgcgaagctattggggccgccgttctctcccagggggagtcatcacacccagtcctgttggtggaactgattaaactcgcggaaaagctgaagctgagcgatcctctggtgctggaaaggcggagcggagatcgggatcttgagcctgactggctggcacaattaaggagacagttggaacagaaagtggccggagacattggtgacccccacccaacccggagcgacataagcggagccggtggtaccaccaccgagaacactttctaccaggacttctcagggtgccaaggatatagtgaggcccccgggtaccggtctgcactctggttaaccccggaacagacttgcctactgcagccatcaccccagcagccgtttcctctgcagcccgggtcgtaccctgctggtgggggggctgggcaaactggcacgccgcgccccttttacagcgtcccagaaactcatctccctgggaccggcagcagcgtcgccgttacagaggcaacaggcgggacggtgtgggaagagatgttacagacccacttaggcccgggcgaaaataccgtgtctcaagaaaccagccagcctcccgacggccaggaggttatatctaaacctcagacgccactggcggctagaccaaggtccatctcagagtcgtccgcatcctccgctaaagaggacgaaaaggaatctagtgacgaggctgataaaaacagtccccggaacaccgcccagagaggcaagttgggcgatggtaaagaacacaccaaaagttccggctttgggtggtttagctggttccggagcaagccaactaaaaacgcatccccggctggagatgaagacagctctgattcacctgattccgagcaggagaccccgcgcgcctcgagtccacatcaggcaggcctcggtctgtcgctgacccccagcccggagtcgcccccccttcccgatgtctcagccttttcaaggggcaggggcggaggggagggccggggatcagcctcatcaggcggggctgccgcaggcgcaggggttggaggcctgtcaggacccgaatcagtttcctttgaactttgcagtaacccaggggtgcttctacctcctccggccctgaagggtgccgtgccattatacaaccctagccaggtccctcagttgcccacagccacgtctcttaatcgcccgaatcgtctgtcagcgtcactgtcccaccccgccatgctccgcataaatacaagaccccgattgatctcccaagactag

SEQ ID NO: 227281 - DNA, 3183 bp, Artificial Sequence
  derived and/or modified sequence
atggaactgtgggcaccccagcggcttccacaaactaggggaaaagcaactgctcccagtaaagatcccgatcgcggcttcaggcgggacggtcatcacagaccagtcccccattcatggcataatggcgagcgctttcatcagtggcaggataataggggtagtcctcagcctcaacaggagcccagagccgatcaccagcagcagcctcactatgcatcacggcctggcgattggcaccagccagtctcaggagtggattactacgagggtggttaccggaaccagctctacagccgccccggttacgagaattcctatcagagctaccagtctcctaccatgcgggaagagtacgcgtatggaagttattactaccatggacacccacaatggctccaggaggagcgcgtgcctcgacaacgcagcccgtacatctggcatgaggactaccgggaacaaaaatatctggacgaacaccattacgaaaatcaacactccccgttcggcaccaactccgagacacacttccagtcaaatagtcgcaacccttgcaaggatagtcctgcctctaattcgggacaggagtggcccggcgagctgttccccggaagtttgctggcggaggcacaaaagaataaaccttctctggcatcagagtcaaatctgctgcaacagagagaatcgggcttatctagttcatcatacgagctgagtcaatacatcagagatgcaccagaaagagacgacccaccagcctctgcagcatggtcaccggtacaggccgatgtatctagcgccggaccaaaggcgcctatgaaattctatatcccccatgtgccagtgagtttcggaccaggagggcagcttgtgcatgttggtccctcttcacctacggatggccaggctgctttggtggagctgcatagtatggaggtaatcctcaacgatagcgaagaacaggaggagatgaggtctttctccggtccacttattagggaggacgtgcacaaggtcgacatcatgaccttctgccaacagaaagccgcacaatcctgtaagtcagaaaccctagggagtcgtgactccgccctcctgtggcagctactagttctgctctgtcgccagaacggctccatggtgggtagcgacatagctgaactcttgatgcaggactgcaagaaactggagaagtacaagagacaaccaccagtagcgaatctgattaaccttaccgacgaagattggccggtgttgagtagcggcaccccaaacctgctcacaggagagatccctcctagcgtcgagacaccagcccagatagttgagaaattcactaggctgttgtattacggacgaaagaaagaggcactagaatgggcaatgaagaatcacctgtggggtcatgcacttttcctgagtagtaaaatggatccccagacgtattcatgggttatgtccggcttcacaagtacgttggcactcaacgaccccctacagaccttattccagctgatgagtggccgcatcccgcaggccgcaacttgctgcggcgagaagcagtggggagattggaggccccacttagctgtgatcctttccaatcaggccggcgatccagaactttaccagcgggcgatagtagctatcggcgatactctcgcagggaagggattggtggaggcggcccacttttgctacctcatggctcacgtgccctttgggcattatactgttaaaaccgaccacttggtgctgctgggatcatcacactcccaggagtttttgaagttcgccacaacagaagcaatccaacggacggagattttcgagtactgccagatgctcggtaggcccaaatcattcatcccctccttccaggtttataagctgctgtatgccagccggctggctgactacggacttgtcagccaggctctccactattgtgaagccattggagctgccgtcctgagtcaaggcgagtcctcgcaccctgtgctgctcgtggagcttatcaagttggccgagaagttgaaactcagtgatcctctagtcctggagagaaggtccggggatcgggatcttgagccggactggcttgcccaacttcggcgccagttggaacagaaggtggccggcgatatcggcgatccacaccctactcgatctgacatctcaggagccgggggcacaacaacggaaaatacattctatcaggacttttctggttgtcagggttactctgaggctcctggatatagatctgccctctggttaacccctgaacagacgtgccttcttcagccttccccccagcagccgtttcctctgcagcctgggagctaccccgccggcggcggagcagggcagactggcacaccgcggcctttttactcagtcccggagacccatcttccaggcaccgggtcctctgtcgctgtaacagaagccacaggtggcaccgtgtgggaggagatgctacaaacacacctcggccccggggagaatacagtgtctcaggaaacgtcacagccccctgacgggcaggaagtgattagcaaaccgcagaccccactcgcagcgcgacccaggtcgatctcagaaagtagtgccagttcagcaaaggaagatgaaaaggagtcatccgatgaggctgataaaaactcaccacgtaatacggctcagcggggcaaactgggggacgggaaagagcatacaaaatcttccggctttggctggttctcttggtttagatcaaagcctacgaaaaacgcctctcccgccggggacgaggattctagtgacagtcccgacagcgaagaaaccccccgggctagctctcctcatcaggccggcctcggcctgtccctgaccccaagtccagagtcccccccactgccagacgtgtcagcttttagccgggggagaggcggtggagaagggcgaggctccgcatcctccggtggtgccgccgccggggctggcgtcgggggtttgagcgggcccgagtccgtgtcattcgaactatgcagcaaccccggcgtgctgctgccaccccccgcgctcaagggcgctgttcccctgtataacccatcccaggtcccgcagctgcccactgccacaagtctgaacagaccaaacagattagcacagcgaaggtatcctacccagccctgttag

SEQ ID NO: 227282 - DNA, 2238 bp, Artificial Sequence
  derived and/or modified sequence
atggagctgtgggcaccccagcggctgccacagactaggggcaaggccacagcaccttccaaggatccggaccggggcttccgtagggatggccaccaccgcccagtaccccacagttggcacaacggtgaacgatttcaccagtggcaagacaatcgcggatcaccccagccgcaacaggaaccccgggcagaccaccagcaacagccccactatgcgtctagaccaggggactggcaccagcccgtgtccggcgtggactattacgagggaggttaccgcaatcagttgtacagcaggccagtactgagctctgggacccctaacctgctgaccggagagatcccccccagtgtagagacgccagcccaaatcgtggaaaagttcacaaggctcctctactatggtcgcaagaaagaagcgctcgagtgggctatgaagaaccatctatggggccacgctctgttcctatcctctaagatggacccacagacatacagctgggtgatgtcaggattcaccagcacattggccttgaacgaccccctccagactctcttccagttgatgtcgggccggatcccgcaggctgctacatgttgcggagaaaagcagtggggcgactggcgcccccacctcgcagtgatcctgagcaatcaagcaggcgatcctgagctctatcagcgtgctatagttgccatcggcgacaccctagctgggaaagggctcgtggaggcagctcacttttgctatctcatggcccacgtacccttcgggcactacactgtaaagaccgaccatctggtcctattgggatcttcgcatagccaagaattccttaaattcgccacaactgaagccatccagcgcacagagattttcgagtactgccagatgcttggtaggccaaaaagtttcataccttcctttcaggtgtacaaattgctctacgcatccagactcgctgactacggccttgtcagccaggcacttcattattgcgaggccattggggctgcagtgctgagtcagggagaatctagccaccctgtgctcctcgtggaactgatcaagctcgccgaaaagcttaaattgtcggatcctctggtcctggagcgacgcagtggagatagagatctggaacctgactggctcgcccagttaagaagacaacttgagcaaaaggtagccggagacatcggggatccccaccccacgcgttccgatatcagcggcgcaggagggacaaccaccgaaaacactttctaccaggatttttctggttgtcagggctactctgaagccccgggttatagaagcgccctctggcttacaccagagcagacttgcttactacaaccttctcctcagcagccattccccctgcagccaggaagctaccccgctgggggtggagcaggccaaacgggaacccctaggccattttactctgtgcctgagacacacctgcctggcaccggaagttctgtcgcggtgaccgaagctactggaggaactgtttgggaagagatgcttcagactcaccttggaccaggggagaatacagttagtcaggaaacgtcgcaaccgcccgacggacaggaggttatttcaaagccacagaccccattggctgcacgaccacgtagtataagcgagtcttcggcatcatctgcgaaggaggacgagaaggaatcctccgatgaagccgataaaaattcaccaagaaatactgcccaacgcgggaaacttggcgacggcaaggaacatacaaagagcagcggattcggatggttcagctggttcagaagtaagcccacaaagaacgcttctccagcgggggatgaagattcatcagacagcccagatagcgaacaggaaactccacgcgcttcaagtccacaccaggccggcctgggcctttcactgaccccttccccggagtctcccccactgccagatgtctccgccttttctagggggcgggggggcggagaggggagaggctcggctagctcaggcggcgccgccgcaggggccggggtgggtggactgagcggacccgagagtgtgagttttgagttgtgtagtaatccaggtgtgctgcttcccccgcccgctctgaagggggcagtcccattgtacaatccctcacaggtccctcagctgccaacggctacgagcctgaacagacctaatcgtcttgcccaacgccgataccccactcagccgtgctag

SEQ ID NO: 227283 - DNA, 2367 bp, Artificial Sequence
  derived and/or modified sequence
acccactacctgagccctggcctgagtgacttctacctgaaccacagccctgccagcacctgcaccctgcggcgcagcctgggcagcgagaccgggaagtgcctgcctgcccacagcctgctgcccaagttcttcccctgcagagaagatgtgcacaaggtggacatcatgaccttctgccagcagaaggccgcccagagctgcaagtctgagaccctgggcagccgggacagcgccctgctgtggcagctgctggtgctgctgtgccggcagaatggctccatggtgggcagtgacattgctgagctgctgatgcaggactgcaagaagctggagaagtacaagaggcagccccctgtggccaacctgatcaacctgacagatgaggactggcctgtgctgagcagcggcacccccaacctgctgactggagagatccccccatctgtggagaccccagcccagatcgtggagaagttcacccggctgctgtactacggcaggaagaaggaggccctggagtgggccatgaagaaccacctgtggggccacgccctcttcctgagcagcaagatggacccccagacctacagctgggtgatgagcggcttcaccagcaccctggccctgaatgaccccctgcagaccctcttccagctgatgagcggccgcatcccccaggccgccacctgctgcggggagaagcagtggggagactggaggccccacctggccgtcatcctgagcaaccaggccggggaccctgagctgtaccagagggccatcgtggccatcggggacaccctggccggcaagggcctggtggaggccgcccacttctgctacctgatggcccacgtgcccttcggccactacacagtgaagacagaccacctggtgctgctgggcagcagccacagccaggagttcctgaagtttgccaccacagaggccatccagaggacagagatctttgagtactgccagatgctgggccggcccaagagcttcatccccagcttccaggtgtacaagctgctgtatgccagccggctggccgactatggcctggtgtcccaggccctgcactactgtgaggccatcggggctgctgtgctgagccagggcgagagcagccaccctgtgctgctggtggagctgatcaagctggccgagaagctgaagctgagtgaccccctggtgctggagcggcgcagcggggaccgggacctggagccagactggctggcccagctgcggcggcagctggagcagaaggtggccggggacattggagacccccaccccaccaggagtgacatcagcggggccggcggcaccaccacagagaacaccttctaccaggacttcagcggctgccagggctacagcgaggcccctggctacagaagtgccctgtggctgaccccagagcagacctgcctgctgcagcccagcccccagcagcccttccccctgcagcccggcagctacccagctgggggcggggccggccagacaggcaccccccggcccttctacagcgtgcctgagacccacctgcccggcaccggcagctctgtggccgtgacagaggccaccggcggcaccgtgtgggaggagatgctgcagacccacctgggccctggagaaaatacagtgtcccaggagaccagccagcccccagatggccaggaggtgatcagcaagccccagacccccctggccgcccggcccaggagcatcagcgagagcagcgccagcagcgccaaggaggatgagaaggagagcagtgatgaagctgacaagaacagccccaggaacacagcccagaggggcaagctgggagatggcaaggagcacaccaagagcagcggcttcggctggttctcctggttccgcagcaagcccaccaagaatgccagccctgctggagatgaggacagcagtgacagcccagattctgagcaggagaccccccgggccagcagcccccaccaggccggcctgggcctgagcctgacccccagccctgagagcccccccctgcctgatgtgtctgccttcagccggggccggggcggcggggagggccggggcagcgccagcagcggcggcgctgctgctggagctggggtgggcggcctgagcggccctgagagcgtgtcctttgagctgtgcagcaaccctggggtgctgctgcccccaccagccctgaagggagctgtgcccctgtacaaccccagccaggtgccccagctgcccacagccaccagcctgaaccggcccaaccggctgagcgccagcctgagccacccagccatgctgcgcatcaacacccggcccaggctcatcagccaggactag

SEQ ID NO: 227284 - DNA, 3183 bp, Artificial Sequence
  derived and/or modified sequence
atggagctgtgggccccccagaggctgccccagacccggggcaaggccacagcccccagcaaggaccctgaccggggcttcagaagagatggccaccacaggcctgtgccccacagctggcacaacggggagcgcttccaccagtggcaggacaacagaggcagcccccagccccagcaggagcccagggctgaccaccagcagcagccccactacgccagcaggcctggggactggcaccagcctgtgtctggagtggactactatgaaggaggctacagaaaccagctgtacagcaggcctggctatgagaacagctaccagagctaccagagccccaccatgagggaggagtatgcctacggcagctactactaccacggccacccccagtggctgcaggaggagcgggtgccccggcagaggagcccctacatctggcatgaggactaccgggagcagaagtacctggatgagcaccactatgagaaccagcacagccccttcggcaccaacagcgagacccacttccagagcaacagcaggaacccctgcaaggacagccctgccagcaacagcggccaggagtggccaggagagctgtttcctggcagcctgctggccgaggcccagaagaacaagcccagcctggccagcgagagcaacctgctgcagcagcgggagagcggcctgagcagcagcagctatgagctgagccagtacatcagagatgcccctgagagagatgatcctccagccagcgctgcctggagccctgtgcaggctgatgtgagcagcgctggccccaaggcccccatgaagttctacatcccccacgtgcctgtgtcctttggacctgggggccagctggtgcacgtgggccccagcagccccacagatggccaggccgccctggtggagctgcacagcatggaggtgatcctgaatgacagcgaggagcaggaggagatgaggagcttcagcggccccctcatccgggaggatgtgcacaaggtggacatcatgaccttctgccagcagaaggccgcccagagctgcaagtctgagaccctgggcagccgggacagcgccctgctgtggcagctgctggtgctgctgtgccggcagaatggctccatggtgggcagtgacattgctgagctgctgatgcaggactgcaagaagctggagaagtacaagaggcagccccctgtggccaacctgatcaacctgacagatgaggactggcctgtgctgagcagcggcacccccaacctgctgaccggggagatcccccccagcgtggagaccccagcccagatcgtggagaagttcacccggctgctgtactacggcaggaagaaggaggccctggagtgggccatgaagaaccacctgtggggccacgccctcttcctgagcagcaagatggacccccagacctacagctgggtgatgagcggcttcaccagcaccctggccctgaatgaccccctgcagaccctcttccagctgatgagcggccgcatcccccaggccgccacctgctgcggggagaagcagtggggagactggaggccccacctggccgtcatcctgagcaaccaggccggggaccctgagctgtaccagagggccatcgtggccatcggggacaccctggccggcaagggcctggtggaggccgcccacttctgctacctgatggcccacgtgcccttcggccactacacagtgaagacagaccacctggtgctgctgggcagcagccacagccaggagttcctgaagtttgccaccacagaggccatccagaggacagagatctttgagtactgccagatgctgggccggcccaagagcttcatccccagcttccaggtgtacaagctgctgtatgccagccggctggccgactatggcctggtgtcccaggccctgcactactgtgaggccatcggggctgctgtgctgagccagggcgagagcagccaccctgtgctgctggtggagctgatcaagctggccgagaagctgaagctgagtgaccccctggtgctggagaggagaagtggggaccgggacctggagccagactggctggcccagctgcggcggcagctggagcagaaggtggccggggacatcggggacccccaccccaccaggagtgacatctctggagctgggggcaccaccacagagaacaccttctaccaggacttcagcggctgccagggctacagcgaggcccctggctaccgcagcgccctgtggctgaccccagagcagacctgcctgctgcagcccagcccccagcagcccttccccctgcagcccggcagctacccagctgggggcggggccggccagacaggcaccccccggcccttctacagcgtgcctgagacccacctgcccggcaccggcagctctgtggccgtgacagaggccactggaggcaccgtgtgggaggagatgctgcagacccacctgggccctggagagaacacagtgtcccaggagaccagccagcccccagatggccaggaggtgatcagcaagccccagacccccctggccgcccggcccaggagcatcagcgagagcagcgccagcagcgccaaggaggatgagaaggagagcagtgatgaggccgacaagaacagccccaggaacacagcccagaggggcaagctgggagatggcaaggagcacaccaagagcagcggcttcggctggttctcctggttccgcagcaagcccaccaagaatgccagccctgctggagatgaggacagcagtgacagcccagacagcgaggagaccccccgggccagcagcccccaccaggccggcctgggcctgagcctgacccccagccctgagagcccccccctgcctgatgtgtctgccttcagccggggccggggcggcggggagggccggggcagcgccagcagcggcggcgctgctgctggagctggggtgggcggcctgagcggccctgagagcgtgtcctttgagctgtgcagcaaccctggggtgctgctgcccccaccagccctgaagggagctgtgcccctgtacaaccccagccaggtgccccagctgcccacagccaccagcctgaaccggcccaaccggctggcccagaggcgctaccccacccagccctgctag

SEQ ID NO: 227285 - DNA, 2238 bp, Artificial Sequence
  derived and/or modified sequence
atggagctgtgggccccccagaggctgccccagacccggggcaaggccacagcccccagcaaggaccctgaccggggcttcagaagagatggccaccacaggcctgtgccccacagctggcacaacggggagcgcttccaccagtggcaggacaacagaggcagcccccagccccagcaggagcccagggctgaccaccagcagcagccccactacgccagcaggcctggggactggcaccagcctgtgtctggagtggactactatgaaggaggctacagaaaccagctgtacagcaggcctgtgctgagcagcggcacccccaacctgctgaccggggagatcccccccagcgtggagaccccagcccagatcgtggagaagttcacccggctgctgtactacggcaggaagaaggaggccctggagtgggccatgaagaaccacctgtggggccacgccctcttcctgagcagcaagatggacccccagacctacagctgggtgatgagcggcttcaccagcaccctggccctgaatgaccccctgcagaccctcttccagctgatgagcggccgcatcccccaggccgccacctgctgcggggagaagcagtggggagactggaggccccacctggccgtcatcctgagcaaccaggccggggaccctgagctgtaccagagggccatcgtggccatcggggacaccctggccggcaagggcctggtggaggccgcccacttctgctacctgatggcccacgtgcccttcggccactacacagtgaagacagaccacctggtgctgctgggcagcagccacagccaggagttcctgaagtttgccaccacagaggccatccagaggacagagatctttgagtactgccagatgctgggccggcccaagagcttcatccccagcttccaggtgtacaagctgctgtatgccagccggctggccgactatggcctggtgtcccaggccctgcactactgtgaggccatcggggctgctgtgctgagccagggcgagagcagccaccctgtgctgctggtggagctgatcaagctggccgagaagctgaagctgagtgaccccctggtgctggagaggagaagtggggaccgggacctggagccagactggctggcccagctgcggcggcagctggagcagaaggtggccggggacatcggggacccccaccccaccaggagtgacatctctggagctgggggcaccaccacagagaacaccttctaccaggacttcagcggctgccagggctacagcgaggcccctggctaccgcagcgccctgtggctgaccccagagcagacctgcctgctgcagcccagcccccagcagcccttccccctgcagcccggcagctacccagctgggggcggggccggccagacaggcaccccccggcccttctacagcgtgcctgagacccacctgcccggcaccggcagctctgtggccgtgacagaggccactggaggcaccgtgtgggaggagatgctgcagacccacctgggccctggagagaacacagtgtcccaggagaccagccagcccccagatggccaggaggtgatcagcaagccccagacccccctggccgcccggcccaggagcatcagcgagagcagcgccagcagcgccaaggaggatgagaaggagagcagtgatgaggccgacaagaacagccccaggaacacagcccagaggggcaagctgggagatggcaaggagcacaccaagagcagcggcttcggctggttctcctggttccgcagcaagcccaccaagaatgccagccctgctggagatgaggacagcagtgacagcccagacagcgagcaggagaccccccgggccagcagcccccaccaggccggcctgggcctgagcctgacccccagccctgagagcccccccctgcctgatgtgtctgccttcagccggggccggggcggcggggagggccggggcagcgccagcagtggaggagctgctgctggggccggcgtgggcggcctgagcggccctgagagcgtgtcctttgagctgtgcagcaaccctggggtgctgctgcccccaccagccctgaagggagctgtgcccctgtacaaccccagccaggtgccccagctgcccacagccaccagcctgaaccggcccaaccggctggcccagaggcgctaccccacccagccctgctag

SEQ ID NO: 227286 - DNA, 2367 bp, Artificial Sequence
  derived and/or modified sequence
acccactacctgagccccggcctgagcgacttctacctgaaccacagccctgctagtacatgcactctaaggcggtctctggggagtgagactggcaagtgcctgcctgcgcactcccttttgcccaagttcttcccctgcagagaggatgtacataaggttgatatcatgaccttttgtcaacagaaggcagcccagtcctgtaagagtgagactctcggctcccgtgacagcgccctgctgtggcagttactcgtgctgctctgccgacaaaacggctccatggtgggttctgatatcgcggagttactgatgcaggactgtaagaaactcgagaaatataagcggcagcccccagttgccaatttgataaatctgaccgatgaagattggcccgttctgtcctccggcactccgaacctgctgactggtgagatccccccctcggtggagacccccgcacagatcgtagaaaagttcaccagactgctctattacggaaggaaaaaagaggccctcgaatgggctatgaagaatcatctctggggtcatgccctgttcttgtcaagcaaaatggaccctcagacttacagctgggtgatgtctgggttcacttcaaccctcgcactgaacgaccccctgcagacactgttccagcttatgtctgggcgtattccgcaggcagctacctgttgcggcgagaagcaatggggagactggaggccacacctagctgtgattctatcgaaccaggcgggagatccggaattataccagagagcgatcgtggcgataggggatacgctagcaggcaaaggtttagttgaggccgcccacttctgctatctcatggcgcacgtgccctttggtcattataccgttaagaccgatcatctcgtgctcctgggtagttcacattctcaggagtttctcaagttcgcgacaactgaggcaattcagaggaccgaaatctttgaatattgccaaatgctggggagacctaagtcttttatcccttccttccaggtctataaacttttgtacgcatctcgccttgccgactacggcctcgtgtcccaagcactccactattgcgaggcaataggcgccgcagtgctttctcaaggcgagtcttcgcaccctgtcctcctagtggagcttatcaaactggcggagaaattgaaacttagtgatccactggtcctcgagagaaggagtggggaccgagacctggagccagactggctcgctcagcttcgccgacagctggaacagaaggtggcaggtgatattggcgatccacaccccacgcgctctgatatctcaggcgctggcggaaccactaccgagaatacattctatcaagatttttccggctgccagggatatagcgaagccccaggctatagatctgctctctggctgacccctgagcagacatgtttactgcagccttcgccccagcaacccttccccctgcagcctggtagctacccagcaggcggcggagcgggacagactggcactccccggcctttttattccgttcctgagactcacttgcccggaactggatcctccgtcgcagtcactgaggcaactggaggaactgtttgggaagagatgctgcaaacccatctggggccgggtgagaacaccgtgtcccaggagacttctcagccgcctgatggccaggaggttatttctaagccgcagactccccttgctgctcgcccgcgatctatcagtgagtccagtgcaagcagcgccaaggaggatgaaaaagagagtagtgacgaagctgacaagaactcaccacggaatacagcccagagggggaagctgggcgacggaaaggagcacactaaatctagcgggttcggatggttttcttggtttcgaagtaagcctacgaaaaatgcttccccagcgggggacgaagattcctccgatagtcccgactcagaacaggagacgcctcgcgcgagctccccacaccaagcaggattaggacttagtcttaccccttcacccgaatccccaccgctgccggatgtgtcagccttctccagaggaaggggcggcggcgagggacggggcagcgcaagctcgggaggagcagccgccggggccggggttggaggattaagcggccccgagtcggtcagctttgagttgtgttccaacccaggagtgctgttaccgccccctgccctaaagggtgccgtgcctctctacaacccctctcaagtgccccagctgccaaccgccacatccctgaataggccaaacagactgagtgcatctctttcacatcctgcaatgctgagaatcaacacgaggcctcgactgatttcccaggattag

SEQ ID NO: 227287 - DNA, 3183 bp, Artificial Sequence
  derived and/or modified sequence
atggagctgtgggccccccagcggctgccccagacccggggcaaggcgacagctccgagtaaagaccccgacagaggatttaggagggacgggcaccaccggcccgtacctcattcctggcataatggggaacgattccatcaatggcaggataatcggggctcccctcagcctcagcaggagcccagagcagaccatcagcagcagccacattatgcatctcgacccggcgactggcaccagccagtaagcggcgttgattattacgaagggggttaccggaaccagctatattctcgccccgggtacgagaacagttaccaaagctaccagtccccaaccatgcgggaagagtacgcctatggatcatattactatcatggacacccccaatggcttcaggaagagagggttccccggcaaagatccccttatatctggcacgaagactaccgcgaacagaaatatctggatgaacaccactacgagaaccaacacagcccctttggcactaattccgagacacatttccagtccaacagtagaaacccatgcaaggattcacccgcatctaattcaggccaagaatggccaggagaacttttccccggcagtctactcgcggaagctcaaaagaataagccgtcactcgcatctgagtccaacttgctgcaacagcgcgagtccgggcttagtagcagctcctatgaattatctcagtatatcagggatgcgccggaaagagatgacccgccagccagcgctgcatggagcccggtgcaagcggatgttagttcagcaggaccaaaggcccctatgaaattctatattccacatgtgcctgtctcctttggcccaggaggtcagcttgtgcacgtaggtccgagctcaccaacagatggccaggctgccttggtggaactccattctatggaagtcatacttaacgattccgaggagcaggaggagatgagaagcttcagcggtccactgattcgcgaagatgtgcacaaggtggacattatgaccttctgtcagcagaaggcagcccagagttgcaaaagcgagactctggggagccgggatagtgcgctgctttggcagctgctcgtgctgttatgccgccaaaatgggagtatggtggggtcagatatcgctgagttgctgatgcaggactgtaagaaattggagaaatataaacggcagccgccagtggccaatttgatcaatctgacagatgaagattggccagtcctcagcagcggtacccccaacctcctgactggcgaaatcccaccaagcgtagaaacccccgctcagattgtggaaaagtttacccggcttctgtattacgggcggaaaaaggaggccctggaatgggctatgaagaatcacctgtggggacatgcacttttcctctctagtaagatggacccccaaacctactcgtgggtcatgtccggcttcacaagtacactagccctgaatgaccccctgcaaactctcttccagctgatgtcaggacgcatacctcaggcagcaacttgttgtggcgaaaagcaatggggagactggagacctcacctcgcagtcatcctgagtaaccaggccggtgacccggaactgtaccagagagccatcgtcgccatcggagacacgctggcgggcaaaggtctggtcgaagcagcgcacttctgctatctgatggcacatgtaccattcgggcattatacggttaaaaccgatcatttagtcctgctggggagtagtcacagtcaagaattcctgaagttcgccactactgaagccatccagagaacagagatatttgaatactgtcagatgctgggacggcctaaaagttttatcccctcctttcaggtgtacaaactcctgtatgcctcccggttggcggactacggcctcgtgtctcaggccttgcattactgtgaggctatcggtgcagccgtcctgtcccagggtgaaagtagccaccctgtacttttagtggagctgattaagctggcggaaaagttaaaactgtccgacccacttgtgctggagcgccgctctggcgatcgggacctagagccagattggctagcacagcttagacggcaattggaacaaaaggttgccggagacatcggggacccccatccaaccagatctgatatctccggagctgggggcaccactactgagaatactttctaccaggatttttccggctgccaggggtactcagaggccccaggttataggtccgcactctggctgacccctgagcagacatgtctcctgcaacctagcccacaacagccctttccgcttcagcccgggtcctatccagcgggaggcggggcagggcaaacaggtaccccgcgcccattttacagcgtgcctgagacccacctcccaggtactggatccagcgttgccgtgaccgaggcaaccgggggaactgtttgggaggaaatgcttcagacacatctgggcccaggcgagaataccgtaagtcaggaaacgtcccagccccccgacggccaggaagtaatcagcaaaccccaaacacccctggctgcgcgcccacgttcgatctcagaatcttcagcttctagcgcgaaagaagacgaaaaggagagcagcgacgaggcagataaaaactccccacgcaatactgcccagcgagggaagctgggggatggaaaggagcacacgaagagtagcgggtttggttggttcagctggttcagaagcaagcctacaaagaacgcaagcccggctggagatgaggacagctcagatagccccgatagcgaagagacccccagagcctcttccccccatcaagcaggtctcggcctgtctttaactcccagcccagagagtcctcctctccctgacgtttctgccttcagtaggggcagaggcggtggggagggtaggggctctgctagctccggcggggcggctgctggggctggtgtggggggcctgagcggaccagagagcgtttcctttgagttgtgcagcaatcctggggttctgctgcccccccccgctctgaaaggtgcagtaccgctgtacaacccctcacaggtgccgcagttacccacggctacctccctcaaccggcctaatcggttggctcaacggaggtatccgacgcagccgtgctag

SEQ ID NO: 227288 - DNA, 2238 bp, Artificial Sequence
  derived and/or modified sequence
atggagctgtgggccccccagcggctgccccagacccggggcaaggccacggcaccctctaaagaccccgacagagggttccggagagatggacaccaccgcccagtgcctcattcttggcacaacggcgaacggtttcatcagtggcaggataatcgaggctccccccagccccaacaggagccacgggctgaccaccagcagcagcctcactatgccagtagaccaggtgactggcatcagcctgtgagcggagtggattactacgaggggggctatcggaaccaactctactctcgacctgtgctcagttccggtactcccaacttgctaaccggggaaattcctcctagcgtcgaaacacccgcacaaatcgttgagaagttcacaaggctgttatattacgggagaaaaaaggaagctctggaatgggcaatgaagaaccacctttggggtcacgccctgtttctaagttcaaagatggacccccaaacctactcttgggttatgtcagggttcacctccaccctagcgttgaacgaccctctgcagactctctttcagctgatgtcaggccgaatcccacaagccgctacctgctgcggcgaaaagcagtggggagactggagaccacacctggctgtgattctgtctaaccaggctggggatccagagttatatcagagggcaatcgtagcgataggggacaccctggctggtaaagggctggtggaagcggctcacttttgctacctgatggcgcatgtgccttttggacattacaccgttaagacagatcaccttgtgctgctgggtagtagccacagccaggagttcctgaagttcgccacaaccgaggccatccaacggaccgagatctttgaatattgccagatgctggggcgaccaaagtcttttatcccaagctttcaggtttataaattactgtacgcctcaaggctcgccgactatggactcgtgtcccaggccctgcactattgcgaggcaatcggcgccgcagtgttgtcacaaggcgagtcgtcacatccagtactcttggtggaattgatcaaactggcagaaaaactgaaacttagcgatccactggtgctcgaacgccgcagcggggatcgcgatctggagcctgactggctagcccaactccgccgccagctggaacaaaaagtcgccggggatatcggagatccccaccctactcgcagtgacatcagcggagctgggggcaccaccaccgagaacaccttctatcaggacttttctggctgtcagggctactccgaggcgcctgggtataggagcgccttgtggctgacgcccgagcaaacctgcttattgcagccctctccccagcaacccttcccactccagcccggctcgtatcctgctggcggcggggcagggcagaccgggaccccgagacccttctatagcgtccccgagacccatcttcccggcacggggtcatctgtagcagtcacggaagcaacaggggggactgtgtgggaggaaatgcttcagacacatttaggcccaggtgagaacacagtgtcacaggaaaccagtcaacccccagatggtcaagaagttatctctaagccacagacacctctcgctgcccgccctcgctctattagtgagagctctgccagttccgccaaggaagacgagaaagaatcatcagacgaggctgataagaattcacctcgcaataccgcccagcgggggaagctaggtgacggcaaagaacacaccaagtcgtccggtttcggctggttctcctggttccgcagcaagcccaccaaaaacgcctcaccagcaggcgatgaggacagcagcgacagcccagattctgagcaggagactccccgagcctctagccctcaccaggccggcctcggactgagcctgaccccatcccctgagagccctcccttgcccgacgtgagtgctttttccagaggcagggggggtggagaaggtagaggtagtgcctcttccgggggggccgccgctggtgccggggttggcggactcagcggcccagaatctgtatctttcgagttatgctcgaacccaggcgtcctactgccgcctcctgcgctgaagggcgctgtacccctctataacccctcccaggttccccagttaccaacagccacttcacttaataggccgaatcggcttgcccagagaaggtatcctacccaaccctgctag

SEQ ID NO: 227289 - DNA, 5213 bp, Artificial Sequence
  derived and/or modified sequence
gaagaatatctctgctatgggcctgtactgtggtcaatacaaagatatgaactttcccgtcttctccaagagcctatcttcagtgcttcagtactgccagcaagggtgcatccagctatatgtcagaatggttttcaagctggacgaggaagataaaataactgcacaacttactcaaaacccaggacaaattcagagagtcaaggatggaactttgggctccccagaggctgccccagacacgagggaaggccacagcaccctcaaaggatccagaccgagggtttcggagagatggacatcatcggcctgtccctcactcttggcacaatggagagaggtttcaccaatggcaagacaaccgtgggagcccccagccacagcaggagcccagggcagaccatcagcagcagccccattatgcatccaggccaggggactggcatcagcctgtgtctggagttgactattacgaaggtggttatcgcaatcagttgtattcaaggccaggttatgagaattcatatcagagctatcagtctcccacaatgagggaggaatatgcttatggaagttattactatcatggacacccacagtggctgcaggaagaaagagtgccaaggcaacggagtccttatatctggcacgaagattaccgagagcaaaagtaccttgatgaacatcattatgaaaaccagcacagtccatttggaacaaatagtgagacccacttccaatctaacagtaggaacccttgtaaagacagccctgcttccaactctggacaggagtggccgggggagctgtttccagggagcctgcttgctgaggcccagaaaaataagccatcattggctagtgagtccaaccttctccagcagcgtgagtctggtctcagctccagcagctatgagctcagtcagtacatcagagatgccccggagcgggatgatcccccagcttcagcagcttggagtccagttcaggctggtgggttctaaaatgatcagaagagtcagaagatgtctcctcagctggtcccaaagcacccatgaagttctacatccctcatgttcctgtgagtttcgggccaggaggtcagctggtgcatgtaggtcccagctctcccactgacgggcaagcagcccttgttgaactgcacagcatggaggtaaagaagacccagtgtccctggaatgctggcacactgcttacccaactactcctaacatgcttaccttgctttcctgtgcctgagccggggcatctccaggaatgggatgctcttgcgggaaactgggccatgtaccccctggattaggagggtgcaggaatgggtggggctcttctctgaaagaattgatgctacagttgtgtttttcctgagatgtcaatgtctcatctttagcaacaaaattcacttttttctttctgctttctccacaaggccttgagccatatcctagccccacggccttggggtctgacactagacttgactgaaaggggcctagggtggccacagtcttaaacacaaaatctgattgttttattccaggttattcttaatgattccgaagagcaagaggagatgagaagtttctcaggacccttgattaggtatagtgctgtaagagctgctgagtaagggcttttgaaacctagaaaatcttcctgcccagatcagcattttggagatttgttcttggtttccttggaaaaaaatatctgtccttgttggagtggaattctctgtgctgcaagatagaaccagatgtggcctgagtcattttgacaagccattcaatagttgaaggacagaaagaaaaattagcatgacagtttagaaatctaaaaccagttccattatgcagaggctgcatggttggaagttttagcattccgtgtgcttgatagatgttagtagaaaagtggagcatcgcctgggaagtcactgacaagtggatcatagcagaaacaattcttgtaacagtggctttttcctggagaggtaaataagatcggcagtgttcaagttacagaacagtgtgcaagtgagccctctgcagtactgaactaggactgcttttaaatgtctagttatatttctgataaatgtaactcagggcatctttgttgaggagagagtccttgctggatgacagcccacgtgggtctcaggctcaggcgtcttactgactaggaataccatggtggacaggtcagttagccctctctgaaccttagttttccccttgagaaatggtataacacctgctctccctacccgaggcttgtctatgagtctcaagtcagattatgcacatggaaagtatcatcactactatataaatgtattcctcaaatggcatttgacggttccctcaagtaaaaatgagtgttatctctttcttacaaacaggtatacagatatggggcaaaaaagcgagttgggtattcaaacactggggtactaagcctaacttggctttgatgttattggataatcttgagcaaatcataatgccaatcatattgatcacttaatatatgccacacaattttctaattcctttttgtatggaggtaggtccttttactgtccctattttaggggacaaagctgaggctcagaggaggtaagaaacttgtctaaacagagaagtggcagagccagatttagatccagggttgtctgactccaaagtctgcttttacttgctttcctgtgcagtgacttcaggtctctgagcctctgtttcttcatctataaagggggtgcatgagagaatctctgaaatttcttcttgttctataagaaaataactatcctatagctatagactcattaccttagccctggcttgtcagatttctatctcaatcacagcccagccagcacttgcacacttaggaggagcctggggtccgaaacagggaagtgtctgcctgctcactctttgctccctaaattttttccatgtagggaagatgtacataaggtggatattatgacgttttgccagcagaaagcagctcagagctgcaaatctgagacactggggagcagagactcagctctactgtggcagctcttggttctcctttgtcgccagaatgggtccatggtggggtctgacatcgctgagctgctaatgcaagactgcaagaagctggagaagtacaagcggcagccccctgtggccaacctcatcaacctgaccgatgaggactggccagtgctgagctctgggaccccgaacctgctcacgggagagatcccccccagtgtggagacacctgcgcagatcgtggagaaattcactaggctgctctactatggaaggaagaaggaagccttggagtgggccatgaagaaccacttgtggggccatgctttgttcctgtccagcaagatggacccacagacctacagctgggtcatgagtggcttcaccagcacgctggcgctcaatgacccactgcagaccctcttccagctcatgtcggggaggattccacaggcagccacgtgttgtggagaaaagcagtggggagactggaggcctcacttggctgtgattctgtcgaatcaggctggggacccagagctgtatcagcgtgcgattgttgccattggggacaccctggctgggaaggggcttgtggaggcagctcacttctgctatctcatggctcacgtgccctttggccactacaccgtgaagacagaccatctggtcttgctgggcagcagccacagtcaagagtttttgaaatttgcaacaactgaggcaatccagaggacggaaatcttcgagtactgtcagatgctgggccgccccaaatccttcatcccttctttccaggtgtataagctcctttatgcttcccgtctggcagattatggcctcgtgtcccaggctttgcattactgcgaagccattggtgcagctgtcttgagccagggagagagcagtcaccctgtgctattagtggaactcatcaagctagcagagaaactgaagctgtcagatcctctggttttagaaagacgcagtggagacagggacctggagccagattggctagcgcaacttcggaggcagctggagcaaaaggtagcaggagacattggggatcctcatcctactcgctcagatatttcgggagccggaggaacaacaacagaaaacactttctaccaggacttttctggatgtcaaggctactctgaagcccctgggtaccgctcagctctgtggctgacacctgagcagacctgcctgctccagcccagcccacagcagccctttcccctccagccgggctcctacccagcaggagggggtgcagggcagacagggacaccgaggcctttttactcagttcctgagacccatctaccagggactggcagcagcgtggcagtgacagaggccactggaggaacagtctgggaggaaatgctgcagacacacctgggccctggagagaacacagtgtctcaagaaacttcccagcctcctgatggccaagaggtcatttccaaaccacagacaccattggctgctagaccacgaagtatttctgagagttccgccagttcagccaaggaggatgagaaggagtcctctgatgaggctgataaaaactctccccgaaatactgcccagagaggcaagctcggagatgggaaggagcatacaaagagctcagggtttggctggttcagctggtttcgatcgaagcccaccaagaacgcatcccccgctggagacgaggactcctcagacagccctgactctgagcaggagacccccagagcatcttctccccaccaggctggcctgggcctctcactgacaccttcccctgagtccccacctctgccggatgttagtgccttctccaggggcagaggtgggggtgaaggccgaggatccgcatccagcgggggagcagctgcgggcgctggggttggaggcttgtctggaccagagagtgtttcctttgagctctgctccaaccctggtgttcttcttcctccacctgccttaaaaggggctgttcctctttacaacccatctcaggtgcctcagctgcccacggccactagcctgaatcggccaaatcgcctatcagcgtcgctatcccacccagccatgctgagaataaacacacgtcccaggctcatctcccaggactga

SEQ ID NO: 227290 - DNA, 3985 bp, Artificial Sequence
  derived and/or modified sequence
cgctgaaggaaggtgggaagccatcagagcaggaagataaaataactgcacaacttactcaaaacccaggacaaattcagagagtcaaggatggaactttgggctccccagaggctgccccagacacgagggaaggccacagcaccctcaaaggatccagaccgagggtttcggagagatggacatcatcggcctgtccctcactcttggcacaatggagagaggtttcaccaatggcaagacaaccgtgggagcccccagccacagcaggagcccagggcagaccatcagcagcagccccattatgcatccaggccaggggactggcatcagcctgtgtctggagttgactattacgaaggtggttatcgcaatcagttgtattcaaggccaggttatgagaattcatatcagagctatcagtctcccacaatgagggaggaatatgcttatggaagttattactatcatggacacccacagtggctgcaggaagaaagagtgccaaggcaacggagtccttatatctggcacgaagattaccgagagcaaaagtaccttgatgaacatcattatgaaaaccagcacagtccatttggaacaaatagtgagacccacttccaatctaacagtaggaacccttgtaaagacagccctgcttccaactctggacaggagtggccgggggagctgtttccagggagcctgcttgctgaggcccagaaaaataagccatcattggctagtgagtccaaccttctccagcagcgtgagtctggtctcagctccagcagctatgagctcagtcagtacatcagagatgccccggagcgggatgatcccccagcttcagcagcttggagtccagttcaggctgatgtctcctcagctggtcccaaagcacccatgaagttctacatccctcatgttcctgtgagtttcgggccaggaggtcagctggtgcatgtaggtcccagctctcccactgacgggcaagcagcccttgttgaactgcacagcatggaggttattcttaatgattccgaagagcaagaggagatgagaagtttctcaggacccttgattagggaagatgtacataaggtggatattatgacgttttgccagcagaaagcagctcagagctgcaaatctgagacactggggagcagagactcagctctactgtggcagctcttggttctcctttgtcgccagaatgggtccatggtggggtctgacatcgctgagctgctaatgcaagactgcaagaagctggagaagtacaagcggcagccccctgtggccaacctcatcaacctgaccgatgaggactggccagtgctgagctctgggaccccgaacctgctcacgggagagatcccccccagtgtggagacacctgcgcagatcgtggagaaattcactaggctgctctactatggaaggaagaaggaagccttggagtgggccatgaagaaccacttgtggggccatgctttgttcctgtccagcaagatggacccacagacctacagctgggtcatgagtggcttcaccagcacgctggcgctcaatgacccactgcagaccctcttccagctcatgtcggggaggattccacaggcagccacgtgttgtggagaaaagcagtggggagactggaggcctcacttggctgtgattctgtcgaatcaggctggggacccagagctgtatcagcgtgcgattgttgccattggggacaccctggctgggaaggggcttgtggaggcagctcacttctgctatctcatggctcacgtgccctttggccactacaccgtgaagacagaccatctggtcttgctgggcagcagccacagtcaagagtttttgaaatttgcaacaactgaggcaatccagaggacggaaatcttcgagtactgtcagatgctgggccgccccaaatccttcatcccttctttccaggtgtataagctcctttatgcttcccgtctggcagattatggcctcgtgtcccaggctttgcattactgcgaagccattggtgcagctgtcttgagccagggagagagcagtcaccctgtgctattagtggaactcatcaagctagcagagaaactgaagctgtcagatcctctggttttagaaagacgcagtggagacagggacctggagccagattggctagcgcaacttcggaggcagctggagcaaaaggtagcaggagacattggggatcctcatcctactcgctcagatatttcgggagccggaggaacaacaacagaaaacactttctaccaggacttttctggatgtcaaggctactctgaagcccctgggtaccgctcagctctgtggctgacacctgagcagacctgcctgctccagcccagcccacagcagccctttcccctccagccgggctcctacccagcaggagggggtgcagggcagacagggacaccgaggcctttttactcagttcctgagacccatctaccagggactggcagcagcgtggcagtgacagaggccactggaggaacagtctgggaggaaatgctgcagacacacctgggccctggagagaacacagtgtctcaagaaacttcccagcctcctgatggccaagaggtcatttccaaaccacagacaccattggctgctagaccacgaagtatttctgagagttccgccagttcagccaaggaggatgagaaggagtcctctgatgaggctgataaaaactctccccgaaatactgcccagagaggcaagctcggagatgggaaggagcatacaaagagctcagggtttggctggttcagctggtttcgatcgaagcccaccaagaacgcatcccccgctggagacgaggactcctcagacagccctgactctgaggagacccccagagcatcttctccccaccaggctggcctgggcctctcactgacaccttcccctgagtccccacctctgccggatgttagtgccttctccaggggcagaggtgggggtgaaggccgaggatccgcatccagcgggggagcagctgcgggcgctggggttggaggcttgtctggaccagagagtgtttcctttgagctctgctccaaccctggtgttcttcttcctccacctgccttaaaaggggctgttcctctttacaacccatctcaggtgcctcagctgcccacggccactagcctgaatcggccaaatcgcctagctcagcgtcgctatcccacccagccatgctgagaataaacacacgtcccaggctcatctcccaggactgaaactttcttgctctctttttctcaatctcccagcccctctctaccatattgggaccctcaagaggtttgtgctagcccgatgcctccaccgggcacttagaaggcaagaggacaggatctctcaagacacagcacaattcagtctcttaagattagcttcacaatgatggaaattatttcatcaggtggaaagtctgggtctaatagcagactgcacatgagcagagtgacatggtggtggcacttatggtggtggcttgagagccttggggaaattagggccctaacagctagaatcaaagatgataccgcagggccctgtagcaagaaatgggaagcagggggaggggcaggggctcagaacaatattctagaccaactttgactacttcctgtcttagtaatagaccaatacatggctctatttagcaaagtttttatactgaaacttgattattgctgccctttataatttcctcttcaatgatatttcagcagtttccctcttggtcctagttttgtgcacatttttttgaatgtggttcagattaattatatttctctcactttcttagctggtcctattttttcacattctggcatgtggctatcaagttagattgctgtaggcatcatattgtcatggtaactactgaacctaatgatgcagatgg

SEQ ID NO: 227291 - DNA, 2803 bp, Artificial Sequence
  derived and/or modified sequence
acgagaagtgcaagctggcgatgcagaggggtgcgcagtccagcgtgaactacagtcagggcagcctgaaggatgcagaagataaaataactgcacaacttactcaaaacccaggacaaattcagagagtcaaggatggaactttgggctccccagaggctgccccagacacgagggaaggccacagcaccctcaaaggatccagaccgagggtttcggagagatggacatcatcggcctgtccctcactcttggcacaatggagagaggtttcaccaatggcaagacaaccgtgggagcccccagccacagcaggagcccagggcagaccatcagcagcagccccattatgcatccaggccaggggactggcatcagcctgtgtctggagttgactattacgaaggtggttatcgcaatcagttgtattcaaggccagtgctgagctctgggaccccgaacctgctcacgggagagatcccccccagtgtggagacacctgcgcagatcgtggagaaattcactaggctgctctactatggaaggaagaaggaagccttggagtgggccatgaagaaccacttgtggggccatgctttgttcctgtccagcaagatggacccacagacctacagctgggtcatgagtggcttcaccagcacgctggcgctcaatgacccactgcagaccctcttccagctcatgtcggggaggattccacaggcagccacgtgttgtggagaaaagcagtggggagactggaggcctcacttggctgtgattctgtcgaatcaggctggggacccagagctgtatcagcgtgcgattgttgccattggggacaccctggctgggaaggggcttgtggaggcagctcacttctgctatctcatggctcacgtgccctttggccactacaccgtgaagacagaccatctggtcttgctgggcagcagccacagtcaagagtttttgaaatttgcaacaactgaggcaatccagaggacggaaatcttcgagtactgtcagatgctgggccgccccaaatccttcatcccttctttccaggtgtataagctcctttatgcttcccgtctggcagattatggcctcgtgtcccaggctttgcattactgcgaagccattggtgcagctgtcttgagccagggagagagcagtcaccctgtgctattagtggaactcatcaagctagcagagaaactgaagctgtcagatcctctggttttagaaagacgcagtggagacagggacctggagccagattggctagcgcaacttcggaggcagctggagcaaaaggtagcaggagacattggggatcctcatcctactcgctcagatatttcgggagccggaggaacaacaacagaaaacactttctaccaggacttttctggatgtcaaggctactctgaagcccctgggtaccgctcagctctgtggctgacacctgagcagacctgcctgctccagcccagcccacagcagccctttcccctccagccgggctcctacccagcaggagggggtgcagggcagacagggacaccgaggcctttttactcagttcctgagacccatctaccagggactggcagcagcgtggcagtgacagaggccactggaggaacagtctgggaggaaatgctgcagacacacctgggccctggagagaacacagtgtctcaagaaacttcccagcctcctgatggccaagaggtcatttccaaaccacagacaccattggctgctagaccacgaagtatttctgagagttccgccagttcagccaaggaggatgagaaggagtcctctgatgaggctgataaaaactctccccgaaatactgcccagagaggcaagctcggagatgggaaggagcatacaaagagctcagggtttggctggttcagctggtttcgatcgaagcccaccaagaacgcatcccccgctggagacgaggactcctcagacagccctgactctgagcaggagacccccagagcatcttctccccaccaggctggcctgggcctctcactgacaccttcccctgagtccccacctctgccggatgttagtgccttctccaggggcagaggtgggggtgaaggccgaggatccgcatccagcgggggagcagctgcgggcgctggggttggaggcttgtctggaccagagagtgtttcctttgagctctgctccaaccctggtgttcttcttcctccacctgccttaaaaggggctgttcctctttacaacccatctcaggtgcctcagctgcccacggccactagcctgaatcggccaaatcgcctagctcagcgtcgctatcccacccagccatgctgagaataaacacacgtcccaggctcatctcccaggactgaaactttcttgctctctttttctcaatctcccagcccctctctaccatattgggaccctcaagaggtttgtgctagcccgatgcctccaccgggcacttagaaggcaagaggacaggatctctcaagacacagcacaattcagtctcttaagattagcttcacaatgatggaaattatttcatcaggtggaaagtctgggtctaatagcagactgcacatgagcagagtgacatggtggtggcacttatggtggtggcttgagagccttggggaaattagggccctaacagctagaatcaaagatgataccgcagggccctgtagcaagaaatgggaagcagggggaggggcaggggctcagaacaatattctagaccaactttgactacttc

SEQ ID NO: 227292 - DNA, 2367 bp, Artificial Sequence
  derived and/or modified sequence
acgcactacctgagtcctggcctgagcgacttctacctgaatcactcacctgccagcacttgtaccttgcgtagatcattaggttctgaaacaggcaagtgtttgccggcacactcgctgttgccaaagttttttccgtgtagagaggacgtgcataaggtggacatcatgactttttgccaacagaaagctgcccaaagttgcaaaagcgaaacactcggatcacgcgattccgccctcctgtggcaactgctggttttactttgcaggcagaacggttctatggtcggttcggatatagctgagctgctgatgcaggattgcaaaaagctcgagaagtataagcggcaaccccctgtcgccaatctcattaacttgacggacgaagattggccagtgctctcctctgggacaccaaacctgttgaccggagagatcccacccagtgtggagacccctgcccagatagtggagaagttcacacggcttctgtactacggacggaaaaaggaagcccttgagtgggccatgaaaaaccatctgtggggccatgccttgtttctgtcttccaagatggacccgcagacctacagctgggtaatgtccgggtttacttccactttagcattgaacgacccactccaaaccttgttccaactgatgtcaggcagaattccacaggctgctacgtgttgcggagaaaagcaatggggcgattggcggcctcatcttgcggtgatactatccaaccaagcaggggatcctgaactctaccaacgagcaatagtggccatcggcgatacccttgccggaaagggcttagtagaggcggcacatttctgttacctgatggctcacgtccctttcggtcactacaccgtcaagactgatcacctagtgctgctaggcagtagccacagtcaagaatttctcaagttcgccactactgaagcgatccagaggaccgagatcttcgaatattgccaaatgctcggcaggccaaagtcattcatccccagttttcaggtgtataagctgctctatgcttcacggctagctgactatggattggtgtcgcaggcccttcattactgtgaggcgataggagcagctgtcttatcccaaggggaaagctctcatccagtacttttggtagagttgataaaacttgctgaaaaattaaagctgagcgaccccttggtcctggagaggaggtcaggcgatcgagacctggagcctgattggctggctcagcttcggaggcaactggaacagaaggtggccggtgacatcggcgatccgcaccccaccagatctgacatctctggggcaggaggcacaaccactgagaacaccttctaccaggacttcagtggatgccagggttacagcgaggccccaggctaccgatcagctctgtggcttactcccgagcagacttgtctgctacagccatcacctcagcagccctttccccttcaaccagggtcctaccccgcaggcggtggcgcaggccagaccggtaccccaaggccattttactcagttccagaaactcatttgccaggcacaggatctagtgtcgccgtcactgaggccaccggtggcactgtctgggaggagatgctccagactcatctagggcctggagagaatacagttagccaggaaaccagccagcctcctgacggacaagaagtcatcagcaaaccacaaacccccctcgcagccagacctagatccattagcgaaagtagtgccagctccgcaaaagaggacgagaaagagtccagtgatgaggccgacaaaaattctcccagaaacactgcgcagcgcggtaaactgggagacggtaaggaacatactaaatcttcaggatttggatggttcagctggtttcggagtaagccgactaagaacgcctctccggctggagacgaggatagtagcgatagtcctgactctgaacaggagacccctcgcgcttcatcaccgcaccaggctgggctgggcctctcactgacaccctcccctgaatcaccacctctgccagatgttagcgcattctcccgcggaagaggaggcggagaaggaagggggagtgctagctccggaggagctgccgcaggggctggcgtcggaggtctttccggacccgagagcgtgagctttgaattatgctccaatcccggtgtactcctgccacctccggctctaaaaggcgcagtccccctctacaatccttcccaggtgccccagttgccaacagccaccagtctgaaccgccctaatcggctgagcgcatccctctcccacccggctatgctgcggatcaatactaggcctcgtctgatatcgcaggattag

SEQ ID NO: 227293 - DNA, 3183 bp, Artificial Sequence
  derived and/or modified sequence
atggaactttgggcaccgcaacgtcttccacagactcgaggcaaagccactgccccttcgaaagacccagacagggggttccggagggacggacaccacaggcctgttcctcattcatggcacaatggcgagcgtttccaccagtggcaggacaacagaggttctcctcaacctcagcaggagcccagagctgaccaccagcaacagccccactatgcctctaggcctggggactggcaccagcctgtgagtggtgtggactactatgagggcggatataggaaccagttgtactccagacctgggtatgaaaatagttatcagagttaccagagtccaaccatgcgggaagaatatgcctacggatcgtattactatcatgggcatccccagtggcttcaagaagagagagtgccccgacaacgttccccatacatctggcatgaggactatcgggagcagaaatacctcgacgagcatcactacgagaaccaacatagcccttttggcaccaatagtgagacgcactttcagagcaacagcagaaatccttgtaaggacagcccggcatctaacagtgggcaagaatggcccggagagctgttccccggaagcctcttagccgaggctcaaaaaaacaagccctcactcgcatctgaaagcaacctgcttcagcaacgggagagcggactgtcctctagtagctacgaactgagccagtacatccgcgatgcccctgaaagagacgatccacctgcatccgccgcttggagtcctgtccaggcagatgtttcaagtgccggacccaaagctcccatgaagttttatattcctcatgtgcctgtgtcttttggaccgggaggccaactcgtccacgtcgggcctagctccccaactgatggccaggccgcacttgtggagcttcacagtatggaagttatcctgaatgacagtgaggaacaggaggaaatgcgcagttttagcggccctctcataagagaagacgtgcacaaggttgacatcatgacattttgtcagcaaaaggctgcccagtcctgtaagagtgagacattagggtcccgtgactcagcgttactgtggcagctgctggtgctgctgtgcaggcaaaatggctccatggtcggaagcgacatagccgaattgttaatgcaagattgcaagaagctggagaaatacaagcgccagccaccagtagctaatctgatcaacttgacagacgaggactggcctgtcctctcctcaggaacccctaacctccttaccggagagatcccacccagcgtcgagactcctgcccaaatcgtggagaaatttacacgcctcttatactacggcaggaaaaaggaagccctcgaatgggccatgaagaatcacctgtggggccacgcactgttcctaagctctaaaatggatccacagacctattcctgggtcatgagcggcttcaccagcacacttgctttaaacgatcctcttcaaacactgttccagttaatgagcggtcgcatcccacaggcagcaacttgttgcggcgaaaaacaatggggcgattggaggccccatctggcggtgattctctccaaccaggctggagaccccgaattgtatcagcgtgcaatcgtagcgataggcgacactctagctggtaagggtctggtggaagcagcccatttttgttacctgatggcgcatgtcccgttcgggcactataccgtgaagacagatcacttagttctcttagggagttcccacagtcaagaattcttaaagttcgctacaacagaagcgatccagagaacagaaatcttcgagtactgtcagatgctggggaggcctaagagctttattcctagctttcaggtctataagctgctgtacgcttcccgtctggccgactatggactagtgtcacaggccctgcattattgcgaggcaatcggcgctgccgttctgtcccaaggggagtcaagtcacccggttctgctcgtggagctcatcaaactggcggagaagctaaagctaagcgacccccttgtgctcgagcgtaggtccggggaccgcgacttggagcctgattggctggctcagcttcgcaggcagctcgagcagaaggtggccggtgacattggggaccctcaccctacaaggagcgacattagtggagccggagggactacaaccgagaacactttctatcaagattttagtggatgtcagggatatagtgaagctcctgggtaccgaagcgctctgtggctaaccccagagcaaacatgtctgctgcagccttcccctcaacagccattccctcttcaacctggcagttaccctgccggaggtggagccggacaaacaggaacccctcgaccattctatagcgtgcccgagacacacttgccaggaacggggagttcggtagcagtcacagaagccactggaggaacggtgtgggaagagatgttacaaacccatctgggtcccggtgagaacaccgtgtcacaggagacctcccagccaccggacggccaggaggtaatctcaaaacctcagacacctctggcagctcgaccaagatctatcagtgagtcgtccgcctcgtccgccaaggaggacgagaaagagtcatctgacgaagccgataagaactcgccgcgtaataccgcccagagagggaagttgggagatgggaaggaacatactaagtcttctggtttcggctggttctcttggttccgaagcaaacctactaaaaacgcttctcctgctggcgatgaagattccagcgatagccccgactcagaggagaccccacgcgcatctagtccccaccaggcaggcctaggactttcactcacgcccagccctgagtcaccgcctcttccagatgtgtccgccttctcgagagggcgagggggaggcgaagggaggggctctgccagttcaggcggagccgctgcaggtgcgggtgtcggtggactgagtggtccagagagtgtcagttttgaattgtgctcgaatccgggagtcctattgcctcccccagcccttaaaggggcagtgcccctgtataacccctctcaggtcccccagctacccactgccactagtttgaacaggcccaataggctggctcagcgaagataccctacccagccatgctag

SEQ ID NO: 227294 - DNA, 2238 bp, Artificial Sequence
  derived and/or modified sequence
atggagctctgggctccgcagcgcctgcctcagacccggggaaaagcaaccgctccctcaaaagacccggataggggctttcgcagggatggacaccaccgtccggttccacacagctggcacaacggagagcggtttcaccagtggcaagataatagaggctcaccccagccgcagcaagagcctagggccgaccaccagcaacagcctcactacgcctctcgaccgggtgactggcaccagcccgtgtcaggagttgattactacgaagggggataccgcaaccagttatattctaggccagtattgtccagtggcacacctaaccttctcactggcgagattcctccttctgtggagacccctgcccagatcgtagagaagttcactaggttactctattacggccgtaagaaggaagctctggagtgggctatgaaaaatcacctatgggggcacgccctgttcttgagcagcaagatggatcctcagacgtattcttgggtaatgtcagggttcactagcacattagccctcaacgatcctctgcagacactgtttcagctcatgagcggcaggattcctcaggcagccacatgttgtggggaaaaacagtggggggactggcgcccacacttagcagtgatcttgtctaaccaagctggcgatccagagctgtatcagcgcgcaatcgtcgctatcggcgacaccctggcgggaaaggggctcgtcgaagcagcacatttttgctacctgatggctcacgtccctttcggtcattatacggtgaaaactgatcatctggtcttattgggatcttcacattctcaggagtttctgaagtttgcaaccactgaggcgatacaacgcaccgaaattttcgaatattgtcagatgctgggcagaccaaaatcgttcatcccatcttttcaggtttataagttgctgtatgcgagcaggctggccgactacggcctcgtttctcaggctctgcattactgtgaggctattggggcagcggtgctttctcagggcgagagtagccatcctgtgctcctcgtagagctgataaagctcgccgaaaagctcaagctgagtgatcccctggtcttggagcgtagatcaggggaccgcgatctagaaccagactggctggctcagctgcggaggcagctggagcagaaggtagcgggagatattggcgaccctcaccctactagatcagacattagcggcgcaggaggaactactactgaaaacaccttctaccaggatttctctgggtgtcagggctattccgaggccccaggttaccgctcagcactctggcttaccccagagcagacatgcctgttacagccatccccccagcagccttttccgctacagcctggatcctatccagcaggcggaggagcgggtcaaactggcacacctcggccattctattctgtccccgagacacacttgcctggcactggctctagcgtagccgtcactgaggccacggggggaacggtatgggaagaaatgcttcagactcacctgggccctggcgagaacactgtgagccaggaaacaagtcagcccccagacggacaggaggtgatttctaaaccacaaacccctctcgccgctcgccctcggtcaatctctgaatcctcagcctcctccgcaaaggaagacgagaaagaaagcagcgatgaggcagataagaactcaccaagaaacaccgcacagcgcggaaagctaggcgacggcaaagagcataccaagtctagcgggttcggatggtttagctggttcagatcaaaaccaaccaagaacgcatccccagctggggacgaggatagctctgacagtccagattccgagcaagaaacaccgagggcctcctcgcctcaccaggctggcctcggtctttctttaaccccctcccctgagtcaccacctttgcctgacgtaagcgccttctcgcggggaagaggcggtggcgagggaaggggttccgcttctagcggcggagctgccgcaggggctggcgtgggcggactgtctgggccagagtccgtgtctttcgagctctgctccaatcccggtgtgctgctgcctccaccagcattaaagggtgcagttccactgtacaacccatcccaggtgcctcagctgcccacagcaaccagcctgaaccgccctaacaggctggcccagcgcagataccccacccagccctgctag

SEQ ID NO: 227295 - protein, 352 aa, Artificial Sequence
  derived and/or modified sequence
MAPLGYFLLLCSLKQALGSYPIWWSLAVGPQYSSLGSQPILCASIPGLVPKQLRFCRNYVEIMPSVAEGIKIGIQECQHQFRGRRWNCTTVHDSLAIFGPVLDKATRESAFVHAIASAGVAFAVTRSCAEGTAAICGCSSRHQGSPGKGWKWGGCSEDIEFGGMVSREFADARENRPDARSAMNRHNNEAGRQAIASHMHLKCKCHGLSGSCEVKTCWWSQPDFRAIGDFLKDKYDSASEMVVEKHRESRGWVETLRPRYTYFKVPTERDLVYYEASPNFCEPNPETGSFGTRDRTCNVSSHGIDGCDLLCCGRGHNARAERRREKCRCVFHWCCYVSCQECTRVYDVHTCK

SEQ ID NO: 227296 - DNA, 1059 bp, Artificial Sequence
  derived and/or modified sequence
atggcccccctgggctacttcctgctgctgtgcagcctgaagcaggccctgggcagctaccccatctggtggagcctggccgtgggcccccagtacagcagcctgggcagccagcccatcctgtgcgccagcatccccggcctggtgcccaagcagctgagattctgcagaaactacgtggagatcatgcccagcgtggccgagggcatcaagatcggcatccaggagtgccagcaccagttcagaggcagaagatggaactgcaccaccgtgcacgacagcctggccatcttcggccccgtgctggacaaggccaccagagagagcgccttcgtgcacgccatcgccagcgccggcgtggccttcgccgtgaccagaagctgcgccgagggcaccgccgccatctgcggctgcagcagcagacaccagggcagccccggcaagggctggaagtggggcggctgcagcgaggacatcgagttcggcggcatggtgagcagagagttcgccgacgccagagagaacagacccgacgccagaagcgccatgaacagacacaacaacgaggccggcagacaggccatcgccagccacatgcacctgaagtgcaagtgccacggcctgagcggcagctgcgaggtgaagacctgctggtggagccagcccgacttcagagccatcggcgacttcctgaaggacaagtacgacagcgccagcgagatggtggtggagaagcacagagagagcagaggctgggtggagaccctgagacccagatacacctacttcaaggtgcccaccgagagagacctggtgtactacgaggccagccccaacttctgcgagcccaaccccgagaccggcagcttcggcaccagagacagaacctgcaacgtgagcagccacggcatcgacggctgcgacctgctgtgctgcggcagaggccacaacgccagagccgagagaagaagagagaagtgcagatgcgtgttccactggtgctgctacgtgagctgccaggagtgcaccagagtgtacgacgtgcacacctgcaagtag

SEQ ID NO: 227297 - DNA, 1059 bp, Artificial Sequence
  derived and/or modified sequence
atggccccactgggctactttctgttactgtgtagtcttaaacaggctctgggctcgtaccccatttggtggtctctggctgtcggcccgcagtactcctcactcggttcacaacctattctctgcgcctcaatccctgggttagtcccaaaacagctccggttctgtagaaactatgtggagatcatgccctcagtagccgagggcattaagattggcatccaagaatgccaacaccagtttagaggtaggcgatggaattgcaccaccgttcacgattccctcgccatttttggtccagtactggataaggctacgcgggagagcgcttttgtacatgctatcgcttctgccggggtggcttttgccgtgactcgaagttgtgctgagggcacagcagccatctgcgggtgttcaagcaggcatcaaggctccccaggtaagggctggaagtggggcgggtgttcggaggacatcgagtttggcggaatggtctcacgcgagttcgccgatgcccgtgagaaccggcccgacgctaggtcagccatgaacaggcataacaacgaagctgggcgccaggctattgcctctcatatgcacctgaaatgtaagtgccacggcttaagcggtagctgcgaggtcaaaacatgctggtggtcacagccagattttagagccatcggcgacttcctcaaagacaagtatgactccgctagtgagatggtagttgaaaagcacagagagtcacgagggtgggtagaaaccctgcgtccgcgctatacatatttcaaggtgccaactgagcgggacctggtttactatgaggctagccctaacttttgtgaacctaacccagaaacggggagcttcggtacaagggataggacttgcaacgtgagcagccacgggattgacggatgcgaccttctctgctgcggcagggggcacaacgccagagccgagaggagaagggaaaaatgtcgatgcgtgtttcactggtgctgctatgtgtcctgtcaagaatgcacacgagtgtatgatgtgcacacttgcaaatag

SEQ ID NO: 227298 - DNA, 1059 bp, Artificial Sequence
  derived and/or modified sequence
atggcccccctgggctacttcctgctgctgtgcagcctgaagcaggccctgggcagctaccccatctggtggagcctggccgtgggcccccagtacagcagcctgggcagccagcccatcctgtgtgccagcatccctggcctggtgcccaagcagctgcgcttctgcagaaattatgtggagatcatgcccagcgtggccgagggcatcaagattggcatccaggagtgccagcaccagttccggggccgccgctggaactgcaccaccgtgcatgacagcctggccatcttcggccctgtgctggacaaggccacccgggagagcgcctttgtgcacgccatcgccagcgctggggtggcctttgctgtgaccaggagctgtgccgagggcacagctgccatctgtggctgcagcagccgccaccagggcagccctgggaagggctggaagtggggcggctgcagtgaagatattgaatttggaggcatggtgtcccgggagtttgctgatgcccgggagaacagaccagatgcccggagcgccatgaacagacacaacaatgaggccggccggcaggccatcgccagccacatgcacctgaagtgcaagtgccacggcctgagcggcagctgtgaggtgaagacctgctggtggagccagcctgacttccgggccatcggggacttcctgaaggacaagtatgattctgccagcgagatggtggtggagaagcaccgggagagccggggctgggtggagaccctgcggccccgctacacctacttcaaggtgcccacagagcgggacctggtgtactatgaggccagccccaacttctgtgagcccaaccctgagaccggcagctttggcacccgggacaggacctgcaatgtgagcagccacggcattgatggctgtgacctgctgtgctgcggccggggccacaatgcccgggcagagaggagaagagagaagtgccgctgtgtgttccactggtgctgctacgtgtcctgccaggagtgcaccagggtgtatgatgtgcacacctgcaagtag

SEQ ID NO: 227299 - DNA, 1059 bp, Artificial Sequence
  derived and/or modified sequence
atggcccccctgggctacttcctgctgctgtgcagcctgaagcaggcgttgggctcatatccaatttggtggagcctggctgtgggccctcagtatagctcgctcgggagccagcctatcctgtgtgccagtatcccaggcctggtgcccaagcagctgaggttctgccggaattacgtggagatcatgccctcagttgctgagggtatcaagattgggatacaggaatgtcaacaccagttccgaggtagaagatggaattgcacaaccgttcatgacagcttggccatcttcggacccgtactggacaaagccaccagagaatctgccttcgtacacgctatcgcttccgccggcgtggcattcgcggtgactaggagttgcgcagaggggacggccgccatttgtggctgtagctcacggcaccaaggcagtcctggtaaaggatggaaatggggtggttgctcggaggatatcgaatttgggggcatggttagtagagagttcgcagatgcgcgcgagaaccggccggacgctcgctcggctatgaatcggcacaataacgaagcgggccgacaagcgatagcatcccatatgcacctgaaatgtaagtgtcatgggctcagtggatcctgtgaagtgaagacctgctggtggagccaaccggacttcagggccataggagactttctgaaagacaagtatgacagtgcctcggagatggttgtagagaagcaccgtgaatctcgcggctgggtggaaactctccggcctcggtatacctactttaaggtcccaaccgagagggatctagtgtattacgaggcatctcccaacttttgtgagcccaatcccgagacaggaagcttcgggacccgggacaggacctgcaatgtgagcagtcacggcattgatggatgtgatctgttgtgttgcggccggggacacaacgcaagggccgagcggcgaagggaaaagtgtcgctgcgtcttccactggtgctgctacgtatcttgtcaggaatgcactcgcgtctacgacgtgcacacttgtaaatag

SEQ ID NO: 227300 - DNA, 1059 bp, Artificial Sequence
  derived and/or modified sequence
atggctcctctcgggtatttcctcctgctatgcagtctcaaacaggctctgggcagttaccccatatggtggagtctcgccgtgggtccacagtactcctccctggggagccagccaattctgtgcgctagtatcccaggcctggtccccaagcagctgcgtttctgtaggaattacgtggaaatcatgccatctgtcgccgaaggcatcaaaatcggaatccaggagtgtcagcaccagtttaggggcaggagatggaactgcacaactgttcacgactcgctggctatattcggaccagtgctcgacaaggccacgcgggaatccgcatttgtacatgcaatagcatcagccggtgttgcattcgccgtcacaaggtcctgcgctgaagggactgccgctatctgcggctgcagcagccgccaccagggatcaccaggaaaaggctggaaatggggcggatgctcagaggacatagagttcggaggcatggtgtcccgagaattcgcagatgccagggaaaatcgccctgacgctcgttccgccatgaatcgtcacaataacgaggccggacggcaggcaatcgcctcacacatgcacctgaaatgcaagtgtcatgggttatccggatcttgcgaagtaaaaacttgctggtggtctcaaccagacttcagggctattggagattttctcaaggacaaatacgattctgcaagcgaaatggtggtcgaaaagcacagggagtcccgtggctgggtggaaacattacggccacggtatacatatttcaaagtgccaacagaacgagacttggtctattatgaggctagtccaaatttctgtgagccgaatcctgaaacagggtcattcggaaccagggaccggacctgcaatgttagtagccatgggatcgacggatgcgacttactgtgctgtggcagagggcacaacgccagggccgaaaggagacgtgagaaatgcaggtgcgtttttcactggtgctgttacgtgagctgtcaggagtgtacgagggtctatgatgtgcacacctgtaagtag

SEQ ID NO: 227301 - DNA, 2932 bp, Artificial Sequence
  derived and/or modified sequence
agctcccagggcccggccccccccggcgctcacgctctcggggcggactcccggccctccgcgccctctcgcgcggcgatggccccactcggatacttcttactcctctgcagcctgaagcaggctctgggcagctacccgatctggtggtcgctggctgttgggccacagtattcctccctgggctcgcagcccatcctgtgtgccagcatcccgggcctggtccccaagcagctccgcttctgcaggaactacgtggagatcatgcccagcgtggccgagggcatcaagattggcatccaggagtgccagcaccagttccgcggccgccggtggaactgcaccaccgtccacgacagcctggccatcttcgggcccgtgctggacaaagctaccagggagtcggcctttgtccacgccattgcctcagccggtgtggcctttgcagtgacacgctcatgtgcagaaggcacggccgccatctgtggctgcagcagccgccaccagggctcaccaggcaagggctggaagtggggtggctgtagcgaggacatcgagtttggtgggatggtgtctcgggagttcgccgacgcccgggagaaccggccagatgcccgctcagccatgaaccgccacaacaacgaggctgggcgccaggccatcgccagccacatgcacctcaagtgcaagtgccacgggctgtcgggcagctgcgaggtgaagacatgctggtggtcgcaacccgacttccgcgccatcggtgacttcctcaaggacaagtacgacagcgcctcggagatggtggtggagaagcaccgggagtcccgcggctgggtggagaccctgcggccgcgctacacctacttcaaggtgcccacggagcgcgacctggtctactacgaggcctcgcccaacttctgcgagcccaaccctgagacgggctccttcggcacgcgcgaccgcacctgcaacgtcagctcgcacggcatcgacggctgcgacctgctgtgctgcggccgcggccacaacgcgcgagcggagcggcgccgggagaagtgccgctgcgtgttccactggtgctgctacgtcagctgccaggagtgcacgcgcgtctacgacgtgcacacctgcaagtaggcaccggccgcggctccccctggacggggcgggccctgcctgagggtgggcttttccctgggtggagcaggactcccacctaaacggggcagtactcctccctgggggcgggactcctccctgggggtggggctcctacctgggggcagaactcctacctgaaggcagggctcctccctggagctagtgtctcctctctggtggctgggctgctcctgaatgaggcggagctccaggatggggaggggctctgcgttggcttctccctggggacggggctcccctggacagaggcggggctacagattgggcggggcttctcttgggtgggacagggcttctcctgcgggggcgaggcccctcccagtaagggcgtggctctgggtgggcggggcactaggtaggcttctacctgcaggcggggctcctcctgaaggaggcggggctctaggatggggcacggctctggggtaggctgctccctgagggcggagcgcctccttaggagtggggttttatggtggatgaggcttcttcctggatggggcagagcttctcctgaccagggcaaggccccttccacgggggctgtggctctgggtgggcgtggcctgcataggctccttcctgtgggtggggcttctctgggaccaggctccaatggggcggggcttctctccgcgggtgggactcttccctgggaaccgccctcctgattaaggcgtggcttctgcaggaatcccggctccagagcaggaaattcagcccaccagccacctcatccccaaccccctgtaaggttccatccacccctgcgtcgagctgggaaggttccatgaagcgagtcgggtccccaacccgtgcccctgggatccgagggcccctctccaagcgcctggctttggaatgctccaggcgcgccgacgcctgtgccaccccttcctcagcctggggtttgaccacccacctgaccaggggccctacctggggaaagcctgaagggcctcccagcccccaaccccaagaccaagcttagtcctgggagaggacagggacttcgcagaggcaagcgaccgaggccctcccaaagaggcccgccctgcccgggctcccacaccgtcaggtactcctgccagggaactggcctgctgcgccccaggccccgcccgtctctgctctgctcagctgcgcccccttctttgcagctgcccagcccctcctccctgccctcgggtctccccacctgcactccatccagctacaggagagatagaagcctctcgtcccgtccctccctttcctccgcctgtccacagccccttaagggaaaggtaggaagagaggtccagccccccaggctgcccagagctgctggtctcatttgggggcgttcgggaggtttggggggcatcaaccccccgactgtgctgctcgcgaaggtcccacagccctgagatgggccggcccccttcctggcccctcatggcgggactggagaaatggtccgctttcctggagccaatggcccggcccctcctgactcatccgcctggcccgggaatgaatggggaggccgctgaacccacccggcccatatccctggttgcctcatggccagcgcccctcagcctctgccactgtgaaccggctcccaccctcaaggtgcggggagaagaagcggccaggcggggcgccccaagagcccaaaagagggcacaccgccatcctctgcctcaaattctgcgtttttggttttaatgttatatctgatgctgctatatccactgtccaacgg

SEQ ID NO: 227302 - protein, 663 aa, Artificial Sequence
  derived and/or modified sequence
MFLKAGRGNKVPPVRVYGPDCVVLMEPPLSKRNPPALRLADLATAQVQPLQNMTGFPALAGPPAHSQLRAAVAHLRLRDLGADPGVATTPLGPEHMAQASTLGLSPPSQAFPAHPEAPAAAARAAALVAHPGAGSYPCGGGSSGAQPSAPPPPAPPLPPTPSPPPPPPPPPPPALSGYTTTNSGGGGSSGKGHSRDFVLRRDLSATAPAAAMHGAPLGGEQRSGTGSPQHPAPPPHSAGMFISASGTYAGPDGSGGPALFPALHDTPGAPGGHPHPLNGQMRLGLAAAAAAAAAELYGRAEPPFAPRSGDAHYGAVAAAAAAALHGYGAVNLNLNLAAAAAAAAAGPGPHLQHHAPPPAPPPPPAPAQHPHQHHPHLPGAAGAFLRYMRQPIKQELICKWIDPDELAGLPPPPPPPPPPPPPPPAGGAKPCSKTFGTMHELVNHVTVEHVGGPEQSSHVCFWEDCPREGKPFKAKYKLINHIRVHTGEKPFPCPFPGCGKVFARSENLKIHKRTHTGEKPFKCEFDGCDRKFANSSDRKKHSHVHTSDKPYYCKIRGCDKSYTHPSSLRKHMKIHCKSPPPSPGPLGYSSVGTPVGAPLSPVLDPARSHSSTLSPQVTNLNEWYVCQASGAPSHLHTPSSNGTTSETEDEEIYGNPEVVRTIH

SEQ ID NO: 227303 - protein, 217 aa, Artificial Sequence
  derived and/or modified sequence
AAAALHGYGAVNLNLNLAAAAAAAHPHQHHPHLPGAAGAFLRYMRQPIKQELICKWIDPDELAGRAKPCSKTFGTMHELVNHVTVEHVGGPEQSSHVCFWEDCPREGKPFKAKYKLINHIRVHTGEKPFPCPFPGCGKVFARSENLKIHKRTHTGEKPFKCEFDGCDRKFANSSDRKKHSHVHTSDKPYYCKIRGCDKSYTHPSSLRKHMKIHCKSP

SEQ ID NO: 227304 - DNA, 4607 bp, Artificial Sequence
  derived and/or modified sequence
gcggccgcaagcacgggggcgaatccccgctgggtcgagggcctgaacgggagccaatcgagcagccgaggctactgccaatcacgcggctccctccaatcccacccgtgccatttccaaaatctcggtcccactgtgcagctcaaatgtggtgttcactctgccaatcgctggaggatagagtgggaacaggaataagcagagttaagaggccaggacaaaagaagttaaagagcgcccaatacatacatgtttttgaaggcgggcagagggaataaagtccccccagtgagggtctatgggcctgattgtgtagttctgatggagccccctttgagcaagaggaacccgccagcgctgagattagcggatttggcaacggctcaggtccagccgcttcagaatatgacaggcttcccggcgctggccggcccgcccgcccactcccaactccgggccgccgtcgcgcacctccgcctgcgggacctgggcgctgaccccggcgtggccaccactccgctcggacccgagcacatggcccaggcgagcacgctgggcctcagccctccctcccaggcgttcccggcacacccggaggctccggcagccgccgcccgtgctgcagccttggtcgcgcaccccggcgcgggcagctacccctgcggcgggggcagcagtggcgcgcagccctccgcgcccccgcccccagcccctcctcttcctcccaccccttcaccccctccccctcccccgcctcctcctcctcctgccctctcgggctacaccaccaccaacagtggcggcggcggcagcagcggcaaaggccacagcagggacttcgtcctccggagggacctttccgccacggcccccgcggcggccatgcacggggccccgctcggaggggagcagcggtccggcaccggctccccccagcacccggccccgcctccccactcggccggcatgttcatctccgccagcggcacctacgcgggcccggacggcagcggcggcccggcgctcttccccgcgctgcacgacacgccgggggccccaggcggccacccgcacccgctcaacggccagatgcgcctggggctggcggcggcagcggcagccgcggcggctgagctgtacggccgcgccgaaccgcccttcgcgccgcgctctggggacgcgcactacggggcggttgcggccgcagcggcggccgccctgcacggctacggagccgtgaacttaaacctgaacctggcggctgcggcggccgcagcagcggccgggcccgggccccacctgcagcaccacgcgccgcccccggcgccgccgccgccgccggcgcccgcgcagcacccgcaccagcaccacccccacctcccaggggcggctggggccttcctgcgctacatgcggcagccaatcaagcaggagctcatctgcaagtggatcgaccccgacgagctggccgggctgccgccgccgccgccgccgccgccgccgccgccgccaccgcccccggccggcggcgccaagccctgctccaaaactttcggcaccatgcacgagctggtgaatcacgtcacggtggagcacgtgggaggccccgagcagagcagccacgtctgcttctgggaggactgtccgcgcgagggcaagcccttcaaggccaaatacaagctcatcaaccacatccgcgtgcacaccggcgagaagccctttccctgccctttccccggctgcggcaaggtcttcgcgcgctccgagaacctcaagatccacaagcgtactcatacaggggaaaagcctttcaaatgtgaatttgatggctgtgacaggaagtttgccaatagcagtgatcggaagaaacattcccatgtccacaccagtgacaagccctactactgcaagattcgaggctgtgacaaatcctacactcacccaagctccctgaggaagcacatgaagattcactgcaagtccccgccaccttctccaggaccccttggttactcatcagtggggactccagtgggcgcccccttgtcccctgtgctggacccagccaggagtcactccagcactctgtcccctcaggtgaccaacctcaatgagtggtacgtttgccaggccagtggggcccccagccacctccacaccccttccagcaacggaaccacctctgagactgaagatgaggaaatttacgggaaccctgaagttgtgcggacgatacattagaatttattattaataataataagtgaaataataagtgggagtccttggaccacatcctaacctgagacaatgccgagcctgagacaaacccgtgactcagacttgccaccgggtctaattagccctatttattcagtatgaaaccctatggtgtttgtacatttaattaatttaattaagatatttgggcttttttttttttttttcttaaaaaacaaacaaaaaacaaccaagctggacttgtacattgcaggaggatggggctgggggcaaattgtaccaaggaaaatgaatggagagattagttaatggcgatacacactgccgatgcaatatatatatatatatatatatacatatatatatatattattttttttaaaagggggagaaaaagagcattaagtcagaacttaacacagcaccaaggccctctgcatttcccagagtgcctctcaaatgcctttgacaccataccatgggctgcttttgagcctccttgttggaccctaattctgccaaggcctcttgattgtaaaccacacacctgctgcattgccaacagatcctgttccgtacctgtgtccaaaaacatttgtaaaaaccctttgagtttaatatttgtaatttttaatttccactcttttattactgatcttagcttaatacaatatttttatacaggattatttcttcagtatcctactgtgtgattttaaaaaaagatgcagcaaccttaatatatctccatatcttgtgctactgtgattgttcaagcaaaagtggagagaagaaaagctgctgcaaaagacaactgtgaaactgtgatattttataaaatagaagaaattcaagtgctttctttttcctatatgtttttttttttttatctgaattctcagatactgcctcctaactgtgtccaaacttcttgtgtaataaagagattctgttttcgatcctaagttctttgggatgccaacattcacagtcaagtcttgaggaggtgtgatgatggcatcatgcctatttttttggaaagctgttgtttttaaaacaggccaacacctcttttatactgttgtatcagccttttaaaaagtctatttttcaatgcctgaaactgcattttaatgcattttcttccacctgagcactgagcacaccaaactggaatccatttgaaaatgacagtgtgtgaagtgtatgatttacattaaaagaggggagggagttgccatacatattaaaaatttttaaaaggtttatagttaccaccaaacactgatgaatgtgtgacctttgccagagctgtcaagctaggataaaaaaggtcaaggacctaggacaataactcttagtcgatttattttcggttggtacaacacatctcctgtgcaaaatgtagtccatcagaaacatcctacagatacactaaagagcactaatttatccttagagaccccgaagacaccccctccccagggtttgtagaaatttgttttgtgtgctgtgagtggttgatgtagtcttgtcattgttaataacttgtatgtgaacactattatttgtacagttgaattaatttattttcagacatcatcctttttttttttctttcctggaagagttcaaagcacaccaaagaattatattatacattttggtgaaagattgtcatttatgatccatggtttatttaaaaaaaaaaggaaagaaaatggaaaaatatatttttaagcttacttgaatgaacaacgtaatgtgaaaaccaagactcttcctgcatgtcttttttgcattgtgttgataagattatatatagtttatagatatattatattactagtacagtgcatggtgctgtcacttggaaagcctttcaatgttgtcttcagattgttgtgatgaatatgaaacatgcagaccctcctttataaagaaaaagaccttaaaacttgaatatgagataattttacattttaaaagtttatttgattttcatattattcactttcaaagccctttcaaatagaaaaggtatgaacttttggggggataatttatgtatcgtaaacttattagaacaaaatattcctgatgtataatgagttgttttatttatacaactttttcaatggtagtttgcactattctttattatgctacaggtttatttattatgaaacaaaggaatatgtattttatgtattttaccatgcataggttaactctttgccacagatttattggttcttgatacacctaaaataaaaaaaaatgtgtacctccaatagagagcaagcaagaatgattatgaagtaacaaatttaataaaggtattcttgttattattaaaaaaaaaa

SEQ ID NO: 227305 - DNA, 1992 bp, Artificial Sequence
  derived and/or modified sequence
atgttcctgaaggccggcagaggcaacaaggtgccccccgtgagagtgtacggccccgactgcgtggtgctgatggagccccccctgagcaagagaaacccccccgccctgagactggccgacctggccaccgcccaggtgcagcccctgcagaacatgaccggcttccccgccctggccggcccccccgcccacagccagctgagagccgccgtggcccacctgagactgagagacctgggcgccgaccccggcgtggccaccacccccctgggccccgagcacatggcccaggccagcaccctgggcctgagcccccccagccaggccttccccgcccaccccgaggcccccgccgccgccgccagagccgccgccctggtggcccaccccggcgccggcagctacccctgcggcggcggcagcagcggcgcccagcccagcgccccccccccccccgccccccccctgccccccacccccagccccccccccccccccccccccccccccccccccgccctgagcggctacaccaccaccaacagcggcggcggcggcagcagcggcaagggccacagcagagacttcgtgctgagaagagacctgagcgccaccgcccccgccgccgccatgcacggcgcccccctgggcggcgagcagagaagcggcaccggcagcccccagcaccccgccccccccccccacagcgccggcatgttcatcagcgccagcggcacctacgccggccccgacggcagcggcggccccgccctgttccccgccctgcacgacacccccggcgcccccggcggccacccccaccccctgaacggccagatgagactgggcctggccgccgccgccgccgccgccgccgccgagctgtacggcagagccgagccccccttcgcccccagaagcggcgacgcccactacggcgccgtggccgccgccgccgccgccgccctgcacggctacggcgccgtgaacctgaacctgaacctggccgccgccgccgccgccgccgccgccggccccggcccccacctgcagcaccacgcccccccccccgcccccccccccccccccgcccccgcccagcacccccaccagcaccacccccacctgcccggcgccgccggcgccttcctgagatacatgagacagcccatcaagcaggagctgatctgcaagtggatcgaccccgacgagctggccggcctgcccccccccccccccccccccccccccccccccccccccccccccgccggcggcgccaagccctgcagcaagaccttcggcaccatgcacgagctggtgaaccacgtgaccgtggagcacgtgggcggccccgagcagagcagccacgtgtgcttctgggaggactgccccagagagggcaagcccttcaaggccaagtacaagctgatcaaccacatcagagtgcacaccggcgagaagcccttcccctgccccttccccggctgcggcaaggtgttcgccagaagcgagaacctgaagatccacaagagaacccacaccggcgagaagcccttcaagtgcgagttcgacggctgcgacagaaagttcgccaacagcagcgacagaaagaagcacagccacgtgcacaccagcgacaagccctactactgcaagatcagaggctgcgacaagagctacacccaccccagcagcctgagaaagcacatgaagatccactgcaagagccccccccccagccccggccccctgggctacagcagcgtgggcacccccgtgggcgcccccctgagccccgtgctggaccccgccagaagccacagcagcaccctgagcccccaggtgaccaacctgaacgagtggtacgtgtgccaggccagcggcgcccccagccacctgcacacccccagcagcaacggcaccaccagcgagaccgaggacgaggagatctacggcaaccccgaggtggtgagaaccatccactag

SEQ ID NO: 227306 - DNA, 654 bp, Artificial Sequence
  derived and/or modified sequence
gccgccgccgccctgcacggctacggcgccgtgaacctgaacctgaacctggccgccgccgccgccgccgcccacccccaccagcaccacccccacctgcccggcgccgccggcgccttcctgagatacatgagacagcccatcaagcaggagctgatctgcaagtggatcgaccccgacgagctggccggcagagccaagccctgcagcaagaccttcggcaccatgcacgagctggtgaaccacgtgaccgtggagcacgtgggcggccccgagcagagcagccacgtgtgcttctgggaggactgccccagagagggcaagcccttcaaggccaagtacaagctgatcaaccacatcagagtgcacaccggcgagaagcccttcccctgccccttccccggctgcggcaaggtgttcgccagaagcgagaacctgaagatccacaagagaacccacaccggcgagaagcccttcaagtgcgagttcgacggctgcgacagaaagttcgccaacagcagcgacagaaagaagcacagccacgtgcacaccagcgacaagccctactactgcaagatcagaggctgcgacaagagctacacccaccccagcagcctgagaaagcacatgaagatccactgcaagagcccctag

SEQ ID NO: 227307 - DNA, 1992 bp, Artificial Sequence
  derived and/or modified sequence
atgttcctaaaagcagggcgcggcaacaaggtgcccccagttcgggtgtacggacccgactgcgtcgtgctcatggaaccgccactgagtaagagaaacccaccagctctgcggctggctgacctcgcaacggcacaagttcagccgctgcagaacatgaccggcttcccggccctagctggtccccctgcccacagccagctgagagctgcagtggcccatctgcgcctccgggatctgggggctgatccaggagtagccacaacaccactgggtcctgaacacatggctcaggcgtcaacgctgggattgtctcctcctagtcaagcgttcccggcacatccggaggcccccgccgcagccgcacgggccgctgcccttgtagcgcatcccggagccggcagttacccatgcggtggcggtagtagcggcgcccagcctagcgcccccccccccccagcacctcctctgccaccaaccccttcacctccgcctccccctccaccgccacctcctccagctctgagtggttacactactacaaatagtggaggtggcggatcctccgggaaaggccacagcagagattttgtgctgcggagagatctgtcagctaccgccccagcagccgcaatgcacggggcacctctcggaggcgagcagcggtccggtacgggctctcctcagcatcccgctccaccaccccactcggccggaatgttcataagcgcgagcgggacatatgcagggccggacggaagcggcggaccggctctgttccctgcgctgcatgatactcccggcgctcccggtggccatccacatcctctgaacgggcagatgcgcctcgggctggccgcagcagccgccgccgccgcagctgagctgtatggccgggctgaacccccattcgctccacgaagcggagacgcccattacggtgccgttgcagcagcggccgccgcagcgctacacggttacggagctgtgaatctgaatctgaacctggcagcggctgcggcagccgccgcagccggccccggcccccaccttcagcaccacgctcctccaccggcaccccctcctcctcctgctccagctcagcatccacaccagcaccaccctcatttgccaggtgccgctggcgctttccttcgctatatgagacaacctatcaaacaggaacttatctgcaaatggatagaccccgacgagcttgctggactgcctcctcctccgcccccacctcccccccctcctcccccacccccagccggcggtgctaagccgtgttctaagacttttggaaccatgcatgaactggtgaaccatgtgaccgtggagcatgtgggcggtccagagcagtccagtcacgtctgtttctgggaagattgtcctcgggagggcaaaccctttaaagcaaaatacaagctcattaaccacattagagtgcacacaggtgagaagccatttccttgtcccttccctgggtgcgggaaggtcttcgccagatcagaaaatttgaagatccacaaaagaacacacaccggcgagaagcccttcaaatgcgaatttgatggttgtgatcgaaagttcgctaactccagcgatcgtaagaagcactcccacgtccacacctcagacaagccttattactgtaagatccgcggatgtgacaagagctatacacatcccagcagtcttcgcaagcacatgaagatccactgtaaatcacctcctccttccccaggaccacttggctactcctccgttgggacccctgtgggtgcgccgctgagtccggtcttggaccccgcccgctcccattcatctaccctcagcccacaggtgaccaaccttaacgaatggtatgtctgtcaggcttcgggggcccccagccacctgcatacacctagctcgaacggcactaccagcgaaaccgaagacgaggaaatctatggcaaccccgaggtggtaaggaccatccactag

SEQ ID NO: 227308 - DNA, 654 bp, Artificial Sequence
  derived and/or modified sequence
gcagcggccgccctgcacggctacggagctgtgaacctcaatttaaatctggccgctgcagccgcagcggcacacccgcaccagcatcatccacacttacccggtgcagctggagcgttcctcaggtatatgaggcagccgatcaagcaggagctgatctgcaaatggattgatcccgatgagttggcgggaagagcaaaaccgtgctctaagacttttggaaccatgcatgagctggttaatcatgtaactgtggagcacgtaggtggtccggagcagagttcacatgtatgcttttgggaagactgcccccgcgaggggaaacctttcaaggcgaaatataagctcataaaccatatcagggtacacactggcgagaaacccttcccttgtccctttcccgggtgcggaaaggtcttcgcccgatcggagaatcttaaaatccacaagcgcacccacaccggggagaagccttttaagtgcgaatttgatggctgcgacaggaaatttgctaactcaagtgacagaaaaaagcacagtcatgtccacacgtccgacaagccatactactgtaagattcgaggatgcgataagtcttatacccacccatcctcactgagaaagcatatgaaaatccactgtaagagtccgtag

SEQ ID NO: 227309 - DNA, 1992 bp, Artificial Sequence
  derived and/or modified sequence
atgttcctgaaggccggccggggcaacaaggtgccccctgtgcgggtgtatggccctgactgtgtggtgctgatggagccccccctgagcaagaggaaccccccagccctgcggctggccgacctggccacagcccaggtgcagcccctgcagaacatgacaggcttccctgccctggccggccccccagcccacagccagctgcgggctgctgtggcccacctgcggctgcgggacctgggcgctgaccccggggtggccaccacccccctgggccctgagcacatggcccaggccagcaccctgggcctgagcccccccagccaggccttccctgcccaccctgaggccccagctgctgctgcccgggctgctgccctggtggcccaccctggagctggcagctacccctgtggcggcggcagcagcggggcccagcccagcgcccctcctcctccagccccacccctgccccccacccccagccccccacctcctcctcctcctcctcctcctccagccctgagcggctacaccaccaccaacagcggcggcggcggcagcagcggcaagggccacagccgggactttgtgctgcggcgggacctgagcgccacagccccagctgctgccatgcatggagcccccctgggcggggagcagaggtctggaacaggcagcccccagcacccagcccccccaccccacagcgctggcatgttcatcagcgccagcggcacctacgccggcccagatggcagcggcggccctgccctcttccctgccctgcatgacacccctggggcccctgggggccacccccaccccctgaatggccagatgaggctgggcctggccgctgctgctgctgctgctgctgctgagctgtatggccgggcagagcccccatttgcccccaggtctggagatgcccactatggagctgtggccgctgctgctgctgctgccctgcacggctatggagctgtgaacctgaacctgaacctggccgctgctgctgctgctgctgctgctggccctggcccccacctgcagcaccacgcccctcctccagcccctcctcctcctccagccccagcccagcacccccaccagcaccacccccacctgcccggggctgctggggccttcctgcgctacatgaggcagcccatcaagcaggagctgatctgcaagtggattgatcctgatgagctggccggcctgcccccacctcctcctcctcctcctcctcctcctcctcctcctcctgctggaggagccaagccctgcagcaagaccttcggcaccatgcatgagctggtgaaccacgtgacagtggagcacgtgggcggccctgagcagagcagccacgtgtgcttctgggaggactgcccccgggagggcaagcccttcaaggccaagtacaagctgatcaaccacatccgggtgcacactggagagaagcccttcccctgccccttccctggctgtgggaaggtgtttgcccggtctgagaacctgaagatccacaagaggacccacactggagagaagcccttcaagtgtgaatttgatggctgtgacaggaagtttgccaacagcagtgacaggaagaagcacagccacgtgcacaccagtgacaagccctactactgcaagatccggggctgtgacaagagctacacccaccccagcagcctgaggaagcacatgaagatccactgcaagagccccccacccagccctggccccctgggctacagctctgtgggcacccctgtgggcgcccccctgagccctgtgctggaccctgcccggagccacagcagcaccctgagcccccaggtgaccaacctgaatgagtggtacgtgtgccaggccagcggggcccccagccacctgcacacccccagcagcaatggcaccaccagcgagacagaagatgaggagatctacggcaaccctgaggtggtgaggaccatccactag

SEQ ID NO: 227310 - DNA, 654 bp, Artificial Sequence
  derived and/or modified sequence
gctgctgctgccctgcacggctacggggctgtgaacctgaacctgaacctggccgctgctgctgctgctgcccacccccaccagcaccacccccacctgcccggggctgctggggccttcctgcgctacatgaggcagcccatcaagcaggagctgatctgcaagtggattgatcctgatgagctggccggccgggccaagccctgcagcaagaccttcggcaccatgcatgagctggtgaaccacgtgacagtggagcacgtgggcggccctgagcagagcagccacgtgtgcttctgggaggactgcccccgggagggcaagcccttcaaggccaagtacaagctgatcaaccacatccgggtgcacactggagagaagcccttcccctgccccttccctggctgtgggaaggtgtttgcccggtctgagaacctgaagatccacaagaggacccacactggagagaagcccttcaagtgtgaatttgatggctgtgacaggaagtttgccaacagcagtgacaggaagaagcacagccacgtgcacaccagtgacaagccctactactgcaagatccggggctgtgacaagagctacacccaccccagcagcctgaggaagcacatgaagatccactgcaagagcccctag

SEQ ID NO: 227311 - DNA, 1992 bp, Artificial Sequence
  derived and/or modified sequence
atgttcctgaaggccggccggggcaacaaggtgccccccgtgcgggtgtatggccctgattgcgttgtgctcatggaaccgcccctctccaagcgaaatccaccagcattgcgtctcgctgaccttgctacggcccaagtgcagccgttgcaaaacatgaccggctttcccgcccttgccggacctcctgctcactctcagcttcgagccgctgtggctcacttgcggctccgggacctgggggccgatccaggtgttgccacaactccccttgggcccgagcatatggcacaagcaagcactcttggattgtcccctccatcccaggcatttccggcccaccctgaggcccctgcagctgcagcccgggccgctgccctggttgcccatcctggagccggtagctatccgtgtgggggggggagctctggagcgcagcctagtgcgccacccccccccgctccacccctgccccccacaccctcgccaccaccaccacctcctccgcccccaccgccggccttgtcaggttacactacaacgaattcgggaggcggggggagtagtgggaaggggcattcacgggactttgtgttgaggagagatctgagcgcgaccgcaccagcagctgccatgcacggagctccactaggcggcgagcagcgtagcggaaccggcagtcctcagcatccagcacctccaccccacagtgctggtatgttcatcagtgcctctggaacctacgccgggccggatggcagcggaggccctgccctttttcctgctctgcacgacacccctggtgcccctggcggccatccccacccgctgaatggacaaatgcgcctgggcctcgccgctgctgccgctgccgcagcagccgagctgtacggtcgagccgagcctcccttcgccccccgctctggagacgcccactatggggccgtcgctgctgctgcagccgcagcacttcacggttacggagcagtcaatttgaatctgaacctggccgcagctgcagctgccgcagccgccggccccggcccccacctacaacaccacgctcccccacccgctccgccaccccctcccgctcccgctcagcatcctcatcaacaccacccccacctgcccggagctgctggcgcatttctgaggtacatgagacagccaataaagcaggagctcatttgcaagtggattgatccagatgagctggccggcttgcctccacctccaccaccaccacctccccctccccccccccctccagctggtggggccaagccgtgttctaagacattcggcaccatgcatgagctggtgaaccacgtcacagtagaacatgtaggaggaccagagcagagcagccacgtgtgcttctgggaagattgcccccgagagggaaagccctttaaagctaaatacaaactgatcaatcatataagagtgcatacaggtgaaaagccatttccctgcccatttcctggatgtggcaaagtttttgcaaggtccgagaatcttaagatccataagcgaactcatacaggtgaaaaacccttcaaatgcgaatttgacggatgcgacaggaaattcgctaatagctctgaccgcaaaaagcatagtcacgttcacactagcgacaagccctattattgtaaaatcagaggctgcgacaagtcatacacccatccttcatcactgcgtaaacacatgaagatccattgcaaatctccaccaccatctccggggccattgggctactcgagtgtgggtacgcccgttggagcccctctttctccagttctggaccccgcaaggagtcattcttcgactctctcgcctcaggtgacaaatctgaacgagtggtacgtttgccaggcgtctggggccccgagccacctccatacccctagctctaacggaacaaccagtgagaccgaagacgaggagatatacggcaatcctgaggtggttcggaccatacactag

SEQ ID NO: 227312 - DNA, 654 bp, Artificial Sequence
  derived and/or modified sequence
gccgccgccgccctgcacggctacggcgccgtgaacctgaacctgaatttggccgccgcagccgcggccgctcatccacaccagcaccaccctcacttgccgggtgcggccggcgcctttttgcggtacatgcgccagccaatcaagcaggagctcatatgtaaatggatcgacccggacgagctcgctggaagagctaagccttgtagcaagacctttgggaccatgcacgaactagtcaatcacgtgacggtggagcacgttgggggccccgagcagtcaagtcatgtgtgtttttgggaagactgccctagggagggaaaacctttcaaggccaagtataagttgattaaccatattcgtgtgcacaccggggaaaagcctttcccttgccccttcccagggtgtggaaaagtgtttgcacgctccgaaaatctcaagatccataagagaactcacacgggtgagaaacccttcaagtgcgagttcgatggatgtgaccggaaattcgcaaactccagcgatcggaagaaacatagccatgtgcatacctctgataagccctactactgcaaaattcggggctgcgacaaatcatatacacatccttcctcactccgaaaacacatgaagattcactgcaaaagtccctag

SEQ ID NO: 227313 - DNA, 1992 bp, Artificial Sequence
  derived and/or modified sequence
atgttcttgaaagctggcagagggaataaggttcctcctgtccgagtatatggcccagactgcgtcgtcctcatggaaccccctctgtccaaacggaatcctcccgcactcagactggccgatctggccacagcccaggtacagccgttacaaaacatgacaggatttcctgccttggcaggtccaccagcccattctcagctgagagccgctgtcgcccacctacgcctccgggacctcggtgccgatcctggggtggctacgaccccactgggcccagagcacatggcccaggctagcactcttgggctgtctcctccatctcaggccttccccgcacacccagaagccccagcagctgctgccagagctgccgcattggttgcccaccccggagccggaagttacccatgcggaggcggttcatccggggctcagccatccgcccctcctccacccgcacccccactaccacctacccccagtcctcctccccctccccctcctccccctcccccagcactttctggctacacgaccacgaactcggggggaggaggctcatcgggcaaggggcactccagagacttcgtgctgcgacgagacttgtccgccaccgcaccagccgcagcgatgcacggggcaccccttggaggggagcagagatctggcacgggctcaccccagcatcccgctccccctccacacagcgcagggatgtttatttccgcttcgggcacatatgccggacctgatggcagtggaggaccggctctgttcccagcactgcacgatacacctggcgctcctgggggacaccctcatccattgaatgggcagatgagactcgggctggctgccgctgctgccgctgcagctgcagagctctacgggagagcggaacccccattcgccccacggtccggagatgcacattatggtgccgttgccgctgcagcagccgcagctcttcatgggtacggtgccgttaacctgaatctgaatcttgcggctgctgctgctgccgctgcagcagggcctggtccgcatctgcagcaccacgcgcctcccccagccccacctccccctcctgccccagcccagcatccgcaccagcatcacccgcatctgcccggagcagcgggagcatttctcagatacatgcgtcagcccatcaaacaggaactaatatgtaagtggattgaccccgacgaactcgcaggtctgcctccaccccctccacctccgccacccccaccgccacctcctccagctggtggcgcaaaaccttgcagcaagacttttggcaccatgcacgaattggtaaatcacgtgaccgttgagcatgtgggcggaccagaacagtcctcccatgtgtgcttctgggaagactgtccaagagagggcaagcccttcaaagctaaatacaaattgattaatcacattagagtccatactggggagaaaccctttccttgtcctttccctggctgtggcaaagtgtttgctcgttctgaaaatttgaaaatacataagcggacacacactggcgagaagccttttaaatgcgaattcgatggctgcgatcggaagtttgcgaactcttctgacaggaagaaacacagccatgttcataccagcgacaaaccttactactgcaaaatccgaggatgcgacaaatcttacacccaccccagctcactccgtaaacatatgaaaatccattgcaagagccccccacctagccctgggccattagggtatagctctgtgggcacacctgtaggggcaccgctttcacccgttctcgacccagctcggtctcactccagcacactcagcccccaggtgaccaatctaaacgaatggtatgtctgccaggcctcaggcgcaccctcccacctccatactccgtcctctaacgggactacctctgaaacggaggatgaagaaatctatggtaaccctgaggtggtccggacaatccattag

SEQ ID NO: 227314 - DNA, 654 bp, Artificial Sequence
  derived and/or modified sequence
gctgcagcagccttacacggatacggggcagtgaacctgaatctgaatttagctgccgcagctgctgcagcgcatccacaccagcatcatccacacttgccaggcgcagcaggcgctttcctgcggtatatgcgacagccaataaagcaggagttaatctgcaagtggatagatcccgatgagcttgctgggagagcgaagccctgctccaagactttcggcactatgcacgagttagtcaaccacgtcaccgtcgaacatgtgggcggtccggagcaatcgtcccacgtgtgcttctgggaggattgccccagagagggcaagccatttaaagctaagtacaaacttatcaatcacatcagagtacacaccggcgaaaagccattcccgtgtccctttccagggtgtggcaaggtctttgccagatctgagaacctgaagatccacaaaagaactcatactggggaaaaacctttcaaatgcgaatttgacggctgcgatagaaagtttgccaattcctctgacagaaagaaacattctcacgtgcacacctcagacaagccgtactattgcaagatcagaggttgtgacaagtcatacacccatccctcaagcctgaggaaacatatgaaaatccactgcaaaagcccctag

SEQ ID NO: 227315 - DNA, 2406 bp, Artificial Sequence
  derived and/or modified sequence
ggggcgaatccccgctgggtcgagggcctgaacgggagccaatcgagcagccgaggctactgccaatcacgcggctccctccaatcccacccgtgccatttccaaaatctcggtcccactgtgcagctcaaatgtggtgttcactctgccaatcgctggaggatagagtgggaacaggaataagcagagttaagaggccaggacaaaagaagttaaagagcgcccaatacatacatgtttttgaaggcgggcagagggaataaagtccccccagtgagggtctatgggcctgattgtgtagttctgatggagccccctttgagcaagaggaacccgccagcgctgagattagcggatttggcaacggctcaggtccagccgcttcagaatatgacaggcttcccggcgctggccggcccgcccgcccactcccaactccgggccgccgtcgcgcacctccgcctgcgggacctgggcgctgaccccggcgtggccaccactccgctcggacccgagcacatggcccaggcgagcacgctgggcctcagccctccctcccaggcgttcccggcacacccggaggctccggcagccgccgcccgtgctgcagccttggtcgcgcaccccggcgcgggcagctacccctgcggcgggggcagcagtggcgcgcagccctccgcgcccccgcccccagcccctcctcttcctcccaccccttcaccccctccccctcccccgcctcctcctcctcctgccctctcgggctacaccaccaccaacagtggcggcggcggcagcagcggcaaaggccacagcagggacttcgtcctccggagggacctttccgccacggcccccgcggcggccatgcacggggccccgctcggaggggagcagcggtccggcaccggctccccccagcacccggccccgcctccccactcggccggcatgttcatctccgccagcggcacctacgcgggcccggacggcagcggcggcccggcgctcttccccgcgctgcacgacacgccgggggccccaggcggccacccgcacccgctcaacggccagatgcgcctggggctggcggcggcagcggcagccgcggcggctgagctgtacggccgcgccgaaccgcccttcgcgccgcgctctggggacgcgcactacggggcggttgcggccgcagcggcggccgccctgcacggctacggagccgtgaacttaaacctgaacctggcggctgcggcggccgcagcagcggccgggcccgggccccacctgcagcaccacgcgccgcccccggcgccgccgccgccgccggcgcccgcgcagcacccgcaccagcaccacccccacctcccaggggcggctggggccttcctgcgctacatgcggcagccaatcaagcaggagctcatctgcaagtggatcgaccccgacgagctggccgggctgccgccgccgccgccgccgccgccgccgccgccgccaccgcccccggccggcggcgccaagccctgctccaaaactttcggcaccatgcacgagctggtgaatcacgtcacggtggagcacgtgggaggccccgagcagagcagccacgtctgcttctgggaggactgtccgcgcgagggcaagcccttcaaggccaaatacaagctcatcaaccacatccgcgtgcacaccggcgagaagccctttccctgccctttccccggctgcggcaaggtcttcgcgcgctccgagaacctcaagatccacaagcgtactcatacaggggaaaagcctttcaaatgtgaatttgatggctgtgacaggaagtttgccaatagcagtgatcggaagaaacattcccatgtccacaccagtgacaagccctactactgcaagattcgaggctgtgacaaatcctacactcacccaagctccctgaggaagcacatgaagattcactgcaagtccccgccaccttctccaggaccccttggttactcatcagtggggactccagtgggcgcccccttgtcccctgtgctggacccagccaggagtcactccagcactctgtcccctcaggtgaccaacctcaatgagtggtacgtttgccaggccagtggggcccccagccacctccacaccccttccagcaacggaaccacctctgagactgaagatgaggaaatttacgggaaccctgaagttgtgcggacgatacattagaatttattattaataataataagtgaaataataagtgggagtccttggaccacatcctaacctgagacaatgccgagcctgagacaaacccgtgactcagacttgccaccgggtctaattagccctatttattcagtatgaaaccctatggtgtttgtacatttaattaatttaattaag

SEQ ID NO: 227316 - DNA, 3262 bp, Artificial Sequence
  derived and/or modified sequence
gcggcggccgccctgcacggctacggagccgtgaacttaaacctgaacctggcggctgcggcggccgcagcacacccgcaccagcaccacccccacctcccaggggcggctggggccttcctgcgctacatgcggcagccaatcaagcaggagctcatctgcaagtggatcgaccccgacgagctggccgggcgcgccaagccctgctccaaaactttcggcaccatgcacgagctggtgaatcacgtcacggtggagcacgtgggaggccccgagcagagcagccacgtctgcttctgggaggactgtccgcgcgagggcaagcccttcaaggccaaatacaagctcatcaaccacatccgcgtgcacaccggcgagaagccctttccctgccctttccccggctgcggcaaggtcttcgcgcgctccgagaacctcaagatccacaagcgtactcatacaggggaaaagcctttcaaatgtgaatttgatggctgtgacaggaagtttgccaatagcagtgatcggaagaaacattcccatgtccacaccagtgacaagccctactactgcaagattcgaggctgtgacaaatcctacactcacccaagctccctgaggaagcacatgaagattcactgcaagtccccgccaccttctccaggaccccttggttactcatcagtggggactccagtgggcgcccccttgtcccctgtgctggacccagccaggagtcactccagcactctgtcccctcaggtgaccaacctcaatgagtggtacgtttgccaggccagtggggcccccagccacctccacaccccttccagcaacggaaccacctctgagactgaagatgaggaaatttacgggaaccctgaagttgtgcggacgatacattagaatttattattaataataataagtgaaataataagtgggagtccttggaccacatcctaacctgagacaatgccgagcctgagacaaacccgtgactcagacttgccaccgggtctaattagccctatttattcagtatgaaaccctatggtgtttgtacatttaattaatttaattaagatatttgggcttttttttttttttttcttaaaaaacaaacaaaaaacaaccaagctggacttgtacattgcaggaggatggggctgggggcaaattgtaccaaggaaaatgaatggagagattagttaatggcgatacacactgccgatgcaatatatatatatatatatatatacatatatatatatattattttttttaaaagggggagaaaaagagcattaagtcagaacttaacacagcaccaaggccctctgcatttcccagagtgcctctcaaatgcctttgacaccataccatgggctgcttttgagcctccttgttggaccctaattctgccaaggcctcttgattgtaaaccacacacctgctgcattgccaacagatcctgttccgtacctgtgtccaaaaacatttgtaaaaaccctttgagtttaatatttgtaatttttaatttccactcttttattactgatcttagcttaatacaatatttttatacaggattatttcttcagtatcctactgtgtgattttaaaaaaagatgcagcaaccttaatatatctccatatcttgtgctactgtgattgttcaagcaaaagtggagagaagaaaagctgctgcaaaagacaactgtgaaactgtgatattttataaaatagaagaaattcaagtgctttctttttcctatatgtttttttttttttatctgaattctcagatactgcctcctaactgtgtccaaacttcttgtgtaataaagagattctgttttcgatcctaagttctttgggatgccaacattcacagtcaagtcttgaggaggtgtgatgatggcatcatgcctatttttttggaaagctgttgtttttaaaacaggccaacacctcttttatactgttgtatcagccttttaaaaagtctatttttcaatgcctgaaactgcattttaatgcattttcttccacctgagcactgagcacaccaaactggaatccatttgaaaatgacagtgtgtgaagtgtatgatttacattaaaagaggggagggagttgccatacatattaaaaatttttaaaaggtttatagttaccaccaaacactgatgaatgtgtgacctttgccagagctgtcaagctaggataaaaaaggtcaaggacctaggacaataactcttagtcgatttattttcggttggtacaacacatctcctgtgcaaaatgtagtccatcagaaacatcctacagatacactaaagagcactaatttatccttagagaccccgaagacaccccctccccagggtttgtagaaatttgttttgtgtgctgtgagtggttgatgtagtcttgtcattgttaataacttgtatgtgaacactattatttgtacagttgaattaatttattttcagacatcatcctttttttttttctttcctggaagagttcaaagcacaccaaagaattatattatacattttggtgaaagattgtcatttatgatccatggtttatttaaaaaaaaaaggaaagaaaatggaaaaatatatttttaagcttacttgaatgaacaacgtaatgtgaaaaccaagactcttcctgcatgtcttttttgcattgtgttgataagattatatatagtttatagatatattatattactagtacagtgcatggtgctgtcacttggaaagcctttcaatgttgtcttcagattgttgtgatgaatatgaaacatgcagaccctcctttataaagaaaaagaccttaaaacttgaatatgagataattttacattttaaaagtttatttgattttcatattattcactttcaaagccctttcaaatagaaaaggtatgaacttttggggggataatttatgtatcgtaaacttattagaacaaaatattcctgatgtataatgagttgttttatttatacaactttttcaatggtagtttgcactattctttattatgctacaggtttatttattatgaaacaaaggaatatgtattttatgtattttaccatgcataggttaactctttgccacagatttattggttcttgatacacctaaaataaaaaaaaatgtgtacctccaatagagagcaagcaagaatgattatgaagtaacaaatttaataaaggtattcttgttattatt

SEQ ID NO: 227317 - DNA, 375 bp, Artificial Sequence
  derived and/or modified sequence
atgctgcccagcaaggccttcgagttcgccaccgtgaagagcatgcacggcatcttcggctgcggcctggccctgccccccgtgttcgccgccgagctgctgtacctgaccagagcctgcgccagcgacgagcagcccttcatcaccgccctgagacccccccccagacccccccccagcgccctgcagttcatcagcagactggtgcccatcgccacctgcggcctgggcggcccccccgacatcctgagcttcggcagccccgtgacccccgagctgctgcccttctggggcgcccacatctgcgacaccctggtgtgccccgtgcacttcctgcacctggagttcctgagctgcagccacatcagcatctag

SEQ ID NO: 227318 - DNA, 123 bp, Artificial Sequence
  derived and/or modified sequence
atgctgctgcgggagatcacctacagcatcacccccctgagcctgcacggaacttcactcctgaattgcaattggagggcaaccgggttggtgaccctcgaagggcatcgcccgtttcagtag

SEQ ID NO: 227319 - protein, 297 aa, Artificial Sequence
  derived and/or modified sequence
MNRGFSRKSHTFLPKIFFRKMSSSGAKDKPELQFPFLQDEDTVATLLECKTLFILRGLPGSGKSTLARVIVDKYRDGTKMVSADAYKITPGARGALKELRQFVPGDEPREKMDLVTYFGKRPPGVLHCTTKFCDYGKAPGAEEYAQQDVLKKSYSKAFTLTISALFVTPKTTGARVELSEQQLQLWPSDVDKLSPTDNLPRGSRAHITLGCAADVEAVQTGLDLLEILRQEKGGSRGEEVGELSRGKLYSLGNGRWMLTLAKNMEVRAIFTGYYGKGKPVPTQGSRKGGALQSCTII

SEQ ID NO: 227320 - protein, 401 aa, Artificial Sequence
  derived and/or modified sequence
MSSSGAKDKPELQFPFLQDEDTVATLLECKTLFILRGLPGSGKSTLARVIVDKYRDGTKMVSADAYKITPGARGAFSEEYKRLDEDLAAYCRRRDIRILVLDDTNHERERLEQLFEMADQYQYQVVLVEPKTAWRLDCAQLKEKNQWQLSADDLKKLKPGLEKDFLPLYFGWFLTKKSSETLRKAGQVFLEELGNHKAFKKELRQFVPGDEPREKMDLVTYFGKRPPGVLHCTTKFCDYGKAPGAEEYAQQDVLKKSYSKAFTLTISALFVTPKTTGARVELSEQQLQLWPSDVDKLSPTDNLPRGSRAHITLGCAADVEAVQTGLDLLEILRQEKGGSRGEEVGELSRGKLYSLGNGRWMLTLAKNMEVRAIFTGYYGKGKPVPTQGSRKGGALQSCTII

SEQ ID NO: 227321 - protein, 421 aa, Artificial Sequence
  derived and/or modified sequence
MNRGFSRKSHTFLPKIFFRKMSSSGAKDKPELQFPFLQDEDTVATLLECKTLFILRGLPGSGKSTLARVIVDKYRDGTKMVSADAYKITPGARGAFSEEYKRLDEDLAAYCRRRDIRILVLDDTNHERERLEQLFEMADQYQYQVVLVEPKTAWRLDCAQLKEKNQWQLSADDLKKLKPGLEKDFLPLYFGWFLTKKSSETLRKAGQVFLEELGNHKAFKKELRQFVPGDEPREKMDLVTYFGKRPPGVLHCTTKFCDYGKAPGAEEYAQQDVLKKSYSKAFTLTISALFVTPKTTGARVELSEQQLQLWPSDVDKLSPTDNLPRGSRAHITLGCAADVEAVQTGLDLLEILRQEKGGSRGEEVGELSRGKLYSLGNGRWMLTLAKNMEVRAIFTGYYGKGKPVPTQGSRKGGALQSCTII

SEQ ID NO: 227322 - DNA, 1266 bp, Artificial Sequence
  derived and/or modified sequence
atgaatcgcggcttttccaggaagtctcacacattcctccctaagatattcttcagaaagatgagttccagcggcgctaaggacaagcctgaattacagttccctttccttcaagacgaggacaccgttgcaactctgttagagtgtaagaccctgttcatattgcggggtctgccaggaagtggcaagtcgaccctggctagggttatcgtggacaaataccgtgacggcaccaaaatggtatctgccgacgcttacaagattacaccgggcgcaagaggagccttcagtgaggagtataagaggctggatgaagacctggccgcgtactgtcggcgcagagatattcgaatcctagtgctcgacgatacaaaccacgagcgggagcggcttgagcagctgtttgaaatggcagaccagtatcagtatcaggttgtcctcgtcgagcccaagactgcatggagactggactgtgctcaattgaaagaaaagaatcagtggcagctctcagccgacgatctgaagaagctcaaacctggcctcgagaaggactttcttccactttactttggatggttcctcactaagaagagctccgagacgctccgaaaagctggacaggtgttcctggaagagcttggcaaccataaggccttcaagaaagagctcagacagtttgtgcctggcgacgaaccacgcgaaaaaatggacctcgttacgtacttcgggaaacggcccccaggcgtcctgcactgtacaaccaaattttgtgattacggaaaagctcccggggccgaggaatacgctcagcaggatgttctgaagaagagctactccaaagcctttactcttactattagcgcccttttcgtcaccccaaaaacaaccggggctagagtggaactttctgaacagcagttgcagctgtggcccagtgatgttgacaaactgtcgcctactgataatctgccccgcgggtcgagagcccatatcacgctaggctgcgccgccgatgtagaggctgtgcagacagggctagatctgctagagatcttgcggcaggaaaagggagggtcacgcggtgaggaggttggggagctttctcgaggaaagctgtactccctgggaaatgggcggtggatgctgacgcttgctaagaacatggaagtcagggctattttcacaggctactatggaaaagggaaacccgttccaactcagggttccagaaaaggaggagcactgcagtcatgcacaatcatctag

SEQ ID NO: 227323 - DNA, 1266 bp, Artificial Sequence
  derived and/or modified sequence
atgaacagaggcttcagcaggaagagccacaccttcctgcccaagatcttcttcaggaagatgagcagcagcggggccaaggacaagccagagctgcagttccccttcctgcaggatgaggacacagtggccaccctgctggagtgcaagaccctcttcatcctgcggggcctgcccggcagcggcaagagcaccctggcccgggtcatcgtggacaagtacagagatggcaccaagatggtgtctgcagatgcctacaagatcacccctggggcccggggggccttcagcgaggagtacaagaggctggatgaggacctggccgcctactgcagaagaagagacatccgcatcctggtgctggatgacaccaaccacgagcgggagcggctggagcagctgtttgagatggctgaccagtaccagtaccaggtggtgctggtggagcccaagacagcctggaggctggactgtgcccagctgaaggagaagaaccagtggcagctgtctgcagatgacctgaagaagctgaagccaggcctggagaaggacttcctgcccctgtacttcggctggttcctgaccaagaagagcagcgagaccctgaggaaggccggccaggtgttcctggaggagctgggcaaccacaaggccttcaagaaggagctgcggcagtttgtgcctggagatgagccccgggagaagatggacctggtgacctactttgggaagaggcctcctggggtgctgcactgcaccaccaagttctgtgactatggcaaggcccctggagctgaggagtatgcccagcaggatgtgctgaagaagagctacagcaaggccttcaccctgaccatcagcgccctgtttgtgacccccaagaccaccggggcccgggtggagctgtctgagcagcagctgcagctgtggcccagtgatgtggacaagctgagccccacagacaacctgccccggggcagccgggcccacatcaccctgggctgtgccgcagatgtggaggccgtgcagacaggcctggacctgctggagatcctgcggcaggagaagggcggcagcagaggagaggaggtgggggagctgagccggggcaagctgtacagcctgggcaatggccgctggatgctgaccctggccaagaacatggaggtgcgggccatcttcaccggctactacggcaagggcaagcctgtgcccacccagggcagcaggaaaggaggagccctgcagagctgcaccatcatctag

SEQ ID NO: 227324 - DNA, 1266 bp, Artificial Sequence
  derived and/or modified sequence
atgaaccggggcttcagccggaagagccacaccttcctgcccaagatcttctttagaaagatgtcctctagtggggcaaaggacaaacccgagctgcagtttccattcctccaggacgaagatacggtcgccactctgcttgaatgtaaaaccttattcatattacgcggcctgccaggcagcggaaagtctaccttggcccgggtcatcgtggacaaatatcgggatggtaccaagatggtgtcagccgacgcgtacaagatcacaccgggtgcaaggggggcattttcagaggagtataagagactggatgaagacctagccgcctattgtcgacgtcgtgatatcaggatactggttctcgatgatacgaaccatgagagagagcgtctggaacaactgtttgagatggctgatcaatatcagtaccaggtcgtgctcgtggagcccaagaccgcatggcgcctcgattgcgcacaactcaaggaaaaaaaccagtggcagctaagcgccgacgacctgaagaagttaaaaccagggctggaaaaagattttcttccactgtattttgggtggttcctcacaaaaaaaagctctgaaaccctccgcaaggccggccaggtgtttctggaggagctgggaaaccataaggcctttaaaaaggagctgcgccaattcgtcccaggcgacgagcctagggaaaagatggacctcgtgacctacttcggcaaacggccccctggagtgctgcactgcactacaaagttctgtgattatgggaaggcccctggtgccgaagaatacgcgcagcaggacgttttgaagaagagctatagtaaagcctttacattgaccatcagtgcccttttcgtcacacccaagacgaccggcgccagagtcgaattatccgagcagcaactgcagttatggccctccgatgttgacaaattaagtccaacagataacctccccagaggaagcagagcacacataactctggggtgcgcagcagacgtcgaagcagtacagactggccttgacttgctggaaatcctgagacaggaaaaaggaggtagtagaggcgaagaagtgggggaactgtccaggggaaaactgtacagtttgggaaatgggcgctggatgctgactttggccaagaacatggaggttagggcgatttttacaggctattatgggaagggaaaaccagtgccaacacagggatcccgaaagggaggcgccctccaatcttgtacaatcatttag

SEQ ID NO: 227325 - DNA, 1266 bp, Artificial Sequence
  derived and/or modified sequence
atgaaccgaggtttttcacggaaatcccatacttttcttcccaaaatcttctttcgcaaaatgtcatcctcgggagcgaaggacaaaccggaactgcaattcccgtttctgcaggacgaagacaccgttgctacactgcttgagtgtaaaaccctctttatacttagaggcctgcccggtagtggtaagtcaacattggccagggtgatcgtagataaatacagagacggcactaagatggtgtccgccgacgcctacaagatcactcctggagcacgaggggcttttagtgaagaatacaagcgccttgatgaggacctagccgcatactgtagaagaagggatattagaatacttgtgcttgatgacacgaaccacgagcgggagcgattagagcagctattcgagatggctgatcagtaccaataccaggtcgtcctggttgagccgaagacagcttggcggctggattgtgctcagttaaaggaaaagaaccagtggcagttaagcgccgacgacttgaaaaagttgaagcccggactggaaaaagacttcctgccgctgtacttcggctggtttctcacaaaaaagtcttccgagactctgcggaaagcgggacaggtgtttttggaagaactgggtaaccacaaagcctttaagaaggagctgcgtcagtttgttcctggtgatgagcctagggaaaagatggacctagtgacgtattttgggaaacggcctcccggagtcctgcattgtaccaccaaattttgtgattatgggaaggcacctggcgcagaggaatatgcccagcaggacgttctgaaaaagtcctactccaaggctttcaccctcacgatctctgctctttttgtaactccaaaaacaaccggggcacgcgttgagctgagcgaacagcagctgcagttgtggcctagcgacgtggataagctgtcccccaccgataatctcccgcgtggctctagggcccatattaccctcggctgtgcagctgacgtggaggcagtgcagactggcctcgacctgctggagatcttaagacaggaaaagggcggaagccgaggtgaggaggtgggagaactcagcaggggcaagttatactcactggggaatggtcgctggatgctcaccctagcaaagaacatggaagttcgggctatctttaccgggtattacggcaagggaaaacccgtgcccacacagggctcccgaaagggaggggctctgcaatcttgcacgattatttag

SEQ ID NO: 227326 - DNA, 2583 bp, Artificial Sequence
  derived and/or modified sequence
ctccgcgcaggcgggcggccccggagcgctggtgccggcagaggcggcgacggtggcgcccctcctcatcatgaggcttctcccgaaaaagccacacattcctgcccaagatcttcttccgcaagatgtcatcctcaggggccaaggacaagcctgagctgcagtttcccttccttcaggatgaggacacagtggccacgctgctagagtgcaagacgctcttcatcttgcgcggcctgccaggaagcggcaagtccacgctggcacgggtcatcgtggacaagtaccgtgatggcaccaagatggtgtcggctgacgcttacaagatcacccccggcgctcgaggagccttctccgaggagtacaagcggctcgatgaggacctggctgcctactgccgccgccgggacatcagaattcttgtgcttgatgacaccaaccacgaacgggaacggctggagcagctctttgaaatggccgaccagtaccagtaccaggtggtgctggtggagcccaagacggcgtggcggctggactgtgcccagctcaaggagaagaaccagtggcagctgtcggctgatgacctgaagaagctgaagcctgggctggagaaggacttcctgccgctctacttcggctggttcctgaccaagaagagctctgagaccctccgcaaagccggccaggtcttcctggaagagctggggaaccacaaggccttcaagaaggagctgcgacaattcgtccctggggatgagcccagggagaagatggacttggtcacctactttggaaagagacccccaggcgtgctgcattgcacaaccaagttttgtgactacgggaaggctcccggggcagaggagtacgctcaacaagatgtgttaaagaaatcttactccaaggccttcacgctgaccatctctgccctctttgtgacacccaagacgactggggcccgggtggagttaagcgagcagcaactgcagttgtggccgagtgatgtggacaagctgtcacccactgacaacctgccgcgggggagccgcgcccacatcaccctcggctgtgcagctgacgtagaggccgtgcagacgggccttgacctcttagagattctgcggcaggagaaggggggcagccgaggcgaggaggtgggcgagctaagccggggcaagctctattccttgggcaatgggcgctggatgctgaccctggccaagaacatggaggtcagggccatcttcacggggtactacgggaaaggcaaacctgtgcccacgcaaggtagccggaaggggggcgccttgcagtcctgcaccatcatatgagtgttctcaccaccacttatgcccctagaagggaaggggagagggaaacgtgccctctgtttgatccttgttttgtgacattttttttttttttttttttactcaaagttaacctacctgtaactttttaaaaacttgtaaaataactgaccctcccttcctgtccgccctcttcccctctaatgctcacgctcccaacacaaggtgggcagggaggcaccattcaggaacctggaccaaagctgacgaggctgggccaagccagggatggggccacagccagaaccccgagccctacttccaggttctggttagctcagccccagcccagcccagctgctctgcccagagctgggtgagtggggagacacctcagagccccgcaaaacccactgaccggaggcaaaaggcagtggggctgggggtagttttccatggtcacagagaactagtggtggctctgagaaggggaggacctctgggctttgattccatctccttgtcttttttctttgtttttagagacagggtcctgctatttcccaagctggagtgcagtggtgcgatcatggctcactgcagcctcgaactcctgggctcaagcaatcctcctgagtgatcccatttcttaatcagtgtagccccaagaaggctggggctatttaccagggtagaaaaaggagcttacctcccacctttggtcctaagtccctgccccctccccttcacaccataactaggtaacagtttgataactagggaagaaagcagaacagttaagcagccgccacatccccgctggctgggggcctcactccaggaaggggctggactggctgtcctttccagtggcctggctccgctgtgtggatggggagatcggggccagaggcagaaccctggtgaggaagctccagtcctgctctctacccagcccatcttgcctccatggtgcctctggaggcctctgggcctcctctaacaggggctggtgggcaccaagagccaatggagtagacccctggctggtaagggccaagtcccaccggttgcttctgggaaggggtttctaacactagtctgtgtgctgtggttcctggggtgccctccactgccctctgttcagtaacagggccttgctaatcgggttgtcactcaacaaaagtgctttggatttaagttactatcctggctttgcccaacctcagcaacctgtaagactgataatgaaataaatcatgttaatcctagc

SEQ ID NO: 227327 - DNA, 2660 bp, Artificial Sequence
  derived and/or modified sequence
gggtgcccgctccgccccccgggctatgtaaagcggccgggctcgggtcgtgccaccgctggactcccgtgtccctccgcgcaggcgggcggccccggagcgctggtgccggcagaggcggcgacggtggcgcccctcctcatcatgaacagaggcttctcccgaaaaagccacacattcctgcccaagatcttcttccgcaagatgtcatcctcaggggccaaggacaagcctgagctgcagtttcccttccttcaggatgaggacacagtggccacgctgctagagtgcaagacgctcttcatcttgcgcggcctgccaggaagcggcaagtccacgctggcacgggtcatcgtggacaagtaccgtgatggcaccaagatggtgtcggctgacgcttacaagatcacccccggcgctcgaggagccttctccgaggagtacaagcggctcgatgaggacctggctgcctactgccgccgccgggacatcagaattcttgtgcttgatgacaccaaccacgaacgggaacggctggagcagctctttgaaatggccgaccagtaccagtaccaggtggtgctggtggagcccaagacggcgtggcggctggactgtgcccagctcaaggagaagaaccagtggcagctgtcggctgatgacctgaagaagctgaagcctgggctggagaaggacttcctgccgctctacttcggctggttcctgaccaagaagagctctgagaccctccgcaaagccggccaggtcttcctggaagagctggggaaccacaaggccttcaagaaggagctgcgacaattcgtccctggggatgagcccagggagaagatggacttggtcacctactttggaaagagacccccaggcgtgctgcattgcacaaccaagttttgtgactacgggaaggctcccggggcagaggagtacgctcaacaagatgtgttaaagaaatcttactccaaggccttcacgctgaccatctctgccctctttgtgacacccaagacgactggggcccgggtggagttaagcgagcagcaactgcagttgtggccgagtgatgtggacaagctgtcacccactgacaacctgccgcgggggagccgcgcccacatcaccctcggctgtgcagctgacgtagaggccgtgcagacgggccttgacctcttagagattctgcggcaggagaaggggggcagccgaggcgaggaggtgggcgagctaagccggggcaagctctattccttgggcaatgggcgctggatgctgaccctggccaagaacatggaggtcagggccatcttcacggggtactacgggaaaggcaaacctgtgcccacgcaaggtagccggaaggggggcgccttgcagtcctgcaccatcatatgagtgttctcaccaccacttatgcccctagaagggaaggggagagggaaacgtgccctctgtttgatccttgttttgtgacattttttttttttttttttttactcaaagttaacctacctgtaactttttaaaaacttgtaaaataactgaccctcccttcctgtccgccctcttcccctctaatgctcacgctcccaacacaaggtgggcagggaggcaccattcaggaacctggaccaaagctgacgaggctgggccaagccagggatggggccacagccagaaccccgagccctacttccaggttctggttagctcagccccagcccagcccagctgctctgcccagagctgggtgagtggggagacacctcagagccccgcaaaacccactgaccggaggcaaaaggcagtggggctgggggtagttttccatggtcacagagaactagtggtggctctgagaaggggaggacctctgggctttgattccatctccttgtcttttttctttgtttttagagacagggtcctgctatttcccaagctggagtgcagtggtgcgatcatggctcactgcagcctcgaactcctgggctcaagcaatcctcctgagtgatcccatttcttaatcagtgtagccccaagaaggctggggctatttaccagggtagaaaaaggagcttacctcccacctttggtcctaagtccctgccccctccccttcacaccataactaggtaacagtttgataactagggaagaaagcagaacagttaagcagccgccacatccccgctggctgggggcctcactccaggaaggggctggactggctgtcctttccagtggcctggctccgctgtgtggatggggagatcggggccagaggcagaaccctggtgaggaagctccagtcctgctctctacccagcccatcttgcctccatggtgcctctggaggcctctgggcctcctctaacaggggctggtgggcaccaagagccaatggagtagacccctggctggtaagggccaagtcccaccggttgcttctgggaaggggtttctaacactagtctgtgtgctgtggttcctggggtgccctccactgccctctgttcagtaacagggccttgctaatcgggttgtcactcaacaaaagtgctttggatttaagttactatcctggctttgcccaacctcagcaacctgtaagactgataatgaaataaatcatgttaatccta

SEQ ID NO: 227328 - DNA, 300 bp, Artificial Sequence
  derived and/or modified sequence
gtcggggcccctcgggaggaagcgtcttgcaaacgaggacccggggctccgggttcgacttccagttttcttgaacagaggcttctcccgaaaaagccacacattcctgcccaagatcttcttccgcaagatgtcatcctcaggggccaaggacaagcctgagctgcagtttcccttccttcaggatgaggacacagtggccacgctgctagagtgcaagacgctcttcatcttgcgcggcctgccaggaagcggcaagtccacgctggcacgggtcatcgtggacaagtaccgtgatgg

SEQ ID NO: 227329 - DNA, 1266 bp, Artificial Sequence
  derived and/or modified sequence
atgaacagaggcttcagcagaaagagccacaccttcctgcccaagatcttcttcagaaagatgagcagcagcggcgccaaggacaagcccgagctgcagttccccttcctgcaggacgaggacaccgtggccaccctgctggagtgcaagaccctgttcatcctgagaggcctgcccggcagcggcaagagcaccctggccagagtgatcgtggacaagtacagagacggcaccaagatggtgagcgccgacgcctacaagatcacccccggcgccagaggcgccttcagcgaggagtacaagagactggacgaggacctggccgcctactgcagaagaagagacatcagaatcctggtgctggacgacaccaaccacgagagagagagactggagcagctgttcgagatggccgaccagtaccagtaccaggtggtgctggtggagcccaagaccgcctggagactggactgcgcccagctgaaggagaagaaccagtggcagctgagcgccgacgacctgaagaagctgaagcccggcctggagaaggacttcctgcccctgtacttcggctggttcctgaccaagaagagcagcgagaccctgagaaaggccggccaggtgttcctggaggagctgggcaaccacaaggccttcaagaaggagctgagacagttcgtgcccggcgacgagcccagagagaagatggacctggtgacctacttcggcaagagaccccccggcgtgctgcactgcaccaccaagttctgcgactacggcaaggcccccggcgccgaggagtacgcccagcaggacgtgctgaagaagagctacagcaaggccttcaccctgaccatcagcgccctgttcgtgacccccaagaccaccggcgccagagtggagctgagcgagcagcagctgcagctgtggcccagcgacgtggacaagctgagccccaccgacaacctgcccagaggcagcagagcccacatcaccctgggctgcgccgccgacgtggaggccgtgcagaccggcctggacctgctggagatcctgagacaggagaagggcggcagcagaggcgaggaggtgggcgagctgagcagaggcaagctgtacagcctgggcaacggcagatggatgctgaccctggccaagaacatggaggtgagagccatcttcaccggctactacggcaagggcaagcccgtgcccacccagggcagcagaaagggcggcgccctgcagagctgcaccatcatctag

SEQ ID NO: 227330 - protein, 364 aa, Artificial Sequence
  derived and/or modified sequence
MHRLIFVYTLICANFCSCRDTSATPQSASIKALRNANLRRDDLYRRDETIQVKGNGYVQSPRFPNSYPRNLLLTWRLHSQENTRIQLVFDNQFGLEEAENDICRYDFVEVEDISETSTIIRGRWCGHKEVPPRIKSRTNQIKITFKSDDYFVAKPGFKIYYSLLEDFQPAAASETNWESVTSSISGVSYNSPSVTDPTLIADALDKKIAEFDTVEDLLKYFNPESWQEDLENMYLDTPRYRGRSYHDRKSKVDLDRLNDDAKRYSCTPRNYSVNIREELKLANVVFFPRCLLVQRCGGNCGCGTVNWRSCTCNSGKTVKKYHEVLQFEPGHIKRRGRAKTMALVDIQLDHHERCDCICSSRPPR

SEQ ID NO: 227331 - DNA, 1095 bp, Artificial Sequence
  derived and/or modified sequence
atgcacagactgatcttcgtgtacaccctgatctgcgccaacttctgcagctgcagagacaccagcgccaccccccagagcgccagcatcaaggccctgagaaacgccaacctgagaagagacgacctgtacagaagagacgagaccatccaggtgaagggcaacggctacgtgcagagccccagattccccaacagctaccccagaaacctgctgctgacctggagactgcacagccaggagaacaccagaatccagctggtgttcgacaaccagttcggcctggaggaggccgagaacgacatctgcagatacgacttcgtggaggtggaggacatcagcgagaccagcaccatcatcagaggcagatggtgcggccacaaggaggtgccccccagaatcaagagcagaaccaaccagatcaagatcaccttcaagagcgacgactacttcgtggccaagcccggcttcaagatctactacagcctgctggaggacttccagcccgccgccgccagcgagaccaactgggagagcgtgaccagcagcatcagcggcgtgagctacaacagccccagcgtgaccgaccccaccctgatcgccgacgccctggacaagaagatcgccgagttcgacaccgtggaggacctgctgaagtacttcaaccccgagagctggcaggaggacctggagaacatgtacctggacacccccagatacagaggcagaagctaccacgacagaaagagcaaggtggacctggacagactgaacgacgacgccaagagatacagctgcacccccagaaactacagcgtgaacatcagagaggagctgaagctggccaacgtggtgttcttccccagatgcctgctggtgcagagatgcggcggcaactgcggctgcggcaccgtgaactggagaagctgcacctgcaacagcggcaagaccgtgaagaagtaccacgaggtgctgcagttcgagcccggccacatcaagagaagaggcagagccaagaccatggccctggtggacatccagctggaccaccacgagagatgcgactgcatctgcagcagcagaccccccagatag

SEQ ID NO: 227332 - DNA, 1095 bp, Artificial Sequence
  derived and/or modified sequence
atgcatcgccttatattcgtgtatacactgatttgcgctaatttctgttcgtgtagagataccagtgcaacaccccagagcgcctctatcaaggcattaaggaacgctaacctgcgcagagacgacctctatcgccgcgatgagaccatccaagtgaaaggaaacggctacgtgcagtccccaaggtttcccaattcgtacccaaggaacctcctactgacttggaggctccatagtcaagaaaacacacgcatccagcttgtgttcgacaatcaatttggtctggaagaagcggagaatgacatctgccgctatgacttcgtggaagtcgaggatatctcagaaacatccaccatcataagaggtcgatggtgtggacataaagaggtcccaccaagaatcaagagcaggaccaaccagattaagatcactttcaaaagcgatgattattttgtcgcgaaaccaggatttaagatctattactcattgctagaagattttcagcctgctgctgctagcgagaccaattgggaaagcgtgaccagttccattagcggggtgtcatataatagcccctctgtcacagaccctactcttatcgcagatgctcttgacaagaagattgctgagttcgacactgtggaggacttactgaaatacttcaatcctgaaagttggcaagaggatctggagaacatgtacctcgatactccgcggtaccgcggtaggtcctaccacgatcggaagtcaaaagtggatcttgatcggctgaacgatgatgctaaacggtattcctgtactccccgtaattatagcgtgaacatacgcgaggagctcaagctggcaaacgttgtgttcttccctaggtgcctgctagtacagcggtgcggtgggaattgtggctgtggcaccgtcaactggcgcagttgtacgtgcaatagtggaaaaaccgttaaaaaatatcacgaggtgctccagttcgagcccggtcacattaagcgacgtgggagggctaaaactatggcactggtcgatatccagcttgaccaccatgagcgctgcgactgtatctgctccagtaggccaccacggtag

SEQ ID NO: 227333 - DNA, 1095 bp, Artificial Sequence
  derived and/or modified sequence
atgcacaggctcatctttgtgtacaccctcatctgtgccaacttctgcagctgccgggacaccagcgccaccccccagagcgccagcatcaaggccctgagaaatgccaacctgcggagagatgacctgtacagaagagatgagaccatccaggtgaagggaaatggctacgtgcagagcccccgcttccccaacagctaccccaggaacctgctgctgacctggaggctgcacagccaggagaacacccgcatccagctggtgtttgacaaccagtttggcctggaggaggctgaaaatgacatctgccgctatgactttgtggaggtggaggacatcagcgagaccagcaccatcatccggggccgctggtgtggccacaaggaggtgcccccacgcatcaagagcaggaccaaccagatcaagatcaccttcaagagtgatgactactttgtggccaagccaggcttcaagatctactacagcctgctggaggacttccagcctgctgctgccagcgagaccaactgggagagcgtgaccagcagcatctctggagtgtcctacaacagccccagcgtgacagaccccaccctgattgctgatgccctggacaagaagattgctgagtttgacacagtggaggacctgctgaagtacttcaaccctgagagctggcaggaggacctggagaacatgtacctggacaccccccgctaccggggccgcagctaccatgacaggaagagcaaggtggacctggaccggctgaatgatgatgccaagcgctacagctgcaccccaagaaactacagcgtgaacatccgggaggagctgaagctggccaacgtggtgttcttcccccgctgcctgctggtgcagagatgtggcggcaactgtggctgcggcaccgtgaactggaggagctgcacctgcaacagcggcaagacagtgaagaagtaccacgaggtgctgcagtttgagcccggccacatcaagaggcggggccgggccaagaccatggccctggtggacatccagctggaccaccacgagcgctgtgactgcatctgcagcagccggccccccaggtag

SEQ ID NO: 227334 - DNA, 1095 bp, Artificial Sequence
  derived and/or modified sequence
atgcaccggctgatcttcgtgtacaccctgatctgcgccaacttctgtagttgtagggatacctctgctacaccgcagagcgcctccatcaaagctctgaggaacgctaatctccgacgtgacgatttataccgtagagatgagaccatacaggtgaagggcaacggttacgtgcagtccccgcggttccctaattcatatcctagaaacctattgcttacctggcgactacactcacaggaaaacacccgaatccagctcgtgtttgacaatcagttcggtttggaagaagctgagaacgacatttgcagatacgatttcgtcgaagtggaggacatcagcgaaacttctactattatccgaggtagatggtgcgggcacaaggaggtcccaccccgtatcaaaagccgtaccaatcagataaaaatcacattcaagagcgatgactactttgtcgccaaaccagggttcaaaatttactactctctgctagaggacttccaaccagccgccgctagcgaaactaactgggaatccgtgacatcttctatcagcggcgtttcctacaactctccgagtgtaactgatcccaccctgatcgccgatgctctcgacaaaaagatagcagagtttgatactgtcgaagatttacttaaatattttaaccccgaaagttggcaggaagacctggagaatatgtacctcgacacacctcggtaccggggacgcagctaccatgaccgtaagagcaaggtcgatcttgaccggttgaacgacgatgccaagcgctattcctgtaccccccgcaactactctgtgaatatcagagaggagctgaagcttgccaatgtagtgttttttccacgatgtctgttggtgcaaaggtgtggcggcaattgcggatgtggcactgtgaactggcggagctgtacttgcaattctggcaagacagtgaaaaaataccacgaggtgctccagtttgaaccaggccatatcaaaaggcggggaagggctaagacaatggcactggtagatatccagctggatcatcacgagcgctgcgactgtatttgcagtagccgccccccccgctag

SEQ ID NO: 227335 - DNA, 1095 bp, Artificial Sequence
  derived and/or modified sequence
atgcatcgcttaatttttgtttacacacttatttgtgcgaatttttgtagttgtagggacacatccgctacccctcagtcagcgagcatcaaggcactccgcaacgccaatctccggagggacgacctgtaccgcagagatgaaacgatacaggttaagggtaacggttacgtgcagtccccccgattcccaaactcataccccagaaacctcctactgacgtggaggctgcattctcaggaaaatacacggatccagctcgtcttcgataaccagttcgggcttgaggaagctgaaaatgatatctgccgctacgatttcgtcgaggttgaagacatttctgagacgtccactattatcagagggcgatggtgtggccacaaagaagttccaccacgtataaaaagccggacaaatcagattaaaattacgtttaagtccgacgattacttcgtggccaagcccggatttaagatttattatagcctgctggaggacttccaacctgccgcagcttctgagactaactgggaaagtgtgacaagcagcatctcaggcgtgtcttacaacagcccctccgttactgatccaaccctgatcgctgatgccttggataagaagattgccgagtttgataccgtggaggacctcctgaagtatttcaacccagagtcatggcaggaagacctggagaacatgtacctggacactccacgctaccgtggtcgcagttaccatgatcggaagagcaaggtggacctcgatcggttgaatgacgacgccaagaggtactcttgcacccccagaaactattctgtcaatattcgggaggagttgaagctcgcgaatgtggtgtttttcccaagatgtctcctggtgcagcgctgtggcggtaactgcgggtgcggaacagtaaattggagaagctgcacctgcaactccggaaaaaccgttaagaagtaccacgaggtgttgcaatttgaaccgggacacattaaacggaggggccgagctaaaacgatggctttagttgacatacagttggaccatcacgaaaggtgtgactgtatatgctctagcagaccccctagatag

SEQ ID NO: 227336 - DNA, 1095 bp, Artificial Sequence
  derived and/or modified sequence
atgcacagattgatcttcgtctatacactgatctgtgccaatttttgctcatgccgggatacatctgcgaccccccagtcagcgtcaatcaaggcgttgcggaacgctaacctccgaagggatgatctgtaccgccgagatgaaacaatccaggtcaaggggaatggttatgttcagtccccccgttttccgaactcttatcctagaaacctgttgctgacatggcgcctccattctcaagagaacacccggattcagctagtctttgataaccaattcggactagaggaggctgagaacgatatctgccgttatgattttgtcgaagtcgaggacatctcagagactagtactatcatcagaggcaggtggtgcggtcacaaggaagtgccgccacggataaaatcccgcacaaatcagattaagatcacttttaaatccgacgattatttcgttgccaagcccggtttcaagatttactactcactgctagaagacttccagcccgccgctgcctccgaaactaactgggagagcgttacatcctctatctccggagtcagttacaattcgccgagtgtgaccgaccccacactgatcgccgacgcactcgacaaaaagatcgcggaattcgacactgtcgaggacttactgaagtacttcaaccctgagtcttggcaggaagatctagaaaacatgtaccttgacacaccacgatatagaggaagatcctaccacgatcgaaaatcaaaagttgacttggacaggctgaatgacgacgctaagcgttacagctgcaccccccggaactactcagtcaacatacgagaggaactcaaactcgccaatgtggtcttttttccccggtgtctcctcgtccagcgatgcggcggcaactgtggatgcggcaccgttaattggagaagctgcacctgcaattccggcaagactgtcaaaaaataccatgaagtgctccaattcgagcctggccatattaagaggcgtgggagagctaagaccatggctttagtcgacatccagttggaccatcacgagagatgcgactgcatctgctctagtaggccacctcgctag

SEQ ID NO: 227337 - DNA, 1095 bp, Artificial Sequence
  derived and/or modified sequence
atgcaccggctgattttcgtctatacgctaatttgcgcaaatttttgttcttgccgcgacacatccgcaaccccacaaagtgcctctatcaaagcgctccgaaacgccaatttacgccgcgatgacttgtatcggcgcgatgagaccattcaggtaaagggtaacggctacgtgcagtcaccaaggtttcccaattcatacccacgaaatctgttacttacttggagactccactcccaagagaatacacggatccagctcgtattcgacaaccagttcggtctggaagaagccgagaatgatatctgtcggtacgacttcgtggaggtcgaagatatctccgagaccagcacaattatccgaggacgttggtgtggtcacaaggaagttccgcccagaattaaatcaaggactaaccagatcaaaattacattcaaatccgacgactacttcgtggccaaaccaggttttaagatctactatagtttactcgaagacttccagccagcggcggctagcgaaactaactgggaatccgttacatcaagtatcagcggcgtgtcctacaattctccttctgtaaccgatcccacgctgatcgccgacgccttggacaaaaagattgccgaattcgatactgtggaggacctccttaaatattttaaccctgagagctggcaggaagacctggagaatatgtacctcgacacaccacgctaccggggaagaagttatcacgacagaaagagtaaagtagacctggacaggttaaacgatgatgctaagcgctattcatgtacgccgcggaattacagcgttaacatccgagaagagctgaaactagctaacgtagtgtttttccctcgttgcctactcgtgcagagatgtggaggaaattgtggatgcggcactgttaattggcggtcgtgcacatgtaacagtggaaaaacggtgaagaaatatcatgaagttctgcaatttgagccgggccacatcaaacgaagaggaagagccaaaaccatggcccttgtggacatccagttagaccatcatgagagatgcgactgtatctgttctagtagaccacctaggtag

SEQ ID NO: 227338 - DNA, 4052 bp, Artificial Sequence
  derived and/or modified sequence
ggcagagcaggtttaggcccggcctgggaaactggggagctgaggtgctcgcgccgccgctctgagcccgagtgcgcgcctctcaggggccgcggccggggctggagaacgctgctgctccgctcgcctgccccgctagattcggcgctgcccgccccctgcagcctgtgctgcagctgccggccaccggagggggcgaacaaacaaacgtcaacctgttgtttgtcccgtcaccatttatcagctcagcaccacaaggaagtgcggcacccacacgcgctcggaaagttcagcatgcaggaagtttggggagagctcggcgattagcacagcgacccgggccagcgcagggcgagcgcaggcggcgagagcgcagggcggcgcggcgtcggtcccgggagcagaacccggctttttcttggagcgacgctgtctctagtcgctgatcccaaatgcaccggctcatctttgtctacactctaatctgcgcaaacttttgcagctgtcgggacacttctgcaaccccgcagagcgcatccatcaaagctttgcgcaacgccaacctcaggcgagatgacttgtaccgaagagatgagaccatccaggtgaaaggaaacggctacgtgcagagtcctagattcccgaacagctaccccaggaacctgctcctgacatggcggcttcactctcaggagaatacacggatacagctagtgtttgacaatcagtttggattagaggaagcagaaaatgatatctgtaggtatgattttgtggaagttgaagatatatccgaaaccagtaccattattagaggacgatggtgtggacacaaggaagttcctccaaggataaaatcaagaacgaaccaaattaaaatcacattcaagtccgatgactactttgtggctaaacctggattcaagatttattattctttgctggaagatttccaacccgcagcagcttcagagaccaactgggaatctgtcacaagctctatttcaggggtatcctataactctccatcagtaacggatcccactctgattgcggatgctctggacaaaaaaattgcagaatttgatacagtggaagatctgctcaagtacttcaatccagagtcatggcaagaagatcttgagaatatgtatctggacacccctcggtatcgaggcaggtcataccatgaccggaagtcaaaagttgacctggataggctcaatgatgatgccaagcgttacagttgcactcccaggaattactcggtcaatataagagaagagctgaagttggccaatgtggtcttctttccacgttgcctcctcgtgcagcgctgtggaggaaattgtggctgtggaactgtcaactggaggtcctgcacatgcaattcagggaaaaccgtgaaaaagtatcatgaggtattacagtttgagcctggccacatcaagaggaggggtagagctaagaccatggctctagttgacatccagttggatcaccatgaacgatgtgattgtatctgcagctcaagaccacctcgataagagaatgtgcacatccttacattaagcctgaaagaacctttagtttaaggagggtgagataagagacccttttcctaccagcaaccaaacttactactagcctgcaatgcaatgaacacaagtggttgctgagtctcagccttgctttgttaatgccatggcaagtagaaaggtatatcatcaacttctatacctaagaatataggattgcatttaataatagtgtttgaggttatatatgcacaaacacacacagaaatatattcatgtctatgtgtatatagatcaaatgttttttttggtatatataaccaggtacaccagagcttacatatgtttgagttagactcttaaaatcctttgccaaaataagggatggtcaaatatatgaaacatgtctttagaaaatttaggagataaatttatttttaaattttgaaacacaaaacaattttgaatcttgctctcttaaagaaagcatcttgtatattaaaaatcaaaagatgaggctttcttacatatacatcttagttgattattaaaaaaggaaaaatatggtttccagagaaaaggccaatacctaagcattttttccatgagaagcactgcatacttacctatgtggactataataacctgtctccaaaaccatgccataataatataagtgctttagaaattaaatcattgtgttttttatgcattttgctgaggcatgcttattcatttaacacctatctcaaaaacttacttagaaggttttttattatagtcctacaaaagacaatgtataagctgtaacagaattttgaattgtttttctttgcaaaacccctccacaaaagcaaatcctttcaagaatggcatgggcattctgtatgaacctttccagatggtgttcagtgaaagatgtgggtagttgagaacttaaaaagtgaacattgaaacatcgacgtaactggaaattaggtgggatatttgataggatccatatctaataatggattcgaactctccaaactacaccaattaatttaatgtatcttgcttttgtgttcccgtctttttgaaatatagacatggatttataatggcattttatatttggcaggccatcatagattatttacaacctaaaagcttttgtgtatcaaaaaaatcacattttattaatgtaaatttctaatcgtatacttgctcactgttctgatttcctgtttctgaaccaagtaaaatcagtcctagaggctatggttcttaatctatggagcttgctttaagaagccagttgtcaattgtggtaacacaagtttggccctgctgtcctactgtttaatagaaaactgttttacattggttaatggtatttagagtaattttttctctctgcctcctttgtgtctgttttaaaggagactaactccaggagtaggaaatgattcatcatcctccaaagcaagaggcttaagagagaaacaccgaaattcagatagctcagggactgctaacagagaactacatttttcttattgccttgaaagttaaaaggaaagcagatttcttcagtgactttgtggtcctactaactacaaccagtttgggtgacagggctggtaaagtcccagtgttagatgagtgacctaaatatacttagatttctaagtatggtgctctcaggtccaagttcaactattcttaagcagtgcaattcttcccagttatttgagatgaaagatctctgcttattgaagatgtaccttctaaaactttcctaaaagtgtctgatgtttttactcaagaggggagtggtaaaattaaatactctattgttcaattctctaaaatcccagaacacaatcagaaatagctcaggcagacactaataattaagaacgctcttcctcttcataactgctttgcaagtttcctgtgaaaacatcagtttcctgtaccaaagtcaaaatgaacgttacatcactctaacctgaacagctcacaatgtagctgtaaatataaaaaatgagagtgttctacccagttttcaataaaccttccaggctgcaataaccagcaaggttttcagttaaagccctatctgcactttttatttattagctgaaatgtaagcaggcatattcactcacttttctttgcctttcctgagagttttattaaaacttctcccttggttacctgttatcttttgcacttctaacatgtagccaataaatctatttgatagccatcaaaggaataaaaagctggccgtacaaattacatttcaaaacaaaccctaataaatccacatttccgcatggctcattcacctggaataatgccttttattgaatatgttcttatagggcaaaacactttcataagtagagttttttatgttttttgtcatatcggtaacatgcagctttttcctctcatagcattttctatagcgaatgtaatatgcctcttatcttcatgaaaaataaatattgcttttgaacaaaa

SEQ ID NO: 227339 - DNA, 3979 bp, Artificial Sequence
  derived and/or modified sequence
tctcaggggccgcggccggggctggagaacgctgctgctccgctcgcctgccccgctagattcggcgctgcccgccccctgcagcctgtgctgcagctgccggccaccggagggggcgaacaaacaaacgtcaacctgttgtttgtcccgtcaccatttatcagctcagcaccacaaggaagtgcggcacccacacgcgctcggaaagttcagcatgcaggaagtttggggagagctcggcgattagcacagcgacccgggccagcgcagggcgagcgcaggcggcgagagcgcagggcggcgcggcgtcggtcccgggagcagaacccggctttttcttggagcgacgctgtctctagtcgctgatcccaaatgcaccggctcatctttgtctacactctaatctgcgcaaacttttgcagctgtcgggacacttctgcaaccccgcagagcgcatccatcaaagctttgcgcaacgccaacctcaggcgagatgacttgtaccgaagagatgagaccatccaggtgaaaggaaacggctacgtgcagagtcctagattcccgaacagctaccccaggaacctgctcctgacatggcggcttcactctcaggagaatacacggatacagctagtgtttgacaatcagtttggattagaggaagcagaaaatgatatctgtaggtatgattttgtggaagttgaagatatatccgaaaccagtaccattattagaggacgatggtgtggacacaaggaagttcctccaaggataaaatcaagaacgaaccaaattaaaatcacattcaagtccgatgactactttgtggctaaacctggattcaagatttattattctttgctggaagatttccaacccgcagcagcttcagagaccaactgggaatctgtcacaagctctatttcaggggtatcctataactctccatcagtaacggatcccactctgattgcggatgctctggacaaaaaaattgcagaatttgatacagtggaagatctgctcaagtacttcaatccagagtcatggcaagaagatcttgagaatatgtatctggacacccctcggtatcgaggcaggtcataccatgaccggaagtcaaaagttgacctggataggctcaatgatgatgccaagcgttacagttgcactcccaggaattactcggtcaatataagagaagagctgaagttggccaatgtggtcttctttccacgttgcctcctcgtgcagcgctgtggaggaaattgtggctgtggaactgtcaactggaggtcctgcacatgcaattcagggaaaaccgtgaaaaagtatcatgaggtattacagtttgagcctggccacatcaagaggaggggtagagctaagaccatggctctagttgacatccagttggatcaccatgaacgatgtgattgtatctgcagctcaagaccacctcgataagagaatgtgcacatccttacattaagcctgaaagaacctttagtttaaggagggtgagataagagacccttttcctaccagcaaccaaacttactactagcctgcaatgcaatgaacacaagtggttgctgagtctcagccttgctttgttaatgccatggcaagtagaaaggtatatcatcaacttctatacctaagaatataggattgcatttaataatagtgtttgaggttatatatgcacaaacacacacagaaatatattcatgtctatgtgtatatagatcaaatgttttttttggtatatataaccaggtacaccagagcttacatatgtttgagttagactcttaaaatcctttgccaaaataagggatggtcaaatatatgaaacatgtctttagaaaatttaggagataaatttatttttaaattttgaaacacaaaacaattttgaatcttgctctcttaaagaaagcatcttgtatattaaaaatcaaaagatgaggctttcttacatatacatcttagttgattattaaaaaaggaaaaatatggtttccagagaaaaggccaatacctaagcattttttccatgagaagcactgcatacttacctatgtggactataataacctgtctccaaaaccatgccataataatataagtgctttagaaattaaatcattgtgttttttatgcattttgctgaggcatgcttattcatttaacacctatctcaaaaacttacttagaaggttttttattatagtcctacaaaagacaatgtataagctgtaacagaattttgaattgtttttctttgcaaaacccctccacaaaagcaaatcctttcaagaatggcatgggcattctgtatgaacctttccagatggtgttcagtgaaagatgtgggtagttgagaacttaaaaagtgaacattgaaacatcgacgtaactggaaattaggtgggatatttgataggatccatatctaataatggattcgaactctccaaactacaccaattaatttaatgtatcttgcttttgtgttcccgtctttttgaaatatagacatggatttataatggcattttatatttggcaggccatcatagattatttacaacctaaaagcttttgtgtatcaaaaaaatcacattttattaatgtaaatttctaatcgtatacttgctcactgttctgatttcctgtttctgaaccaagtaaaatcagtcctagaggctatggttcttaatctatggagcttgctttaagaagccagttgtcaattgtggtaacacaagtttggccctgctgtcctactgtttaatagaaaactgttttacattggttaatggtatttagagtaattttttctctctgcctcctttgtgtctgttttaaaggagactaactccaggagtaggaaatgattcatcatcctccaaagcaagaggcttaagagagaaacaccgaaattcagatagctcagggactgctaacagagaactacatttttcttattgccttgaaagttaaaaggaaagcagatttcttcagtgactttgtggtcctactaactacaaccagtttgggtgacagggctggtaaagtcccagtgttagatgagtgacctaaatatacttagatttctaagtatggtgctctcaggtccaagttcaactattcttaagcagtgcaattcttcccagttatttgagatgaaagatctctgcttattgaagatgtaccttctaaaactttcctaaaagtgtctgatgtttttactcaagaggggagtggtaaaattaaatactctattgttcaattctctaaaatcccagaacacaatcagaaatagctcaggcagacactaataattaagaacgctcttcctcttcataactgctttgcaagtttcctgtgaaaacatcagtttcctgtaccaaagtcaaaatgaacgttacatcactctaacctgaacagctcacaatgtagctgtaaatataaaaaatgagagtgttctacccagttttcaataaaccttccaggctgcaataaccagcaaggttttcagttaaagccctatctgcactttttatttattagctgaaatgtaagcaggcatattcactcacttttctttgcctttcctgagagttttattaaaacttctcccttggttacctgttatcttttgcacttctaacatgtagccaataaatctatttgatagccatcaaaggaataaaaagctggccgtacaaattacatttcaaaacaaaccctaataaatccacatttccgcatggctcattcacctggaataatgccttttattgaatatgttcttatagggcaaaacactttcataagtagagttttttatgttttttgtcatatcggtaacatgcagctttttcctctcatagcattttctatagcgaatgtaatatgcctcttatcttcatgaaaaataaatattgcttttgaacaaaactaaaaa

SEQ ID NO: 227340 - RNA, 1095 nt, Artificial Sequence
  derived and/or modified sequence
augcacagauugaucuucgucuauacacugaucugugccaauuuuugcucaugccgggauacaucugcgaccccccagucagcgucaaucaaggcguugcggaacgcuaaccuccgaagggaugaucuguaccgccgagaugaaacaauccaggucaaggggaaugguuauguucaguccccccguuuuccgaacucuuauccuagaaaccuguugcugacauggcgccuccauucucaagagaacacccggauucagcuagucuuugauaaccaauucggacuagaggaggcugagaacgauaucugccguuaugauuuugucgaagucgaggacaucucagagacuaguacuaucaucagaggcagguggugcggucacaaggaagugccgccacggauaaaaucccgcacaaaucagauuaagaucacuuuuaaauccgacgauuauuucguugccaagcccgguuucaagauuuacuacucacugcuagaagacuuccagcccgccgcugccuccgaaacuaacugggagagcguuacauccucuaucuccggagucaguuacaauucgccgagugugaccgaccccacacugaucgccgacgcacucgacaaaaagaucgcggaauucgacacugucgaggacuuacugaaguacuucaacccugagucuuggcaggaagaucuagaaaacauguaccuugacacaccacgauauagaggaagauccuaccacgaucgaaaaucaaaaguugacuuggacaggcugaaugacgacgcuaagcguuacagcugcaccccccggaacuacucagucaacauacgagaggaacucaaacucgccaauguggucuuuuuuccccggugucuccucguccagcgaugcggcggcaacuguggaugcggcaccguuaauuggagaagcugcaccugcaauuccggcaagacugucaaaaaauaccaugaagugcuccaauucgagccuggccauauuaagaggcgugggagagcuaagaccauggcuuuagucgacauccaguuggaccaucacgagagaugcgacugcaucugcucuaguaggccaccucgcuag

SEQ ID NO: 227341 - RNA, 1095 nt, Artificial Sequence
  derived and/or modified sequence
augcaccggcugauuuucgucuauacgcuaauuugcgcaaauuuuuguucuugccgcgacacauccgcaaccccacaaagugccucuaucaaagcgcuccgaaacgccaauuuacgccgcgaugacuuguaucggcgcgaugagaccauucagguaaaggguaacggcuacgugcagucaccaagguuucccaauucauacccacgaaaucuguuacuuacuuggagacuccacucccaagagaauacacggauccagcucguauucgacaaccaguucggucuggaagaagccgagaaugauaucugucgguacgacuucguggaggucgaagauaucuccgagaccagcacaauuauccgaggacguugguguggucacaaggaaguuccgcccagaauuaaaucaaggacuaaccagaucaaaauuacauucaaauccgacgacuacuucguggccaaaccagguuuuaagaucuacuauaguuuacucgaagacuuccagccagcggcggcuagcgaaacuaacugggaauccguuacaucaaguaucagcggcguguccuacaauucuccuucuguaaccgaucccacgcugaucgccgacgccuuggacaaaaagauugccgaauucgauacuguggaggaccuccuuaaauauuuuaacccugagagcuggcaggaagaccuggagaauauguaccucgacacaccacgcuaccggggaagaaguuaucacgacagaaagaguaaaguagaccuggacagguuaaacgaugaugcuaagcgcuauucauguacgccgcggaauuacagcguuaacauccgagaagagcugaaacuagcuaacguaguguuuuucccucguugccuacucgugcagagauguggaggaaauuguggaugcggcacuguuaauuggcggucgugcacauguaacaguggaaaaacggugaagaaauaucaugaaguucugcaauuugagccgggccacaucaaacgaagaggaagagccaaaaccauggcccuuguggacauccaguuagaccaucaugagagaugcgacuguaucuguucuaguagaccaccuagguag

SEQ ID NO: 227342 - protein, 60 aa, Artificial Sequence
  derived and/or modified sequence
MAEGEITTFTALTEKFNLPPGNYKKPKLLYCSNGGHFLRILPDGTVDGTRDRSDQHTDTK

SEQ ID NO: 227343 - DNA, 183 bp, Artificial Sequence
  derived and/or modified sequence
atggccgagggcgagatcaccaccttcaccgccctgaccgagaagttcaacctgccccccggcaactacaagaagcccaagctgctgtactgcagcaacggcggccacttcctgagaatcctgcccgacggcaccgtggacggcaccagagacagaagcgaccagcacaccgacaccaagtag

SEQ ID NO: 227344 - DNA, 183 bp, Artificial Sequence
  derived and/or modified sequence
atggccgaaggagagatcaccacgttcacagcattaacagaaaagttcaatctccccccaggtaattataagaagcctaaactgctgtattgctccaatggcggccacttcctgcggatcctgcccgacggcactgtggatgggacgcgggaccgttccgatcaacataccgacacaaaatag

SEQ ID NO: 227345 - DNA, 183 bp, Artificial Sequence
  derived and/or modified sequence
atggccgagggggagatcaccaccttcaccgccctgacagagaagttcaacctgcccccaggcaactacaagaagcccaagctgctgtactgcagcaatggaggccacttcctgcgcatcctgcctgatggcaccgtggatggcacccgggacagaagtgaccagcacacagacaccaagtag

SEQ ID NO: 227346 - DNA, 183 bp, Artificial Sequence
  derived and/or modified sequence
atggccgagggcgagatcaccaccttcaccgccctgaccgagaagttcaatcttcctccaggcaactataagaaacccaaattgctctactgttctaatggtggacacttccttagaatacttcccgatgggaccgtcgacggcacgcgtgacaggagtgatcaacatacagacacaaagtag

SEQ ID NO: 227347 - DNA, 183 bp, Artificial Sequence
  derived and/or modified sequence
atggcggaaggcgaaattaccacctttacagcgctgactgagaagttcaatctgcctcccggaaactacaaaaagcccaaacttctgtactgctcaaacggcggtcactttctgaggatcctccccgacggcacggttgacggtacacgggacagaagtgaccagcacactgatactaaatag

SEQ ID NO: 227348 - protein, 793 aa, Artificial Sequence
  derived and/or modified sequence
MDDFERRRELRRQKREEMRLEAERIAYQRNDDDEEEAARERRRRARQERLRQKQEEESLGQVTDQVEVNAQNSVPDEEAKTTTTNTQVEGDDEAAFLERLARREERRQKRLQEALERQKEFDPTITDASLSLPSRRMQNDTAENETTEKEEKSESRQERYEIEETETVTKSYQKNDWRDAEENKKEDKEKEEEEEEKPKRGSIGENQVEVMVEEKTTESQEETVVMSLKNGQISSEEPKQEEEREQGSDEISHHEKMEEEDKERAEAERARLEAEERERIKAEQDKKIADERARIEAEEKAAAQERERREAEERERMREEEKRAAEERQRIKEEEKRAAEERQRIKEEEKRAAEERQRIKEEEKRAAEERQRARAEEEEKAKVEEQKRNKQLEEKKHAMQETKIKGEKVEQKIEGKWVNEKKAQEDKLQTAVLKKQGEEKGTKVQAKREKLQEDKPTFKKEEIKDEKIKKDKEPKEEVKSFMDRKKGFTEVKSQNGEFMTHKLKHTENTFSRPGGRASVDTKEAEGAPQVEAGKRLEELRRRRGETESEEFEKLKQKQQEAALELEELKKKREERRKVLEEEEQRRKQEEADRKLREEEEKRRLKEEIERRRAEAAEKRQKMPEDGLSDDKKPFKCFTPKGSSLKIEERAEFLNKSVQKSSGVKSTHQAAIVSKIDSRLEQYTSAIEGTKSAKPTKPAASDLPVPAEGVRNIKSMWEKGNVFSSPTAAGTPNKETAGLKVGVSSRINEWLTKTPDGNKSPAPKPSDLRPGDVSSKRNLWEKQSVDKVTSPTKV

SEQ ID NO: 227349 - protein, 558 aa, Artificial Sequence
  derived and/or modified sequence
MLGGSGSHGRRSLAALSQIAYQRNDDDEEEAARERRRRARQERLRQKQEEESLGQVTDQVEVNAQNSVPDEEAKTTTTNTQVEGDDEAAFLERLARREERRQKRLQEALERQKEFDPTITDASLSLPSRRMQNDTAENETTEKEEKSESRQERYEIEETETVTKSYQKNDWRDAEENKKEDKEKEEEEEEKPKRGSIGENQGEEKGTKVQAKREKLQEDKPTFKKEEIKDEKIKKDKEPKEEVKSFMDRKKGFTEVKSQNGEFMTHKLKHTENTFSRPGGRASVDTKEAEGAPQVEAGKRLEELRRRRGETESEEFEKLKQKQQEAALELEELKKKREERRKVLEEEEQRRKQEEADRKLREEEEKRRLKEEIERRRAEAAEKRQKMPEDGLSDDKKPFKCFTPKGSSLKIEERAEFLNKSVQKSSGVKSTHQAAIVSKIDSRLEQYTSAIEGTKSAKPTKPAASDLPVPAEGVRNIKSMWEKGNVFSSPTAAGTPNKETAGLKVGVSSRINEWLTKTPDGNKSPAPKPSDLRPGDVSSKRNLWEKQSVDKVTSPTKV

SEQ ID NO: 227350 - protein, 532 aa, Artificial Sequence
  derived and/or modified sequence
MLGGSGSHGRRSLAALSQIAYQRNDDDEEEAARERRRRARQERLRQKQEEESLGQVTDQVEVNAQNSVPDEEAKTTTTNTQVEGDDEAAFLERLARREERRQKRLQEALERQKEFDPTITDASLSLPSRRMQNDTAENETTEKEEKSESRQERYEIEETETVTKSYQKNDWRDAEENKKEDKEKEEEEEEKPKRGSIGENQIKDEKIKKDKEPKEEVKSFMDRKKGFTEVKSQNGEFMTHKLKHTENTFSRPGGRASVDTKEAEGAPQVEAGKRLEELRRRRGETESEEFEKLKQKQQEAALELEELKKKREERRKVLEEEEQRRKQEEADRKLREEEEKRRLKEEIERRRAEAAEKRQKMPEDGLSDDKKPFKCFTPKGSSLKIEERAEFLNKSVQKSSGVKSTHQAAIVSKIDSRLEQYTSAIEGTKSAKPTKPAASDLPVPAEGVRNIKSMWEKGNVFSSPTAAGTPNKETAGLKVGVSSRINEWLTKTPDGNKSPAPKPSDLRPGDVSSKRNLWEKQSVDKVTSPTKV

SEQ ID NO: 227351 - protein, 543 aa, Artificial Sequence
  derived and/or modified sequence
MTSYMKVDRQWNAEILELILGTGQLSTGQIAYQRNDDDEEEAARERRRRARQERLRQKQEEESLGQVTDQVEVNAQNSVPDEEAKTTTTNTQVEGDDEAAFLERLARREERRQKRLQEALERQKEFDPTITDASLSLPSRRMQNDTAENETTEKEEKSESRQERYEIEETETVTKSYQKNDWRDAEENKKEDKEKEEEEEEKPKRGSIGENQIKDEKIKKDKEPKEEVKSFMDRKKGFTEVKSQNGEFMTHKLKHTENTFSRPGGRASVDTKEAEGAPQVEAGKRLEELRRRRGETESEEFEKLKQKQQEAALELEELKKKREERRKVLEEEEQRRKQEEADRKLREEEEKRRLKEEIERRRAEAAEKRQKMPEDGLSDDKKPFKCFTPKGSSLKIEERAEFLNKSVQKSSGVKSTHQAAIVSKIDSRLEQYTSAIEGTKSAKPTKPAASDLPVPAEGVRNIKSMWEKGNVFSSPTAAGTPNKETAGLKVGVSSRINEWLTKTPDGNKSPAPKPSDLRPGDVSSKRNLWEKQSVDKVTSPTKV

SEQ ID NO: 227352 - DNA, 1695 bp, Artificial Sequence
  derived and/or modified sequence
atggatgactttgagcggcgccgcgaacttaggcgtcaaaagcgcgaggagatgcgtctggaggctgagcgaattgcctatcagcgcaacgatgatgacgaagaagaagcagccagagaaaggcgcagaagagcaaggcaggagcggctccgacagaaacaggaggaagagtccctgggccaggtgacagatcaggtcgaggtaaacgcccagaacagcgtccctgatgaagaagcgaaaaccaccaccaccaatacgcaggtggaaggcgatgacgaggctgcctttctggaacggctagcaagaagggaggaacggcgccagaaaagacttcaagaggccctcgaaaggcagaaggagtttgaccccacaattaccgacgcctcgttgtcattgccatccaggcgtatgcaaaacgataccgctgaaaacgagactacggagaaggaggagaaaagcgagtcgagacaggagcgctatgagattgaagagactgagaccgtgaccaaatcttatcagaagaatgactggagggatgctgaggagaacaaaaaagaggataaagagaaggaggaagaggaagaggaaaaaccaaaacgcggttctattggggagaaccagggtgaagagaaagggactaaagtgcaggcaaaacgcgagaaactgcaggaagacaaacctacatttaagaaggaagaaatcaaggacgagaaaatcaagaaagacaaggagccgaaggaggaggtcaaaagctttatggacaggaaaaagggttttacagaggtgaaatctcagaacggagaatttatgacccataagctgaagcataccgaaaacaccttttctcgacccggaggtagagcctccgtggacactaaggaggctgaaggggcgcctcaggtggaagcggggaagcgacttgaagaactacgtaggaggcgcggagagactgagagcgaggagtttgagaaactcaagcaaaagcaacaggaagccgccctcgagctggaagaactgaaaaaaaaacgggaggaacggagaaaagtattggaggaagaggaacagcgacgcaaacaggaagaagccgatcgcaagcttcgggaggaggaagagaaaaggcgtctgaaggaagaaatagagagaagacgagccgaggcggcggaaaagcgtcagaagatgccggaagacggcctgtcagatgataagaaaccatttaagtgttttaccccaaagggctcgtcactcaagattgaagaacgagccgagtttcttaataagagcgtacagaagagctctggtgtgaagtctacccaccaggccgcaatcgtttccaaaatagattctcggctggaacagtacacctcagctatcgagggtacaaagagcgccaaacccaccaagcctgccgcctcggatctgccagttcccgccgaaggcgtgagaaatattaagtctatgtgggaaaaggggaatgtgttttcgagcccaaccgctgctgggacgccaaataaggagaccgccgggctaaaggtgggcgtatcttcacgcattaatgagtggctgacaaaaacccctgacggcaataaatcccctgcacccaaaccgagcgacctccgaccaggcgacgtatccagcaaaagaaacctctgggagaaacagtcggttgacaaagtgacttcccctactaaggtttag

SEQ ID NO: 227353 - DNA, 2382 bp, Artificial Sequence
  derived and/or modified sequence
atggatgatttcgagcggcgcagggagctcaggagacagaaaagagaagaaatgcggctggaagcggagaggattgcctaccaaaggaacgatgatgatgaagaggaggcagcaagagaacggaggagacgagccaggcaggagcgcttgcggcagaagcaggaggaggaaagcctcggccaggttaccgatcaggttgaagtaaatgcacaaaattctgtgcccgacgaggaagccaagactactactactaatacacaggtagagggagatgacgaggcagcttttctggagcgcctcgcccggcgggaggagcgacgtcaaaagaggctgcaggaggccttagaacggcagaaagagtttgatccgaccattactgacgctagcctgtcactcccttcaaggcgtatgcagaacgataccgccgaaaatgaaaccacggaaaaagaagagaagtcggagtctcgccaggagagatatgaaatcgaagagaccgaaacagtaaccaaatcgtaccagaaaaacgattggagggacgcggaggagaacaaaaaagaagataaggagaaagaagaggaggaagaggaaaaaccaaaacgaggatccattggtgaaaatcaggttgaggtgatggtggaagaaaagactaccgaaagtcaggaagaaacagtggtaatgagtctgaagaacggccagatcagctcagaggaacctaagcaggaagaagagagggaacaaggaagcgatgaaatctcccatcacgaaaaaatggaagaagaagacaaggagcgagcagaagccgaacgcgctcgcctggaggcagaagagagggagagaatcaaagctgaacaggacaaaaaaatcgccgacgagagggcccgaatcgaagccgaagagaaagcagcggctcaggaacgggagcgtcgggaggctgaagagagggaaaggatgcgggaagaagagaaacgcgcagcagaggagcggcaacggattaaggaagaagagaagagagccgccgaagaaagacaaaggatcaaggaggaagagaaacgagctgccgaagaacgtcaaaggattaaggaggaggaaaagcgggcggctgaggagcgacagcgggctcgggccgaggaggaggagaaggccaaagttgaagagcaaaagaggaataagcagctcgaagagaaaaaacatgcgatgcaagaaactaagatcaagggcgagaaagtcgaacagaaaatcgagggaaaatgggtgaatgaaaaaaaggcccaagaggacaaactccagacagccgttttaaaaaaacaaggggaagagaagggtacaaaagtgcaggccaaaagggagaagctgcaggaggataagcctacattcaagaaggaggagatcaaggacgaaaagattaagaaagacaaggagcccaaggaggaagtgaaatcgtttatggaccgaaagaaaggcttcacagaggtgaaatcccagaacggggagttcatgacacacaagctgaaacacaccgagaatacattctccagacctgggggtagagcgtcagtggacacaaaggaggcagagggagccccccaagtcgaggccgggaaacgtctggaagaattgcgtcgccgcaggggagagacggaatcagaggagttcgaaaaactaaagcagaagcaacaggaggccgcactggagctcgaggagcttaagaagaaacgagaggagcggcggaaagtactggaggaagaagagcaacgccggaagcaggaggaggccgacaggaagctccgagaggaagaggaaaaaaggcgcctgaaagaagagattgagcgaaggagagccgaggctgctgagaagaggcagaagatgcccgaggatgggctgagtgatgacaaaaagcctttcaagtgttttacccccaaagggtcatcactaaaaatagaggaaagagccgagtttctcaacaagtccgttcagaagtcttctggtgtcaagagcacccaccaggccgctatcgtaagtaaaatcgattcccggcttgagcagtacacctctgccatcgagggtacgaaatccgctaaacccacaaaaccagcagcttctgatctgcctgtacctgctgagggggtgcgcaacataaaaagcatgtgggaaaaggggaatgtgttcagcagccctaccgctgccgggacacctaacaaggagaccgccggcctgaaggtcggcgtaagctctagaataaatgaatggctcacgaagaccccggacggaaataaaagccccgcccctaagcccagcgacctgcggcccggggacgtgtctagcaaacgcaatttatgggaaaaacagagtgtggataaggtgacctcacctaccaaagtgtag

SEQ ID NO: 227354 - DNA, 1617 bp, Artificial Sequence
  derived and/or modified sequence
atggatgactttgaaaggcgccgtgagctcagaagacaaaaacgtgaggagatgagactcgaagccgaaagaattgcctatcagagaaatgacgacgacgaggaagaagcagctcgcgaaaggcgaaggagggcccggcaggagcgcctcaggcaaaagcaagaagaagagtccctgggacaagttacggatcaggtggaggtcaacgcacaaaattccgttcccgacgaggaggccaagaccacaacaaccaacacacaggtggaaggcgatgacgaggcggctttcctggagaggctggcccggagagaggagcgccgccaaaaaaggcttcaggaagctttagagaggcaaaaagaattcgacccaaccattactgatgcttccttgtcccttccaagccgccgaatgcagaacgacacagcagagaacgagactacagaaaaagaagagaagagcgagagtaggcaagaaaggtacgagatcgaggaaaccgaaaccgtgaccaaaagctatcagaagaacgactggcgcgacgctgaagagaataaaaaagaggataaagaaaaggaggaggaagaggaggagaagccaaagcgcggctcaatcggcgagaaccaaataaaggacgagaagatcaagaaggataaagaacccaaagaggaggtgaaatcttttatggaccgcaaaaaggggtttacagaggttaaatcacaaaatggagagtttatgactcataagctcaagcacactgaaaataccttcagtcgccccggcggaagggccagtgttgataccaaagaagccgagggcgctcctcaagtggaggctggaaaacgtctggaagagctcagaagacgacgcggcgagactgagagcgaggagtttgaaaagctgaagcaaaagcagcaagaagctgcactggagctggaagagttaaagaagaagagggaagaacgccgaaaggtgttggaggaagaagagcaacggcggaagcaagaggaagccgacaggaaactgcgggaagaggaggagaagcgaagactgaaggaagaaatcgaacgccgccgggccgaggcagccgagaagagacagaaaatgcccgaggatggtctttcggatgacaaaaaacccttcaaatgttttaccccgaagggctcatccctaaagatcgaggaacgcgccgaattcttaaacaaaagcgttcagaagtcatcaggcgtgaaaagcacccaccaagcggctattgtgagtaagattgacagccggttggagcagtacaccagcgcgatagagggtacaaaatcggccaagccaaccaaaccagctgcctccgacttgccggtgccagcggaaggcgttaggaatatcaagagcatgtgggagaaggggaatgtctttagctcacccactgctgctggtaccccaaataaggaaactgccggactaaaggtgggggtgtcttcaaggatcaacgagtggcttactaaaacacctgacggaaataaaagtcctgctcccaaaccatccgatctgagacctggagacgtgtccagtaaacgcaacctgtgggaaaagcagtctgtcgataaagtaacatccccaactaaagtctag

SEQ ID NO: 227355 - DNA, 1677 bp, Artificial Sequence
  derived and/or modified sequence
atgcttggagggagtggcagtcacgggcggcgcagtctcgctgccctgtcccagattgcttaccagcggaatgacgatgacgaggaggaagccgcgcgagaaaggaggcgccgggcaagacaggagaggctcagacagaagcaagaagaggaatcattgggccaggtgaccgaccaggtggaggtgaacgcgcagaacagtgtgccagatgaggaggcaaagacgacaaccacgaacacacaggtggaaggcgacgatgaagctgcattccttgagcggctcgcgagaagggaagaaaggcgccagaagaggttgcaggaggctctggagagacagaaggagttcgaccccacgataactgacgcttctttgtccttgccttctcgaaggatgcagaatgatactgccgagaatgagacaacggagaaggaggagaaatccgaaagccgccaggagcgttatgagatcgaggagactgagaccgtaaccaagagctaccagaagaatgactggagagatgccgaggagaacaaaaaggaggataaggagaaggaagaagaagaagaagaaaaaccaaagagaggaagcataggggagaaccagggagaagaaaaggggacgaaagttcaggctaagcgcgagaagctgcaagaagacaagccaactttcaagaaagaagagatcaaagatgagaagataaaaaaggacaaagagccgaaggaggaagtcaagtccttcatggaccgtaagaagggtttcacagaggtgaagtcccagaatggagaattcatgacccacaagcttaaacacacagagaatacctttagtcggccagggggccgcgcttccgtagacaccaaggaagctgagggagcacctcaagtcgaggctggtaaaaggctggaggagttacgcaggcggcgcggagagactgagagtgaagagttcgagaaattgaaacagaagcagcaggaagcggccctcgaactggaggaactcaaaaaaaagagagaagagcgacggaaagtcctggaagaggaagagcagagacggaagcaggaggaggcagaccggaagttaagggaagaggaagagaaaagacggctcaaagaggaaattgagcggcggcgtgccgaggccgctgagaagaggcagaagatgccagaggatggcttgtctgacgacaaaaaaccctttaaatgcttcactccaaaaggtagctcactcaaaatagaggagcgggccgagtttcttaacaagtcagtacagaaatcctccggagtgaagagcacccaccaagccgcaattgtatctaagatcgatagtcggttggagcaatatacttcggctatcgaaggcaccaaaagcgctaaacctaccaagcccgcggctagcgatctgcctgtacccgccgaaggagtgaggaatatcaaatccatgtgggagaaaggaaacgttttctccagtccaaccgctgccggcaccccgaataaagagacagcgggtctgaaggttggggtgagtagtcgcataaatgagtggctaactaagactcccgacggcaataagtcgccggcccctaaaccatctgacctccgtccaggcgatgtcagttctaagaggaatctatgggaaaagcagtctgtagacaaagtgacctccccaacgaaggtgtag

SEQ ID NO: 227356 - DNA, 1617 bp, Artificial Sequence
  derived and/or modified sequence
atggacgactttgaaaggagaagggaactgagaaggcagaaaagagaggagatgaggctcgaggccgaaagaatcgcgtaccaaaggaacgacgacgatgaggaagaagccgctcgggaaagacgaagaagggccagacaagagcgactcagacagaagcaggaagaggaatcactgggacaggttaccgatcaggtggaagtaaacgcccaaaactctgtgcctgacgaagaagctaaaactacaactactaatacacaggtcgaaggcgatgacgaggcagcattcctcgagagactcgctcgcagggaggaacgcaggcagaaacggcttcaagaggctctggagcgtcagaaagagtttgacccaacgattacagacgccagtctgagtcttccgtcccggcgcatgcaaaatgacactgccgagaatgaaactaccgaaaaagaagagaaatccgagagccgacaggagcgctacgagattgaggaaaccgagaccgtaacaaaaagttaccagaaaaatgattggagagatgctgaggagaataagaaagaagataaggaaaaagaagaggaggaggaggagaaacccaaaagaggatctattggagagaatcaaattaaagacgagaagatcaagaaggataaagagcctaaggaggaagtgaaatctttcatggataggaagaaagggtttacagaagtcaagtctcaaaatggcgagtttatgacgcataaactcaagcacacggagaacaccttcagccggcccggcggacgcgcctctgttgatactaaggaggccgagggggctccgcaggtcgaagctggaaagcggcttgaagagctaagaagacgcaggggcgaaacagaatcagaggaattcgaaaaactgaaacagaaacagcaggaggcggcgcttgagctggaggagctcaaaaaaaaaagggaagaaagacggaaagtgctggaggaagaagagcagaggaggaagcaggaagaggctgaccggaaactccgggaggaagaagaaaagcgaagattgaaggaggagatagaaaggcgcagggccgaggcagctgaaaaaagacaaaagatgcctgaggatggcttatccgatgataaaaagcccttcaagtgcttcactcccaaggggtcgtccctgaagatagaagaacgagccgaattcttgaacaagtccgtccaaaaatcctcaggcgttaagtcaacccaccaggccgctatcgtgagcaaaattgatagcaggcttgagcaatacacaagtgcaatcgaagggacaaaatccgctaaacccacaaagccggctgccagcgacctgcctgtacccgcagaaggagtgcggaacatcaaaagcatgtgggagaaaggtaacgttttctcttcgccgactgccgctggcacgccaaacaaagaaactgcgggactaaaggtcggagtcagcagtcgaataaacgagtggctaacaaagactcctgatggcaacaagagtcccgcacccaaaccttccgacctgcgccctggcgatgtttcttccaaacggaacctctgggagaaacagtccgtcgacaaggttacttcacccaccaaggtatag

SEQ ID NO: 227357 - DNA, 1599 bp, Artificial Sequence
  derived and/or modified sequence
atgctaggaggctctggtagtcacgggaggcgcagtttagcagccttatcacagatcgcgtatcagcgcaacgacgacgatgaagaggaggctgcccgggagcggaggcgacgggcccggcaggagaggctgcgacagaagcaggaggaggaaagcctgggacaggttaccgaccaggtggaagtcaacgcccagaactctgttcctgacgaggaagctaagacaacaacaaccaatacacaggtggagggtgatgatgaagctgcttttttggaacggctcgcacgccgcgaggaacgtaggcagaagcgcctgcaggaggcgttggaacgacagaaagagtttgaccccaccataactgacgcgagcctttctctacccagtcgccgtatgcagaatgataccgctgagaacgaaacgaccgagaaggaggagaaatccgaatctcggcaggagcggtatgaaattgaggaaacagagacagtgaccaagtcctaccagaaaaacgactggcgtgatgccgaggaaaataaaaaagaggacaaagagaaagaagaagaagaggaggagaagcccaagcggggatccatcggcgagaatcaaattaaagacgaaaaaataaagaaagacaaagagccaaaggaggaggttaagagttttatggaccgtaaaaaaggctttaccgaagttaaatcccagaatggggaattcatgacacacaaactgaaacacactgaaaacaccttctctagacccgggggccgcgcgagcgttgataccaaagaagctgagggggcccctcaggtggaggcaggaaagcgcctggaggagttacgacgccgcagaggcgagaccgaatccgaggagttcgaaaagctgaaacagaaacagcaggaagccgccctagaactggaagagctgaagaagaagcgagaggaacgtcgaaaagttctagaagaggaagagcaaaggcgaaagcaggaggaggccgataggaaactgagggaggaggaggagaagcggcgactaaaggaggagatcgaacgaaggcgcgcagaggctgccgagaagcgacaaaagatgccagaagacggcctgtctgacgacaaaaagccatttaagtgtttcacccctaaaggatcttcactgaagattgaggagcgagcagagtttctgaacaaatctgtgcagaagagctctggcgtcaagtccactcatcaggccgctatcgtgagcaaaatcgacagccgattagagcagtatacttcggccattgaagggactaaatccgctaagccaacaaagccggcggcctctgacctgcctgtgcctgcagaaggagtgcggaacatcaagtcaatgtgggaaaaggggaatgtgttcagttcaccgactgcagcaggcacgcctaacaaggaaactgcagggctgaaggtgggtgtaagtagcaggattaacgagtggttaactaagacaccagacggcaataaatccccagccccaaaacccagcgatctccgtcccggggatgtctcttcaaagagaaatctgtgggaaaaacagtcggtggacaaggtaactagtcccaccaaagtctag

SEQ ID NO: 227358 - DNA, 1632 bp, Artificial Sequence
  derived and/or modified sequence
atgaccagctatatgaaagttgaccggcagtggaatgcagaaattctggagctgatcctcgggaccggccaattgagcactggccagattgcgtatcagcgaaatgatgacgatgaggaggaggcggctcgagaacgacggaggagagctagacaagagagacttagacaaaaacaggaggaggagagtctaggacaagtgactgatcaggtggaggtgaatgcccaaaacagcgtgcctgacgaggaggccaagaccaccacgaccaatacccaggtggaaggcgatgacgaagccgcctttcttgagcgtctggcgcgccgggaggagcgtcggcagaagcgacttcaagaagctctggagagacaaaaggagtttgaccctaccataactgatgcctcattgagccttccatcccgccggatgcagaatgataccgccgagaacgagaccaccgaaaaggaggagaagagtgagagccggcaggaacgctatgaaatagaagaaaccgaaactgtcaccaagtcgtatcagaaaaacgactggagggatgcggaagagaataagaaagaggacaaagaaaaagaggaggaagaagaagagaagcctaagagaggcagtatcggcgaaaatcagattaaggacgagaaaatcaagaaggataaggaacctaaggaagaagtcaagtcatttatggaccggaagaaaggctttacggaggtgaaatctcagaatggtgaattcatgactcataagctgaaacatactgagaatacattcagcaggccaggaggacgtgctagcgtggatactaaggaggcagagggcgctcctcaggtggaggccggaaaaagactggaagaactccgtcgcagacgcggcgagacagagtccgaggaatttgaaaaactgaagcagaaacagcaggaagctgctctggagctcgaggaacttaaaaaaaagagggaagaacgccgcaaggtactggaagaagaagagcaacggcgcaaacaggaggaggcggacagaaagctgcgggaagaagaggaaaagagacgcttaaaagaggagatcgagaggagacgcgccgaggctgccgagaagaggcagaaaatgcctgaagacgggctgagtgacgacaagaaaccatttaagtgctttacacctaagggttcctctctcaaaatcgaggagcgcgccgagttcctgaataagagtgtgcagaagtcgtccggggtcaagtctacccaccaggccgcaattgtgagcaagatcgatagccgccttgagcagtatactagcgctatagagggaacgaagagtgctaaacctaccaagcctgccgcaagtgacctgcccgtaccagcagagggagtgagaaatattaagagcatgtgggagaaaggtaatgtgttttccagccccaccgccgccggaaccccaaataaagaaactgcgggcctgaaggtcggggtgtctagtagaatcaatgaatggcttacaaaaacacctgacggtaacaagtcccccgcccctaaacccagtgatttgcgccctggtgacgtgtcctctaagcgaaacctctgggaaaagcaatccgtggacaaggtcactagtccaactaaggtgtag

SEQ ID NO: 227359 - DNA, 1695 bp, Artificial Sequence
  derived and/or modified sequence
atggatgactttgagaggagaagagagctgcggcggcagaagcgggaggagatgaggctggaggccgagagaattgcctaccagagaaatgatgatgatgaggaggaggccgcccgggagaggagaagaagagcccggcaggagcggctgcggcagaagcaggaggaggagagcctgggccaggtgacagaccaggtggaggtgaatgcccagaacagcgtgcctgatgaggaggccaagaccaccaccaccaacacccaggtggagggagatgatgaggccgccttcctggagcggctggcccggcgggaggagcggcggcagaagaggctgcaggaggccctggagcggcagaaggagtttgaccccaccatcacagatgccagcctgagcctgcccagcaggaggatgcagaatgacacagcagaaaatgagaccacagagaaggaggagaagtctgagagccggcaggagagatatgaaattgaggagacagaaacagtgaccaagagctaccagaagaatgactggagagatgctgaggagaacaagaaggaggacaaggagaaggaggaggaggaggaggagaagcccaagaggggcagcattggagagaaccagggcgaggagaagggcaccaaggtgcaggccaagcgggagaagctgcaggaggacaagcccaccttcaagaaggaggagatcaaggatgagaagatcaagaaggacaaggagcccaaggaggaggtgaagagcttcatggacaggaagaagggcttcacagaggtgaagagccagaatggagagttcatgacccacaagctgaagcacacagagaacaccttcagcaggcctgggggccgggcctctgtggacaccaaggaggccgagggcgccccccaggtggaggccggcaagaggctggaggagctgcggaggagaagaggagaaacagaaagtgaggagtttgagaagctgaagcagaagcagcaggaggccgccctggagctggaggagctgaagaagaagcgggaggagaggaggaaggtgctggaggaggaggagcagaggaggaagcaggaggaggccgacaggaagctgcgggaggaggaggagaagaggcggctgaaggaggagattgaaagaagaagagctgaggccgctgagaagaggcagaagatgccagaagatggcctgagtgatgacaagaagcccttcaagtgcttcacccccaagggcagcagcctgaagattgaggagagagctgagttcctgaacaagtctgtgcagaagagcagcggcgtgaagagcacccaccaggccgccatcgtgtccaagattgacagccggctggagcagtacaccagcgccatcgagggcaccaagagcgccaagcccaccaagccagctgccagtgacctgcctgtgcctgctgagggcgtgaggaacatcaagtccatgtgggagaagggaaatgtgttcagcagccccacagctgctggcacccccaacaaggagacagctggcctgaaggtgggcgtgagcagccgcatcaatgagtggctgaccaagaccccagatggcaacaagagccctgcccccaagcccagcgacctgcggcctggagatgtgagcagcaagaggaacctgtgggagaagcagagcgtggacaaggtgaccagccccaccaaggtgtag

SEQ ID NO: 227360 - DNA, 2382 bp, Artificial Sequence
  derived and/or modified sequence
atggatgactttgagaggagaagagagctgcggcggcagaagcgggaggagatgaggctggaggccgagagaattgcctaccagagaaatgatgatgatgaggaggaggccgcccgggagaggagaagaagagcccggcaggagcggctgcggcagaagcaggaggaggagagcctgggccaggtgacagaccaggtggaggtgaatgcccagaacagcgtgcctgatgaggaggccaagaccaccaccaccaacacccaggtggagggagatgatgaggccgccttcctggagcggctggcccggcgggaggagcggcggcagaagaggctgcaggaggccctggagcggcagaaggagtttgaccccaccatcacagatgccagcctgagcctgcccagcaggaggatgcagaatgacacagcagaaaatgagaccacagagaaggaggagaagtctgagagccggcaggagagatatgaaattgaggagacagaaacagtgaccaagagctaccagaagaatgactggagagatgctgaggagaacaagaaggaggacaaggagaaggaggaggaggaggaggagaagcccaagaggggcagcattggagagaaccaggtggaggtgatggtggaggagaagaccacagagagccaggaggagaccgtggtgatgagcctgaagaatggccagatcagcagcgaggagcccaagcaggaggaggagcgggagcagggcagtgatgagatcagccaccacgagaagatggaggaggaggacaaggagagagctgaggccgagcgggcccggctggaggccgaggagcgggagcgcatcaaggccgagcaggacaagaagattgctgatgagcgggccagaattgaagctgaggagaaggccgccgcccaggagcgggagcggcgggaggccgaggagcgggagaggatgagggaggaggagaagagagctgctgaggagcggcagaggatcaaggaggaggagaagagagctgctgaggagcggcagaggatcaaggaggaggagaagagagctgctgaggagcggcagaggatcaaggaggaggagaagagagctgctgaggagcggcagagggcccgggcagaggaggaggagaaggccaaggtggaggagcagaagaggaacaagcagctggaggagaagaagcacgccatgcaggagaccaagatcaagggggagaaggtggagcagaagattgagggcaagtgggtgaatgagaagaaggcccaggaggacaagctgcagacagctgtgctgaagaagcagggcgaggagaagggcaccaaggtgcaggccaagcgggagaagctgcaggaggacaagcccaccttcaagaaggaggagatcaaggatgagaagatcaagaaggacaaggagcccaaggaggaggtgaagagcttcatggacaggaagaagggcttcacagaggtgaagagccagaatggagagttcatgacccacaagctgaagcacacagagaacaccttcagcaggcctgggggccgggcctctgtggacaccaaggaggccgagggcgccccccaggtggaggccggcaagaggctggaggagctgcggcggcggcggggggagacagagagcgaggagtttgagaagctgaagcagaagcagcaggaggccgccctggagctggaggagctgaagaagaagcgggaggagaggaggaaggtgctggaggaggaggagcagaggaggaagcaggaggaggccgacaggaagctgcgggaggaggaggagaagaggcggctgaaggaggagattgaaagaagaagagctgaggccgctgagaagaggcagaagatgccagaagatggcctgagtgatgacaagaagcccttcaagtgcttcacccccaagggcagcagcctgaagattgaggagcgggcagagttcctgaacaagtctgtgcagaagagcagtggagtgaagagcacccaccaggccgccatcgtgtccaagattgacagccggctggagcagtacaccagcgccatcgagggcaccaagagcgccaagcccaccaagccagctgccagtgacctgcctgtgcctgctgagggcgtgaggaacatcaagtccatgtgggagaagggaaatgtgttcagcagccccacagctgctggcacccccaacaaggagacagctggcctgaaggtgggcgtgagcagccgcatcaatgagtggctgaccaagaccccagatggcaacaagagccctgcccccaagcccagcgacctgcggcctggagatgtgagcagcaagaggaacctgtgggagaagcagagcgtggacaaggtgaccagccccaccaaggtgtag

SEQ ID NO: 227361 - DNA, 1617 bp, Artificial Sequence
  derived and/or modified sequence
atggatgactttgagaggagaagagagctgcggcggcagaagcgggaggagatgaggctggaggccgagagaattgcctaccagagaaatgatgatgatgaggaggaggccgcccgggagaggagaagaagagcccggcaggagcggctgcggcagaagcaggaggaggagagcctgggccaggtgacagaccaggtggaggtgaatgcccagaacagcgtgcctgatgaggaggccaagaccaccaccaccaacacccaggtggagggagatgatgaggccgccttcctggagcggctggcccggcgggaggagcggcggcagaagaggctgcaggaggccctggagcggcagaaggagtttgaccccaccatcacagatgccagcctgagcctgcccagcaggaggatgcagaatgacacagcagaaaatgagaccacagagaaggaggagaagtctgagagccggcaggagagatatgaaattgaggagacagaaacagtgaccaagagctaccagaagaatgactggagagatgctgaggagaacaagaaggaggacaaggagaaggaggaggaggaggaggagaagcccaagaggggcagcattggagagaaccagatcaaggatgagaagatcaagaaggacaaggagcccaaggaggaggtgaagagcttcatggacaggaagaagggcttcacagaggtgaagagccagaatggagagttcatgacccacaagctgaagcacacagagaacaccttcagcaggcctgggggccgggcctctgtggacaccaaggaggccgagggcgccccccaggtggaggccggcaagaggctggaggagctgcggaggagaagaggagaaacagaaagtgaggagtttgagaagctgaagcagaagcagcaggaggccgccctggagctggaggagctgaagaagaagcgggaggagaggaggaaggtgctggaggaggaggagcagaggaggaagcaggaggaggccgacaggaagctgcgggaggaggaggagaagaggcggctgaaggaggagattgaaagaagaagagctgaggccgctgagaagaggcagaagatgccagaagatggcctgagtgatgacaagaagcccttcaagtgcttcacccccaagggcagcagcctgaagattgaggagagagctgagttcctgaacaagtctgtgcagaagagcagcggcgtgaagagcacccaccaggccgccatcgtgtccaagattgacagccggctggagcagtacaccagcgccatcgagggcaccaagagcgccaagcccaccaagccagctgccagtgacctgcctgtgcctgctgagggcgtgaggaacatcaagtccatgtgggagaagggaaatgtgttcagcagccccacagctgctggcacccccaacaaggagacagctggcctgaaggtgggcgtgagcagccgcatcaatgagtggctgaccaagaccccagatggcaacaagagccctgcccccaagcccagcgacctgcggcctggagatgtgagcagcaagaggaacctgtgggagaagcagagcgtggacaaggtgaccagccccaccaaggtgtag

SEQ ID NO: 227362 - DNA, 1677 bp, Artificial Sequence
  derived and/or modified sequence
atgctgggcggcagcggcagccacggccgccgcagcctggccgccctgagccagatcgcctaccagagaaatgatgatgatgaggaggaggccgcccgggagaggagaagaagagcccggcaggagcggctgcggcagaagcaggaggaggagagcctgggccaggtgacagaccaggtggaggtgaatgcccagaacagcgtgcctgatgaggaggccaagaccaccaccaccaacacccaggtggagggagatgatgaggccgccttcctggagcggctggcccggcgggaggagcggcggcagaagaggctgcaggaggccctggagcggcagaaggagtttgaccccaccatcacagatgccagcctgagcctgcccagcaggaggatgcagaatgacacagcagaaaatgagaccacagagaaggaggagaagtctgagagccggcaggagagatatgaaattgaggagacagaaacagtgaccaagagctaccagaagaatgactggagagatgctgaggagaacaagaaggaggacaaggagaaggaggaggaggaggaggagaagcccaagaggggcagcattggagagaaccagggcgaggagaagggcaccaaggtgcaggccaagcgggagaagctgcaggaggacaagcccaccttcaagaaggaggagatcaaggatgagaagatcaagaaggacaaggagcccaaggaggaggtgaagagcttcatggacaggaagaagggcttcacagaggtgaagagccagaatggagagttcatgacccacaagctgaagcacacagagaacaccttcagcaggcctgggggccgggcctctgtggacaccaaggaggccgagggcgccccccaggtggaggccggcaagaggctggaggagctgcggaggagaagaggagaaacagaaagtgaggagtttgagaagctgaagcagaagcagcaggaggccgccctggagctggaggagctgaagaagaagcgggaggagaggaggaaggtgctggaggaggaggagcagaggaggaagcaggaggaggccgacaggaagctgcgggaggaggaggagaagaggcggctgaaggaggagattgaaagaagaagagctgaggccgctgagaagaggcagaagatgccagaagatggcctgagtgatgacaagaagcccttcaagtgcttcacccccaagggcagcagcctgaagattgaggagagagctgagttcctgaacaagtctgtgcagaagagcagcggcgtgaagagcacccaccaggccgccatcgtgtccaagattgacagccggctggagcagtacaccagcgccatcgagggcaccaagagcgccaagcccaccaagccagctgccagtgacctgcctgtgcctgctgagggcgtgaggaacatcaagtccatgtgggagaagggaaatgtgttcagcagccccacagctgctggcacccccaacaaggagacagctggcctgaaggtgggcgtgagcagccgcatcaatgagtggctgaccaagaccccagatggcaacaagagccctgcccccaagcccagcgacctgcggcctggagatgtgagcagcaagaggaacctgtgggagaagcagagcgtggacaaggtgaccagccccaccaaggtgtag

SEQ ID NO: 227363 - DNA, 1599 bp, Artificial Sequence
  derived and/or modified sequence
atgctgggcggcagcggcagccacggccgccgcagcctggccgccctgagccagatcgcctaccagagaaatgatgatgatgaggaggaggccgcccgggagaggagaagaagagcccggcaggagcggctgcggcagaagcaggaggaggagagcctgggccaggtgacagaccaggtggaggtgaatgcccagaacagcgtgcctgatgaggaggccaagaccaccaccaccaacacccaggtggagggagatgatgaggccgccttcctggagcggctggcccggcgggaggagcggcggcagaagaggctgcaggaggccctggagcggcagaaggagtttgaccccaccatcacagatgccagcctgagcctgcccagcaggaggatgcagaatgacacagcagaaaatgagaccacagagaaggaggagaagtctgagagccggcaggagagatatgaaattgaggagacagaaacagtgaccaagagctaccagaagaatgactggagagatgctgaggagaacaagaaggaggacaaggagaaggaggaggaggaggaggagaagcccaagaggggcagcattggagagaaccagatcaaggatgagaagatcaagaaggacaaggagcccaaggaggaggtgaagagcttcatggacaggaagaagggcttcacagaggtgaagagccagaatggagagttcatgacccacaagctgaagcacacagagaacaccttcagcaggcctgggggccgggcctctgtggacaccaaggaggccgagggcgccccccaggtggaggccggcaagaggctggaggagctgcggaggagaagaggagaaacagaaagtgaggagtttgagaagctgaagcagaagcagcaggaggccgccctggagctggaggagctgaagaagaagcgggaggagaggaggaaggtgctggaggaggaggagcagaggaggaagcaggaggaggccgacaggaagctgcgggaggaggaggagaagaggcggctgaaggaggagattgaaagaagaagagctgaggccgctgagaagaggcagaagatgccagaagatggcctgagtgatgacaagaagcccttcaagtgcttcacccccaagggcagcagcctgaagattgaggagagagctgagttcctgaacaagtctgtgcagaagagcagcggcgtgaagagcacccaccaggccgccatcgtgtccaagattgacagccggctggagcagtacaccagcgccatcgagggcaccaagagcgccaagcccaccaagccagctgccagtgacctgcctgtgcctgctgagggcgtgaggaacatcaagtccatgtgggagaagggaaatgtgttcagcagccccacagctgctggcacccccaacaaggagacagctggcctgaaggtgggcgtgagcagccgcatcaatgagtggctgaccaagaccccagatggcaacaagagccctgcccccaagcccagcgacctgcggcctggagatgtgagcagcaagaggaacctgtgggagaagcagagcgtggacaaggtgaccagccccaccaaggtgtag

SEQ ID NO: 227364 - DNA, 1632 bp, Artificial Sequence
  derived and/or modified sequence
atgaccagctacatgaaggtggaccggcagtggaatgctgagatcctggagctgatcctgggcaccggccagctgagcacaggccagatcgcctaccagagaaatgatgatgatgaggaggaggccgcccgggagaggagaagaagagcccggcaggagcggctgcggcagaagcaggaggaggagagcctgggccaggtgacagaccaggtggaggtgaatgcccagaacagcgtgcctgatgaggaggccaagaccaccaccaccaacacccaggtggagggagatgatgaagctgccttcctggagcggctggcccggcgggaggagcggcggcagaagaggctgcaggaggccctggagcggcagaaggagtttgaccccaccatcacagatgccagcctgagcctgcccagcaggaggatgcagaatgacacagcagaaaatgagaccacagagaaggaggagaagtctgagagccggcaggagagatatgaaattgaggagacagagaccgtgaccaagagctaccagaagaatgactggagagatgctgaggagaacaagaaggaggacaaggagaaggaggaggaggaggaggagaagcccaagaggggcagcatcggggagaaccagatcaaggatgagaagatcaagaaggacaaggagcccaaggaggaggtgaagagcttcatggacaggaagaagggcttcacagaggtgaagagccagaatggagagttcatgacccacaagctgaagcacacagagaacaccttcagcaggcctgggggccgggcctctgtggacaccaaggaggccgagggcgccccccaggtggaggccggcaagaggctggaggagctgcggcggcggcggggggagacagagagcgaggagtttgagaagctgaagcagaagcagcaggaggccgccctggagctggaggagctgaagaagaagcgggaggagaggaggaaggtgctggaggaggaggagcagaggaggaagcaggaggaggccgacaggaagctgcgggaggaggaggagaagaggcggctgaaggaggagattgaaagaagaagagctgaggccgctgagaagaggcagaagatgccagaagatggcctgagtgatgacaagaagcccttcaagtgcttcacccccaagggcagcagcctgaagattgaggagcgggcagagttcctgaacaagtctgtgcagaagagcagtggagtgaagagcacccaccaggccgccatcgtgtccaagattgacagccggctggagcagtacaccagcgccatcgagggcaccaagagcgccaagcccaccaagccagctgccagtgacctgcctgtgcctgctgagggcgtgaggaacatcaagtccatgtgggagaagggaaatgtgttcagcagccccacagctgctggcacccccaacaaggagacagctggcctgaaggtgggcgtgagcagccgcatcaatgagtggctgaccaagaccccagatggcaacaagagccctgcccccaagcccagcgacctgcggcctggagatgtgagcagcaagaggaacctgtgggagaagcagagcgtggacaaggtgaccagccccaccaaggtgtag

SEQ ID NO: 227365 - DNA, 1695 bp, Artificial Sequence
  derived and/or modified sequence
atggacgacttcgagcggcggcgggagctgcggcggcagaagcgggaagaaatgaggctcgaagcagaacgcatcgcctaccaaaggaacgacgatgacgaggaggaagccgctcgggagaggaggcgccgcgcaaggcaggaaagacttcgtcagaagcaagaagaggaatctttgggccaagtgacagaccaggtcgaggttaatgcccagaattccgttccagatgaggaagcgaagactactaccaccaatacccaggtggaaggagatgatgaagccgcctttctcgagaggttagctcggcgggaggagcggcggcagaagcgattgcaggaagctttagaacgccagaaagaatttgaccccaccataacggatgcgagcctgtcactgcctagccggaggatgcagaacgacacggccgagaacgaaacaacagagaaagaagagaagtctgaatcaaggcaggaacggtacgagattgaggagacggaaacagtgaccaaaagctaccagaaaaacgattggagggacgccgaggagaacaagaaggaggataaagaaaaggaggaggaggaagaggagaagccaaagcgtggatctatcggggagaatcagggtgaggagaaaggcacgaaagtgcaggccaagagagagaagctgcaagaggataagcccacatttaaaaaagaagaaataaaggatgaaaagataaagaaggacaaagaacccaaggaagaggtgaagtcctttatggataggaagaaaggttttactgaagtgaaatcccagaacggcgagttcatgacccacaaactcaaacacaccgagaacactttcagtagaccagggggacgcgcttcagtggacactaaagaggcggagggagctccacaagtggaagccggaaaaaggctcgaagaactgagaaggcggcgaggtgagaccgagagtgaggagtttgagaagcttaaacagaagcagcaggaagccgctctggagctcgaggaacttaagaagaaacgtgaagagcgtaggaaagtgctcgaggaggaggagcagcgcaggaagcaagaggaagccgacaggaagctgagagaggaggaagaaaaacgacggttgaaggaggagatcgagaggagacgcgcagaggctgcggaaaaacggcagaagatgccggaagacggcctcagtgatgacaagaagccatttaagtgctttacgcctaaggggagctctctgaagatcgaggaaagagctgagtttttgaataaatccgtgcagaagtcgtctggcgtcaaatctacacatcaggctgccatcgtcagtaaaatagattcaaggctggaacaatacactagcgccatcgaagggaccaagtcggcaaagcccacgaaacctgcggcgtcggacctgcccgttccagcagagggtgtgagaaacattaagtctatgtgggaaaagggcaacgtcttctccagtcctactgcagcggggacacccaacaaggagaccgccggtctcaaggtgggcgtgtcttcccgcatcaacgagtggttgacgaagaccccagacggtaacaagtctcccgccccaaaaccctctgacctgcgccccggggatgtcagcagtaaaagaaacctgtgggagaaacagtccgtggataaggttacctctcccacaaaagtgtag

SEQ ID NO: 227366 - DNA, 2382 bp, Artificial Sequence
  derived and/or modified sequence
atggacgacttcgagcggcggcgggagctgcggcggcagaagcgggaagagatgcgcttagaagcagaacggattgcataccagagaaacgacgacgacgaggaagaggcggcccgggagaggcggcggagggcgcgccaagagcgattgcggcagaaacaggaagaggaaagtttaggtcaggtgacggaccaggtggaagtgaatgcccagaactcggtccccgacgaggaggcaaagacaactacaacaaatacacaagttgagggggacgatgaagcagccttcctggaacgcctagccagacgcgaggaacgtcgccagaagcggctgcaggaggcgctggagaggcaaaaggaattcgaccctaccattacagacgcctccctgtctctgccttcacgccgcatgcagaatgataccgctgagaatgagacaaccgagaaagaggagaaatcagaatctagacaggagcggtatgaaattgaagagacagaaaccgtaaccaagtcatatcagaagaacgactggcgggatgccgaagagaataaaaaggaggataaggagaaagaggaagaagaagaggagaaaccaaaaagggggtccattggcgagaaccaagtggaggtgatggtggaagaaaagacaacagaatcccaagaggaaacagtagttatgtcactcaagaatggccagatcagctctgaggagcccaaacaagaagaggaacgggaacagggcagtgacgaaattagccaccacgagaaaatggaggaagaagacaaggagagagcagaagccgaacgcgctagacttgaggccgaggagcgagagaggattaaggccgaacaggataagaagatcgcggacgagagagcccggatcgaggccgaagagaaggcagcagctcaggagcgtgaacgacgtgaggctgaagaacgtgagaggatgagggaggaggagaagagggccgccgaagagcggcagaggattaaagaagaggagaagcgcgcagccgaggagaggcagaggattaaagaggaggaaaagcgggctgccgaggaaagacagcgtattaaggaggaggaaaagcgcgccgccgaggaaagacagcgtgccagagctgaggaggaggaaaaggccaaagtagaagagcagaagcggaataagcaactggaggaaaaaaagcacgcgatgcaagaaaccaaaattaaaggagaaaaggtcgagcagaaaatcgaggggaaatgggtgaacgaaaaaaaggctcaggaggataagctccagacagccgtgctgaagaaacaaggtgaggagaaaggtaccaaggtccaggctaagcgggagaaactgcaagaagacaagcctacgtttaaaaaggaagagattaaagacgagaagattaagaaggataaggaaccgaaagaagaagtgaaatcatttatggatagaaaaaaaggattcaccgaggtcaagagtcagaatggagaatttatgacccataagctgaagcacaccgagaacaccttctctagacctggaggacgggcaagtgttgacacaaaagaggctgaaggcgccccacaggtggaggcaggaaaaagacttgaagagctgcggagaagacgtggcgaaactgaatccgaggagtttgagaagctaaaacaaaagcagcaggaggctgccctagaacttgaggagctgaagaaaaaacgtgaggagcgccggaaagtgctcgaggaggaggagcagaggaggaaacaagaagaggctgatcgcaagctgcgggaggaggaggaaaaacggagattgaaagaagaaattgagcggcggcgggctgaggcagctgaaaaaagacagaagatgcctgaggacggcctatccgatgataagaagccttttaagtgttttactccaaaggggagtagtctgaaaattgaggagcgggccgagtttctaaacaagagcgttcagaaatcttccggggtgaagtctactcatcaggcagccatcgtttctaaaatcgattcccgcctcgagcagtatactagcgccatcgaaggcactaaatcagcgaagcccaccaagccggccgctagcgacctgcctgtgcccgccgagggcgtacgaaatataaaatccatgtgggagaaagggaacgtttttagttcgcccactgcagctggtacacccaataaggagactgctggactgaaggtaggggtcagtagtcggataaatgagtggctcaccaaaactccggatggtaataagtcccccgcaccgaaaccaagcgacctgcgcccaggagatgtgagttctaaacggaatctgtgggaaaaacaatctgttgacaaagtgacgagtcccaccaaagtgtag

SEQ ID NO: 227367 - DNA, 1617 bp, Artificial Sequence
  derived and/or modified sequence
atggacgacttcgagcggcggcgggagctgcggcggcagaagcgggaagaaatgcggctcgaagctgagcggattgcctaccaaaggaatgatgacgacgaagaagaagctgctagagagagaaggagaagggccagacaggagaggctgaggcagaagcaggaagaggaatccttaggccaggtgacagatcaggtggaagtgaacgcacagaactctgtaccggatgaggaagcaaagacaaccaccactaatacccaggtagagggggatgatgaagccgcatttctcgagcggctggcaaggagagaagagagacgacagaaacgcctgcaagaggccctggagaggcagaaggagtttgatccaaccataacagacgcttcactctctcttccaagcagacgaatgcaaaatgacactgcagagaatgagactactgaaaaagaagaaaagtcagaatcgaggcaagagcgatacgaaatcgaggagacagaaacagtgacaaaaagttaccaaaagaatgactggagggacgcagaagagaacaagaaggaggataaggagaaagaggaagaggaagaagagaagccaaaaaggggtagcatcggggagaatcagatcaaagacgagaaaataaaaaaggataaggaacccaaggaagaggtgaagagctttatggaccgtaagaaaggctttaccgaagtgaagagccagaacggcgaatttatgacgcacaagctgaagcacaccgagaacacctttagtagaccaggaggccgggcctctgtggacaccaaggaggcagagggggccccccaggtggaagccggtaaacgactcgaggagctgcggcgtcgtaggggagaaaccgagtctgaagaattcgagaagcttaagcaaaagcagcaggaggccgccctcgagttggaggaacttaagaaaaagcgggaggaacggcgcaaggtactcgaggaggaggagcaaagaaggaaacaggaggaggcagacagaaagctgagggaagaggaggaaaagcgcaggttgaaagaggaaatagagcgaagacgtgcggaggcagcagaaaaaagacagaagatgcctgaggatggcttgagcgatgataaaaaacccttcaagtgctttactccaaaaggctctagtttaaaaatcgaagagagggctgaattcctgaataaaagcgtccagaagtcatccggggtgaagtctactcatcaggctgctatagtgtctaagattgacagtagactggaacagtatactagtgcaatcgaagggaccaagtcggctaaacctaccaaacctgcagcttctgacttgcccgtccctgccgaaggtgtgcggaatatcaaaagcatgtgggagaaggggaacgtattctcaagcccaacagccgcagggactcctaataaggagactgctggcctgaaagtcggggtatcttctcggatcaacgagtggcttacaaagactccagatggcaacaaatcccctgcaccaaagccatctgatctgaggcctggggacgtgtcgagcaagcgaaatctttgggaaaagcagagcgtcgataaagttacaagcccaacgaaagtgtag

SEQ ID NO: 227368 - DNA, 1677 bp, Artificial Sequence
  derived and/or modified sequence
atgctgggcggcagcggcagccacggccggcggagcctggccgccctcagccaaattgcctatcagaggaatgacgacgacgaagaagaagctgctagggagcgaaggcgccgggctcgtcaggaacgcttaaggcaaaaacaggaagaggagagtcttggccaggttactgaccaagtagaagtgaacgctcagaatagtgtcccagacgaagaagccaagactaccaccaccaacacccaggtcgagggagacgacgaggctgcttttctcgagcgtcttgctaggagggaggagagacgtcaaaaacgccttcaggaagctctggagcggcaaaaagagttcgacccgaccataacagatgctagtttgagcctgccctccagacgtatgcagaatgataccgccgagaatgaaacaaccgagaaggaggaaaaaagcgagtctaggcaggaaagatatgagatcgaggaaacggagacagtgaccaagtcataccagaagaatgattggagggatgcagaggaaaacaagaaggaggataaggagaaggaggaagaagaggaggagaagcccaagcgcggatccattggcgagaaccagggagaagagaaggggaccaaagtgcaggcaaaacgggagaagttacaggaggacaagcccaccttcaagaaagaagaaattaaagatgagaaaatcaagaaagacaaagaaccgaaggaagaggttaaatcatttatggacagaaaaaagggcttcaccgaggttaaaagccagaacggggaatttatgacacacaaactgaagcatacagaaaataccttcagtcggccagggggaagggcctccgtggacactaaagaggcagaaggggccccccaggttgaagcagggaagcgcctcgaggagctgcgtcgcagacgcggtgagacagaaagcgaagaattcgaaaagttaaagcaaaagcagcaggaggccgccctggaattagaagagctgaaaaaaaaaagggaagagcgtaggaaggtgctggaagaagaagagcaaagacgaaagcaggaagaagccgataggaaactgagggaagaggaggagaaacgcaggcttaaagaagaaatcgagagacgtcgagcagaagcggccgagaagagacagaaaatgcctgaagacggtctttccgatgataaaaaaccttttaagtgctttacacctaagggtagctctctgaagatcgaagagcgggccgaattcctgaataaatcagtgcaaaaaagtagtggcgtgaaatctactcaccaggctgccatcgtcagtaagatcgattcaaggctcgagcaatacactagcgctattgaaggcacaaagtcagcaaaacctacaaagcccgctgcctcagacttgcccgtacccgccgagggcgtccggaacatcaagtctatgtgggagaaaggcaacgttttttcaagccctacagccgcagggacgccgaataaggagacggccggtttgaaggtgggcgtgtcgtccaggattaatgagtggctgactaagacccccgatggaaacaaatccccagcgcccaagccttctgatctgcgaccaggcgatgtatccagcaaaagaaatctgtgggagaagcagtcggtggataaggtcacttcccccacaaaggtgtag

SEQ ID NO: 227369 - DNA, 1617 bp, Artificial Sequence
  derived and/or modified sequence
atggacgacttcgagcggcggcgggagctgcggcggcagaagcgggaggagatgaggctggaagcagagcggatagcctatcagagaaacgacgacgatgaggaggaggccgctcgcgagcggcgccgacgggcccgccaagagcgcctgcgtcagaaacaggaggaggagtccctgggacaggtgacagatcaggtggaagtgaatgctcagaacagcgttccagatgaagaagcaaagaccacaaccaccaatacgcaggtggaaggcgacgatgaggcagcttttttggagaggctggctagacgcgaagagcgtcgacagaagcgtttgcaggaggctttagagcgtcagaaagagtttgacccaaccattactgatgcctcactgagccttcctagccggcgaatgcagaacgacaccgctgaaaacgaaaccaccgagaaggaggaaaaaagcgaatcccgccaagagcgatacgagatcgaagagaccgagaccgtcaccaagagttatcaaaaaaacgactggagggatgcggaagagaataaaaaagaggacaaagaaaaggaagaagaagaagaggaaaaacctaagcgagggtccattggggagaaccagattaaggacgagaagattaagaaggacaaggagcctaaagaagaggtcaaaagtttcatggataggaagaagggctttaccgaggtgaaatctcagaacggcgagttcatgacacataagcttaagcatacagagaataccttctcgcgccctggcggccgcgcctctgtggatactaaggaagccgaaggagccccacaggtggaagctgggaagagactcgaagagttgcgaagaaggagaggagagacagagtctgaggagtttgaaaaattgaaacagaaacagcaggaggccgcactagaactggaggaacttaagaagaaaagggaggagaggcggaaggtcctggaagaagaagagcaacgacgtaaacaggaggaagccgataggaagctgcgcgaggaagaagaaaaacgacgcctgaaagaggagatagagagacgccgtgctgaagctgcagagaaacgacagaagatgccggaggacggcttaagtgatgacaagaaacccttcaagtgcttcactccaaagggctctagtctaaagatcgaggaaagggctgagttcctgaacaaatccgtgcagaaaagtagtggcgtcaagtctacccatcaagctgcaattgtctctaaaatcgacagtcgcttggagcagtacactagcgctattgaggggactaagagcgctaaaccaacaaagccagcggcctcggacctacccgtgcccgccgaaggagtcagaaacattaaaagcatgtgggaaaaaggtaacgtcttctcaagccctactgccgccggtacaccaaacaaggagacggcaggtttaaaggtcggcgtgtctagtcgaatcaacgaatggcttaccaaaacacccgacggcaataaatcacctgcgcccaaaccttctgatttgcggcccggtgatgtttccagcaagaggaacctgtgggagaaacagtctgttgataaggtgacctccccaaccaaggtgtag

SEQ ID NO: 227370 - DNA, 1599 bp, Artificial Sequence
  derived and/or modified sequence
atgctgggcggcagcggcagccacggccggcggagcctggccgccctgagccagatcgcttaccagagaaacgatgacgacgaggaggaagctgccagagaacgccggagaagagctcgccaggagaggctgagacagaaacaagaagaagagagtctgggtcaggtcaccgaccaggttgaggtgaacgcacagaactctgtccctgacgaagaggcaaagaccacgacaactaacactcaggtcgaaggcgatgatgaagcagcttttcttgagcgactggcgaggcgggaggaacggaggcagaaacgactgcaggaagctttggagaggcagaaggaattcgatccaaccattaccgacgctagcctctccttaccttccagacgaatgcaaaatgacaccgctgagaacgagacgaccgagaaggaagagaagagcgaatccagacaagagagatatgaaattgaggagactgagaccgtgactaagagctatcaaaaaaacgattggcgagacgctgaggagaacaaaaaagaggacaaggaaaaagaggaggaagaggaagagaaacccaaacgagggtcaattggagaaaaccagattaaagacgaaaaaataaagaaggataaagaaccaaaagaagaggtgaagagctttatggacagaaaaaagggcttcaccgaggtaaaaagtcagaatggagagtttatgactcataagttgaaacacaccgaaaacacattttcgcgcccgggtggtcgggcctcagttgatactaaggaggccgagggagcaccccaggttgaagcggggaagcggctcgaggaattgagaaggcgcaggggggagacagaatctgaagagttcgagaagctcaagcagaagcagcaggaggctgccttggaactggaagaactaaaaaagaaaagggaagaacgacgaaaagtattggaggaagaggagcagcgccgtaagcaagaagaggctgatcggaagctgcgggaggaagaagaaaagaggagacttaaggaagagatcgagagacggcgcgccgaagcagcagaaaaaaggcagaagatgccagaggatggcttgtctgatgataagaagccctttaaatgctttacgccgaaaggcagttctttaaaaattgaagagagggctgagttcctaaacaaatctgtccagaagtcttcaggagttaaatccactcatcaagccgctatcgtgagcaagatcgattcgagactggaacagtatacctcagctatcgagggaacaaagtctgccaagcctactaaaccagcagcatctgacttgccagtgcctgctgagggtgtccggaatatcaagagcatgtgggaaaaaggaaacgtcttctcgtctcccaccgctgctggcactccaaataaagagactgccgggctgaaggttggcgttagctcgaggattaatgagtggcttaccaagaccccagatggcaataaatcacccgctcctaagccaagtgatctgcggcccggcgacgtaagcagtaaaaggaatctgtgggagaagcagagcgtggataaggtgacgagtcctacaaaagtctag

SEQ ID NO: 227371 - DNA, 1632 bp, Artificial Sequence
  derived and/or modified sequence
atgaccagctacatgaaggtggaccggcagtggaacgccgagatcttggagcttattctcggtactgggcagttgtcaacgggccagatcgcttatcagcgaaacgatgacgacgaggaggaggccgcacgcgaaagaaggcgacgagccaggcaggagcgcctgagacagaagcaggaagaggagtctctggggcaggtcacagaccaggttgaagtgaacgctcaaaacagcgtccctgacgaggaggccaaaaccaccaccacaaacacccaggttgaaggagatgacgaggcagccttcttagaaaggcttgccagaagagaagagagacgacagaaacggcttcaggaagccctcgaaagacaaaaagagtttgacccgaccatcacagacgcaagcctgagcttgcccagccgtaggatgcagaacgatactgcggagaacgagaccacagaaaaggaagagaagagcgaatctagacaagaacgttacgaaattgaggaaactgagactgttaccaagagttatcagaagaacgactggcgcgatgctgaggagaacaagaaagaggacaaggagaaagaagaagaagaggaggaaaagcctaaacgaggatcaattggcgaaaaccagattaaagacgaaaaaattaaaaaggataaggagcccaaagaggaagtgaaatccttcatggatagaaagaagggttttactgaggtgaaatctcagaatggagaatttatgacccacaaactgaagcataccgagaacacgttttcaaggccaggcggacgagctagtgttgatactaaggaagctgagggtgcaccacaagtggaggccggaaaacggctggaagagctgcggcgacggagaggagagacggagtcagaggagttcgaaaaactcaaacaaaagcagcaggaggctgcattggaactggaagagctgaagaagaagagggaagagcggagaaaagtgttggaagaagaagagcagcgacggaagcaagaggaagcggaccgaaagctgagggaagaggaggagaagaggcgcttaaaagaagaaatagagcgacgtcgggcggaggccgccgaaaagcggcagaaaatgcccgaggacggcttatccgacgataagaaacccttcaagtgttttactccaaaaggttcatctctgaagatcgaggagcgggcagagtttctgaataagtcagtgcaaaaatcatctggagtgaaatctacgcaccaagctgcgatcgtaagtaaaatcgactccagactcgaacaatacacatcagccattgaagggacgaagtcagccaaacccacgaaaccagcagcttccgatctaccagttcccgctgagggggtccggaatatcaaatctatgtgggagaagggtaacgtgttctcatcaccaaccgccgcagggacgcccaataaagagactgccggcctgaaggtgggagtctcctctaggatcaacgagtggctcactaaaacgcccgatggtaataagagcccagctcccaaaccgagcgaccttcggccaggcgacgtcagctcaaagagaaacctttgggagaaacaatcagtcgacaaggtcacaagtcctaccaaagtctag

SEQ ID NO: 227372 - DNA, 1695 bp, Artificial Sequence
  derived and/or modified sequence
atggatgatttcgagagacgtagagaactgaggaggcagaaacgggaggaaatgaggctcgaagccgagaggatcgcttaccagcggaacgatgatgatgaggaggaagcagctagggagcggaggaggcgggcaaggcaggaacgactgcgccagaaacaggaagaggagagcctcggccaagtgacagatcaagtggaagtcaatgcccaaaacagcgttcctgacgaggaggcgaagactactaccactaatacgcaggtggagggggacgacgaagccgcattcctggagaggctggcgcgacgcgaggagcggcgtcaaaagcggttacaggaggcactggagcggcagaaggaatttgatcccaccatcaccgacgcatcacttagcctgccctccaggagaatgcagaacgataccgccgagaacgagaccacagaaaaggaagaaaagagtgagtccagacaggaacggtacgaaatcgaggaaacagaaacagtaacgaaatcttaccagaagaacgactggcgggacgcagaagagaataaaaaggaagataaggagaaagaagaggaggaggaggaaaaacccaagcggggtagcatcggagagaaccagggcgaggaaaaaggcaccaaagtgcaggcgaagcgcgagaagctgcaggaggacaaacccacatttaagaaagaggagataaaagatgagaagatcaaaaaggacaaggaacccaaggaggaggttaaatccttcatggatcgtaaaaaaggcttcaccgaggtgaagtcgcaaaatggcgaattcatgactcataagctgaagcacacagagaacactttctcacgtcctggcggtagagcaagtgttgatactaaggaagcagagggcgctcctcaagtggaggccggtaagcgacttgaagagctgcgcagacgacggggagaaacagaaagtgaagagttcgagaaactcaaacagaagcagcaggaggccgcacttgagctggaggagctcaagaaaaagagggaagagagaagaaaagtgctagaggaggaggaacagcgccgaaagcaggaagaagccgataggaaacttagggaggaagaggagaagcggcgtttgaaggaggaaatcgaacgcagaagagccgaggctgccgagaagcgccagaaaatgccagaagacggccttagcgatgacaaaaaaccgtttaagtgcttcacacccaagggatctagcctgaagatcgaagaacgtgcagagtttctgaacaaaagcgtgcagaagtcctcaggcgttaagtctacgcaccaggctgctatagtgtctaaaattgactcacgtctggagcagtatacctcggcaattgagggaacaaagtctgctaagcctactaagcctgccgcatctgatctgccagtgccagcagaaggcgtgaggaatatcaagtcaatgtgggagaaaggaaacgtgtttagcagccccaccgcagctgggacaccaaataaggaaacggccggtctgaaggtgggggttagctcccggataaatgagtggctcaccaagactccagacgggaacaagagtcccgctcccaagccctcagatctacgccctggcgatgtgtctagcaagcggaacctgtgggagaagcaaagtgtagacaaggtcacttcccctactaaggtctag

SEQ ID NO: 227373 - DNA, 2382 bp, Artificial Sequence
  derived and/or modified sequence
atggatgacttcgagcgcaggagggagctacggagacagaaacgggaggaaatgcgactagaggcggaacggatagcttaccagaggaatgacgatgacgaggaggaagccgcaagggagaggcggagaagagcacgacaagagcggttgaggcagaagcaggaggaagagagtctgggccaggtaacagaccaggtcgaggtcaatgcacagaacagcgtaccggacgaggaagccaaaactactacaacaaacacacaggttgagggtgacgatgaggccgcattcctggagagactggctaggagggaggagaggaggcagaaacggcttcaggaggccctagagagacaaaaagagttcgatcctaccatcacggatgcctcgctatccctgccctctcgtaggatgcagaacgacacagcagagaacgaaaccacggaaaaagaggagaaatccgagtccaggcaagagaggtacgaaatcgaagagactgaaaccgtaacgaaatcttaccagaagaacgactggagagatgcagaagaaaacaagaaggaagacaaagagaaagaagaggaggaggaagagaagccgaagcgcggatcgattggcgagaaccaggtcgaggttatggtggaggaaaagaccacagagagccaggaagagacggttgtaatgtcactgaaaaatgggcagatctcttctgaggagcccaagcaggaggaggaaagagaacagggttcggatgagattagccatcacgaaaaaatggaggaagaagataaagagcgtgccgaggctgagagagcgaggctggaggctgaagagcgcgagagaatcaaggcagaacaggacaagaagattgctgacgaaagagccaggatcgaagccgaagagaaggcagctgcccaagagagggaaagaagagaagccgaggaacgcgagcgcatgcgcgaggaggaaaaaagggcggctgaggaaagacagcgcataaaggaggaggagaagcgggcagctgaagagcgccaaagaatcaaggaggaggagaaaagagcagctgaggaacgtcagcgaatcaaagaagaagagaaacgcgcagcagaggaacggcagcgagctcgtgccgaggaagaagaaaaggctaaggtggaggaacagaagagaaacaagcagctggaagagaagaagcatgctatgcaggagacaaagattaagggtgagaaggtagagcagaagattgaaggaaaatgggtgaatgagaagaaagcccaagaggacaagctgcagacggccgtattgaaaaaacagggtgaagagaagggtacaaaagtccaggccaagcgggagaaactccaggaggacaaacctaccttcaagaaggaagaaatcaaggacgagaaaattaagaaagacaaagaaccaaaggaggaagtcaagagtttcatggatagaaaaaagggattcacagaagttaaaagccagaatggggaatttatgactcataagctgaaacacacagagaacacatttagtaggcccggaggacgagccagcgttgacactaaggaagctgagggggcaccgcaggttgaagccggtaagcgactcgaagagctgcgcagaaggagaggggaaactgagtccgaggaatttgagaaactcaaacagaagcagcaggaagctgctttggaattggaggagctcaagaagaaaagggaagagagacgcaaggtgctggaggaggaggagcagcgcagaaagcaggaggaggccgacagaaaactgcgggaagaggaagagaaaagacgcctgaaggaggaaatagagcggcgacgtgcagaagctgccgaaaaacgccagaagatgcctgaggatgggctaagcgatgacaagaagccattcaagtgcttcacacctaaggggtcttccctgaagatcgaagaaagagcggagttcctgaacaagagcgtccagaagagcagcggagtaaagtccacacatcaggcagccattgtgtctaagatcgactcgcgactggagcagtacacctctgctattgaaggaactaagagcgctaagccaacaaagcccgctgcatcagacctgcccgtacccgctgagggagtgcgcaacattaagagcatgtgggagaaggggaatgtgtttagtagcccgaccgccgctggtactccaaataaagagaccgctgggctgaaagtgggagtgagcagccggatcaatgagtggctcacgaagactcctgacgggaataagagccccgcaccaaagccaagtgacctgagacccggtgacgtctcatccaagcggaacctgtgggaaaagcaatctgtggacaaggtaacaagtcccaccaaagtgtag

SEQ ID NO: 227374 - DNA, 1617 bp, Artificial Sequence
  derived and/or modified sequence
atggatgattttgagcgccgtcgtgagttacgtcggcagaagagagaagagatgcggctggaagcagaaagaattgcgtaccaacgcaatgatgatgacgaggaggaagcagctcgtgaacgacgcaggagagccaggcaggagcgtctccgccagaaacaggaagaggaatcactggggcaggtgaccgatcaggtggaggtaaatgcccagaattcagtccccgacgaggaggcaaagacaacgacaacaaacacccaggtagagggggatgacgaggcagcttttctggagagactggctaggcgagaggaacgacgccagaaacggctgcaggaggccctggagaggcagaaagaatttgacccaacaataactgatgccagcctgagccttcccagcaggagaatgcagaacgacacagcagagaacgaaactaccgagaaagaagagaaatctgagagtcgtcaggaaagatacgagatcgaggaaaccgaaaccgttactaagtcataccaaaagaacgattggagagatgctgaagaaaacaagaaggaggataaagaaaaggaagaagaggaagaagaaaagccaaagagaggctccattggagaaaaccagatcaaagatgagaagattaaaaaagacaaagagcctaaggaggaagttaagagctttatggaccgcaaaaagggattcaccgaggttaaatcgcagaatggggaattcatgacacacaaactgaaacacacagagaatactttctcccgacccggaggcagagcgtctgtggacaccaaggaggccgagggcgctccgcaggtcgaggcaggaaagagactggaagagctgcggcgacgcagaggcgagacagaatccgaggaatttgagaaactgaagcaaaaacagcaagaagccgcattggagctggaggagctgaaaaaaaagagagaggaacgccgaaaggtgctggaagaggaggagcagcggagaaaacaggaggaggccgaccgcaaactccgcgaagaggaggagaagcgtagactgaaggaggagatcgagcgccgaagggctgaggctgcagaaaagcgacagaagatgcctgaggatggtctcagtgacgacaagaaaccctttaagtgtttcactcctaaaggttcttccctgaagatcgaagagcgggctgaatttctgaataaatccgtccagaaatcatctggcgtgaaaagtactcatcaggccgcaattgtgtccaagatcgatagcagactggaacagtatacatctgcaatcgaaggcaccaaaagtgccaaacctacaaaacccgctgccagtgatctaccagtgccagcggagggagtgcgcaacattaaatcaatgtgggagaaaggcaacgtgttcagtagcccgaccgcagcgggaactccaaacaaagaaaccgccggtttgaaagtgggtgtatcctcgagaatcaatgagtggttgaccaagactcctgacggaaataaatctcccgcaccaaaaccatctgacctgcgccctggtgacgtgtcctccaagcggaacttatgggagaaacaatcagttgataaggtgacatccccgaccaaggtgtag

SEQ ID NO: 227375 - DNA, 1677 bp, Artificial Sequence
  derived and/or modified sequence
atgctgggagggtccggatcacacggacgacgttcactcgccgcactttcccaaatcgcttatcagcggaacgacgatgatgaagaggaggccgcacgggagcgcagacgacgagcgcgacaggaaaggcttagacagaaacaggaggaggagagcctgggccaggtgactgaccaggtggaggttaacgcgcagaattccgtgcccgatgaggaagcgaagacaaccacaactaacacccaggtggaaggggacgatgaggcggctttcttagagaggctggctagacgcgaggagcggaggcaaaaacgcttacaggaagcattggaaaggcagaaagaattcgaccccaccattactgatgccagtctgtcactgccttcccgcaggatgcaaaacgataccgctgagaatgagaccacagaaaaagaggagaagtccgaatccaggcaagaaagatatgaaatcgaggaaaccgaaaccgtaacgaaaagttaccaaaagaacgattggcgcgatgctgaagaaaataaaaaggaggacaaggaaaaagaagaggaagaggaggagaaacctaaaaggggtagtatcggtgaaaaccagggcgaagagaaagggacaaaggtccaggcgaaaagagagaagctgcaggaggataaaccaacatttaaaaaagaggaaataaaggatgaaaagatcaaaaaagataaagaaccaaaagaagaggtcaagagctttatggataggaagaaaggatttaccgaggtaaaatcccaaaatggagagttcatgactcataagcttaagcacacagaaaataccttctccaggcctgggggacgcgcatccgtggataccaaggaagccgagggagctccgcaagtcgaggctggtaaaaggctggaggagctgagacggcgtcgcggagagactgaatcagaggaatttgaaaagctcaaacaaaagcagcaagaggcagcccttgagttggaggagctgaagaaaaagcgtgaggagcggagaaaagtgctcgaagaggaagaacagagacgcaagcaagaagaggccgaccgcaagctgcgggaggaggaagaaaagaggcgactgaaggaggaaatcgagcggcgaagagccgaagcggctgagaagcgacagaagatgcctgaggacggcctctcagacgacaagaagccattcaaatgttttacacctaaaggaagtagtttaaagatcgaggagcgagccgagtttctcaataaaagtgtgcagaaaagtagcggggtgaaaagtactcaccaagcggcaatagtgtcaaagatcgatagtcgccttgaacaatacacatccgccatcgagggcaccaaaagcgccaagcctaccaagcccgctgcatccgacctccccgttccagcagagggtgtgcgaaatatcaaatccatgtgggagaaggggaatgtgttctcctcccctacagcagccggaacaccaaataaggagacagctgggctcaaggtaggggtctcgagtaggatcaacgagtggctcaccaaaactcctgatggtaacaagtcccccgctcccaagccttctgatctaaggcctggggatgtgtcgtctaagagaaacctgtgggaaaagcagtctgtagataaagtgacctccccgaccaaggtgtag

SEQ ID NO: 227376 - DNA, 1617 bp, Artificial Sequence
  derived and/or modified sequence
atggatgatttcgaacgacgacgagaactgcgaaggcagaagagggaagagatgcgtttggaggccgagagaatcgcctatcaacgcaatgacgacgatgaagaggaagctgccagagagcgtcgcagacgggctaggcaggagaggctgagacagaaacaggaggaagagtcactgggacaggtgacagatcaggtggaggtcaatgcccagaattcagtccctgacgaggaggccaagacaacaacgaccaacacccaggtagaaggagatgacgaagcagcctttctggagagactggctcgtcgcgaagaaagacggcaaaaaaggcttcaggaagcgctggaacggcagaaggagtttgacccgaccatcacagatgcaagcctcagcctgcccagccgccgaatgcaaaacgacaccgctgaaaacgagaccaccgagaaggaagagaagtctgaatcacgccaggaaagatacgaaattgaggagacagagaccgtcacaaaaagttaccagaagaatgattggagggacgctgaggagaacaagaaagaagataaagagaaggaggaggaggaggaggagaaacccaagcgtggctctattggcgagaaccagattaaagatgaaaagattaagaaagacaaggagcccaaggaagaggtcaaatctttcatggataggaagaaaggcttcactgaagtaaaatcccagaatggagagtttatgacacataaactcaaacatacagaaaacacattcagcagaccaggtggacgtgcctccgtggacacgaaggaagccgagggggctccacaagtagaggctggcaagaggctggaggagctgaggcggcgtcgaggcgagactgagtcagaagagttcgagaaactaaagcagaagcaacaggaggccgctctggagctggaggagctcaagaaaaaaagagaagagagaaggaaagttttggaagaagaggagcagcggcgtaagcaggaagaggccgatcgcaagttgcgagaggaggaggagaagcggaggctgaaggaagagatcgaaagaagacgagccgaagcagctgagaaacgccagaagatgcctgaagatggattaagcgacgacaaaaagccctttaagtgcttcacccccaagggcagctctctgaagatagaggaaagggccgaattccttaacaagagcgtgcagaagagctcaggcgtgaaatcaacccaccaggctgccatcgtgtccaagatcgattctaggctcgagcagtacacttccgcgattgagggcacaaagagcgccaagccaactaaacctgccgcaagtgacctgccagttcctgcagagggcgtccgtaacattaagagtatgtgggaaaaagggaatgtgttctcgagtcctacagcggcaggtaccccaaacaaagaaaccgccggtttgaaagtgggggtgtccagtcgcattaacgagtggcttactaagacccccgacgggaacaagtcaccagcacccaagccttctgacttgcgccctggagacgtttcaagcaagagaaatctgtgggagaagcagagcgtcgataaagtgacttctcccaccaaggtgtag

SEQ ID NO: 227377 - DNA, 1599 bp, Artificial Sequence
  derived and/or modified sequence
atgctcggaggttctggatcacatggcaggcggagcctcgccgctctttctcagatcgcctaccaacggaacgatgacgacgaggaggaggcggcacgcgaaagacgacgcagagctagacaggaaaggctacggcagaagcaggaggaggaaagcctcggtcaggttactgaccaggtcgaggtgaacgcgcagaattcagtccctgatgaagaagccaagaccacaaccacaaatactcaggttgagggggacgacgaagctgcattcctggagcgccttgcgaggagagaagaacggaggcagaaacggttacaggaagctctggagcgccagaaggaatttgatcctacaatcacggatgcttccttatccctgccctcccgacgcatgcagaacgacacagcagaaaacgaaactaccgaaaaggaggagaaaagcgaatctcgtcaggagcggtatgaaatcgaagagaccgagacagtgaccaaaagctaccagaagaatgattggcgggatgctgaggagaacaagaaagaggacaaggagaaagaggaggaagaggaagaaaaaccaaagagaggttccattggtgaaaaccagattaaggacgagaagatcaagaaagacaaggagccaaaagaggaagtgaaatcttttatggaccgaaaaaaggggttcacggaggtcaagtcccagaatggggagtttatgacgcacaaactcaagcacacggaaaataccttctctagacctggtggtcgcgcaagcgtggacacgaaagaagctgaaggtgcccctcaagttgaggccggaaaacgcctggaggagcttcgaaggcgccgtggcgagactgaaagcgaagagtttgaaaagctaaaacagaaacaacaggaggccgctctcgagctggaagagcttaaaaagaaaagggaagagaggcgtaaggtgctggaggaggaagaacagcgacggaaacaggaagaggcagacagaaagctgagagaggaggaggagaagcggcgtctcaaggaggaaattgaacgcagaagggcggaagcggcagagaagaggcagaaaatgccagaggatggactgagcgacgataaaaagcccttcaaatgtttcactccaaaggggagcagcctgaagattgaggagagagccgagtttttaaataagtccgtgcagaaatctagtggcgtgaaaagtacacatcaggctgcgattgtttccaagatcgacagccgactggagcaatatacttctgccatcgaaggcaccaaaagtgctaaaccaacgaaaccggcagcatccgacctgcccgtacctgccgagggagtgcgcaatataaagtctatgtgggagaagggcaatgtctttagctccccaacggccgcaggtacacctaacaaggagaccgctggcctgaaggttggagtctcctcccgtatcaatgagtggctgacaaagactcccgatgggaacaagtcccctgcgcctaagccttctgacctgagacccggtgatgtcagtagtaaacggaacctgtgggagaagcagtccgtagacaaggtcacaagtcccacgaaggtctag

SEQ ID NO: 227378 - DNA, 1632 bp, Artificial Sequence
  derived and/or modified sequence
atgacctcctacatgaaggtagaccgtcaatggaatgccgaaatattggaactcatactgggtactggacagctgtccactggccaaatcgcctatcagcgcaacgacgatgacgaggaggaagcagccagggaaagacggaggcgtgcaagacaagagcggctccgccagaaacaggaagaagagtccttgggccaggttacggatcaagtcgaggtaaatgcacaaaattctgtgcccgatgaggaagccaagaccaccactacaaatacacaagtggagggggacgacgaagctgccttcctcgaaaggctggcacgaagggaggaacgacgtcagaagcgattacaggaggcacttgagcgccagaaggaatttgatcccacaataactgacgcatctctgtcattgccctcccgtaggatgcagaacgacactgctgagaacgaaactactgagaaggaggaaaaatctgagtcccgacaggagcgctatgaaatcgaggaaacagaaacggttacaaagtcctatcagaagaatgattggagagacgccgaggaaaacaagaaagaggacaaagagaaagaagaggaggaggaagaaaagccaaagcggggatcaattggcgagaatcagatcaaagacgagaagattaagaaagataaagagcctaaagaggaagtgaagtcattcatggataggaagaaggggtttactgaagtgaagtcgcaaaacggggagttcatgacccacaaactcaagcataccgagaacacttttagtagaccaggcggtagggcatctgtcgacacgaaggaggctgaaggagcgcctcaggtggaagcagggaagagactggaggaacttcgaaggaggcggggagaaaccgaatccgaggagtttgaaaagttaaagcagaaacagcaggaagccgcactggagctggaggagctgaagaagaaacgcgaggaacggcgaaaagtgctggaggaagaggaacagcgtcggaaacaggaagaggctgacaggaaactgcgggaggaggaggagaagaggcgtcttaaagaagagatcgagagacgcagggctgaggcagctgagaagaggcagaaaatgcccgaagacggtttgtcagacgacaaaaagccatttaagtgtttcacccctaagggctcatctctcaaaattgaagagcgggcagagtttctgaacaagtccgtccagaagtcctccggagtcaaaagtacccatcaagctgccatcgtgtcgaagatagacagcaggttagagcaatatacctccgccatcgaggggaccaaaagtgctaagccgacaaaaccagcagcctctgacttacccgtgcccgctgagggagttagaaacatcaagtctatgtgggagaaaggtaatgtcttttccagccccactgcagcagggaccccaaataaagagaccgccggtctgaaagtcggtgtaagttccagaatcaatgaatggctgactaaaacacctgatggcaataagtcccctgcccctaagccgagcgatcttaggcccggtgacgtttccagcaaacgcaacctgtgggagaagcagagcgtggataaagtgacgtcgcctactaaggtgtag

SEQ ID NO: 227379 - DNA, 4544 bp, Artificial Sequence
  derived and/or modified sequence
gatgagtgatttcctgagcatgcctagggaatgacaggcatctccacaggcaggctgcatccaccttggctggggtgtcgtcattggctgcctattagaaaaacgacaggacaatgcataccaccgcctcccgactgtaaacataggggatatgtgttcacttagcatggacttctgggaggggccaaggaagggcggtctggagttttattgaatagagcagtgtgtattcggctgcctgcctgcccgcctgcttgctctctggctgtgctcctgcttaaagaaatcagtccttcctttccgacttagtcctcgggaagaagtttcagactacaaggtatcattggaacatttcaagatcatcaaatcaaattccacagggattggtgaccaaccagaaggctcagacatctgattgctgacctgtccagacatcatctggtctccctgaacctgaaatcacaccatggatgattttgagcgtcgcagagaacttagaaggcaaaagagggaggagatgcgactcgaagcagaaagaatcgcctaccagaggaatgacgatgatgaagaggaggcagcccgggaacggcgccgccgagcccgacaggaacggctgcggcagaagcaggaggaagaatccttgggacaggtgaccgaccaggtggaggtgaatgcccagaacagtgtgcctgacgaggaggccaagacaaccaccacaaacactcaagtggaaggggatgatgaggccgcattcctggagcgcctggctcggcgtgaggaaagacgccaaaaacgccttcaggaggctctggagcggcagaaggagttcgacccaacaataacagatgcaagtctgtcgctcccaagcagaagaatgcaaaatgacacagcagaaaatgaaactaccgagaaggaagaaaaaagtgaaagtcgccaagaaagatacgagatagaggaaacagaaacagtcaccaagtcctaccagaagaatgattggagggatgctgaagaaaacaagaaagaagacaaggaaaaggaggaggaggaagaggagaagccaaagcgagggagcattggagaaaatcagggagaagagaagggaactaaagtgcaagctaaaagagaaaagctccaagaagacaagcctaccttcaaaaaagaagagatcaaagatgaaaagattaaaaaggacaaagaacccaaagaagaagttaagagcttcatggatcgaaagaagggatttacagaagttaagtcgcagaatggagaattcatgacccacaaacttaaacatactgagaatactttcagccgccctggagggagggccagcgtggacaccaaggaggctgagggcgccccccaggtggaagccggcaaaaggctggaggagcttcgtcgtcgtcgcggggagaccgagagcgaagagttcgagaagctcaaacagaagcagcaggaggcggctttggagctggaggaactcaagaaaaagagggaggagagaaggaaggtcctggaggaggaagagcagaggaggaagcaggaggaagccgatcgaaaactcagagaggaggaagagaagaggaggctaaaggaagagattgaaaggcgaagagcagaagctgctgagaaacgccagaagatgccagaagatggcttgtcagatgacaagaaaccattcaagtgtttcactcctaaaggttcatctctcaagatagaagagcgagcagaatttttgaataagtctgtgcagaaaagcagtggtgtcaaatcgacccatcaagcagcaatagtctccaagattgacagcagactggagcagtataccagtgcaattgagggaacaaaaagcgcaaaacctacaaagccggcagcctcggatcttcctgttcctgctgaaggtgtacgcaacatcaagagtatgtgggagaaagggaatgtgttttcatcccccactgcagcaggcacaccaaataaggaaactgctggcttgaaggtaggggtttctagccgcatcaatgaatggctaactaaaaccccagatggaaacaagtcacctgctcccaaaccttctgacttgagaccaggagacgtatccagcaagcggaacctctgggaaaagcaatctgtggataaggtcacttcccccactaaggtttgagacagttccagaaagaacccaagctcaagacgcaggacgagctcagttgtagagggctaattcgctctgttttgtatttatgttgatttactaaattgggttcattatcttttatttttcaatatcccagtaaacccatgtatattatcactatatttaataatcacagtctagagatgttcatggtaaaagtactgcctttgcacaggagcctgtttctaaagaaacccatgctgtgaaatagagacttttctactgatcatcataactctgtatctgagcagtgataccaaccacatctgaagtcaacagaagatccaagtttaaaattgcctgcggaatgtgtgcagtatctagaaaaatgaaccgtagtttttgtttttttaaatacagaagtcatgttgtttctgcactttataataaagcatggaagaaattatcttagtaggcaattgtaacactttttgaaagtaacccatttcagatttgaaatactgcaataatggttgtctttaaaaaaaaaaaagaaatgtactgttaaggtattactttttttcatgctgatgattcatatctaaattacattattatgttagctgacagtggtactgattttttaggttggttgttttgtggatttctttagtagtgatagtagcctgaaccacattttagataactcaattatgtatgtatgtgcatacacatatacaaacacactaatggtagaatgcttttttatgtgctagactattatatttagtagtatgtcattgtaactagccaatatcacagcttttgaaaaattaaaaaatcacactatattaatattttatatttgccaacagaaacatggcagataggtatcaatatgttttcaatgcctgatgacctataagaagaaagtattgaaaagaagagagattagaactgttagaaggagttgaaattttctaaaagacatagtatttagtttataattaaatgcattcttgaagtccagtgtgaattttattaatgctatcatctcgaccaagctcaaagcctacttattagaaacaatgaagttcacaataggtcataaggtctcttccttttctaaaattgaaagacaagaaatttagtgccaatattgtacagacagaaattccatgtatgagtctcaacaaagactacctttggctaaatgtctagaagcagagaagtaaagtgagcaaaatccagtgttgaggagtcatgacagtactttgatctttatatactctgaagcatttcttcaaacttttctacttttatttgtcattgatacctgtagtaagttgacaatgtggtgaaatttcaaaattatatgtaacttctactagttttactttctcccccaagtcttttttaactcatgatttttacacacacaatccagaacttattatatagcctctaagtctttattcttcacagtagataatgaaagagtcctccagtgtcttggcaaaatgttctagtatagctggatacatacagtggagttctataaactcatacctcagtggacttaaccaaaattgtgttagtctcaattcctaccacactgagggagcctcccaaataactattttcttatctgcagtattcctccagaagagctaaccagggcagggctggcatgagaagtgacatctgcgttacaaagtctatcttcctcataagtctgtaaagagcaattgaatcttctagctttagcaaacctaagccaaaggaaggaaagccatgaagaatgcagaagtcaaaccctcatgacaaagtaggcacaagtctacaataagctaaatcagaatttacaaatacaagtgtcccaggtagcattgactcccgtcattggagtgaaatggatcaaagtttgaattaaggcctatggtaaggtaacattgctttgttgtacttttgaacaagagctcctcctgatcactattacatatttttctagaaaatctaaagttcagaagagaatgtatcactgctgacttttattccaatatttggatggagtaagttttagggtagaattttgttcagtttggatttaatcttttgaaaagtaaattccttgtttactggtttgactataattctctgttatctttacgaggtaaaactgcaagctgactagcatgttctgtgaatctgccattcctaaaaattttataaacacttgatacttttcactgataatggatcgctccaataaacatatattgtgaaaatgcatccacaataaatggaattccttcctgcaaaatgtctttttctcacttatttttatgtacaatattgatagtgagaggtatgtctattataataaagattatggcacagtaaaacctgt

SEQ ID NO: 227380 - DNA, 3612 bp, Artificial Sequence
  derived and/or modified sequence
cctgcctgcccgcctgcttgctctctggctgtgctcctgcttaaagaaatcagtccttcctttccgacttagtcctcgggaagaagtttcagactacaaggtatcattggaacatttcaagatcatcaaatcaaattccacagggattggtgaccaaccagaaggctcagacatctgattgctgacctgtccagacatcatctggtctccctgaacctgaaatcacaccatggatgattttgagcgtcgcagagaacttagaaggcaaaagagggaggagatgcgactcgaagcagaaagaatcgcctaccagaggaatgacgatgatgaagaggaggcagcccgggaacggcgccgccgagcccgacaggaacggctgcggcagaagcaggaggaagaatccttgggacaggtgaccgaccaggtggaggtgaatgcccagaacagtgtgcctgacgaggaggccaagacaaccaccacaaacactcaagtggaaggggatgatgaggccgcattcctggagcgcctggctcggcgtgaggaaagacgccaaaaacgccttcaggaggctctggagcggcagaaggagttcgacccaacaataacagatgcaagtctgtcgctcccaagcagaagaatgcaaaatgacacagcagaaaatgaaactaccgagaaggaagaaaaaagtgaaagtcgccaagaaagatacgagatagaggaaacagaaacagtcaccaagtcctaccagaagaatgattggagggatgctgaagaaaacaagaaagaagacaaggaaaaggaggaggaggaagaggagaagccaaagcgagggagcattggagaaaatcaggtagaggtgatggtggaagagaaaacaactgaaagccaggaggaaacagtggtaatgtcattaaaaaatgggcagatcagttcagaagagcctaaacaagaggaggagagggaacaaggttcagatgagatttcccatcatgaaaagatggaagaggaagacaaggaaagagctgaggcagagagggcaaggttggaagcagaagaaagagaaagaattaaagccgagcaagacaaaaagatagcagatgaacgagcaagaattgaagcagaagaaaaagcagctgcccaagaaagagaaaggagagaggcagaagagagggaaaggatgagggaggaagagaaaagggcagcagaggagaggcagaggataaaggaggaagagaaaagggcagcagaggagaggcagaggataaaggaggaagagaaaagggcagcagaggagaggcagaggataaaagaggaagagaaaagggcagcagaggagaggcaaagggccagggcagaggaggaagagaaggctaaggtagaagagcagaaacgtaacaagcagctagaagagaaaaaacatgccatgcaagagacaaagataaaaggggaaaaggtagaacagaaaatagaagggaaatgggtaaatgaaaagaaagcacaagaagataaacttcagacagctgtcctaaagaaacagggagaagagaagggaactaaagtgcaagctaaaagagaaaagctccaagaagacaagcctaccttcaaaaaagaagagatcaaagatgaaaagattaaaaaggacaaagaacccaaagaagaagttaagagcttcatggatcgaaagaagggatttacagaagttaagtcgcagaatggagaattcatgacccacaaacttaaacatactgagaatactttcagccgccctggagggagggccagcgtggacaccaaggaggctgagggcgccccccaggtggaagccggcaaaaggctggaggagcttcgtcgtcgtcgcggggagaccgagagcgaagagttcgagaagctcaaacagaagcagcaggaggcggctttggagctggaggaactcaagaaaaagagggaggagagaaggaaggtcctggaggaggaagagcagaggaggaagcaggaggaagccgatcgaaaactcagagaggaggaagagaagaggaggctaaaggaagagattgaaaggcgaagagcagaagctgctgagaaacgccagaagatgccagaagatggcttgtcagatgacaagaaaccattcaagtgtttcactcctaaaggttcatctctcaagatagaagagcgagcagaatttttgaataagtctgtgcagaaaagcagtggtgtcaaatcgacccatcaagcagcaatagtctccaagattgacagcagactggagcagtataccagtgcaattgagggaacaaaaagcgcaaaacctacaaagccggcagcctcggatcttcctgttcctgctgaaggtgtacgcaacatcaagagtatgtgggagaaagggaatgtgttttcatcccccactgcagcaggcacaccaaataaggaaactgctggcttgaaggtaggggtttctagccgcatcaatgaatggctaactaaaaccccagatggaaacaagtcacctgctcccaaaccttctgacttgagaccaggagacgtatccagcaagcggaacctctgggaaaagcaatctgtggataaggtcacttcccccactaaggtttgagacagttccagaaagaacccaagctcaagacgcaggacgagctcagttgtagagggctaattcgctctgttttgtatttatgttgatttactaaattgggttcattatcttttatttttcaatatcccagtaaacccatgtatattatcactatatttaataatcacagtctagagatgttcatggtaaaagtactgcctttgcacaggagcctgtttctaaagaaacccatgctgtgaaatagagacttttctactgatcatcataactctgtatctgagcagtgataccaaccacatctgaagtcaacagaagatccaagtttaaaattgcctgcggaatgtgtgcagtatctagaaaaatgaaccgtagtttttgtttttttaaatacagaagtcatgttgtttctgcactttataataaagcatggaagaaattatcttagtaggcaattgtaacactttttgaaagtaacccatttcagatttgaaatactgcaataatggttgtctttaaaaaaaaaaaagaaatgtactgttaaggtattactttttttcatgctgatgattcatatctaaattacattattatgttagctgacagtggtactgattttttaggttggttgttttgtggatttctttagtagtgatagtagcctgaaccacattttagataactcaattatgtatgtatgtgcatacacatatacaaacacactaatggtagaatgcttttttatgtgctagactattatatttagtagtatgtcattgtaactagccaatatcacagcttttgaaaaattaaaaaatcacactatattaatattttatatttgccaacagaaacatggcagataggtatcaatatgttttcaatgcctgatgacctataagaagaaagtattgaaaagaagagagattagaactgttagaaggagttgaaattttctaaaagacatagtatttagtttataattaaatgcattcttgaagtcc

SEQ ID NO: 227381 - DNA, 4114 bp, Artificial Sequence
  derived and/or modified sequence
ctgtgctcctgcttaaagaaatcagtccttcctttccgacttagtcctcgggaagaagtttcagactacaaggtatcattggaacatttcaagatcatcaaatcaaattccacagggattggtgaccaaccagaaggctcagacatctgattgctgacctgtccagacatcatctggtctccctgaacctgaaatcacaccatggatgattttgagcgtcgcagagaacttagaaggcaaaagagggaggagatgcgactcgaagcagaaagaatcgcctaccagaggaatgacgatgatgaagaggaggcagcccgggaacggcgccgccgagcccgacaggaacggctgcggcagaagcaggaggaagaatccttgggacaggtgaccgaccaggtggaggtgaatgcccagaacagtgtgcctgacgaggaggccaagacaaccaccacaaacactcaagtggaaggggatgatgaggccgcattcctggagcgcctggctcggcgtgaggaaagacgccaaaaacgccttcaggaggctctggagcggcagaaggagttcgacccaacaataacagatgcaagtctgtcgctcccaagcagaagaatgcaaaatgacacagcagaaaatgaaactaccgagaaggaagaaaaaagtgaaagtcgccaagaaagatacgagatagaggaaacagaaacagtcaccaagtcctaccagaagaatgattggagggatgctgaagaaaacaagaaagaagacaaggaaaaggaggaggaggaagaggagaagccaaagcgagggagcattggagaaaatcagatcaaagatgaaaagattaaaaaggacaaagaacccaaagaagaagttaagagcttcatggatcgaaagaagggatttacagaagttaagtcgcagaatggagaattcatgacccacaaacttaaacatactgagaatactttcagccgccctggagggagggccagcgtggacaccaaggaggctgagggcgccccccaggtggaagccggcaaaaggctggaggagcttcgtcgtcgtcgcggggagaccgagagcgaagagttcgagaagctcaaacagaagcagcaggaggcggctttggagctggaggaactcaagaaaaagagggaggagagaaggaaggtcctggaggaggaagagcagaggaggaagcaggaggaagccgatcgaaaactcagagaggaggaagagaagaggaggctaaaggaagagattgaaaggcgaagagcagaagctgctgagaaacgccagaagatgccagaagatggcttgtcagatgacaagaaaccattcaagtgtttcactcctaaaggttcatctctcaagatagaagagcgagcagaatttttgaataagtctgtgcagaaaagcagtggtgtcaaatcgacccatcaagcagcaatagtctccaagattgacagcagactggagcagtataccagtgcaattgagggaacaaaaagcgcaaaacctacaaagccggcagcctcggatcttcctgttcctgctgaaggtgtacgcaacatcaagagtatgtgggagaaagggaatgtgttttcatcccccactgcagcaggcacaccaaataaggaaactgctggcttgaaggtaggggtttctagccgcatcaatgaatggctaactaaaaccccagatggaaacaagtcacctgctcccaaaccttctgacttgagaccaggagacgtatccagcaagcggaacctctgggaaaagcaatctgtggataaggtcacttcccccactaaggtttgagacagttccagaaagaacccaagctcaagacgcaggacgagctcagttgtagagggctaattcgctctgttttgtatttatgttgatttactaaattgggttcattatcttttatttttcaatatcccagtaaacccatgtatattatcactatatttaataatcacagtctagagatgttcatggtaaaagtactgcctttgcacaggagcctgtttctaaagaaacccatgctgtgaaatagagacttttctactgatcatcataactctgtatctgagcagtgataccaaccacatctgaagtcaacagaagatccaagtttaaaattgcctgcggaatgtgtgcagtatctagaaaaatgaaccgtagtttttgtttttttaaatacagaagtcatgttgtttctgcactttataataaagcatggaagaaattatcttagtaggcaattgtaacactttttgaaagtaacccatttcagatttgaaatactgcaataatggttgtctttaaaaaaaaaaaagaaatgtactgttaaggtattactttttttcatgctgatgattcatatctaaattacattattatgttagctgacagtggtactgattttttaggttggttgttttgtggatttctttagtagtgatagtagcctgaaccacattttagataactcaattatgtatgtatgtgcatacacatatacaaacacactaatggtagaatgcttttttatgtgctagactattatatttagtagtatgtcattgtaactagccaatatcacagcttttgaaaaattaaaaaatcacactatattaatattttatatttgccaacagaaacatggcagataggtatcaatatgttttcaatgcctgatgacctataagaagaaagtattgaaaagaagagagattagaactgttagaaggagttgaaattttctaaaagacatagtatttagtttataattaaatgcattcttgaagtccagtgtgaattttattaatgctatcatctcgaccaagctcaaagcctacttattagaaacaatgaagttcacaataggtcataaggtctcttccttttctaaaattgaaagacaagaaatttagtgccaatattgtacagacagaaattccatgtatgagtctcaacaaagactacctttggctaaatgtctagaagcagagaagtaaagtgagcaaaatccagtgttgaggagtcatgacagtactttgatctttatatactctgaagcatttcttcaaacttttctacttttatttgtcattgatacctgtagtaagttgacaatgtggtgaaatttcaaaattatatgtaacttctactagttttactttctcccccaagtcttttttaactcatgatttttacacacacaatccagaacttattatatagcctctaagtctttattcttcacagtagataatgaaagagtcctccagtgtcttggcaaaatgttctagtatagctggatacatacagtggagttctataaactcatacctcagtggacttaaccaaaattgtgttagtctcaattcctaccacactgagggagcctcccaaataactattttcttatctgcagtattcctccagaagagctaaccagggcagggctggcatgagaagtgacatctgcgttacaaagtctatcttcctcataagtctgtaaagagcaattgaatcttctagctttagcaaacctaagccaaaggaaggaaagccatgaagaatgcagaagtcaaaccctcatgacaaagtaggcacaagtctacaataagctaaatcagaatttacaaatacaagtgtcccaggtagcattgactcccgtcattggagtgaaatggatcaaagtttgaattaaggcctatggtaaggtaacattgctttgttgtacttttgaacaagagctcctcctgatcactattacatatttttctagaaaatctaaagttcagaagagaatgtatcactgctgacttttattccaatatttggatggagtaagttttagggtagaattttgttcagtttggatttaatcttttgaaaagtaaattccttgtttactggtttgactataattctctgttatctttacgaggtaaaactgcaagctgactagcatgttctgtgaatctgccattcctaaaaattttataaacacttgatacttttcactgataatggatcgctccaataaacatatattgtgaaaatgcatccacaataaatggaattccttcctgcaaaa

SEQ ID NO: 227382 - DNA, 4281 bp, Artificial Sequence
  derived and/or modified sequence
aacgggttgggaggagtagatttggctgaggacaagcccagactttcgtcacagggacagaccaacgtgttaacacaaagggagaacacgggagcatcctgcaccgtgcatttcagccacagatcacatggcccctccgcgggcccagcccacgccctgaccgcccggcctggccaggtctccgtatctctctgccccgccgccccttcccaactgcggacatgctgggtggatccggatcgcatggaagacgcagcctggccgcgctctcccaaatcgcctaccagaggaatgacgatgatgaagaggaggcagcccgggaacggcgccgccgagcccgacaggaacggctgcggcagaagcaggaggaagaatccttgggacaggtgaccgaccaggtggaggtgaatgcccagaacagtgtgcctgacgaggaggccaagacaaccaccacaaacactcaagtggaaggggatgatgaggccgcattcctggagcgcctggctcggcgtgaggaaagacgccaaaaacgccttcaggaggctctggagcggcagaaggagttcgacccaacaataacagatgcaagtctgtcgctcccaagcagaagaatgcaaaatgacacagcagaaaatgaaactaccgagaaggaagaaaaaagtgaaagtcgccaagaaagatacgagatagaggaaacagaaacagtcaccaagtcctaccagaagaatgattggagggatgctgaagaaaacaagaaagaagacaaggaaaaggaggaggaggaagaggagaagccaaagcgagggagcattggagaaaatcagggagaagagaagggaactaaagtgcaagctaaaagagaaaagctccaagaagacaagcctaccttcaaaaaagaagagatcaaagatgaaaagattaaaaaggacaaagaacccaaagaagaagttaagagcttcatggatcgaaagaagggatttacagaagttaagtcgcagaatggagaattcatgacccacaaacttaaacatactgagaatactttcagccgccctggagggagggccagcgtggacaccaaggaggctgagggcgccccccaggtggaagccggcaaaaggctggaggagcttcgtcgtcgtcgcggggagaccgagagcgaagagttcgagaagctcaaacagaagcagcaggaggcggctttggagctggaggaactcaagaaaaagagggaggagagaaggaaggtcctggaggaggaagagcagaggaggaagcaggaggaagccgatcgaaaactcagagaggaggaagagaagaggaggctaaaggaagagattgaaaggcgaagagcagaagctgctgagaaacgccagaagatgccagaagatggcttgtcagatgacaagaaaccattcaagtgtttcactcctaaaggttcatctctcaagatagaagagcgagcagaatttttgaataagtctgtgcagaaaagcagtggtgtcaaatcgacccatcaagcagcaatagtctccaagattgacagcagactggagcagtataccagtgcaattgagggaacaaaaagcgcaaaacctacaaagccggcagcctcggatcttcctgttcctgctgaaggtgtacgcaacatcaagagtatgtgggagaaagggaatgtgttttcatcccccactgcagcaggcacaccaaataaggaaactgctggcttgaaggtaggggtttctagccgcatcaatgaatggctaactaaaaccccagatggaaacaagtcacctgctcccaaaccttctgacttgagaccaggagacgtatccagcaagcggaacctctgggaaaagcaatctgtggataaggtcacttcccccactaaggtttgagacagttccagaaagaacccaagctcaagacgcaggacgagctcagttgtagagggctaattcgctctgttttgtatttatgttgatttactaaattgggttcattatcttttatttttcaatatcccagtaaacccatgtatattatcactatatttaataatcacagtctagagatgttcatggtaaaagtactgcctttgcacaggagcctgtttctaaagaaacccatgctgtgaaatagagacttttctactgatcatcataactctgtatctgagcagtgataccaaccacatctgaagtcaacagaagatccaagtttaaaattgcctgcggaatgtgtgcagtatctagaaaaatgaaccgtagtttttgtttttttaaatacagaagtcatgttgtttctgcactttataataaagcatggaagaaattatcttagtaggcaattgtaacactttttgaaagtaacccatttcagatttgaaatactgcaataatggttgtctttaaaaaaaaaaaagaaatgtactgttaaggtattactttttttcatgctgatgattcatatctaaattacattattatgttagctgacagtggtactgattttttaggttggttgttttgtggatttctttagtagtgatagtagcctgaaccacattttagataactcaattatgtatgtatgtgcatacacatatacaaacacactaatggtagaatgcttttttatgtgctagactattatatttagtagtatgtcattgtaactagccaatatcacagcttttgaaaaattaaaaaatcacactatattaatattttatatttgccaacagaaacatggcagataggtatcaatatgttttcaatgcctgatgacctataagaagaaagtattgaaaagaagagagattagaactgttagaaggagttgaaattttctaaaagacatagtatttagtttataattaaatgcattcttgaagtccagtgtgaattttattaatgctatcatctcgaccaagctcaaagcctacttattagaaacaatgaagttcacaataggtcataaggtctcttccttttctaaaattgaaagacaagaaatttagtgccaatattgtacagacagaaattccatgtatgagtctcaacaaagactacctttggctaaatgtctagaagcagagaagtaaagtgagcaaaatccagtgttgaggagtcatgacagtactttgatctttatatactctgaagcatttcttcaaacttttctacttttatttgtcattgatacctgtagtaagttgacaatgtggtgaaatttcaaaattatatgtaacttctactagttttactttctcccccaagtcttttttaactcatgatttttacacacacaatccagaacttattatatagcctctaagtctttattcttcacagtagataatgaaagagtcctccagtgtcttggcaaaatgttctagtatagctggatacatacagtggagttctataaactcatacctcagtggacttaaccaaaattgtgttagtctcaattcctaccacactgagggagcctcccaaataactattttcttatctgcagtattcctccagaagagctaaccagggcagggctggcatgagaagtgacatctgcgttacaaagtctatcttcctcataagtctgtaaagagcaattgaatcttctagctttagcaaacctaagccaaaggaaggaaagccatgaagaatgcagaagtcaaaccctcatgacaaagtaggcacaagtctacaataagctaaatcagaatttacaaatacaagtgtcccaggtagcattgactcccgtcattggagtgaaatggatcaaagtttgaattaaggcctatggtaaggtaacattgctttgttgtacttttgaacaagagctcctcctgatcactattacatatttttctagaaaatctaaagttcagaagagaatgtatcactgctgacttttattccaatatttggatggagtaagttttagggtagaattttgttcagtttggatttaatcttttgaaaagtaaattccttgtttactggtttgactataattctctgttatctttacgaggtaaaactgcaagctgactagcatgttctgtgaatctgccattcctaaaaattttataaacacttgatacttttcactgataatggatcgctccaataaacatatattgtgaaaatgcatccacaataaatggaattccttcctgcaaaatgtctttttctcacttatttttatgtacaatattgatagtgagaggtatgtctattataataaagattatggcacagtaaaacctgt

SEQ ID NO: 227383 - DNA, 1915 bp, Artificial Sequence
  derived and/or modified sequence
atattcaagcctgctctcaggcctgaaatcttttgacttcattctcaggaggcaagactgggtctacctctagatgtctctgatgggatttagtgtgcagcttgaaatgcaggtatcattggaacatttcaagatcatcaaatcaaattccacagggattggtgaccaaccagaaggctcagacatctgattgctgacctgtccagacatcatctggtctccctgaacctgaaatcacaccatggatgattttgagcgtcgcagagaacttagaaggcaaaagagggaggagatgcgactcgaagcagaaagaatcgcctaccagaggaatgacgatgatgaagaggaggcagcccgggaacggcgccgccgagcccgacaggaacggctgcggcagaagcaggaggaagaatccttgggacaggtgaccgaccaggtggaggtgaatgcccagaacagtgtgcctgacgaggaggccaagacaaccaccacaaacactcaagtggaaggggatgatgaggccgcattcctggagcgcctggctcggcgtgaggaaagacgccaaaaacgccttcaggaggctctggagcggcagaaggagttcgacccaacaataacagatgcaagtctgtcgctcccaagcagaagaatgcaaaatgacacagcagaaaatgaaactaccgagaaggaagaaaaaagtgaaagtcgccaagaaagatacgagatagaggaaacagaaacagtcaccaagtcctaccagaagaatgattggagggatgctgaagaaaacaagaaagaagacaaggaaaaggaggaggaggaagaggagaagccaaagcgagggagcattggagaaaatcagatcaaagatgaaaagattaaaaaggacaaagaacccaaagaagaagttaagagcttcatggatcgaaagaagggatttacagaagttaagtcgcagaatggagaattcatgacccacaaacttaaacatactgagaatactttcagccgccctggagggagggccagcgtggacaccaaggaggctgagggcgccccccaggtggaagccggcaaaaggctggaggagcttcgtcgtcgtcgcggggagaccgagagcgaagagttcgagaagctcaaacagaagcagcaggaggcggctttggagctggaggaactcaagaaaaagagggaggagagaaggaaggtcctggaggaggaagagcagaggaggaagcaggaggaagccgatcgaaaactcagagaggaggaagagaagaggaggctaaaggaagagattgaaaggcgaagagcagaagctgctgagaaacgccagaagatgccagaagatggcttgtcagatgacaagaaaccattcaagtgtttcactcctaaaggttcatctctcaagatagaagagcgagcagaatttttgaataagtctgtgcagaaaagcagtggtgtcaaatcgacccatcaagcagcaatagtctccaagattgacagcagactggagcagtataccagtgcaattgagggaacaaaaagcgcaaaacctacaaagccggcagcctcggatcttcctgttcctgctgaaggtgtacgcaacatcaagagtatgtgggagaaagggaatgtgttttcatcccccactgcagcaggcacaccaaataaggaaactgctggcttgaaggtaggggtttctagccgcatcaatgaatggctaactaaaaccccagatggaaacaagtcacctgctcccaaaccttctgacttgagaccaggagacgtatccagcaagcggaacctctgggaaaagcaatctgtggataaggtcacttcccccactaaggtttgagacagttccagaaagaacccaagctcaagacgcaggacgagctcagttgtagagggc

SEQ ID NO: 227384 - DNA, 2124 bp, Artificial Sequence
  derived and/or modified sequence
caactgcggacatgctgggtggatccggatcgcatggaagacgcagcctggccgcgctctcccaaatcgcctaccagaggaatgacgatgatgaagaggaggcagcccgggaacggcgccgccgagcccgacaggaacggctgcggcagaagcaggaggaagaatccttgggacaggtgaccgaccaggtggaggtgaatgcccagaacagtgtgcctgacgaggaggccaagacaaccaccacaaacactcaagtggaaggggatgatgaggccgcattcctggagcgcctggctcggcgtgaggaaagacgccaaaaacgccttcaggaggctctggagcggcagaaggagttcgacccaacaataacagatgcaagtctgtcgctcccaagcagaagaatgcaaaatgacacagcagaaaatgaaactaccgagaaggaagaaaaaagtgaaagtcgccaagaaagatacgagatagaggaaacagaaacagtcaccaagtcctaccagaagaatgattggagggatgctgaagaaaacaagaaagaagacaaggaaaaggaggaggaggaagaggagaagccaaagcgagggagcattggagaaaatcagatcaaagatgaaaagattaaaaaggacaaagaacccaaagaagaagttaagagcttcatggatcgaaagaagggatttacagaagttaagtcgcagaatggagaattcatgacccacaaacttaaacatactgagaatactttcagccgccctggagggagggccagcgtggacaccaaggaggctgagggcgccccccaggtggaagccggcaaaaggctggaggagcttcgtcgtcgtcgcggggagaccgagagcgaagagttcgagaagctcaaacagaagcagcaggaggcggctttggagctggaggaactcaagaaaaagagggaggagagaaggaaggtcctggaggaggaagagcagaggaggaagcaggaggaagccgatcgaaaactcagagaggaggaagagaagaggaggctaaaggaagagattgaaaggcgaagagcagaagctgctgagaaacgccagaagatgccagaagatggcttgtcagatgacaagaaaccattcaagtgtttcactcctaaaggttcatctctcaagatagaagagcgagcagaatttttgaataagtctgtgcagaaaagcagtggtgtcaaatcgacccatcaagcagcaatagtctccaagattgacagcagactggagcagtataccagtgcaattgagggaacaaaaagcgcaaaacctacaaagccggcagcctcggatcttcctgttcctgctgaaggtgtacgcaacatcaagagtatgtgggagaaagggaatgtgttttcatcccccactgcagcaggcacaccaaataaggaaactgctggcttgaaggtaggggtttctagccgcatcaatgaatggctaactaaaaccccagatggaaacaagtcacctgctcccaaaccttctgacttgagaccaggagacgtatccagcaagcggaacctctgggaaaagcaatctgtggataaggtcacttcccccactaaggtttgagacagttccagaaagaacccaagctcaagacgcaggacgagctcagttgtagagggctaattcgctctgttttgtatttatgttgatttactaaattgggttcattatcttttatttttcaatatcccagtaaacccatgtatattatcactatatttaataatcacagtctagagatgttcatggtaaaagtactgcctttgcacaggagcctgtttctaaagaaacccatgctgtgaaatagagacttttctactgatcatcataactctgtatctgagcagtgataccaaccacatctgaagtcaacagaagatccaagtttaaaattgcctgcggaatgtgtgcagtatctagaaaaatgaaccgtagtttttgtttttttaaatacagaagtcatgttgtttctgcactttataataaagcatggaagaaattatcttagtaggcaattgtaacactttttgaaagtaacccatttcagatttgaaatactgcaataatggttgtcttt

SEQ ID NO: 227385 - DNA, 1978 bp, Artificial Sequence
  derived and/or modified sequence
gaggctgtgagccccaggcattcttctttggggtgtggccttcatggggagtgtattgctgcagaaagctggggacagaatagtgttctggattgagtatctcagttaccagcctgaaatctccatcgaccaacactgccttctctcaaatgacttcttatatgaaagtggacagacagtggaatgcagaaattttagagctgatcttggggaccggtcaactgtctactggccaaatcgcctaccagaggaatgacgatgatgaagaggaggcagcccgggaacggcgccgccgagcccgacaggaacggctgcggcagaagcaggaggaagaatccttgggacaggtgaccgaccaggtggaggtgaatgcccagaacagtgtgcctgacgaggaggccaagacaaccaccacaaacactcaagtggaaggggatgatgaggccgcattcctggagcgcctggctcggcgtgaggaaagacgccaaaaacgccttcaggaggctctggagcggcagaaggagttcgacccaacaataacagatgcaagtctgtcgctcccaagcagaagaatgcaaaatgacacagcagaaaatgaaactaccgagaaggaagaaaaaagtgaaagtcgccaagaaagatacgagatagaggaaacagaaacagtcaccaagtcctaccagaagaatgattggagggatgctgaagaaaacaagaaagaagacaaggaaaaggaggaggaggaagaggagaagccaaagcgagggagcattggagaaaatcagatcaaagatgaaaagattaaaaaggacaaagaacccaaagaagaagttaagagcttcatggatcgaaagaagggatttacagaagttaagtcgcagaatggagaattcatgacccacaaacttaaacatactgagaatactttcagccgccctggagggagggccagcgtggacaccaaggaggctgagggcgccccccaggtggaagccggcaaaaggctggaggagcttcgtcgtcgtcgcggggagaccgagagcgaagagttcgagaagctcaaacagaagcagcaggaggcggctttggagctggaggaactcaagaaaaagagggaggagagaaggaaggtcctggaggaggaagagcagaggaggaagcaggaggaagccgatcgaaaactcagagaggaggaagagaagaggaggctaaaggaagagattgaaaggcgaagagcagaagctgctgagaaacgccagaagatgccagaagatggcttgtcagatgacaagaaaccattcaagtgtttcactcctaaaggttcatctctcaagatagaagagcgagcagaatttttgaataagtctgtgcagaaaagcagtggtgtcaaatcgacccatcaagcagcaatagtctccaagattgacagcagactggagcagtataccagtgcaattgagggaacaaaaagcgcaaaacctacaaagccggcagcctcggatcttcctgttcctgctgaaggtgtacgcaacatcaagagtatgtgggagaaagggaatgtgttttcatcccccactgcagcaggcacaccaaataaggaaactgctggcttgaaggtaggggtttctagccgcatcaatgaatggctaactaaaaccccagatggaaacaagtcacctgctcccaaaccttctgacttgagaccaggagacgtatccagcaagcggaacctctgggaaaagcaatctgtggataaggtcacttcccccactaaggtttgagacagttccagaaagaacccaagctcaagacgcaggacgagctcagttgtagagggctaattcgctctgttttgtatttatgttgatttactaaattgggttcattatcttttatttttcaatatcccagtaaacccatgtatattatcactatatttaataatcacagtctagagatgttcatggtaaaagtactg

SEQ ID NO: 227386 - DNA, 1695 bp, Artificial Sequence
  derived and/or modified sequence
atggacgacttcgagagaagaagagagctgagaagacagaagagagaggagatgagactggaggccgagagaatcgcctaccagagaaacgacgacgacgaggaggaggccgccagagagagaagaagaagagccagacaggagagactgagacagaagcaggaggaggagagcctgggccaggtgaccgaccaggtggaggtgaacgcccagaacagcgtgcccgacgaggaggccaagaccaccaccaccaacacccaggtggagggcgacgacgaggccgccttcctggagagactggccagaagagaggagagaagacagaagagactgcaggaggccctggagagacagaaggagttcgaccccaccatcaccgacgccagcctgagcctgcccagcagaagaatgcagaacgacaccgccgagaacgagaccaccgagaaggaggagaagagcgagagcagacaggagagatacgagatcgaggagaccgagaccgtgaccaagagctaccagaagaacgactggagagacgccgaggagaacaagaaggaggacaaggagaaggaggaggaggaggaggagaagcccaagagaggcagcatcggcgagaaccagggcgaggagaagggcaccaaggtgcaggccaagagagagaagctgcaggaggacaagcccaccttcaagaaggaggagatcaaggacgagaagatcaagaaggacaaggagcccaaggaggaggtgaagagcttcatggacagaaagaagggcttcaccgaggtgaagagccagaacggcgagttcatgacccacaagctgaagcacaccgagaacaccttcagcagacccggcggcagagccagcgtggacaccaaggaggccgagggcgccccccaggtggaggccggcaagagactggaggagctgagaagaagaagaggcgagaccgagagcgaggagttcgagaagctgaagcagaagcagcaggaggccgccctggagctggaggagctgaagaagaagagagaggagagaagaaaggtgctggaggaggaggagcagagaagaaagcaggaggaggccgacagaaagctgagagaggaggaggagaagagaagactgaaggaggagatcgagagaagaagagccgaggccgccgagaagagacagaagatgcccgaggacggcctgagcgacgacaagaagcccttcaagtgcttcacccccaagggcagcagcctgaagatcgaggagagagccgagttcctgaacaagagcgtgcagaagagcagcggcgtgaagagcacccaccaggccgccatcgtgagcaagatcgacagcagactggagcagtacaccagcgccatcgagggcaccaagagcgccaagcccaccaagcccgccgccagcgacctgcccgtgcccgccgagggcgtgagaaacatcaagagcatgtgggagaagggcaacgtgttcagcagccccaccgccgccggcacccccaacaaggagaccgccggcctgaaggtgggcgtgagcagcagaatcaacgagtggctgaccaagacccccgacggcaacaagagccccgcccccaagcccagcgacctgagacccggcgacgtgagcagcaagagaaacctgtgggagaagcagagcgtggacaaggtgaccagccccaccaaggtgtag

SEQ ID NO: 227387 - DNA, 2382 bp, Artificial Sequence
  derived and/or modified sequence
atggacgacttcgagagaagaagagagctgagaagacagaagagagaggagatgagactggaggccgagagaatcgcctaccagagaaacgacgacgacgaggaggaggccgccagagagagaagaagaagagccagacaggagagactgagacagaagcaggaggaggagagcctgggccaggtgaccgaccaggtggaggtgaacgcccagaacagcgtgcccgacgaggaggccaagaccaccaccaccaacacccaggtggagggcgacgacgaggccgccttcctggagagactggccagaagagaggagagaagacagaagagactgcaggaggccctggagagacagaaggagttcgaccccaccatcaccgacgccagcctgagcctgcccagcagaagaatgcagaacgacaccgccgagaacgagaccaccgagaaggaggagaagagcgagagcagacaggagagatacgagatcgaggagaccgagaccgtgaccaagagctaccagaagaacgactggagagacgccgaggagaacaagaaggaggacaaggagaaggaggaggaggaggaggagaagcccaagagaggcagcatcggcgagaaccaggtggaggtgatggtggaggagaagaccaccgagagccaggaggagaccgtggtgatgagcctgaagaacggccagatcagcagcgaggagcccaagcaggaggaggagagagagcagggcagcgacgagatcagccaccacgagaagatggaggaggaggacaaggagagagccgaggccgagagagccagactggaggccgaggagagagagagaatcaaggccgagcaggacaagaagatcgccgacgagagagccagaatcgaggccgaggagaaggccgccgcccaggagagagagagaagagaggccgaggagagagagagaatgagagaggaggagaagagagccgccgaggagagacagagaatcaaggaggaggagaagagagccgccgaggagagacagagaatcaaggaggaggagaagagagccgccgaggagagacagagaatcaaggaggaggagaagagagccgccgaggagagacagagagccagagccgaggaggaggagaaggccaaggtggaggagcagaagagaaacaagcagctggaggagaagaagcacgccatgcaggagaccaagatcaagggcgagaaggtggagcagaagatcgagggcaagtgggtgaacgagaagaaggcccaggaggacaagctgcagaccgccgtgctgaagaagcagggcgaggagaagggcaccaaggtgcaggccaagagagagaagctgcaggaggacaagcccaccttcaagaaggaggagatcaaggacgagaagatcaagaaggacaaggagcccaaggaggaggtgaagagcttcatggacagaaagaagggcttcaccgaggtgaagagccagaacggcgagttcatgacccacaagctgaagcacaccgagaacaccttcagcagacccggcggcagagccagcgtggacaccaaggaggccgagggcgccccccaggtggaggccggcaagagactggaggagctgagaagaagaagaggcgagaccgagagcgaggagttcgagaagctgaagcagaagcagcaggaggccgccctggagctggaggagctgaagaagaagagagaggagagaagaaaggtgctggaggaggaggagcagagaagaaagcaggaggaggccgacagaaagctgagagaggaggaggagaagagaagactgaaggaggagatcgagagaagaagagccgaggccgccgagaagagacagaagatgcccgaggacggcctgagcgacgacaagaagcccttcaagtgcttcacccccaagggcagcagcctgaagatcgaggagagagccgagttcctgaacaagagcgtgcagaagagcagcggcgtgaagagcacccaccaggccgccatcgtgagcaagatcgacagcagactggagcagtacaccagcgccatcgagggcaccaagagcgccaagcccaccaagcccgccgccagcgacctgcccgtgcccgccgagggcgtgagaaacatcaagagcatgtgggagaagggcaacgtgttcagcagccccaccgccgccggcacccccaacaaggagaccgccggcctgaaggtgggcgtgagcagcagaatcaacgagtggctgaccaagacccccgacggcaacaagagccccgcccccaagcccagcgacctgagacccggcgacgtgagcagcaagagaaacctgtgggagaagcagagcgtggacaaggtgaccagccccaccaaggtgtag

SEQ ID NO: 227388 - DNA, 1617 bp, Artificial Sequence
  derived and/or modified sequence
atggacgacttcgagagaagaagagagctgagaagacagaagagagaggagatgagactggaggccgagagaatcgcctaccagagaaacgacgacgacgaggaggaggccgccagagagagaagaagaagagccagacaggagagactgagacagaagcaggaggaggagagcctgggccaggtgaccgaccaggtggaggtgaacgcccagaacagcgtgcccgacgaggaggccaagaccaccaccaccaacacccaggtggagggcgacgacgaggccgccttcctggagagactggccagaagagaggagagaagacagaagagactgcaggaggccctggagagacagaaggagttcgaccccaccatcaccgacgccagcctgagcctgcccagcagaagaatgcagaacgacaccgccgagaacgagaccaccgagaaggaggagaagagcgagagcagacaggagagatacgagatcgaggagaccgagaccgtgaccaagagctaccagaagaacgactggagagacgccgaggagaacaagaaggaggacaaggagaaggaggaggaggaggaggagaagcccaagagaggcagcatcggcgagaaccagatcaaggacgagaagatcaagaaggacaaggagcccaaggaggaggtgaagagcttcatggacagaaagaagggcttcaccgaggtgaagagccagaacggcgagttcatgacccacaagctgaagcacaccgagaacaccttcagcagacccggcggcagagccagcgtggacaccaaggaggccgagggcgccccccaggtggaggccggcaagagactggaggagctgagaagaagaagaggcgagaccgagagcgaggagttcgagaagctgaagcagaagcagcaggaggccgccctggagctggaggagctgaagaagaagagagaggagagaagaaaggtgctggaggaggaggagcagagaagaaagcaggaggaggccgacagaaagctgagagaggaggaggagaagagaagactgaaggaggagatcgagagaagaagagccgaggccgccgagaagagacagaagatgcccgaggacggcctgagcgacgacaagaagcccttcaagtgcttcacccccaagggcagcagcctgaagatcgaggagagagccgagttcctgaacaagagcgtgcagaagagcagcggcgtgaagagcacccaccaggccgccatcgtgagcaagatcgacagcagactggagcagtacaccagcgccatcgagggcaccaagagcgccaagcccaccaagcccgccgccagcgacctgcccgtgcccgccgagggcgtgagaaacatcaagagcatgtgggagaagggcaacgtgttcagcagccccaccgccgccggcacccccaacaaggagaccgccggcctgaaggtgggcgtgagcagcagaatcaacgagtggctgaccaagacccccgacggcaacaagagccccgcccccaagcccagcgacctgagacccggcgacgtgagcagcaagagaaacctgtgggagaagcagagcgtggacaaggtgaccagccccaccaaggtgtag

SEQ ID NO: 227389 - DNA, 1677 bp, Artificial Sequence
  derived and/or modified sequence
atgctgggcggcagcggcagccacggcagaagaagcctggccgccctgagccagatcgcctaccagagaaacgacgacgacgaggaggaggccgccagagagagaagaagaagagccagacaggagagactgagacagaagcaggaggaggagagcctgggccaggtgaccgaccaggtggaggtgaacgcccagaacagcgtgcccgacgaggaggccaagaccaccaccaccaacacccaggtggagggcgacgacgaggccgccttcctggagagactggccagaagagaggagagaagacagaagagactgcaggaggccctggagagacagaaggagttcgaccccaccatcaccgacgccagcctgagcctgcccagcagaagaatgcagaacgacaccgccgagaacgagaccaccgagaaggaggagaagagcgagagcagacaggagagatacgagatcgaggagaccgagaccgtgaccaagagctaccagaagaacgactggagagacgccgaggagaacaagaaggaggacaaggagaaggaggaggaggaggaggagaagcccaagagaggcagcatcggcgagaaccagggcgaggagaagggcaccaaggtgcaggccaagagagagaagctgcaggaggacaagcccaccttcaagaaggaggagatcaaggacgagaagatcaagaaggacaaggagcccaaggaggaggtgaagagcttcatggacagaaagaagggcttcaccgaggtgaagagccagaacggcgagttcatgacccacaagctgaagcacaccgagaacaccttcagcagacccggcggcagagccagcgtggacaccaaggaggccgagggcgccccccaggtggaggccggcaagagactggaggagctgagaagaagaagaggcgagaccgagagcgaggagttcgagaagctgaagcagaagcagcaggaggccgccctggagctggaggagctgaagaagaagagagaggagagaagaaaggtgctggaggaggaggagcagagaagaaagcaggaggaggccgacagaaagctgagagaggaggaggagaagagaagactgaaggaggagatcgagagaagaagagccgaggccgccgagaagagacagaagatgcccgaggacggcctgagcgacgacaagaagcccttcaagtgcttcacccccaagggcagcagcctgaagatcgaggagagagccgagttcctgaacaagagcgtgcagaagagcagcggcgtgaagagcacccaccaggccgccatcgtgagcaagatcgacagcagactggagcagtacaccagcgccatcgagggcaccaagagcgccaagcccaccaagcccgccgccagcgacctgcccgtgcccgccgagggcgtgagaaacatcaagagcatgtgggagaagggcaacgtgttcagcagccccaccgccgccggcacccccaacaaggagaccgccggcctgaaggtgggcgtgagcagcagaatcaacgagtggctgaccaagacccccgacggcaacaagagccccgcccccaagcccagcgacctgagacccggcgacgtgagcagcaagagaaacctgtgggagaagcagagcgtggacaaggtgaccagccccaccaaggtgtag

SEQ ID NO: 227390 - DNA, 1599 bp, Artificial Sequence
  derived and/or modified sequence
atgctgggcggcagcggcagccacggcagaagaagcctggccgccctgagccagatcgcctaccagagaaacgacgacgacgaggaggaggccgccagagagagaagaagaagagccagacaggagagactgagacagaagcaggaggaggagagcctgggccaggtgaccgaccaggtggaggtgaacgcccagaacagcgtgcccgacgaggaggccaagaccaccaccaccaacacccaggtggagggcgacgacgaggccgccttcctggagagactggccagaagagaggagagaagacagaagagactgcaggaggccctggagagacagaaggagttcgaccccaccatcaccgacgccagcctgagcctgcccagcagaagaatgcagaacgacaccgccgagaacgagaccaccgagaaggaggagaagagcgagagcagacaggagagatacgagatcgaggagaccgagaccgtgaccaagagctaccagaagaacgactggagagacgccgaggagaacaagaaggaggacaaggagaaggaggaggaggaggaggagaagcccaagagaggcagcatcggcgagaaccagatcaaggacgagaagatcaagaaggacaaggagcccaaggaggaggtgaagagcttcatggacagaaagaagggcttcaccgaggtgaagagccagaacggcgagttcatgacccacaagctgaagcacaccgagaacaccttcagcagacccggcggcagagccagcgtggacaccaaggaggccgagggcgccccccaggtggaggccggcaagagactggaggagctgagaagaagaagaggcgagaccgagagcgaggagttcgagaagctgaagcagaagcagcaggaggccgccctggagctggaggagctgaagaagaagagagaggagagaagaaaggtgctggaggaggaggagcagagaagaaagcaggaggaggccgacagaaagctgagagaggaggaggagaagagaagactgaaggaggagatcgagagaagaagagccgaggccgccgagaagagacagaagatgcccgaggacggcctgagcgacgacaagaagcccttcaagtgcttcacccccaagggcagcagcctgaagatcgaggagagagccgagttcctgaacaagagcgtgcagaagagcagcggcgtgaagagcacccaccaggccgccatcgtgagcaagatcgacagcagactggagcagtacaccagcgccatcgagggcaccaagagcgccaagcccaccaagcccgccgccagcgacctgcccgtgcccgccgagggcgtgagaaacatcaagagcatgtgggagaagggcaacgtgttcagcagccccaccgccgccggcacccccaacaaggagaccgccggcctgaaggtgggcgtgagcagcagaatcaacgagtggctgaccaagacccccgacggcaacaagagccccgcccccaagcccagcgacctgagacccggcgacgtgagcagcaagagaaacctgtgggagaagcagagcgtggacaaggtgaccagccccaccaaggtgtag

SEQ ID NO: 227391 - DNA, 1632 bp, Artificial Sequence
  derived and/or modified sequence
atgaccagctacatgaaggtggacagacagtggaacgccgagatcctggagctgatcctgggcaccggccagctgagcaccggccagatcgcctaccagagaaacgacgacgacgaggaggaggccgccagagagagaagaagaagagccagacaggagagactgagacagaagcaggaggaggagagcctgggccaggtgaccgaccaggtggaggtgaacgcccagaacagcgtgcccgacgaggaggccaagaccaccaccaccaacacccaggtggagggcgacgacgaggccgccttcctggagagactggccagaagagaggagagaagacagaagagactgcaggaggccctggagagacagaaggagttcgaccccaccatcaccgacgccagcctgagcctgcccagcagaagaatgcagaacgacaccgccgagaacgagaccaccgagaaggaggagaagagcgagagcagacaggagagatacgagatcgaggagaccgagaccgtgaccaagagctaccagaagaacgactggagagacgccgaggagaacaagaaggaggacaaggagaaggaggaggaggaggaggagaagcccaagagaggcagcatcggcgagaaccagatcaaggacgagaagatcaagaaggacaaggagcccaaggaggaggtgaagagcttcatggacagaaagaagggcttcaccgaggtgaagagccagaacggcgagttcatgacccacaagctgaagcacaccgagaacaccttcagcagacccggcggcagagccagcgtggacaccaaggaggccgagggcgccccccaggtggaggccggcaagagactggaggagctgagaagaagaagaggcgagaccgagagcgaggagttcgagaagctgaagcagaagcagcaggaggccgccctggagctggaggagctgaagaagaagagagaggagagaagaaaggtgctggaggaggaggagcagagaagaaagcaggaggaggccgacagaaagctgagagaggaggaggagaagagaagactgaaggaggagatcgagagaagaagagccgaggccgccgagaagagacagaagatgcccgaggacggcctgagcgacgacaagaagcccttcaagtgcttcacccccaagggcagcagcctgaagatcgaggagagagccgagttcctgaacaagagcgtgcagaagagcagcggcgtgaagagcacccaccaggccgccatcgtgagcaagatcgacagcagactggagcagtacaccagcgccatcgagggcaccaagagcgccaagcccaccaagcccgccgccagcgacctgcccgtgcccgccgagggcgtgagaaacatcaagagcatgtgggagaagggcaacgtgttcagcagccccaccgccgccggcacccccaacaaggagaccgccggcctgaaggtgggcgtgagcagcagaatcaacgagtggctgaccaagacccccgacggcaacaagagccccgcccccaagcccagcgacctgagacccggcgacgtgagcagcaagagaaacctgtgggagaagcagagcgtggacaaggtgaccagccccaccaaggtgtag

SEQ ID NO: 227392 - protein, 1118 aa, Artificial Sequence
  derived and/or modified sequence
MEPSRALLGCLASAAAAAPPGEDGAGAGAEEEEEEEEEAAAAVGPGELGCDAPLPYWTAVFEYEAAGEDELTLRLGDVVEVLSKDSQVSGDEGWWTGQLNQRVGIFPSNYVTPRSAFSSRCQPGGEDPSCYPPIQLLEIDFAELTLEEIIGIGGFGKVYRAFWIGDEVAVKAARHDPDEDISQTIENVRQEAKLFAMLKHPNIIALRGVCLKEPNLCLVMEFARGGPLNRVLSGKRIPPDILVNWAVQIARGMNYLHDEAIVPIIHRDLKSSNILILQKVENGDLSNKILKITDFGLAREWHRTTKMSAAGTYAWMAPEVIRASMFSKGSDVWSYGVLLWELLTGEVPFRGIDGLAVAYGVAMNKLALPIPSTCPEPFAKLMEDCWNPDPHSRPSFTNILDQLTTIEESGFFEMPKDSFHCLQDNWKHEIQEMFDQLRAKEKELRTWEEELTRAALQQKNQEELLRRREQELAEREIDILERELNIIIHQLCQEKPRVKKRKGKFRKSRLKLKDGNRISLPSDFQHKFTVQASPTMDKRKSLINSRSSPPASPTIIPRLRAIQLTPGESSKTWGRSSVVPKEEGEEEEKRAPKKKGRTWGPGTLGQKELASGDEGSPQRREKANGLSTPSESPHFHLGLKSLVDGYKQWSSSAPNLVKGPRSSPALPGFTSLMEMALLAASWVVPIDIEEDEDSEGPGSGESRLQHSPSQSYLCIPFPRGEDGDGPSSDGIHEEPTPVNSATSTPQLTPTNSLKRGGAHHRRCEVALLGCGAVLAATGLGFDLLEAGKCQLLPLEEPEPPAREEKKRREGLFQRSSRPRRSTSPPSRKLFKKEEPMLLLGDPSASLTLLSLSSISECNSTRSLLRSDSDEIVVYEMPVSPVEAPPLSPCTHNPLVNVRVERFKRDPNQSLTPTHVTLTTPSQPSSHRRTPSDGALKPETLLASRSPSSNGLSPSPGAGMLKTPSPSRDPGEFPRLPDPNVVFPPTPRRWNTQQDSTLERPKTLEFLPRPRPSANRQRLDPWWFVSPSHARSTSPANSSSTETPSNLDSCFASSSSTVEERPGLPALLPFQAGPLPPTERTLLDLDAEGQSQDSTVPLCRAELNTHRPAPYEIQQEFWS

SEQ ID NO: 227393 - DNA, 3357 bp, Artificial Sequence
  derived and/or modified sequence
atggaaccttctcgtgccctgctgggctgtctagcctctgccgctgcggctgctccccccggtgaagacggcgccggtgcaggcgcggaggaggaggaagaagaggaagaggaggccgccgctgccgtgggcccaggagaacttggttgcgacgcaccactgccgtactggactgccgtgtttgaatatgaggcagccggtgaagatgagttgacgctcagattgggagacgtggtggaagtcctgagtaaggacagccaggtctcaggcgatgagggctggtggactggccagctcaatcagcgggtcggcatcttcccctccaactatgtcaccccaaggtcagctttcagcagtagatgtcagcccgggggagaggatccttcctgctatccccccatccagctgctggagatcgatttcgccgagctgactcttgaggagattattggtatcggtgggttcgggaaagtgtatcgagcgttctggatcggcgatgaggttgccgtgaaggccgccagacacgaccccgacgaagatattagccagaccatagagaacgtcaggcaggaagccaagctttttgctatgctcaagcaccctaatataattgccctgcgtggtgtgtgcctgaaagaaccgaacctgtgcctggtcatggagttcgcgagaggggggcccctcaacagggtgctgtccggcaaacgcatccccccagacatcctggtaaactgggcagtgcagatcgcgcgaggaatgaactacctgcacgatgaggccattgtcccaatcatccatagggatctgaaatcatcgaacatccttatcttacagaaggtcgagaatggtgacctgagtaataagatcttgaagatcactgacttcggacttgcgcgagagtggcacagaaccactaagatgtctgccgctggcacatatgcatggatggctcccgaggtcatcagggcctcgatgttttctaagggaagtgacgtctggagctacggagtacttctttgggaactcctgacaggtgaagtgccttttcgcggcatcgatggtctggcagtagcctacggggtggccatgaataaacttgccctgccaatcccaagtacctgcccagagccatttgcgaagctgatggaggactgctggaatccagatccccatagccgcccctcattcactaacatcctggaccagctaaccacaatcgaggaaagtggattttttgagatgccaaaggacagcttccactgccttcaggacaattggaaacacgagatccaggaaatgttcgaccagctaagagcaaaggaaaaggagctgcgtacctgggaggaggaactgaccagagcagcccttcagcagaaaaaccaggaggaattattgaggagacgcgaacaggagctagccgagcgcgagattgacattctcgaaagagagttgaatataataattcatcagctgtgccaggaaaagcctcgcgtgaagaagcggaagggcaagtttcgcaaatctagattaaaattaaaggacggcaacaggatctccctccccagtgatttccagcacaagtttacggtccaggcatctcccaccatggataagcgcaagagcctgataaattcacggtccagtcctccagcatctcccactatcattccgagactgagagctattcagctgacgcccggcgaatcgtccaaaacatggggccgctcctcagttgtacccaaagaagagggggaagaagaagagaagcgagctccaaaaaaaaaagggcgcacatggggccccggtacgttaggtcagaaagagctggcatctggagacgaaggcagcccacagaggcgcgagaaggccaatgggctgtccactcctagcgaatctcctcactttcatctaggtttgaaaagtttagtcgatggctacaaacagtggtcctctagcgcacccaatctggtgaaaggcccgcggtctagtcctgcccttccgggctttactagcctgatggagatggcacttctcgctgcgagttgggtggtccctattgatatcgaagaagacgaggattcagaaggccccggaagcggggagtccagattacagcacagcccgtcacagtcctacctctgtataccttttccacggggggaagatggagatggacccagtagtgatggaatccatgaagaacccactccagtgaactcagcgacttccacgccacagctgactccgaccaactcccttaagagggggggcgcacaccacagaagatgcgaggtcgcactcctgggctgcggagctgtgctcgccgccacgggtctgggttttgatctgctggaggccggcaaatgccagctcctgccccttgaagaacctgaaccaccggcaagggaagaaaaaaagcgcagagaaggcttgttccagagaagttccagaccgagacgatccacatcccccccgagtaggaagctctttaagaaggaggaaccaatgctactcctcggggatccatcagcctccctgacattgctcagcctttcaagtatttcagagtgcaactcaacccgaagcctgctgaggtctgatagcgacgagattgtcgtttatgaaatgcctgtctcaccagtggaagctccacctctctccccttgcacacacaatcccctggtgaatgttcgagttgaacgcttcaagagagaccctaaccagtcgctgacacccacacatgtgactctcacgacaccctctcaaccttcctcacataggagaacgccttcggacggggccttgaagcccgagacactcctggctagtaggagccctagctctaacggcctgagcccatcacccggcgccggtatgctgaaaaccccgtcaccaagtcgtgaccctggagagttcccgcggctgcccgatccaaacgtcgtcttccccccaacgccaagacgctggaacacccagcaagacagcacccttgagcgaccaaagactctcgaattccttccaagaccacggccctcggcaaacaggcagcggctcgatccgtggtggttcgtgagcccttcccacgctcgctccacctctcccgctaactcatcctctaccgagacgccatccaacctggattcctgctttgccagcagcagctctactgtggaggaaaggcctggactgcctgcccttctcccgtttcaggctggcccattgccacccacagagcgaaccttgctcgatctcgacgcagaagggcaatctcaagattcaaccgtacccctctgtagggcggagctgaacacccatcgtcccgcgccttatgagattcaacaagagttttggtcgtag

SEQ ID NO: 227394 - DNA, 3357 bp, Artificial Sequence
  derived and/or modified sequence
atggagcccagccgggccctgctgggctgcctggccagcgctgctgctgctgcccctcctggagaagatggagctggagctggagctgaggaggaggaggaggaggaggaggaggccgctgctgctgtgggccctggagagctgggctgtgatgcccccctgccctactggacagctgtgtttgaatatgaagctgctggggaggatgagctgaccctgcggctgggagatgtggtggaggtgctgagcaaggacagccaggtgtctggagatgagggctggtggacaggccagctgaaccagagggtgggcatcttccccagcaactacgtgacccccaggtctgccttcagcagccgctgccagcctggaggagaggaccccagctgctacccacccatccagctgctggagattgactttgctgagctgaccctggaggagatcatcggcatcggcggctttgggaaggtgtaccgggccttctggattggagatgaggtggccgtgaaggccgcccggcatgaccctgatgaggacatcagccagaccattgaaaatgtgcggcaggaggccaagctgtttgccatgctgaagcaccccaacatcatcgccctgcggggcgtgtgcctgaaggagcccaacctgtgcctggtgatggagtttgcccggggcggccccctgaacagagtgctgagcggcaagaggatccccccagacatcctggtgaactgggccgtgcagatcgcccggggcatgaactacctgcatgatgaggccatcgtgcccatcatccaccgggacctgaagagcagcaacatcctgatcctgcagaaggtggagaatggagacctgagcaacaagatcctgaagatcacagactttggcctggcccgggagtggcacaggaccaccaagatgtctgctgctggcacctacgcctggatggcccctgaggtgatccgggcctccatgttcagcaagggcagtgatgtgtggagctatggagtgctgctgtgggagctgctgaccggggaggtgcccttccggggcattgatggcctggccgtggcctatggagtggccatgaacaagctggccctgcccatccccagcacctgcccagagccctttgccaagctgatggaggactgctggaacccagacccccacagccggcccagcttcaccaacatcctggaccagctgaccaccatcgaggagagcggcttctttgagatgcccaaggacagcttccactgcctgcaggacaactggaagcatgagatccaggagatgtttgaccagctgcgggccaaggagaaggagctgcggacctgggaggaggagctgacccgggccgccctgcagcagaagaaccaggaggagctgctgcggcggcgggagcaggagctggccgagcgggagattgacatcctggagcgggagctgaacatcatcatccaccagctgtgccaggagaagccccgggtgaagaagaggaagggcaagttcaggaagagccggctgaagctgaaggatggcaaccgcatcagcctgcccagcgacttccagcacaagttcaccgtgcaggccagccccaccatggacaagaggaagagcctcatcaacagccgcagcagccccccagccagccccaccatcatcccccggctgcgggccatccagctgaccccaggagagagcagcaagacctggggccgcagctctgtggtgcccaaggaggagggggaggaggaggagaagagggcccccaagaagaagggccgcacctggggccctggcaccctgggccagaaggagctggccagcggagatgagggcagcccccagaggcgggagaaggccaacggcctgagcacccccagcgagagcccccacttccacctgggcctgaagagcctggtggatggctacaagcagtggagcagcagcgcccccaacctggtgaagggccccaggagcagccctgccctgcccggcttcaccagcctgatggagatggccctgctggccgcctcctgggtggtgcccatcgacatcgaggaggatgaggacagcgagggccctggcagcggggagagccggctgcagcacagccccagccagagctacctgtgcatccccttccccagaggagaagatggagatggccccagcagtgatggcatccacgaggagcccacccctgtgaacagcgccaccagcaccccccagctgacccccaccaacagcctgaagaggggcggggcccaccacagaagatgtgaggtggccctgctgggctgtggggctgtgctggccgccaccggcctgggctttgacctgctggaggccggcaagtgccagctgctgcccctggaggagcctgagcccccagcccgggaggagaagaagagaagagagggcctcttccagaggagcagccggcccaggaggagcaccagcccccccagcaggaagctgttcaagaaggaggagcccatgctgctgctgggggaccccagcgccagcctgaccctgctgagcctgagcagcatcagcgagtgcaacagcaccaggagcctgctgcggagtgacagtgatgaaattgtggtgtatgagatgcctgtgtcccctgtggaggccccacccctgagcccctgcacccacaaccccctggtgaatgtgcgggtggagcgcttcaagagggaccccaaccagagcctgacccccacccacgtgaccctgaccacccccagccagcccagcagccacaggaggacccccagtgatggagccctgaagccagagaccctgctggccagccgcagccccagcagcaatggcctgagccccagccctggagctggcatgctgaagacccccagccccagccgggaccctggagagttcccccggctgcctgaccccaacgtggtgtttcctcccaccccccggcgctggaacacccagcaggacagcaccctggagcggcccaagaccctggagttcctgccccggccccggcccagcgccaaccggcagaggctggacccctggtggtttgtgagccccagccacgcccggagcaccagccctgccaacagcagcagcacagagacccccagcaacctggacagctgctttgccagcagcagcagcacagtggaggagaggcctggcctgcctgccctgctgcccttccaggccggccccctgcccccaacagagaggaccctgctggacctggatgctgagggccagagccaggacagcacagtgcccctgtgcagagctgagctgaacacccacaggcctgccccctatgagatccagcaggagttctggagctag

SEQ ID NO: 227395 - DNA, 5602 bp, Artificial Sequence
  derived and/or modified sequence
atggagccctccagagcgcttctcggctgcctagcgagcgccgccgctgccgccccgccgggggaggatggagcaggggccggggccgaggaggaggaggaggaggaggaggaggcggcggcggcggtgggccccggggagctgggctgcgacgcgccgctgccctactggacggccgtgttcgagtacgaggcggcgggcgaggacgagctgaccctgcggctgggcgacgtggtggaggtgctgtccaaggactcgcaggtgtccggcgacgagggctggtggaccgggcagctgaaccagcgggtgggcatcttccccagcaactacgtgaccccgcgcagcgccttctccagccgctgccagcccggcggcgaggaccccagttgctacccgcccattcagttgttagaaattgattttgcggagctcaccttggaagagattattggcatcgggggctttgggaaggtctatcgtgctttctggataggggatgaggttgctgtgaaagcagctcgccacgaccctgatgaggacatcagccagaccatagagaatgttcgccaagaggccaagctcttcgccatgctgaagcaccccaacatcattgccctaagaggggtatgtctgaaggagcccaacctctgcttggtcatggagtttgctcgtggaggacctttgaatagagtgttatctgggaaaaggattcccccagacatcctggtgaattgggctgtgcagattgccagagggatgaactacttacatgatgaggcaattgttcccatcatccaccgcgaccttaagtccagcaacatattgatcctccagaaggtggagaatggagacctgagcaacaagattctgaagatcactgattttggcctggctcgggaatggcaccgaaccaccaagatgagtgcggcagggacgtatgcttggatggcacccgaagtcatccgggcctccatgttttccaaaggcagtgatgtgtggagctatggggtgctactttgggagttgctgactggtgaggtgccctttcgaggcattgatggcttagcagtcgcttatggagtggccatgaacaaactcgcccttcctattccttctacgtgcccagaaccttttgccaaactcatggaagactgctggaatcctgatccccactcacgaccatctttcacgaatatcctggaccagctaaccaccatagaggagtctggtttctttgaaatgcccaaggactccttccactgcctgcaggacaactggaaacacgagattcaggagatgtttgaccaactcagggccaaagaaaaggaacttcgcacctgggaggaggagctgacgcgggctgcactgcagcagaagaaccaggaggaactgctgcggcgtcgggagcaggagctggccgagcgggagattgacatcctggaacgggagctcaacatcatcatccaccagctgtgccaggagaagccccgggtgaagaaacgcaagggcaagttcaggaagagccggctgaagctcaaggatggcaaccgcatcagcctcccttctgatttccagcacaagttcacggtgcaggcctcccctaccatggataaaaggaagagtcttatcaacagccgctccagtcctcctgcaagccccaccatcattcctcgccttcgagccatccagttgacaccaggtgaaagcagcaaaacctggggcaggagctcagtcgtcccaaaggaggaaggggaggaggaggagaagagggccccaaagaagaagggacggacgtgggggccagggacgcttggtcagaaggagcttgcctcgggagatgaaggatcccctcagagacgtgagaaagctaatggtttaagtaccccatcagaatctccacatttccacttgggcctcaagtccctggtagatggatataagcagtggtcgtccagtgcccccaacctggtgaagggcccaaggagtagcccggccctgccagggttcaccagccttatggagatggccttgctggcagccagttgggtggtgcccatcgacattgaagaggatgaggacagtgaaggcccagggagtggagagagtcgcctacagcattcacccagccagtcctacctctgtatcccattccctcgtggagaggatggcgatggcccctccagtgatggaatccatgaggagcccaccccagtcaactcggccacgagtacccctcagctgacgccaaccaacagcctcaagcggggcggtgcccaccaccgccgctgcgaggtggctctgctcggctgtggggctgttctggcagccacaggcctagggtttgacttgctggaagctggcaagtgccagctgcttcccctggaggagcctgagccaccagcccgggaggagaagaaaagacgggagggtctttttcagaggtccagccgtcctcgtcggagcaccagccccccatcccgaaagcttttcaagaaggaggagcccatgctgttgctaggagacccctctgcctccctgacgctgctctccctctcctccatctccgagtgcaactccacacgctccctgctgcgctccgacagcgatgaaattgtcgtgtatgagatgccagtcagcccagtcgaggcccctcccctgagtccatgtacccacaaccccctggtcaatgtccgagtagagcgcttcaaacgagatcctaaccaatctctgactcccacccatgtcaccctcaccaccccctcgcagcccagcagtcaccggcggactccttctgatggggcccttaagccagagactctcctagccagcaggagcccctccagcaatgggttgagccccagtcctggagcaggaatgttgaaaacccccagtcccagccgagacccaggtgaattcccccgtctccctgaccccaatgtggtcttccccccaaccccaaggcgctggaacactcagcaggactctaccttggagagacccaagactctggagtttctgcctcggccgcgtccttctgccaaccggcaacggctggacccttggtggtttgtgtcccccagccatgcccgcagcacctccccagccaacagctccagcacagagacgcccagcaacctggactcctgctttgctagcagtagcagcactgtagaggagcggcctggacttccagccctgctcccgttccaggcagggccgctgcccccgactgagcggacgctcctggacctggatgcagaggggcagagtcaggacagcaccgtgccgctgtgcagagcggaactgaacacacacaggcctgccccttatgagatccagcaggagttctggtcttagcacgaaaaggattggggcgggcaagggggacagccagcggagatgaggggagctggcgggcacagccctttctcagggttggaccccctgagatccagccctacttcttgcactgataatgcactttgaagatggaagggatggaaacagggccacttcagagggtctcctgccctgcagggcctttctacccgtgtccactggaggggctgtggccatcagctctggctgtgtaggggaggaaggggtgcatgcatgtcccccaccctccacagtcttccttgcctttagagtgaccctgcagagtcactcagccaaatctgtctgctgctccctctcctcagccagttgggtgtgcgcagagctgtcatagggtccctttgtcagccccgagttcagcttcccaaacaccagtgttggatattctgtgattgattttggtcctcctccgctgtcccccaacacccaggaatgggaatctggcttggttcgagataggagcttttctgtgtcctaagccctttcatgctagcaggaagactgaaagcaaggtggcccagtgtggggtcatagggcttgatagacctggcactgcctatctgcacttccaggtgccccacctatttatctgagcccacaggtggaaaggggaactgcctcagtgagaacggggggacggggatgttaggaaaaatacagtaaagttgcaatgaagaggttcatgaagtatgtccttgttctttttggaaactctcggcaaagggcaaaccagcaagtattgagggtacccatctagctacttggggtcaggacctcgtcagaccaggttcggatacaatcatctgctcatcccaggaatagtttcttgggggactcactcactggtgccagttctaagtcagagacaaaattccactgtctgttccttttgctgtctgaactttatgtgttactcccttcctttggtcttcactctaatccctggagtttgtgggcttttggttatgtttggttagtagatatcaccgcaatgccctagaacagctatgaagcagaataccatatggccacctggacattgggacttgggaattcactctcaactgggccatccatgttgtgatgcccttgaagtaaaatggagccagcaggagtaccttctgtaaatgcatgtggcaaagtgctatttatagggtgcccagggagccgctgatgtacaataaccttgaggtcccccatactgaaaactgaccaaggcctgtgcacaggtagcccctcatgctgggctctggaccatgagctgagtaggaaggatagcagaggccaaccctgaccttcctggaagttgtttccttaacttgaatgttgagcttcctctaaagctttctcgtgtatgtcttctccatgccactactctgaggcctcctgtgttatgtgtgaacagttgtctttatgtgggaatgacgacttgattgggagtagagtctcaaggtcattcccctcttccctcaagactctctgaatgctgctccactgtcttttgtcttggaggtcactcagcaggttccttgcatttgctgcctggatgtgcagctggcaacagtgatgaattggtcactgctctttctctataactgggatagatgtcctgccttggggtcactaaaggggtgaccttgttccttgctttatgagcccattagcactttggttcaaggggcccaccaagtcttggacgggaaggcgctactggttttattgcccaaggttttgttattgcttctcttctgtgtccttctctttgttcagtgaagccaatatgtaagatactgtttttgtccccattcccctactcctgagctaggaggaaaaaatgtgaatcttaccagcagttccagccaaccaagtgattcttcttcattcttgatggggagaagtacatacaaagtttgttctgacagggcgcggtggctcacgcctgtaatcccagcgctttgggaggcagaggcaggtggatcacctgaggtcgggagttcgagaccagcctgaccaacatggagatatcctgtctctactaaaaatacaaaaaaattagccaggcatggtggcacgtgcctgtaatcccagctactcgcaaggctgaggcaggagaatcgcttgaacctgggaggcggaggttgcagtgagccaagattgcgccattgcactccagcctgggcaacaagagagaaactctgtctcaaaa

SEQ ID NO: 227396 - DNA, 3357 bp, Artificial Sequence
  derived and/or modified sequence
atggagcccagccgggccctgctgggctgcctggccagcgccgccgccgctgctccccctggtgaagatggggccggtgcaggggcagaggaagaggaagaagaagaagaggaggccgcggctgctgtggggccgggcgagctgggctgtgatgcgcccctgccatattggacggccgttttcgaatacgaagccgccggcgaggatgagcttaccctgcgactaggggacgtggtcgaagtcctttccaaagacagccaagtgtccggggacgaaggatggtggaccggccaattgaaccaacgcgtcggtattttcccatccaattacgtgactccacgcagcgctttcagtagtagatgtcaacccgggggggaagatcctagctgttatcctccaatccaattgcttgagatcgacttcgccgaactaaccctggaagagatcattggtatcggtggcttcggcaaggtgtacagagcgttttggattggtgatgaggttgccgtgaaagctgcccggcacgacccggatgaggatatctcccagacaatcgagaacgtgagacaggaagccaaattgttcgcaatgctcaagcaccctaacatcatcgccctgagaggcgtttgcttgaaggaaccaaacctttgtctggtgatggagtttgccagaggcgggcctctgaatagggtgctaagtggtaaacgcatcccgcccgacatcctggtgaactgggccgttcagatcgcccgtggaatgaactatctgcatgacgaggccatcgtacccattattcacagggacctgaagtcctcaaacatcctgatcctccaaaaggtcgagaatggcgatctgtccaataagattttgaagatcactgacttcggactggcccgggagtggcaccgcactaccaagatgtcggctgcgggcacttacgcgtggatggctccagaggtgatcagagcctctatgtttagtaaaggatctgatgtgtggagctacggcgtgcttctgtgggagcttctgacaggtgaggtaccttttaggggaattgatggtctggccgtggcatatggagttgctatgaataagctggctctgcccattccttcaacatgtccagagcctttcgccaagctaatggaggattgctggaatccagatccacacagccgcccttcatttactaacattctcgatcagctgacaacgattgaagagagtggcttcttcgagatgccaaaagatagtttccactgccttcaagataactggaaacacgaaatccaggagatgtttgatcagctgcgggcgaaagagaaagagctcagaacttgggaagaggagttgacacgcgcagccctgcagcagaagaatcaggaggaacttctcagacggcgggagcaggaacttgccgagagggagattgatattctggagagggagctcaacatcataattcatcagctgtgccaggaaaaaccgcgtgtaaaaaaacgtaaggggaaattccgcaaatctagactgaaactcaaggatgggaacaggatctcactgccatctgactttcagcacaagtttaccgtgcaggcatctcccacaatggataaaagaaaatccctgatcaactcacgttcctcgcctcccgcatctccgactattatcccccgactgagggcaattcagctgacccctggggagtctagtaaaacctggggccggagctcagtggtgccaaaggaagaaggcgaggaggaggaaaagcgggctccgaagaaaaaggggaggacatggggcccagggacgcttggtcagaaggagctggctagtggcgacgaaggttctccccagcgacgcgagaaggccaacgggttatcaacaccttccgaatctccccatttccacctgggattgaagagcctggtcgatggatataaacagtggtcctcttcagcaccaaacctcgtaaaaggacctaggtcgagtcccgccttaccagggttcacttctcttatggagatggctcttctggctgcctcttgggtcgtgcctatagatatcgaagaagatgaagattctgaaggaccaggctctggcgaatctcgtctgcagcactctccctcccagagttacctttgcatcccattcccgcggggtgaagatggtgacggaccaagctcagatggcatccacgaagagccaacacccgttaattcagccacttccactccccaactgacccccacaaatagtctaaagagggggggggcacaccatagaaggtgcgaggtggcactgctcggttgcggcgccgtcctagctgccacaggcctcggatttgacctcctggaggcaggcaaatgccagctcctgccgctggaagaacctgagccccccgcaagggaggagaaaaagagaagggaaggtctcttccagcgttcgtcccgtccccgccggagtaccagtcctccaagcagaaagctgttcaaaaaagaggaaccaatgttgttactgggtgacccctccgcttccctgactttgctgagtctctcaagtatttccgagtgcaacagtactagaagtctcttgcgctctgattcggatgagatcgtcgtgtatgagatgcctgtaagtcccgtagaagccccccccctgtccccctgcacccataatcccctggtcaacgttagagttgagcggtttaagcgtgaccctaatcagtcattgacgcctactcatgtcaccttaacgacaccatctcagcccagctctcaccgcagaacaccttcagatggagctctgaaacccgaaacactgctagccagtcggagtccgtcctcaaacggtttgtcaccatctccaggggctggaatgctgaaaacaccttcaccatcacgggatccaggtgaatttccacgactgcctgatcccaacgtggtgttcccccctacacccaggcggtggaacacccaacaggacagcacattggagaggccaaagaccttagagtttctgccacggccccgcccctcagcaaaccggcagcggctagatccatggtggttcgtgagtccctcacatgcacggagtacatcccccgcgaacagcagctccactgaaacaccatccaatttggactcgtgtttcgcatcctctagctcaactgttgaagagagacccggcctcccagcgttgctccccttccaagcaggtccactccctcctaccgagaggacgttgcttgaccttgatgctgaaggccaatctcaagactcgacagttcccctatgccgtgccgagttaaacacgcaccggccagccccttatgaaattcagcaagagttctggtcttag

SEQ ID NO: 227397 - DNA, 3357 bp, Artificial Sequence
  derived and/or modified sequence
atggagccttcccgagccctccttggatgcctggcctccgccgctgcggctgccccaccaggtgaagatggggcaggcgcaggggctgaagaggaggaggaagaggaagaggaagcagccgctgccgtcggccctggcgaattggggtgtgatgcacctcttccttattggacagcagtcttcgaatacgaggctgccggagaggacgaactgacattgcggctgggcgacgtggtagaggttttgagcaaggattcccaggtttccggagacgagggctggtggacaggccagctcaaccagcgagtggggatttttccctccaactacgttactcctcgatccgcctttagctcacggtgccagccgggaggggaggatcccagctgttatccacctattcagctgctggagatcgattttgccgaacttacattggaggagattattggaataggaggattcggaaaagtgtatagagccttctggatcggagacgaagtggccgtcaaggcggctcgacacgaccccgacgaggatatttctcaaacaatcgagaatgtaagacaagaagcaaaattgtttgccatgcttaagcatcctaacattatcgccctgcgaggagtttgcctcaaggagcctaatctgtgcctggttatggaatttgctagagggggacctcttaaccgcgtgctgtcaggtaagcgcattcccccagacatccttgtcaactgggcggttcaaattgcacgcggtatgaactacttgcacgatgaagctattgttcctatcattcacagagacttgaagtcatccaatatcctcatccttcagaaagtggagaacggcgacttgtccaataagatacttaagatcacagattttggcctcgctagggaatggcatcgaacgaccaaaatgtccgccgctggtacatatgcctggatggctccagaagtgatcagagccagcatgttcagcaagggcagcgacgtctggtcatacggggtgctgctttgggaactgcttactggtgaagttccctttcgaggcattgacggcctggccgtggcctatggagtggcaatgaacaagctagcacttccaatccccagcacatgtcccgagccgtttgccaaactgatggaagattgctggaacccagatccgcactctaggccatccttcaccaacattctggatcaactgaccacgattgaggaaagcggtttcttcgaaatgcccaaggacagttttcactgccttcaagataactggaagcacgaaattcaggaaatgtttgatcagctgagagccaaggagaaagagcttcgcacctgggaagaggagttaacccgcgctgcccttcagcagaagaaccaggaggaactgctcagacgccgagagcaggaactggccgagagagagatcgacatactggaacgagagttgaatattatcattcatcagctgtgccaggagaaacccagagtgaaaaagcgaaaaggcaaattccgcaaatctcgactcaagctcaaggacggcaaccggatatcactgccctcagacttccagcacaaattcaccgtgcaggcttctcccacaatggataagcgaaagagcttaatcaacagccggtcctccccccctgcctcacccaccattatcccccgactgcgagcgatacagctgacaccaggcgagagcagtaagacctgggggagatcctccgttgttccaaaagaagagggagaagaagaggagaaaagggcacccaagaagaaaggtaggacgtggggtccaggaacgctcggccagaaagaactggcgtcgggagacgagggctctccacagcgcagggagaaggcaaacggcttatctaccccctccgaaagtccgcacttccacctgggcctgaagtcacttgtcgatggatataagcaatggagctccagcgcccctaatttggtgaaggggccacgtagctcaccagccttgcccggattcacctcactgatggaaatggctctcttagcagctagctgggtagttcctatagatatcgaagaagacgaagacagcgaagggcctggcagcggcgagagccgtttgcagcactcccccagccagagttatctctgtatcccttttccgcgaggagaggacggcgatggaccttccagtgacggcattcacgaagaaccaactcctgtgaattcggccacatcaactccacagttgacccccacgaacagcttgaagcgaggaggagcccatcatagacgctgtgaggtcgcattgttaggttgtggcgcagtgttagcagcgacgggcctcggcttcgacctgctggaggccggtaaatgccaactgctgcccttagaggagcctgagcccccagccagggaagagaaaaaaagacgggagggtctgttccagcggtcctccagaccaagaagaagcacaagccccccaagccgtaagctgttcaagaaggaggagccgatgcttctgctcggcgatccttccgctagtctgaccttgctgagtctgagctccatatcagaatgtaatagcaccagatcgctgttgcggtctgattctgatgagattgtcgtatacgagatgcccgtgtctccagtggaggccccaccattgagcccatgcactcataacccactggtgaatgtccgggtcgaacgcttcaaacgggacccaaaccagtccctcacacctacacacgtgaccctaacaactccctctcaacctagcagtcaccgaagaaccccaagcgatggggcactgaagcccgagaccctgctggcctccagaagtcctagctccaacggcttgagcccatcacctggcgcaggcatgcttaaaaccccctcaccaagtcgcgatcctggggagttccccagactcccagatcctaatgtcgtatttccgcctacccctaggcgatggaatacacagcaggattcaactctcgagcgtccaaagacattggaattcctgccccgtccacgtccctccgccaatcgccagcgcctcgatccctggtggtttgtgagcccatctcacgccagatccacttctccagcaaactccagctccaccgaaactccctcaaacctcgacagctgcttcgcttcttcgtccagcacggttgaagagaggcctggactgcctgccctattaccatttcaagcaggaccgctacctcctaccgagcgcaccctactggacctggacgctgagggacagtcccaggattccactgtgcctctgtgccgcgctgaactcaacacacaccgaccagctccctacgagatccaacaagaattttggagctag

SEQ ID NO: 227398 - DNA, 3357 bp, Artificial Sequence
  derived and/or modified sequence
atggagccgagccgcgcattattggggtgtttggcatccgcagctgcagccgctcctccaggcgaagatggtgcaggcgctggggcagaggaggaagaggaggaagaagaggaagccgcagccgccgtgggccccggagaactggggtgcgacgcaccacttccttattggacggccgtgtttgaatatgaagctgcaggcgaagacgagctcacgttgcgtctgggtgatgttgtcgaggttctgtctaaagatagccaggtatctggggacgaaggatggtggactggtcagctgaatcagagagtcggaatttttccctcgaactacgtcacacctaggagtgcattcagtagccggtgccaacccggcggcgaggaccccagctgctaccctcctattcagctgcttgagatcgatttcgctgagttgaccctggaagaaatcatcgggatcgggggcttcggaaaagtgtaccgggctttctggatcggcgatgaagtggcagtgaaggccgcaagacacgaccctgacgaggatattagccaaactatcgagaatgtaaggcaagaggctaagctcttcgccatgctgaagcaccctaatatcatcgctctgaggggcgtgtgtctcaaggagccaaacctgtgtcttgttatggaattcgctcgaggcggacccctgaatagagttctgtctgggaagagaatcccaccagatatcttggtaaactgggcagtgcagatagcccgcgggatgaattaccttcatgatgaagccatcgtgcccattatacacagggatttgaagtcatccaacatattgattttacaaaaggtcgagaatggcgacctaagcaacaaaatcctgaagattactgattttggcctcgctagggagtggcatcgaaccactaagatgtccgctgctggcacatatgcttggatggccccggaagtcatcagggcctccatgttctccaagggcagcgatgtttggagttacggagtgttgctgtgggaactgctcactggcgaggtgccattccgcggcattgatgggttggcggtcgcctatggggtggcgatgaacaagttagccctgcccatcccttcaacttgcccagagcccttcgcaaagctgatggaggactgctggaaccccgacccacactccaggccatctttcacaaacattctggatcagctgacaaccatcgaggagagcggtttttttgagatgccaaaggactcatttcactgtctccaggataattggaagcatgaaattcaagaaatgttcgaccagcttagagcaaaggagaaggaactccgtacttgggaagaagagctgactagagccgctttacagcagaagaaccaggaggagctgctacgccgtagagaacaggagctcgccgaacgggaaatcgacatcctggagcgcgagttgaacatcataattcaccaattgtgccaggagaagccccgcgtcaaaaaaaggaaagggaagtttaggaagtcccgcttaaaacttaaagacggcaatcgcatttctctgcccagcgattttcagcataaatttacagtccaggcaagtccgactatggataaacgaaaatctttgattaacagcaggagttccccccctgcatcacctactatcatcccaaggttacgggccatccagttgacgccgggcgagtcctcaaagacttggggacggtcctcagtcgtgcctaaggaggagggtgaggaggaggagaagcgggccccaaaaaagaagggaaggacttgggggccgggcacgttaggtcagaaggagctcgcctctggtgacgaaggctccccgcagcgacgggagaaggccaatggtttaagtacaccatccgagtctccccacttccacctgggacttaagtctctggtcgacgggtacaaacagtggagttcctctgcacccaatctggtgaaaggtccccgtagctctccagcattacctgggttcacctcactcatggaaatggcattattagctgcatcctgggtggtacctatcgatatcgaagaagatgaagacagcgagggccctggcagcggtgagtctagattacagcattctccgagtcaatcgtacctatgcataccattccctaggggtgaagacggggacggtccctcgtccgatggaatccacgaagagcctacaccggtgaattccgccacttccaccccacaactgacaccaaccaactctttgaagcgcggcggggctcaccaccgcagatgtgaagtggcccttctggggtgtggtgcagttctcgccgccaccggcctcggattcgacctcttagaggccggtaagtgccagctgctgcctctcgaggagccagagcccccagcaagagaagagaagaagcgtcgggagggacttttccaacgcagctctcgtcccagacgcagcacctcacctccatcaagaaagctctttaagaaggaagaacctatgcttttgcttggtgacccttcagcctcccttacattgctgtctctctccagtattagcgagtgcaacagcaccaggagcctgctcaggtccgattctgacgagattgttgtgtacgagatgccagtgagtccagtggaagcgcctccgctcagcccatgcacccacaacccgcttgtgaatgttcgcgtggagcgatttaaacgggatccaaatcagtcacttacccccacgcacgtgacactgactaccccctcccaacccagctctcaccgtcgcaccccatcagacggggcactgaagcccgaaactctactggcaagccgctcacccagttcaaatggcctgtctccaagtccaggcgccggcatgctcaagacaccctccccctctcgggatccaggcgaattccctaggctaccggatcctaacgtagtcttcccacccaccccccgtagatggaacactcagcaggactcaaccctcgaacgtcccaagacactggaatttctccccaggccacgaccttccgcaaaccgacagagactcgatccctggtggttcgtcagccctagccacgcccgcagcacaagtcccgccaattcatctagcactgaaacgccatcaaacttggattcttgcttcgcgtcatcaagctctacggtggaagagcgcccgggccttccagctcttctgcctttccaggccggtccacttccaccaacagaacgtacccttctagatcttgacgccgaggggcaaagccaggacagtactgttcctttgtgtcgcgctgagctcaatacgcaccgtccagccccttacgagatccaacaggaattttggtcttag

SEQ ID NO: 227399 - DNA, 3357 bp, Artificial Sequence
  derived and/or modified sequence
atggaaccctccagagcattgctgggttgtttggcttccgcagcagcggccgcacccccgggcgaggacggggctggggccggcgccgaggaggaggaggaagaggaagaggaagcagctgcagctgtcggaccaggtgagttaggttgtgatgcccccctgccctattggaccgccgtttttgaatatgaggccgcaggtgaagacgagctcacattacgcctgggggacgtggtagaagtgctgagcaaggactcacaggtatcaggcgacgaaggctggtggacaggccagttgaatcagagagtcggaatcttccctagtaattatgtcactcctaggagtgcattcagtagcagatgccagcctggcggtgaggaccctagctgttacccccccatccagctcctagaaattgactttgccgagcttaccctcgaggaaatcataggaattggcggctttggaaaagtctatagagccttttggattggtgatgaagtggcagtgaaggctgctcggcacgatcccgatgaagacataagccagaccattgaaaacgtcaggcaggaagctaagctatttgctatgttaaaacaccctaacattatcgccctccggggggtgtgcctcaaggagccaaatctatgcctcgtcatggaattcgcacggggagggcctctcaaccgggtgctgagcgggaaacggataccccccgatatccttgttaactgggccgtccaaatcgcaagaggtatgaactatttgcacgacgaagccatcgtaccgatcatccatcgagacttgaaatcatcgaatatcctaatattacagaaagtagaaaatggcgacctcagcaacaagattctcaagatcacagattttggtctcgccagagagtggcatcgcacaaccaagatgtctgctgccgggacttacgcatggatggcaccagaagtgattagggcgtccatgttctcgaaaggttccgacgtttggagctatggcgtcctgttgtgggagctcctgaccggtgaagtcccttttagaggaatagacggccttgcagtggcctacggtgttgccatgaacaaattagcactgcctatcccatccacctgcccagaaccattcgctaagctcatggaagattgctggaaccctgacccacattctaggccttcctttacaaacattctggaccagttaacgactatcgaggaatccggttttttcgagatgccgaaagactcattccattgcctgcaggataactggaagcacgaaatccaggagatgttcgaccagcttcgagcaaaagagaaagagttgcgaacatgggaagaagaattgacccgggcggccctgcagcagaagaaccaggaagaacttttaagacgcagggagcaggaactggctgaacgcgaaattgatatactggagagggaactgaatattataatccaccagctgtgccaggaaaaaccgagagtgaagaagcgtaagggaaagtttcgaaagtctcgcttgaaactgaaggatggtaatcgtatatctctcccttccgattttcagcataaatttaccgtccaggccagcccgacgatggataaaagaaaaagcctcatcaacagtcgatcaagtccaccagcaagcccaaccattatacccaggctgcgggccatccaactcacaccaggagaatcaagcaaaacgtggggaagaagttccgttgtgccaaaggaagagggcgaggaggaggagaaacgtgcccctaagaaaaaaggcagaacatggggtcctggaaccttaggacagaaggaactggctagtggcgacgaaggatcccctcaaagacgagagaaggccaatggtctatctacaccatcggaatcccctcacttccacttaggactcaagagtttggttgacggatacaagcagtggagtagcagcgccccaaacctggttaagggtccaagatctagtccagccctgcccggctttacctcattgatggagatggctctgctggccgcctcctgggtcgttcccatagatatcgaagaagacgaagattccgaaggcccaggcagcggggaatctcgacttcagcatagcccctcccagtcctacctgtgcatcccattccctcgcggcgaagacggcgacggtccttcatcagacgggatacatgaggagcctaccccagtcaatagcgctacctccaccccccagcttacgcccaccaattcccttaagcggggtggtgctcatcaccgaagatgcgaggttgccctccttggatgcggcgcagtgctggctgctaccggtcttggcttcgacctcttagaagcgggtaaatgccagctgctgcccctggaagaaccggaaccccccgccagagaggaaaagaagcgtcgagagggtctgttccagagaagttcacgcccccgcagatctacaagtcctccctccagaaagctgtttaagaaagaagaacccatgctgctccttggagatcctagcgcatcactgactctgctctccctctcctcgattagtgagtgtaattctacccgctctctgttgagatctgactccgatgagattgtagtctacgaaatgcctgtgagcccggtcgaagcaccccctcttagtccatgtacacacaatccccttgtgaacgtgagggtggagcgatttaaacgggatccaaatcagtcacttacccccacgcacgtgacactgactaccccctcccaacccagctctcaccgtcgcaccccatcagacggggcactgaagcccgaaactctactggcaagccgctcacccagttcaaatggcctgtctccaagtccaggcgccggcatgctcaagacaccctccccctctcgggatccaggcgaattccctaggctaccggatcctaacgtagtcttcccacccaccccccgtagatggaacactcagcaggactcaaccctcgaacgtcccaagaccctggaatttctgccaagacctcgtccctccgctaatcgacaacgtctggatccatggtggttcgttagccccagtcatgctcgcagcaccagccctgctaatagctcttctaccgaaaccccctccaatctcgactcttgtttcgcatctagctcctcaaccgttgaagaacgtccaggcctacccgcactgctgcccttccaagccggtcccctaccccctactgagcgaactctgctggacctggacgctgagggccaatctcaggattcaaccgtcccgttgtgccgtgcagaactcaacacacaccgtcctgccccctatgaaatccaacaagaattctggtcttag

SEQ ID NO: 227400 - DNA, 3357 bp, Artificial Sequence
  derived and/or modified sequence
atggagcccagcagagccctgctgggctgcctggccagcgccgccgccgccgccccccccggcgaggacggcgccggcgccggcgccgaggaggaggaggaggaggaggaggaggccgccgccgccgtgggccccggcgagctgggctgcgacgcccccctgccctactggaccgccgtgttcgagtacgaggccgccggcgaggacgagctgaccctgagactgggcgacgtggtggaggtgctgagcaaggacagccaggtgagcggcgacgagggctggtggaccggccagctgaaccagagagtgggcatcttccccagcaactacgtgacccccagaagcgccttcagcagcagatgccagcccggcggcgaggaccccagctgctacccccccatccagctgctggagatcgacttcgccgagctgaccctggaggagatcatcggcatcggcggcttcggcaaggtgtacagagccttctggatcggcgacgaggtggccgtgaaggccgccagacacgaccccgacgaggacatcagccagaccatcgagaacgtgagacaggaggccaagctgttcgccatgctgaagcaccccaacatcatcgccctgagaggcgtgtgcctgaaggagcccaacctgtgcctggtgatggagttcgccagaggcggccccctgaacagagtgctgagcggcaagagaatcccccccgacatcctggtgaactgggccgtgcagatcgccagaggcatgaactacctgcacgacgaggccatcgtgcccatcatccacagagacctgaagagcagcaacatcctgatcctgcagaaggtggagaacggcgacctgagcaacaagatcctgaagatcaccgacttcggcctggccagagagtggcacagaaccaccaagatgagcgccgccggcacctacgcctggatggcccccgaggtgatcagagccagcatgttcagcaagggcagcgacgtgtggagctacggcgtgctgctgtgggagctgctgaccggcgaggtgcccttcagaggcatcgacggcctggccgtggcctacggcgtggccatgaacaagctggccctgcccatccccagcacctgccccgagcccttcgccaagctgatggaggactgctggaaccccgacccccacagcagacccagcttcaccaacatcctggaccagctgaccaccatcgaggagagcggcttcttcgagatgcccaaggacagcttccactgcctgcaggacaactggaagcacgagatccaggagatgttcgaccagctgagagccaaggagaaggagctgagaacctgggaggaggagctgaccagagccgccctgcagcagaagaaccaggaggagctgctgagaagaagagagcaggagctggccgagagagagatcgacatcctggagagagagctgaacatcatcatccaccagctgtgccaggagaagcccagagtgaagaagagaaagggcaagttcagaaagagcagactgaagctgaaggacggcaacagaatcagcctgcccagcgacttccagcacaagttcaccgtgcaggccagccccaccatggacaagagaaagagcctgatcaacagcagaagcagcccccccgccagccccaccatcatccccagactgagagccatccagctgacccccggcgagagcagcaagacctggggcagaagcagcgtggtgcccaaggaggagggcgaggaggaggagaagagagcccccaagaagaagggcagaacctggggccccggcaccctgggccagaaggagctggccagcggcgacgagggcagcccccagagaagagagaaggccaacggcctgagcacccccagcgagagcccccacttccacctgggcctgaagagcctggtggacggctacaagcagtggagcagcagcgcccccaacctggtgaagggccccagaagcagccccgccctgcccggcttcaccagcctgatggagatggccctgctggccgccagctgggtggtgcccatcgacatcgaggaggacgaggacagcgagggccccggcagcggcgagagcagactgcagcacagccccagccagagctacctgtgcatccccttccccagaggcgaggacggcgacggccccagcagcgacggcatccacgaggagcccacccccgtgaacagcgccaccagcaccccccagctgacccccaccaacagcctgaagagaggcggcgcccaccacagaagatgcgaggtggccctgctgggctgcggcgccgtgctggccgccaccggcctgggcttcgacctgctggaggccggcaagtgccagctgctgcccctggaggagcccgagccccccgccagagaggagaagaagagaagagagggcctgttccagagaagcagcagacccagaagaagcaccagcccccccagcagaaagctgttcaagaaggaggagcccatgctgctgctgggcgaccccagcgccagcctgaccctgctgagcctgagcagcatcagcgagtgcaacagcaccagaagcctgctgagaagcgacagcgacgagatcgtggtgtacgagatgcccgtgagccccgtggaggccccccccctgagcccctgcacccacaaccccctggtgaacgtgagagtggagagattcaagagagaccccaaccagagcctgacccccacccacgtgaccctgaccacccccagccagcccagcagccacagaagaacccccagcgacggcgccctgaagcccgagaccctgctggccagcagaagccccagcagcaacggcctgagccccagccccggcgccggcatgctgaagacccccagccccagcagagaccccggcgagttccccagactgcccgaccccaacgtggtgttcccccccacccccagaagatggaacacccagcaggacagcaccctggagagacccaagaccctggagttcctgcccagacccagacccagcgccaacagacagagactggacccctggtggttcgtgagccccagccacgccagaagcaccagccccgccaacagcagcagcaccgagacccccagcaacctggacagctgcttcgccagcagcagcagcaccgtggaggagagacccggcctgcccgccctgctgcccttccaggccggccccctgccccccaccgagagaaccctgctggacctggacgccgagggccagagccaggacagcaccgtgcccctgtgcagagccgagctgaacacccacagacccgccccctacgagatccagcaggagttctggagctag

SEQ ID NO: 227401 - protein, 123 aa, Artificial Sequence
  derived and/or modified sequence
MSLSFLLLLFFSHLILSAWAHGEKRLAPKGQPGPAATDRNPRGSSSRQSSSSAMSSSSASSSPAASLGSQGSGLEQSSFQWSPSGRRTGSLYCRVGIGFHLQIYPDGKVNGSHEANMLSQVHR

SEQ ID NO: 227402 - DNA, 651 bp, Artificial Sequence
  derived and/or modified sequence
atgctggccagccctgcccggcccaccctgaggatgctggccaaccacgccctgagcaccccccactgtgcctgcagccctgccccagcccccaggacagccagcgccagcagaagaagatgtgtgcctgtggaggcccgggctgctggggtgtttggagaccggctggccggcgtgtttggcagccggggcctgaagcatggaggagtgcaggccccccggccccgggtggtgcgggcagagccccgggccggctttgctgtggtgcgcagcccccggcggctgtgtggccgcagccacgccccccagcccccagcccacctgggcctgggccctggctgcttccctgctgtggccgtggtggtgcctgtgcccggcagccgggcccaccggccctttgctgccctgctggtggagggcagcttcctgggggacccccccatccccccaagaagaagtggagtgctggcccggggcagcgctggagctgactgcctggccagctctgtgaccccaggccccagcctgtggatccccctgctgctggtggccggctgtgtgtcctgctttgtgggcctggccgtgtgtgtgtggatgcaggcccgggtgtccccagcctggccagctggcctcttcctgctgcccaggtag

SEQ ID NO: 227403 - DNA, 372 bp, Artificial Sequence
  derived and/or modified sequence
atgagcctgagcttcctgctgctgctgttcttcagccacctgatcctgagcgcctgggcccacggcgagaagagactggcccccaagggccagcccggccccgccgccaccgacagaaaccccagaggcagcagcagcagacagagcagcagcagcgccatgagcagcagcagcgccagcagcagccccgccgccagcctgggcagccagggcagcggcctggagcagagcagcttccagtggagccccagcggcagaagaaccggcagcctgtactgcagagtgggcatcggcttccacctgcagatctaccccgacggcaaggtgaacggcagccacgaggccaacatgctgagccaggtgcacagatag

SEQ ID NO: 227404 - DNA, 372 bp, Artificial Sequence
  derived and/or modified sequence
atgtcgctcagtttcctcctgctactcttcttttcccacctgattctgtccgcttgggcccatggggagaaaaggcttgcaccaaagggccagcccgggcctgcagctacagatcgcaacccccggggatcatcatcaagacagtcatcctcttctgccatgtcttcctccagtgcatcatcaagtcctgcggcgagtcttggctcccagggcagcggcctggagcagagcagcttccaatggtccccctctgggaggcggaccggctccttgtattgccgcgtgggaatcgggttccatttgcagatctaccctgatggtaaagttaacggctcccacgaagccaatatgctctcccaggtgcaccggtag

SEQ ID NO: 227405 - DNA, 372 bp, Artificial Sequence
  derived and/or modified sequence
atgagcctgtccttcctgctgctgctcttcttcagccacctgatcctgagcgcctgggcccatggagagaagaggctggcccccaagggccagcccggccctgctgccacagacaggaacccccggggcagcagcagccggcagagcagcagcagcgccatgagcagcagcagcgccagcagcagccctgctgccagcctgggcagccagggcagcggcctggagcagagcagcttccagtggagccccagcggccgcaggacaggcagcctgtactgccgggtgggcatcggcttccacctgcagatctacccagatggcaaggtgaatggcagccatgaggccaacatgctgagccaggtgcacaggtag

SEQ ID NO: 227406 - DNA, 372 bp, Artificial Sequence
  derived and/or modified sequence
atgagcctgagcttcctgctgctgctgttcttcagccacctgatcctctctgcctgggcacacggtgaaaagcgcctggcccctaaggggcagcctggcccggccgccacagatcggaaccctagaggaagcagtagccggcaatccagttcatccgctatgtcctcaagctctgcttcgagttctcctgccgcttctctggggagccagggatctggactggaacagtcctctttccagtggtcaccaagtggccgtaggacagggagtctttattgcagggtaggcatcgggttccacctgcagatttatccagacggaaaggtgaatggaagccacgaggccaatatgttgtcacaggttcataggtag

SEQ ID NO: 227407 - DNA, 372 bp, Artificial Sequence
  derived and/or modified sequence
atgagcctgtcctttttgctgctgctgttcttttctcacctgatactgtctgcttgggcacatggcgaaaagagactggccccaaagggccagccaggtcctgctgctacggatcgcaacccacggggtagtagctccaggcagtccagctccagcgctatgagttcctccagtgcttcctcttctccggctgcttctcttggttcacagggctctggactcgaacagtctagcttccagtggtctccatcggggagacgaactggctctttatattgccgggttggcatagggttccatcttcagatttatcccgacggtaaagttaacggatcgcacgaggcaaatatgttgagtcaggtccatcgctag

SEQ ID NO: 227408 - protein, 597 aa, Artificial Sequence
  derived and/or modified sequence
MIEESGNKRKTMAEKRQLFIEMRAQNFDVIRLSTYRTACKLRFVQKRCNLHLVDIWNMIEAFRDNGLNTLDHTTEISVSRLETVISSIYYQLNKRLPSTHQISVEQSISLLLNFMIAAYDSEGRGKLTVFSVKAMLATMCGGKMLDKLRYVFSQMSDSNGLMIFSKFDQFLKEVLKLPTAVFEGPSFGYTEHSVRTCFPQQRKIMLNMFLDTMMADPPPQCLVWLPLMHRLAHVENVFHPVECSYCRCESMMGFRYRCQQCHNYQLCQNCFWRGHAGGPHSNQHQMKEHSSWKSPAKKLSHAISKSLGCVPTREPPHPVFPEQPEKPLDLAHIVPPRPLTNMNDTMVSHMSSGVPTPTKRLQYSQDIPSHLADEHALIASYVARLQHCARVLDSPSRLDEEHRLIARYAARLAAEAGNVTRPPTDLSFNFDANKQQRQLIAELENKNREILQEIQRLRLEHEQASQPTPEKAQQNPTLLAELRLLRQRKDELEQRMSALQESRRELMVQLEELMKLLKEAEARESAQATGSPHTSPTHGGGRPMPMPVRSTSAGSTPTHCPQDSLSGVGGDVQEAFAQAEEGAEEEEEKMQNGKDRG

SEQ ID NO: 227409 - protein, 149 aa, Artificial Sequence
  derived and/or modified sequence
MIEESGNKRKTMAEKRQLFIEMRAQNFDVIRLSTYRTACKLRFVQKRCNLHLVDIWNMIEAFRDNGLNTLDHTTEISVSRLETVISSIYYQLNKRLPSTHQISVEQSISLLLNFMIAAYDSEGRGKLTVFSVKAMLATMCGGKMLDKLR

SEQ ID NO: 227410 - protein, 597 aa, Artificial Sequence
  derived and/or modified sequence
MIEESGNKRKTMAEKRQLFIEMRAQNFDVIRLSTYRTACKLRFVQKRCNLHLVDIWNMIEAFRDNGLNTLDHTTEISVSRLETVISSIYYQLNKRLPSTHQISVEQSISLLLNFMIAAYDSEGRGKLTVFSVKAMLATMCGGKMLDKLRYVFSQMSDSNGLMIFSKFDQFLKEVLKLPTAVFEGPSFGYTEHSVRTCFPQQRKIMLNMFLDTMMADPPPQCLVWLPLMHRLAHVENVFHPVECSYCRCESMMGFRYRCQQCHNYQLCQNCFWRGHAGGPHSNQHQMKEHSSWKSPAKKLSHAISKSLGCVPTREPPHPVFPEQPEKPLDLAHIVPPRPLTNMNDTMVSHMSSGVPTPTKRLQYSQDIPSHLADEHALIASYVARLQHCARVLDSPSRLDEEHRLIARYAARLAAEAGNVTRPPTDLSFNFDANKQQRQLIAELENKNREILQEIQRLRLEHEQASQPTPEKAQQNPTLLAELRLLRQRKDELEQRMSALQESRRELMVQLEELMKLLKEEEQKQAAQATGSPHTSPTHGGGRPMPMPVRSTSAGSTPTHCPQDSLSGVGGDVQEAFAQAEEGAEEEEEKMQNGKDRG

SEQ ID NO: 227411 - DNA, 1794 bp, Artificial Sequence
  derived and/or modified sequence
atgattgaggagtcagggaataagcgcaaaaccatggccgagaagaggcagctgtttattgagatgcgagctcagaattttgacgtgattcggctaagcacatatagaacagcttgcaaactgcgcttcgtccagaagcgctgcaatctgcacctggtggatatctggaacatgattgaagcgttcagggataacggactgaacacactcgaccataccacggagatcagcgtgtcacgattggagaccgtgatctcttccatatattaccagcttaataagaggctcccctccacacatcaaatttccgttgaacaatcaatttcccttctcttgaacttcatgatagcggcatacgattctgaagggagagggaaattgacagtgttctctgttaaggctatgctggctaccatgtgcgggggaaagatgttggacaagctacggtacgtgttctctcaaatgtctgactcaaatgggctgatgatctttagcaaatttgaccagtttctgaaggaggtgctgaagttgccaaccgcagtctttgaaggaccctcgtttggctacacggagcattccgtcagaacctgctttcctcaacaaagaaagatcatgctgaatatgtttctcgatactatgatggctgaccctccgccccagtgtttggtgtggttaccactgatgcatcggctggcacacgttgagaacgttttccatccagtcgagtgcagctactgccgctgcgaatccatgatgggtttccgctaccggtgtcagcagtgtcataactatcagctgtgccagaattgtttctggaggggacatgccggtggaccgcactctaatcagcatcagatgaaggaacactcgtcttggaagagccccgctaaaaagctctctcacgcgatctccaagtcacttggatgcgtcccaacacgagagcctccccatcccgtgttccccgaacagcctgaaaagcctttggacttggcccatattgtgccaccccgtcctctgaccaatatgaacgatacaatggtgtcccatatgtcaagcggtgtgcctacccccaccaagcgccttcaatactctcaggacatcccaagtcatttggctgacgagcacgcactgatcgcctcttacgtggcacggctgcagcactgcgccagggtcctggatagcccgagccgtctagacgaagagcacagactgatcgcaaggtacgcggccaggctagcggcagaggccggtaatgtgaccagacccccaactgatctgagttttaacttcgacgccaataagcagcagaggcaactcatcgcagagctagaaaataaaaaccgggagattctgcaagagatccaacgacttcgcttggaacacgagcaagccagccagcccactccagagaaagcccagcagaaccccaccctgctggccgaattaagactcttacggcagcgcaaggatgagttggagcagcggatgtccgctcttcaggagtctcgtcgtgagcttatggtccaactggaggaacttatgaagctgctgaaagaggcagaggcaagagagtcagctcaggctaccggctctccacatacctcacctacccacgggggaggacggcccatgcccatgcccgtgaggtctacctcggccggtagcacgcctacccactgcccacaggacagtctttccggggtgggcggggatgtccaagaggcatttgcacaagctgaggaaggtgcggaagaggaggaggagaagatgcagaacggcaaggacagaggttag

SEQ ID NO: 227412 - DNA, 1794 bp, Artificial Sequence
  derived and/or modified sequence
atgatcgaagagtccgggaataaacgaaaaaccatggcagaaaaaagacagctttttattgagatgcgagcccagaattttgatgtgatcagactgtcgacctaccgtaccgcttgcaaactgcgcttcgttcagaagaggtgcaacttgcatcttgtggatatctggaacatgattgaggcctttcgggataacgggttgaacaccctggaccacaccacagagataagcgttagccgattggaaaccgttatctcctctatctactaccaactgaataaacgtctcccttccacccaccagatttcagttgaacagagtatttccctactgctaaactttatgattgcagcctatgattctgagggaagggggaaactcacagtcttcagcgtgaaagcgatgttggctactatgtgcggcggcaagatgctggataagcttcggtacgtcttttctcagatgtccgactcaaatggacttatgatattcagcaagttcgaccagttcttgaaagaggttctgaagctaccaaccgccgtattcgaggggccaagctttggctatactgagcattcagtacgcacttgttttcctcagcaaagaaaaatcatgctgaacatgttcctggacaccatgatggccgacccacctccccaatgcctggtgtggctgcccctgatgcaccgcctggcccatgtggaaaacgtgtttcaccccgtggagtgcagctactgcagatgcgagtccatgatgggcttccggtatcgctgtcaacagtgtcataattaccagctgtgccagaattgcttctggcgcggccatgcaggcggaccacatagcaatcaacatcagatgaaagagcacagttcatggaagtccccagccaaaaaactcagccacgcaatctccaagtccttagggtgcgtaccaacaagagaacctccccatcctgtgttcccagagcaaccagaaaaacctctggatctggcgcacatcgtccctccacgcccccttacgaacatgaacgatactatggtgtcacatatgtcgtcaggggtcccgacccctacaaagaggctgcaatattcacaggatatcccatcccacctggctgatgagcatgctctgattgcgtcctatgtggcccgcttgcagcattgtgcaagagtgctagatagccctagtagattggacgaggagcaccgcctgattgcgaggtatgctgcacgcttggctgcagaggctggaaacgtgacacggcctcctacagacctatcctttaatttcgacgctaacaaacaacaacgccaattgatcgcggagctggagaataaaaaccgagagatactccaggaaatccaacggctgagactggaacacgaacaggcgagtcagcctaccccagagaaagcccagcagaaccctacacttctggccgagctgcgtctcctgcgtcagaggaaagacgagctggagcaacgcatgagcgcactgcaggagtcacggcgcgaactgatggtacaactcgaggaactcatgaaattacttaaggaagaagagcagaagcaggctgcacaggccacagggagtcctcatacgagtccgacacacgggggggggcggccaatgccaatgcctgtgcgcagcacttccgccggaagcacaccaactcactgcccacaagactcattgtccggggttggcggagatgtgcaggaagccttcgcccaggcggaggaaggtgccgaggaggaggaggagaagatgcagaatggcaaggatcgcggctag

SEQ ID NO: 227413 - DNA, 1794 bp, Artificial Sequence
  derived and/or modified sequence
atgattgaggagagcggcaacaagaggaagaccatggccgagaagaggcagctgttcatcgagatgagggcccagaactttgatgtgatccggctgagcacctacagaacagcctgcaagctgcgctttgtgcagaagcgctgcaacctgcacctggtggacatctggaacatgattgaggccttccgggacaatggcctgaacaccctggaccacaccacagagatctctgtgtcccggctggagaccgtcatcagcagcatctactaccagctgaacaagaggctgcccagcacccaccagatctctgtggagcagagcatcagcctgctgctgaacttcatgattgctgcctatgattctgagggccggggcaagctgaccgtcttctctgtgaaggccatgctggccaccatgtgtggcggcaagatgctggacaagctgcgctacgtgttcagccagatgtctgacagcaatggcctgatgatcttcagcaagtttgaccagttcctgaaggaggtgctgaagctgcccacagctgtgtttgagggccccagctttggctacacagagcacagcgtgaggacctgcttcccccagcagaggaagatcatgctgaacatgttcctggacaccatgatggctgaccccccaccccagtgcctggtgtggctgcccctgatgcaccggctggcccacgtggagaatgtgttccaccctgtggagtgcagctactgccgctgtgagagcatgatgggcttccgctaccgctgccagcagtgccacaactaccagctgtgccagaactgcttctggaggggccacgccggcggcccccacagcaaccagcaccagatgaaggagcacagctcctggaagagccctgccaagaagctgagccacgccatcagcaagagcctgggctgtgtgcccacccgggagcccccccaccctgtgtttcctgagcagcctgagaagcccctggacctggcccacatcgtgcccccccggcccctgaccaacatgaatgacaccatggtgagccacatgagcagcggcgtgcccacccccaccaagaggctgcagtacagccaggacatccccagccacctggctgatgaacatgccctgattgccagctatgtggcccggctgcagcactgtgcccgggtgctggacagccccagccggctggatgaggagcaccggctgattgcccgctatgctgcccggctggccgctgaggccggaaatgtgacccggcccccaacagacctgtccttcaactttgatgccaacaagcagcagaggcagctgattgctgagctggagaacaagaaccgggagatcctgcaggagatccagaggctgcggctggagcacgagcaggccagccagcccaccccagagaaggcccagcagaaccccaccctgctggccgagctgcggctgctgcggcagaggaaggatgagctggagcagaggatgtctgccctgcaggagagcagaagagagctgatggtgcagctggaggagctgatgaagctgctgaaggaggccgaggcccgggagagcgcccaggccaccggcagcccccacaccagccccacccacggcggcggccggcccatgcccatgcctgtgcgcagcaccagcgctggcagcacccccacccactgcccccaggacagcctgagcggcgtgggcggagatgtgcaggaggcctttgcccaggccgaggagggcgctgaggaggaggaggagaagatgcagaatggcaaggaccggggctag

SEQ ID NO: 227414 - DNA, 1794 bp, Artificial Sequence
  derived and/or modified sequence
atgattgaggagagcggcaacaagaggaagaccatggccgagaagaggcagctgttcatcgagatgagggcccagaactttgatgtgatccggctgagcacctacagaacagcctgcaagctgcgctttgtgcagaagcgctgcaacctgcacctggtggacatctggaacatgattgaggccttccgggacaatggcctgaacaccctggaccacaccacagagatctctgtgtcccggctggagaccgtcatcagcagcatctactaccagctgaacaagaggctgcccagcacccaccagatctctgtggagcagagcatcagcctgctgctgaacttcatgattgctgcctatgattctgagggccggggcaagctgaccgtcttctctgtgaaggccatgctggccaccatgtgtggcggcaagatgctggacaagctgcgctacgtgttcagccagatgtctgacagcaatggcctgatgatcttcagcaagtttgaccagttcctgaaggaggtgctgaagctgcccacagctgtgtttgagggccccagctttggctacacagagcacagcgtgaggacctgcttcccccagcagaggaagatcatgctgaacatgttcctggacaccatgatggctgaccccccaccccagtgcctggtgtggctgcccctgatgcaccggctggcccacgtggagaatgtgttccaccctgtggagtgcagctactgccgctgtgagagcatgatgggcttccgctaccgctgccagcagtgccacaactaccagctgtgccagaactgcttctggaggggccacgccggcggcccccacagcaaccagcaccagatgaaggagcacagctcctggaagagccctgccaagaagctgagccacgccatcagcaagagcctgggctgtgtgcccacccgggagcccccccaccctgtgtttcctgagcagcctgagaagcccctggacctggcccacatcgtgcccccccggcccctgaccaacatgaatgacaccatggtgagccacatgagcagcggcgtgcccacccccaccaagaggctgcagtacagccaggacatccccagccacctggctgatgaacatgccctgattgccagctatgtggcccggctgcagcactgtgcccgggtgctggacagccccagccggctggatgaggagcaccggctgattgcccgctatgctgcccggctggccgctgaggccggaaatgtgacccggcccccaacagacctgtccttcaactttgatgccaacaagcagcagaggcagctgattgctgagctggagaacaagaaccgggagatcctgcaggagatccagaggctgcggctggagcacgagcaggccagccagcccaccccagagaaggcccagcagaaccccaccctgctggccgagctgcggctgctgcggcagaggaaggatgagctggagcagaggatgtctgccctgcaggagagcagaagagagctgatggtgcagctggaggagctgatgaagctgctgaaggaggaggagcagaagcaggccgcccaggccaccggcagcccccacaccagccccacccacggcggcggccggcccatgcccatgcctgtgcgcagcaccagcgctggcagcacccccacccactgcccccaggacagcctgagcggcgtgggcggagatgtgcaggaggcctttgcccaggccgaggagggcgctgaggaggaggaggagaagatgcagaatggcaaggaccggggctag

SEQ ID NO: 227415 - DNA, 1794 bp, Artificial Sequence
  derived and/or modified sequence
atgatcgaggagagcggcaacaagcggaagaccatggccgagaagaggcagctgttcattgaaatgagagctcagaatttcgacgtgatcagactgtccacataccgcacagcgtgtaaactaaggttcgtccagaagcgctgtaacctgcatttggttgacatttggaacatgattgaggctttccgggacaatggtttgaacacactggaccatacaactgagatctctgtgtcccgtctcgagacagtgatctcatctatatattaccagttgaacaagaggctgccctccacccaccaaatatccgtggaacagtccatcagtcttttgctcaattttatgattgccgcttacgattccgaaggtaggggtaagctgaccgtctttagcgttaaggccatgcttgccaccatgtgcggaggaaagatgctggacaaactgcgatacgttttctctcagatgagcgatagcaacggactgatgattttctctaagtttgaccagttcttgaaggaggtgctgaaactgccgaccgcagtgttcgaaggccccagtttcggctacaccgaacacagcgttagaacctgttttccacagcagcgcaagataatgctgaacatgtttttggacactatgatggccgatcctccccctcagtgccttgtgtggttgccgctgatgcaccgcctcgcacacgttgagaacgtgttccatcctgtagaatgcagctactgccggtgtgaaagcatgatgggcttcagatatagatgccagcagtgccacaactatcagctctgccagaattgtttttggcggggtcatgctggaggcccgcacagtaaccagcatcagatgaaggaacactcgagctggaaaagcccagccaaaaagctctcacatgcaatatcaaagtcactgggttgtgtgccaacaagggagccacctcacccagtctttcccgagcagcctgagaagccactagacctcgcccacatagtcccaccaagaccgctaaccaatatgaatgataccatggtgtcacacatgtcatctggggtgccgacacccacaaagagactgcaatactctcaagacatcccatctcatctggcggatgaacatgcgttgatcgccagttacgtagcccgcctgcagcactgtgcaagggttctcgattctccaagcaggctcgacgaggaacacagacttatcgcgaggtacgcggcacgcctggctgctgaggcaggaaatgtcacgcgcccccccaccgacctgtctttcaatttcgacgcgaataaacaacagcgacagctcattgcagaactggaaaacaagaatcgtgagatcttacaggagatacagagacttcgcctcgagcacgagcaggcctcacagcccactcctgaaaaggcccagcaaaaccccacactcctcgccgaactgaggctgctgcggcaacggaaggacgagcttgaacagcggatgtccgcactgcaggaaagccgtcgcgagctgatggtgcagctggaggaattgatgaaacttttgaaagaagcggaggcaagagagagtgcccaggcaaccggatcaccccatacttctccgacacatggcggaggcaggcctatgcctatgcccgtgcgatctacatcggcagggagtacaccaacccactgccctcaggattcactcagtggggtgggtggggacgtacaggaagctttcgcccaggccgaggagggggccgaagaggaagaagaaaagatgcagaacggaaaggaccggggctag

SEQ ID NO: 227416 - DNA, 1794 bp, Artificial Sequence
  derived and/or modified sequence
atgatcgaggagagcggcaacaagcggaagaccatggccgagaagaggcagctgtttattgagatgagggcccagaacttcgatgttattcgattgagcacctaccgtaccgcctgcaagctgcgctttgtgcagaaacgttgcaacctccacttggtggatatttggaatatgattgaagcttttcgagataacggactgaataccctggaccataccaccgaaatctcggtcagccggctggagaccgtcataagctccatctactatcagcttaacaaacggctaccttctacccatcagatttctgtggaacagtctatttccctcctgctgaacttcatgattgctgcatacgattctgagggcagaggtaaactcaccgtgtttagcgtgaaagctatgcttgctaccatgtgcggtgggaagatgctggacaaactcaggtacgtgttttcccagatgtccgactctaacggactgatgatcttttcaaagtttgatcagtttctgaaggaggtcttaaagctgcccaccgctgttttcgaagggccgtcgttcggctatactgagcactcggtgcggacatgcttcccacagcagaggaaaattatgcttaatatgttcctcgatacaatgatggcagacccccctccccagtgcttggtttggttgcctctgatgcaccgcctcgcccatgtcgagaatgtgtttcatccagttgagtgtagttattgtcgatgcgaaagcatgatgggtttccggtacagatgtcagcaatgccataattaccagctgtgccagaattgcttttggagaggacacgccggcggcccccattctaatcagcaccagatgaaggagcatagctcctggaaatcccccgcaaagaaactctctcatgctatctccaagtctttaggttgcgttcccacgcgggaaccgccgcatcccgtgtttccggaacagcccgagaagcccttggacctcgctcacatcgtgccacctaggcccctgacaaatatgaacgacaccatggtctcccacatgagctcaggggtaccaacccctaccaaaaggctgcagtattctcaagatataccgagtcaccttgccgacgagcacgcccttattgcgtcctacgttgcacgcctacaacattgcgcccgagtgttggatagccctagcaggctggacgaagagcacagactcatcgctaggtacgctgcaaggctggctgcagaagccgggaatgtcacacgtcccccgactgacctaagcttcaacttcgacgccaataagcaacagaggcaactcatcgctgagctggagaacaaaaacagggagatcctccaggaaatccagaggcttagactggaacatgagcaggccagccaacctacccctgaaaaggcccagcagaatcccactttgctggccgagttgcggctcctcaggcagcgcaaggatgaactagaacagagaatgtctgccctgcaagagtcccggcgagaactaatggtgcagcttgaagagctcatgaaactgttgaaggaggaggagcaaaaacaggccgcgcaggcaacaggctctccacacaccagccctacacatggcgggggacggccaatgccgatgcccgtgaggtccaccagcgctggatccacacctactcactgcccacaggacagcctgagcggcgtcgggggcgatgttcaggaggcattcgctcaagctgaggagggtgctgaggaggaggaagaaaaaatgcagaatggcaaggatagggggtag

SEQ ID NO: 227417 - DNA, 1794 bp, Artificial Sequence
  derived and/or modified sequence
atgattgaggagagtggcaacaagagaaagacaatggcagagaagagacagttatttattgaaatgagagcccaaaacttcgatgtgatccggttatccacataccgaaccgcctgtaagctgaggttcgttcaaaagcggtgtaatctccatcttgtcgatatctggaatatgattgaggcctttcgcgacaatggactcaataccttagatcacaccaccgaaatctccgtgagccgcctggagaccgtcatttcatccatctactatcaactcaataaacgcttaccttccacacaccagatcagcgtggagcaatctataagcctactcctcaacttcatgatagcagcctatgatagcgagggtagaggcaaactcactgtgtttagcgtgaaagcaatgctggccacaatgtgcggcggtaagatgctggacaagctacgatatgtgttttcccagatgtctgacagtaatggactgatgattttctccaagtttgaccagtttctcaaggaggtgctgaagctgccaaccgctgtgtttgagggaccgtcattcggttatactgaacatagcgtacggacgtgcttcccacagcagaggaaaataatgctaaacatgtttcttgatacgatgatggcggatccacccccacagtgtttggtgtggttacccctaatgcaccggcttgcccacgtggagaatgtattccacccagtcgagtgttcttactgcaggtgtgagagtatgatggggttccgatacagatgccagcagtgtcataactaccagctatgccaaaattgcttttggcgagggcatgcgggtggaccacacagtaatcagcaccagatgaaagagcattcttcctggaagtctccggcaaagaagctgtcgcacgcgatcagcaagtctctgggctgtgtaccaacccgcgagcccccacatccggttttcccggagcagccagaaaaaccccttgatctggcgcatatcgttcccccacggcctctgacaaacatgaacgacaccatggtgtcccacatgagctcaggcgttccgacccctacaaagcgtctgcagtactcccaggatattccctcacacttagccgacgagcacgcactaatcgcctcttacgttgcgagactccagcactgcgctcgggtcctggactcaccttctcggctcgacgaagagcaccggttgatagccagatacgcagctcggctggcggcagaagccggaaatgtgaccagacctcctaccgatctctcattcaacttcgacgccaataaacaacagcgacagctaattgctgaactggaaaataagaatcgggagatcttgcaggagatacagagactgagactggaacatgaacaggcgagtcagcccacccctgagaaggctcaacagaatccaacacttctggccgagcttagactcctgaggcagaggaaagacgagcttgaacagaggatgtcagctctccaggaaagtcgcagagagctgatggtgcagctcgaagagcttatgaagcttctcaaagaagcagaagcccgtgagagtgcccaggcgacaggttctcctcatacctctccgactcacgggggtggccgaccaatgcctatgcctgtaagatctacctctgccggtagcactccaacacactgtccacaagattctttgagcggcgtggggggagacgtgcaggaggcctttgcgcaggccgaagagggtgcagaagaggaagaagagaagatgcagaacggcaaggaccgcggatag

SEQ ID NO: 227418 - DNA, 1794 bp, Artificial Sequence
  derived and/or modified sequence
atgatcgaagaatccggcaacaagagaaaaaccatggccgagaaacggcagctctttatcgagatgagggcacaaaactttgacgtgatcaggctgagcacgtaccgtaccgcatgcaaactgcgctttgtccagaagaggtgcaatctccacctggtcgacatctggaatatgattgaagctttcagggataacggtcttaacacccttgatcatacaaccgagatttccgtgtcaaggctcgagactgtcatctcttcaatttactaccaactcaacaaaagattgcctagcactcaccagatttctgtggagcagtcgatcagcctgctcctcaacttcatgatcgccgcatacgattccgagggtcgcggaaagctaactgttttctccgtcaaagccatgctggccacaatgtgcgggggaaaaatgctggacaaactgaggtacgtcttctcccagatgagcgacagtaacggtctgatgatcttctccaaatttgaccagttcctgaaagaggtcctgaagcttcctactgccgtattcgagggcccatccttcggctataccgagcacagcgtaaggacgtgctttcctcaacagaggaaaatcatgcttaacatgtttctcgacacaatgatggccgatccacctccccagtgtctcgtgtggctgccactgatgcacagattggctcatgtggagaatgtctttcatcccgtagagtgttcgtactgtaggtgcgagtccatgatggggttccgatacaggtgccagcaatgccacaattaccagttgtgccagaattgtttttggcgcggacacgccggaggcccacacagcaaccaacaccagatgaaagagcattcttcatggaagagtccagcaaagaaactgtcccatgctattagcaaatcactgggatgcgtgcccacacgtgagccacctcatcccgtgttccctgagcagcctgaaaagcctctcgacctggctcacatcgtgccgccaaggcctctgaccaatatgaacgatactatggtctctcacatgtcaagtggggtacccactcctactaaaagattgcaatatagccaggacattccgagccacttagccgacgaacacgctcttattgcaagctacgtggccagactgcagcattgtgctagggtgctggactctccgtctcgtctggacgaggaacacagattgatcgcgaggtatgctgctagactagctgctgaagccggaaacgtgactcgccctcctaccgacctcagcttcaattttgacgctaataaacagcagagacagctgattgccgaactggaaaataagaatcgcgagatccttcaagaaatccagagactcaggctggaacacgagcaagcatcacagccaacaccagaaaaggctcagcagaaccccacgctgcttgctgaactgcgccttttacgccagcggaaagacgagcttgaacagcgtatgtccgccctccaagagagccggagagagttgatggttcagctggaggagctgatgaagctactcaaagaagaggaacagaaacaggccgcacaggctactggatcgccccacaccagccccacacacggaggaggcagacctatgcctatgccggtgcggagcacttctgccggttcaacaccaacccactgcccccaggacagtctgtctggagtaggaggggacgtccaggaggcattcgcacaggctgaggaaggtgcagaggaggaagaagagaagatgcagaatgggaaggatagaggatag

SEQ ID NO: 227419 - DNA, 1794 bp, Artificial Sequence
  derived and/or modified sequence
atgatcgaggagagcggcaacaagagaaagaccatggccgagaagagacagctgttcatcgagatgagagcccagaacttcgacgtgatcagactgagcacctacagaaccgcctgcaagctgagattcgtgcagaagagatgcaacctgcacctggtggacatctggaacatgatcgaggccttcagagacaacggcctgaacaccctggaccacaccaccgagatcagcgtgagcagactggagaccgtgatcagcagcatctactaccagctgaacaagagactgcccagcacccaccagatcagcgtggagcagagcatcagcctgctgctgaacttcatgatcgccgcctacgacagcgagggcagaggcaagctgaccgtgttcagcgtgaaggccatgctggccaccatgtgcggcggcaagatgctggacaagctgagatacgtgttcagccagatgagcgacagcaacggcctgatgatcttcagcaagttcgaccagttcctgaaggaggtgctgaagctgcccaccgccgtgttcgagggccccagcttcggctacaccgagcacagcgtgagaacctgcttcccccagcagagaaagatcatgctgaacatgttcctggacaccatgatggccgacccccccccccagtgcctggtgtggctgcccctgatgcacagactggcccacgtggagaacgtgttccaccccgtggagtgcagctactgcagatgcgagagcatgatgggcttcagatacagatgccagcagtgccacaactaccagctgtgccagaactgcttctggagaggccacgccggcggcccccacagcaaccagcaccagatgaaggagcacagcagctggaagagccccgccaagaagctgagccacgccatcagcaagagcctgggctgcgtgcccaccagagagcccccccaccccgtgttccccgagcagcccgagaagcccctggacctggcccacatcgtgccccccagacccctgaccaacatgaacgacaccatggtgagccacatgagcagcggcgtgcccacccccaccaagagactgcagtacagccaggacatccccagccacctggccgacgagcacgccctgatcgccagctacgtggccagactgcagcactgcgccagagtgctggacagccccagcagactggacgaggagcacagactgatcgccagatacgccgccagactggccgccgaggccggcaacgtgaccagaccccccaccgacctgagcttcaacttcgacgccaacaagcagcagagacagctgatcgccgagctggagaacaagaacagagagatcctgcaggagatccagagactgagactggagcacgagcaggccagccagcccacccccgagaaggcccagcagaaccccaccctgctggccgagctgagactgctgagacagagaaaggacgagctggagcagagaatgagcgccctgcaggagagcagaagagagctgatggtgcagctggaggagctgatgaagctgctgaaggaggccgaggccagagagagcgcccaggccaccggcagcccccacaccagccccacccacggcggcggcagacccatgcccatgcccgtgagaagcaccagcgccggcagcacccccacccactgcccccaggacagcctgagcggcgtgggcggcgacgtgcaggaggccttcgcccaggccgaggagggcgccgaggaggaggaggagaagatgcagaacggcaaggacagaggctag

SEQ ID NO: 227420 - DNA, 1794 bp, Artificial Sequence
  derived and/or modified sequence
atgatcgaggagagcggcaacaagagaaagaccatggccgagaagagacagctgttcatcgagatgagagcccagaacttcgacgtgatcagactgagcacctacagaaccgcctgcaagctgagattcgtgcagaagagatgcaacctgcacctggtggacatctggaacatgatcgaggccttcagagacaacggcctgaacaccctggaccacaccaccgagatcagcgtgagcagactggagaccgtgatcagcagcatctactaccagctgaacaagagactgcccagcacccaccagatcagcgtggagcagagcatcagcctgctgctgaacttcatgatcgccgcctacgacagcgagggcagaggcaagctgaccgtgttcagcgtgaaggccatgctggccaccatgtgcggcggcaagatgctggacaagctgagatacgtgttcagccagatgagcgacagcaacggcctgatgatcttcagcaagttcgaccagttcctgaaggaggtgctgaagctgcccaccgccgtgttcgagggccccagcttcggctacaccgagcacagcgtgagaacctgcttcccccagcagagaaagatcatgctgaacatgttcctggacaccatgatggccgacccccccccccagtgcctggtgtggctgcccctgatgcacagactggcccacgtggagaacgtgttccaccccgtggagtgcagctactgcagatgcgagagcatgatgggcttcagatacagatgccagcagtgccacaactaccagctgtgccagaactgcttctggagaggccacgccggcggcccccacagcaaccagcaccagatgaaggagcacagcagctggaagagccccgccaagaagctgagccacgccatcagcaagagcctgggctgcgtgcccaccagagagcccccccaccccgtgttccccgagcagcccgagaagcccctggacctggcccacatcgtgccccccagacccctgaccaacatgaacgacaccatggtgagccacatgagcagcggcgtgcccacccccaccaagagactgcagtacagccaggacatccccagccacctggccgacgagcacgccctgatcgccagctacgtggccagactgcagcactgcgccagagtgctggacagccccagcagactggacgaggagcacagactgatcgccagatacgccgccagactggccgccgaggccggcaacgtgaccagaccccccaccgacctgagcttcaacttcgacgccaacaagcagcagagacagctgatcgccgagctggagaacaagaacagagagatcctgcaggagatccagagactgagactggagcacgagcaggccagccagcccacccccgagaaggcccagcagaaccccaccctgctggccgagctgagactgctgagacagagaaaggacgagctggagcagagaatgagcgccctgcaggagagcagaagagagctgatggtgcagctggaggagctgatgaagctgctgaaggaggaggagcagaagcaggccgcccaggccaccggcagcccccacaccagccccacccacggcggcggcagacccatgcccatgcccgtgagaagcaccagcgccggcagcacccccacccactgcccccaggacagcctgagcggcgtgggcggcgacgtgcaggaggccttcgcccaggccgaggagggcgccgaggaggaggaggagaagatgcagaacggcaaggacagaggctag

SEQ ID NO: 227421 - DNA, 2365 bp, Artificial Sequence
  derived and/or modified sequence
gggcgcgcgcccgcccatccgccctccgccctccgccctcgcgccctcgcgccgggggcgggcgctgcgcgtgccgggcggagaagcggcgcgagccgggcgctgcgaacgttcgccgcgggggtggctccggggcctgagtaggcgctgccgctgcctcagccgagggggctgggccggagcgtgcggaggagtgaggccgcaggagaccttcccgacgacccctgctccggcggggaagtgagcaaggatgattgaggaaagtgggaacaagcggaagaccatggcagagaagaggcagctgttcatagaaatgcgtgctcagaattttgatgtcatacgactatcaacttacagaacagcctgcaaattacgatttgtacaaaaacgatgcaaccttcatcttgttgatatctggaacatgattgaagccttccgagacaatggccttaatacactggaccataccaccgagatcagtgtgtcccgcctcgaaactgtcatctcctccatctactatcagttgaacaagcgccttccttctactcaccaaattagtgtggaacaatctatcagcctcctcctcaactttatgattgctgcatatgacagtgagggccgaggcaagttgacggtattttcagttaaagctatgttagcaaccatgtgtggtggaaaaatgctggacaaattgagatatgttttctcccagatgtcagattccaatggcttaatgatatttagcaagtttgaccagtttctgaaggaagttctgaagctcccaacagctgtctttgaagggccatcttttggttacacagagcactcagtccgcacctgttttccacagcagagaaagataatgctaaatatgtttttagacacaatgatggctgaccctcctccccagtgccttgtctggctacctctcatgcacaggcttgcccatgttgagaatgtcttccatcccgtggagtgctcctactgccgatgtgagagtatgatgggtttccggtaccgatgccagcagtgccacaactatcagctctgccagaattgcttttggcgtggccatgccggcggccctcacagcaaccagcaccagatgaaggagcattcctcttggaaatctcctgcaaagaagctgagccatgcaattagtaaatctttggggtgtgtacccacgagagaacccccgcatcctgtttttcctgagcaaccagagaaaccacttgaccttgcacatatagttcctcctcgccctctgactaatatgaatgacaccatggttagccacatgtcctctggagtgcccactcccaccaagaggttacagtatagccaggatatacccagtcacttggccgatgagcatgcgctgatagcctcctatgtggcccgtctgcagcactgtgcacgtgttctggacagtcctagccgactggatgaggaacaccgtcttatagctcgctatgctgcccggctggctgcagaagcaggaaacgtgactcgtcctcccactgacttgagctttaactttgatgccaacaaacaacaaagacagcttattgcagaactggaaaacaaaaacagagagatcctgcaggagattcagcgtctccgcctggaacacgagcaggcctcccagcccacccctgagaaggcacagcagaaccccacgctgctggcagagctgcggctgctgaggcaaaggaaggatgaactggagcagaggatgtcggccctgcaggagagcaggcgggagctgatggtccagctggaagagctgatgaagttgctgaaggaagctgaggcacgagaatcagctcaggccacagggtcaccacatacatcgcccacccatggaggcggccggccaatgcccatgccagtgcgctccacgtctgccggctccacccccacccactgtccgcaggactcgctgagcggagtcgggggagacgtgcaggaggccttcgcacaagcagaggaaggtgcagaggaagaagaagagaagatgcagaatgggaaagacagaggttagcagaggagccggacacagaggaagctcaggcacagaggacgaggagcaagctggcgccgacatggcgaaggcaaggtcttcccccagaggcacattcctctccatctttccaccgcacacctggaccaggcttgcaggctgccagacgtcactccacccgccagggagaggggagccagagccggtgggaagcggggaggggctgcgtggcacagctagtgggcctccccctgcacagccctgcatgtactagcaccttcatcactcccctcagggcatggtctcatctccgcatcaggaattcacctggaggttgaaaag

SEQ ID NO: 227422 - DNA, 2384 bp, Artificial Sequence
  derived and/or modified sequence
gggcgcgcgcccgcccatccgccctccgccctccgccctcgcgccctcgcgccgggggcgggcgctgcgcgtgccgggcggagaagcggcgcgagccgggcgctgcgaacgttcgccgcgggggtggctccggggcctgagtaggcgctgccgctgcctcagccgagggggctgggccggagcgtgcggaggagtgaggccgcaggagaccttcccgacgacccctgctccggcggggaagtgagcaaggatgattgaggaaagtgggaacaagcggaagaccatggcagagaagaggcagctgttcatagaaatgcgtgctcagaattttgatgtcatacgactatcaacttacagaacagcctgcaaattacgatttgtacaaaaacgatgcaaccttcatcttgttgatatctggaacatgattgaagccttccgagacaatggccttaatacactggaccataccaccgagatcagtgtgtcccgcctcgaaactgtcatctcctccatctactatcagttgaacaagcgccttccttctactcaccaaattagtgtggaacaatctatcagcctcctcctcaactttatgattgctgcatatgacagtgagggccgaggcaagttgacggtattttcagttaaagctatgttagcaaccatgtgtggtggaaaaatgctggacaaattgagatatgttttctcccagatgtcagattccaatggcttaatgatatttagcaagtttgaccagtttctgaaggaagttctgaagctcccaacagctgtctttgaagggccatcttttggttacacagagcactcagtccgcacctgttttccacagcagagaaagataatgctaaatatgtttttagacacaatgatggctgaccctcctccccagtgccttgtctggctacctctcatgcacaggcttgcccatgttgagaatgtcttccatcccgtggagtgctcctactgccgatgtgagagtatgatgggtttccggtaccgatgccagcagtgccacaactatcagctctgccagaattgcttttggcgtggccatgccggcggccctcacagcaaccagcaccagatgaaggagcattcctcttggaaatctcctgcaaagaagctgagccatgcaattagtaaatctttggggtgtgtacccacgagagaacccccgcatcctgtttttcctgagcaaccagagaaaccacttgaccttgcacatatagttcctcctcgccctctgactaatatgaatgacaccatggttagccacatgtcctctggagtgcccactcccaccaagaggttacagtatagccaggatatacccagtcacttggccgatgagcatgcgctgatagcctcctatgtggcccgtctgcagcactgtgcacgtgttctggacagtcctagccgactggatgaggaacaccgtcttatagctcgctatgctgcccggctggctgcagaagcaggaaacgtgactcgtcctcccactgacttgagctttaactttgatgccaacaaacaacaaagacagcttattgcagaactggaaaacaaaaacagagagatcctgcaggagattcagcgtctccgcctggaacacgagcaggcctcccagcccacccctgagaaggcacagcagaaccccacgctgctggcagagctgcggctgctgaggcaaaggaaggatgaactggagcagaggatgtcggccctgcaggagagcaggcgggagctgatggtccagctggaagagctgatgaagttgctgaaggaggaagagcaaaagcaggcagctcaggccacagggtcaccacatacatcgcccacccatggaggcggccggccaatgcccatgccagtgcgctccacgtctgccggctccacccccacccactgtccgcaggactcgctgagcggagtcgggggagacgtgcaggaggccttcgcacaagcagaggaaggtgcagaggaagaagaagagaagatgcagaatgggaaagacagaggttagcagaggagccggacacagaggaagctcaggcacagaggacgaggagcaagctggcgccgacatggcgaaggcaaggtcttcccccagaggcacattcctctccatctttccaccgcacacctggaccaggcttgcaggctgccagacgtcactccacccgccagggagaggggagccagagccggtgggaagcggggaggggctgcgtggcacagctagtgggcctccccctgcacagccctgcatgtactagcaccttcatcactcccctcagggcatggtctcatctccgcatcaggaattcacctggaggttgaaaagagaaaagaaaaagcaccaa

SEQ ID NO: 227423 - protein, 567 aa, Artificial Sequence
  derived and/or modified sequence
MIEESGNKRKTMAEKRQLFIEMRAQNFDVIRLSTYRTACKLRFVQKRCNLHLVDIWNMIEAFRDNGLNTLDHTTEISVSRLETVISSIYYQLNKRLPSTHQISVEQSISLLLNFMIAAYDSEGRGKLTVFSVKAMLATMCGGKMLDKLRYVFSQMSDSNGLMIFSKFDQFLKEVLKLPTAVFEGPSFGYTEHSVRTCFPQQRKIMLNMFLDTMMADPPPQCLVWLPLMHRLAHVENVFHPVECSYCRCESMMGFRYRCQQCHNYQLCQNCFWRGHAGGPHSNQHQMKEHSSWKSPAKKLSHAISKSLGCVPTREPPHPVFPEQPEKPLDLAHIVPPRPLTNMNDTMVSHMSSGVPTPTKSVLDSPSRLDEEHRLIARYAARLAAEAGNVTRPPTDLSFNFDANKQQRQLIAELENKNREILQEIQRLRLEHEQASQPTPEKAQQNPTLLAELRLLRQRKDELEQRMSALQESRRELMVQLEELMKLLKEEEQKQAAQATGSPHTSPTHGGGRPMPMPVRSTSAGSTPTHCPQDSLSGVGGDVQEAFAQAEEGAEEEEEKMQNGKDRG

SEQ ID NO: 227424 - DNA, 1704 bp, Artificial Sequence
  derived and/or modified sequence
atgattgaggagtctggaaataagcgcaagaccatggcagagaagagacaacttttcatcgagatgagggcccagaatttcgatgtcatcagactgagcacataccgcacggcctgcaaattacgctttgtgcagaagcggtgcaatctacacctggtagacatctggaacatgatcgaggcgtttagggacaatggcctaaatacccttgatcacacgaccgaaatttccgtctctaggctggagaccgtcatcagctctatctactatcagctgaacaaacgcctcccatcaacccatcagataagcgtagaacaatctattagcctcctgctcaacttcatgattgctgcctacgattcggagggcagaggtaagctcacagttttcagtgttaaggcaatgcttgccacaatgtgcgggggaaaaatgctcgataagcttaggtatgtgttttctcaaatgagcgatagtaatggtctcatgattttcagtaaattcgaccagtttctgaaggaggtacttaagctgcccacagccgtctttgagggcccgtcattcgggtacaccgaacatagtgtgcgcacctgcttcccacagcaacggaagattatgctgaatatgttcctggacaccatgatggcagatcctccaccccagtgccttgtctggctgccacttatgcatcgcttggcccatgtagaaaatgttttccacccggtggaatgctcctattgcaggtgtgaatcgatgatgggcttccgttatagatgtcagcagtgccataactatcagttgtgtcaaaattgcttttggagggggcacgctggtggaccacactcaaaccaacaccagatgaaagagcactcaagctggaagagtcctgccaaaaaattgagccacgcaattagcaaatcactggggtgcgtgcctactcgggagcctccccatcccgtttttccagaacaaccagagaaaccgctggacttagcacacatagtgcccccaaggcctttaactaatatgaatgacacgatggtatctcacatgtcgagcggagtgccgactcccacgaaaagcgtgctggattccccttcccgtctcgacgaggaacaccggctcatcgcacgttacgctgcccgactggcggctgaggcggggaacgttactagaccgcctaccgatctgtcctttaattttgatgccaataagcaacagaggcaacttattgcagagttagagaacaaaaatcgcgagattctccaggaaatccagaggttgaggctagaacatgagcaggcctcacagcccacaccggagaaggctcaacagaatcctacgcttttggcagaacttagattattacgccaaagaaaagacgaactagagcagagaatgagtgcattacaggagtcccgccgtgagcttatggttcagctcgaggagctgatgaagctacttaaagaagaggagcagaaacaggcggcccaggctactgggtcgccccatacaagccccacccatggcggaggacgcccgatgccaatgcccgtaagaagtacttccgctgggtccactcctacccattgcccccaggattctctcagtggcgtcgggggcgacgtacaggaagcctttgcacaggcggaggaaggggcggaagaagaggaggaaaagatgcagaatgggaaggataggggttag

SEQ ID NO: 227425 - DNA, 1704 bp, Artificial Sequence
  derived and/or modified sequence
atgattgaggagagcggcaacaagaggaagaccatggccgagaagaggcagctgttcatcgagatgagggcccagaactttgatgtgatccggctgagcacctacagaacagcctgcaagctgcgctttgtgcagaagcgctgcaacctgcacctggtggacatctggaacatgattgaggccttccgggacaatggcctgaacaccctggaccacaccacagagatctctgtgtcccggctggagaccgtcatcagcagcatctactaccagctgaacaagaggctgcccagcacccaccagatctctgtggagcagagcatcagcctgctgctgaacttcatgattgctgcctatgattctgagggccggggcaagctgaccgtcttctctgtgaaggccatgctggccaccatgtgtggcggcaagatgctggacaagctgcgctacgtgttcagccagatgtctgacagcaatggcctgatgatcttcagcaagtttgaccagttcctgaaggaggtgctgaagctgcccacagctgtgtttgagggccccagctttggctacacagagcacagcgtgaggacctgcttcccccagcagaggaagatcatgctgaacatgttcctggacaccatgatggctgaccccccaccccagtgcctggtgtggctgcccctgatgcaccggctggcccacgtggagaatgtgttccaccctgtggagtgcagctactgccgctgtgagagcatgatgggcttccgctaccgctgccagcagtgccacaactaccagctgtgccagaactgcttctggaggggccacgccggcggcccccacagcaaccagcaccagatgaaggagcacagctcctggaagagccctgccaagaagctgagccacgccatcagcaagagcctgggctgtgtgcccacccgggagcccccccaccctgtgtttcctgagcagcctgagaagcccctggacctggcccacatcgtgcccccccggcccctgaccaacatgaatgacaccatggtgagccacatgagcagcggcgtgcccacccccaccaagtctgtgctggacagccccagccggctggatgaggagcaccggctgattgcccgctatgctgcccggctggccgctgaggccggaaatgtgacccggcccccaacagacctgtccttcaactttgatgccaacaagcagcagaggcagctgattgctgagctggagaacaagaaccgggagatcctgcaggagatccagaggctgcggctggagcacgagcaggccagccagcccaccccagagaaggcccagcagaaccccaccctgctggccgagctgcggctgctgcggcagaggaaggatgagctggagcagaggatgtctgccctgcaggagagcagaagagagctgatggtgcagctggaggagctgatgaagctgctgaaggaggaggagcagaagcaggccgcccaggccaccggcagcccccacaccagccccacccacggcggcggccggcccatgcccatgcctgtgcgcagcaccagcgctggcagcacccccacccactgcccccaggacagcctgagcggcgtgggcggagatgtgcaggaggcctttgcccaggccgaggagggcgctgaggaggaggaggagaagatgcagaatggcaaggaccggggctag

SEQ ID NO: 227426 - DNA, 1704 bp, Artificial Sequence
  derived and/or modified sequence
atgatcgaggagagcggcaacaagcggaagaccatggccgagaagcggcagctgtttatcgaaatgagagctcagaactttgacgtaatccggttatccacataccgcaccgcatgtaaattgcgatttgtgcagaagcgatgcaatctgcatttggtggatatctggaatatgatcgaggctttcagggacaacgggctcaataccttagaccacactactgagatctctgtgtcaagactggagaccgtgatctcaagcatttattatcagctgaacaaaagactgccctctactcatcagatctccgtggagcaaagcatcagcctgctcctgaattttatgattgccgcatacgatagcgaaggtcgcggcaagcttaccgtcttctccgtaaaagctatgttggcaaccatgtgcgggggtaagatgctggacaagctgcggtacgtctttagccaaatgtccgactccaatggcctgatgattttcagcaaatttgaccagttcttaaaggaggtcctcaaactgcctacagctgtgttcgaaggcccaagctttggatacacggaacactctgtgagaacttgtttcccacagcagaggaaaattatgttgaatatgttcctggacactatgatggccgatccacctccgcagtgtttagtctggttgcccttaatgcatcggctcgcgcatgtggaaaacgtatttcatcccgtcgaatgcagctactgtcggtgcgagtctatgatggggtttcgttacaggtgccagcagtgccataactaccagctctgccaaaattgtttctggcggggccatgccggcgggccccattccaatcagcaccagatgaaagagcacagtagctggaaaagccccgctaaaaagctgtctcatgcgatatcaaaatcactgggctgcgtcccaacccgagagcctcctcatcccgtgtttccggagcagcccgagaagcccctggatttggcacacattgtacctccacgtcccctgacaaatatgaacgacacaatggtatctcatatgagctccggcgtccccaccccgacaaagagcgtgctggactcaccatctagactggacgaggagcaccggcttattgcacgttatgccgccagactggctgctgaggcaggtaatgtgaccagaccccctacggacttatcgtttaacttcgacgctaataagcaacagcgtcagttgatcgctgaactggaaaataagaatcgcgagattctgcaagaaatccagagattgcggttggaacacgagcaggccagtcagccgacacctgagaaggcccagcagaatcccacactgctggccgaattgcggcttctccgccagcgcaaggatgagctggaacaaagaatgagcgctctgcaggagtcccggagagaattgatggttcaactggaagaactcatgaagcttcttaaagaagaggaacagaaacaggccgcacaggcaactggatcaccacacacatccccaacccacggggggggcaggccaatgccgatgcccgtccggagcaccagcgccggctcgacccctacccactgtcctcaggattccctttccggcgtcggcggcgacgtgcaagaagcttttgctcaggcggaggagggcgccgaagaggaagaggaaaaaatgcagaatggcaaggacagaggatag

SEQ ID NO: 227427 - DNA, 1704 bp, Artificial Sequence
  derived and/or modified sequence
atgatcgaggaatccggcaataagcggaagaccatggctgagaagcgccagctattcattgagatgagggctcagaactttgacgtaattagactctctacttacagaaccgcatgcaaactccggtttgttcagaaacgctgcaatctccacctggtggacatctggaacatgattgaggcattccgggacaacggcctgaatacacttgaccatactacagaaataagcgtgtcaaggctggagacagtgatctcctccatctactaccagctgaataaaaggctgccatcaactcaccagatttcagtggaacagtccattagcctcttactgaattttatgatagccgcttatgactctgaaggccgagggaagctgacagtgttcagtgtcaaagcaatgctggcgaccatgtgtggcggaaaaatgctggataagctcagatatgtgttctctcagatgtctgatagcaatggcttgatgatcttctcaaagtttgatcagtttttaaaggaagtcctgaagctgcccacagcagtgttcgaggggccttcttttggttataccgagcatagcgtcagaacttgttttccccaacagcgcaagatcatgctcaacatgttcctcgacacaatgatggctgacccacctcctcagtgtctcgtgtggctcccactgatgcatcgactagcccacgtcgagaatgtatttcatcctgtggagtgttcctattgccgatgtgagtcaatgatggggtttaggtaccgatgtcagcagtgccacaattaccagctgtgccagaactgcttttggagggggcacgcaggtggccctcacagcaaccagcaccagatgaaagaacatagcagttggaagtctccggcaaagaagcttagtcacgcgatttccaagtccctgggctgtgtgccgacacgtgagccccctcatcccgtgttccctgagcagcccgaaaaaccgctcgacttagcccacatagtgcccccaaggccacttacgaacatgaacgatacaatggtgtcccatatgtccagcggcgtcccaaccccaactaagagcgtactagactctccgtcacgtctggacgaggagcatcggcttatcgccagatacgcagcacgattggctgccgaagccggaaatgtgacccggccacccaccgacttatctttcaattttgatgccaacaagcaacaaaggcagctcatcgccgagctggagaacaaaaaccgggaaatcttgcaagaaattcagcggctgcggctggaacacgagcaggctagtcagccaactcctgaaaaagcccagcagaatccgacgctgcttgccgaacttcggctgttgcggcaaaggaaggatgaactggaacagcgcatgtcggctttgcaggaatctaggagagagctgatggtccagctggaagagctgatgaaactgttgaaggaggaggaacagaagcaggctgctcaggcaacaggcagtccacacacatcacccacccacgggggaggaagaccaatgccaatgcccgtccgttctacaagcgccggatctacaccaactcactgtccgcaggactcattgtcaggagttgggggagacgttcaggaggcatttgctcaagccgaggaaggggcagaagaggaggaggagaaaatgcagaatgggaaagaccgcggatag

SEQ ID NO: 227428 - DNA, 1704 bp, Artificial Sequence
  derived and/or modified sequence
atgatcgaggagagcggcaacaagagaaagaccatggccgagaagagacagctgttcatcgagatgagagcccagaacttcgacgtgatcagactgagcacctacagaaccgcctgcaagctgagattcgtgcagaagagatgcaacctgcacctggtggacatctggaacatgatcgaggccttcagagacaacggcctgaacaccctggaccacaccaccgagatcagcgtgagcagactggagaccgtgatcagcagcatctactaccagctgaacaagagactgcccagcacccaccagatcagcgtggagcagagcatcagcctgctgctgaacttcatgatcgccgcctacgacagcgagggcagaggcaagctgaccgtgttcagcgtgaaggccatgctggccaccatgtgcggcggcaagatgctggacaagctgagatacgtgttcagccagatgagcgacagcaacggcctgatgatcttcagcaagttcgaccagttcctgaaggaggtgctgaagctgcccaccgccgtgttcgagggccccagcttcggctacaccgagcacagcgtgagaacctgcttcccccagcagagaaagatcatgctgaacatgttcctggacaccatgatggccgacccccccccccagtgcctggtgtggctgcccctgatgcacagactggcccacgtggagaacgtgttccaccccgtggagtgcagctactgcagatgcgagagcatgatgggcttcagatacagatgccagcagtgccacaactaccagctgtgccagaactgcttctggagaggccacgccggcggcccccacagcaaccagcaccagatgaaggagcacagcagctggaagagccccgccaagaagctgagccacgccatcagcaagagcctgggctgcgtgcccaccagagagcccccccaccccgtgttccccgagcagcccgagaagcccctggacctggcccacatcgtgccccccagacccctgaccaacatgaacgacaccatggtgagccacatgagcagcggcgtgcccacccccaccaagagcgtgctggacagccccagcagactggacgaggagcacagactgatcgccagatacgccgccagactggccgccgaggccggcaacgtgaccagaccccccaccgacctgagcttcaacttcgacgccaacaagcagcagagacagctgatcgccgagctggagaacaagaacagagagatcctgcaggagatccagagactgagactggagcacgagcaggccagccagcccacccccgagaaggcccagcagaaccccaccctgctggccgagctgagactgctgagacagagaaaggacgagctggagcagagaatgagcgccctgcaggagagcagaagagagctgatggtgcagctggaggagctgatgaagctgctgaaggaggaggagcagaagcaggccgcccaggccaccggcagcccccacaccagccccacccacggcggcggcagacccatgcccatgcccgtgagaagcaccagcgccggcagcacccccacccactgcccccaggacagcctgagcggcgtgggcggcgacgtgcaggaggccttcgcccaggccgaggagggcgccgaggaggaggaggagaagatgcagaacggcaaggacagaggctag

SEQ ID NO: 227429 - DNA, 2294 bp, Artificial Sequence
  derived and/or modified sequence
gggcgcgcgcccgcccatccgccctccgccctccgccctcgcgccctcgcgccgggggcgggcgctgcgcgtgccgggcggagaagcggcgcgagccgggcgctgcgaacgttcgccgcgggggtggctccggggcctgagtaggcgctgccgctgcctcagccgagggggctgggccggagcgtgcggaggagtgaggccgcaggagaccttcccgacgacccctgctccggcggggaagtgagcaaggatgattgaggaaagtgggaacaagcggaagaccatggcagagaagaggcagctgttcatagaaatgcgtgctcagaattttgatgtcatacgactatcaacttacagaacagcctgcaaattacgatttgtacaaaaacgatgcaaccttcatcttgttgatatctggaacatgattgaagccttccgagacaatggccttaatacactggaccataccaccgagatcagtgtgtcccgcctcgaaactgtcatctcctccatctactatcagttgaacaagcgccttccttctactcaccaaattagtgtggaacaatctatcagcctcctcctcaactttatgattgctgcatatgacagtgagggccgaggcaagttgacggtattttcagttaaagctatgttagcaaccatgtgtggtggaaaaatgctggacaaattgagatatgttttctcccagatgtcagattccaatggcttaatgatatttagcaagtttgaccagtttctgaaggaagttctgaagctcccaacagctgtctttgaagggccatcttttggttacacagagcactcagtccgcacctgttttccacagcagagaaagataatgctaaatatgtttttagacacaatgatggctgaccctcctccccagtgccttgtctggctacctctcatgcacaggcttgcccatgttgagaatgtcttccatcccgtggagtgctcctactgccgatgtgagagtatgatgggtttccggtaccgatgccagcagtgccacaactatcagctctgccagaattgcttttggcgtggccatgccggcggccctcacagcaaccagcaccagatgaaggagcattcctcttggaaatctcctgcaaagaagctgagccatgcaattagtaaatctttggggtgtgtacccacgagagaacccccgcatcctgtttttcctgagcaaccagagaaaccacttgaccttgcacatatagttcctcctcgccctctgactaatatgaatgacaccatggttagccacatgtcctctggagtgcccactcccaccaagagtgttctggacagtcctagccgactggatgaggaacaccgtcttatagctcgctatgctgcccggctggctgcagaagcaggaaacgtgactcgtcctcccactgacttgagctttaactttgatgccaacaaacaacaaagacagcttattgcagaactggaaaacaaaaacagagagatcctgcaggagattcagcgtctccgcctggaacacgagcaggcctcccagcccacccctgagaaggcacagcagaaccccacgctgctggcagagctgcggctgctgaggcaaaggaaggatgaactggagcagaggatgtcggccctgcaggagagcaggcgggagctgatggtccagctggaagagctgatgaagttgctgaaggaggaagagcaaaagcaggcagctcaggccacagggtcaccacatacatcgcccacccatggaggcggccggccaatgcccatgccagtgcgctccacgtctgccggctccacccccacccactgtccgcaggactcgctgagcggagtcgggggagacgtgcaggaggccttcgcacaagcagaggaaggtgcagaggaagaagaagagaagatgcagaatgggaaagacagaggttagcagaggagccggacacagaggaagctcaggcacagaggacgaggagcaagctggcgccgacatggcgaaggcaaggtcttcccccagaggcacattcctctccatctttccaccgcacacctggaccaggcttgcaggctgccagacgtcactccacccgccagggagaggggagccagagccggtgggaagcggggaggggctgcgtggcacagctagtgggcctccccctgcacagccctgcatgtactagcaccttcatcactcccctcagggcatggtctcatctccgcatcaggaattcacctggaggttgaaaagagaaaagaaaaagcaccaa

SEQ ID NO: 227430 - protein, 1418 aa, Artificial Sequence
  derived and/or modified sequence
MIRLGAPQTLVLLTLLVAAVLRCQGQDVRQPGPKGQKGEPGDIKDIVGPKGPPGPQGPAGEQGPRGDRGDKGEKGAPGPRGRDGEPGTPGNPGPPGPPGPPGPPGLGGNFAAQMAGGFDEKAGGAQLGVMQGPMGPMGPRGPPGPAGAPGPQGFQGNPGEPGEPGVSGPMGPRGPPGPPGKPGDDGEAGKPGKAGERGPPGPQGARGFPGTPGLPGVKGHRGYPGLDGAKGEAGAPGVKGESGSPGENGSPGPMGPRGLPGERGRTGPAGAAGARGNDGQPGPAGPPGPVGPAGGPGFPGAPGAKGEAGPTGARGPEGAQGPRGEPGTPGSPGPAGASGNPGTDGIPGAKGSAGAPGIAGAPGFPGPRGPPGPQGATGPLGPKGQTGEPGIAGFKGEQGPKGEPGPAGPQGAPGPAGEEGKRGARGEPGGVGPIGPPGERGAPGNRGFPGQDGLAGPKGAPGERGPSGLAGPKGANGDPGRPGEPGLPGARGLTGRPGDAGPQGKVGPSGAPGEDGRPGPPGPQGARGQPGVMGFPGPKGANGEPGKAGEKGLPGAPGLRGLPGKDGETGAAGPPGPAGPAGERGEQGAPGPSGFQGLPGPPGPPGEGGKPGDQGVPGEAGAPGLVGPRGERGFPGERGSPGAQGLQGPRGLPGTPGTDGPKGASGPAGPPGAQGPPGLQGMPGERGAAGIAGPKGDRGDVGEKGPEGAPGKDGGRGLTGPIGPPGPAGANGEKGEVGPPGPAGSAGARGAPGERGETGPPGPAGFAGPPGADGQPGAKGEQGEAGQKGDAGAPGPQGPSGAPGPQGPTGVTGPKGARGAQGPPGATGFPGAAGRVGPPGSNGNPGPPGPPGPSGKDGPKGARGDSGPPGRAGEPGLQGPAGPPGEKGEPGDDGPSGAEGPPGPQGLAGQRGIVGLPGQRGERGFPGLPGPSGEPGKQGAPGASGDRGPPGPVGPPGLTGPAGEPGREGSPGADGPPGRDGAAGVKGDRGETGAVGAPGAPGPPGSPGPAGPTGKQGDRGEAGAQGPMGPSGPAGARGIQGPQGPRGDKGEAGEPGERGLKGHRGFTGLQGLPGPPGPSGDQGASGPAGPSGPRGPPGPVGPSGKDGANGIPGPIGPPGPRGRSGETGPAGPPGNPGPPGPPGPPGPGIDMSAFAGLGPREKGPDPLQYMRADQAAGGLRQHDAEVDATLKSLNNQIESIRSPEGSRKNPARTCRDLKLCHPEWKSGDYWIDPNQGCTLDAMKVFCNMETGETCVYPNPANVPKKNWWSSKSKEKKHIWFGETINGGFHFSYGDDNLAPNTANVQMTFLRLLSTEGSQNITYHCKNSIAYLDEAAGNLKKALLIQGSNDVEIRAEGNSRFTYTALKDGCTKHTGKWGKTVIEYRSQKTSRLPIIDIAPMDIGGPEQEFGVDIGPVCFL

SEQ ID NO: 227431 - protein, 1418 aa, Artificial Sequence
  derived and/or modified sequence
MIRLGAPQTLVLLTLLVAAVLRCQGQDVRKPAPALEPAAPGSLSQIVGPKGPPGPQGPAGEQGPRGDRGDKGEKGAPGPRGRDGEPGTPGNPGPPGPPGPPGPPGLGGNFAAQMAGGFDEKAGGAQLGVMQGPMGPMGPRGPPGPAGAPGPQGFQGNPGEPGEPGVSGPMGPRGPPGPPGKPGDDGEAGKPGKAGERGPPGPQGARGFPGTPGLPGVKGHRGYPGLDGAKGEAGAPGVKGESGSPGENGSPGPMGPRGLPGERGRTGPAGAAGARGNDGQPGPAGPPGPVGPAGGPGFPGAPGAKGEAGPTGARGPEGAQGPRGEPGTPGSPGPAGASGNPGTDGIPGAKGSAGAPGIAGAPGFPGPRGPPGPQGATGPLGPKGQTGEPGIAGFKGEQGPKGEPGPAGPQGAPGPAGEEGKRGARGEPGGVGPIGPPGERGAPGNRGFPGQDGLAGPKGAPGERGPSGLAGPKGANGDPGRPGEPGLPGARGLTGRPGDAGPQGKVGPSGAPGEDGRPGPPGPQGARGQPGVMGFPGPKGANGEPGKAGEKGLPGAPGLRGLPGKDGETGAAGPPGPAGPAGERGEQGAPGPSGFQGLPGPPGPPGEGGKPGDQGVPGEAGAPGLVGPRGERGFPGERGSPGAQGLQGPRGLPGTPGTDGPKGASGPAGPPGAQGPPGLQGMPGERGAAGIAGPKGDRGDVGEKGPEGAPGKDGGRGLTGPIGPPGPAGANGEKGEVGPPGPAGSAGARGAPGERGETGPPGPAGFAGPPGADGQPGAKGEQGEAGQKGDAGAPGPQGPSGAPGPQGPTGVTGPKGARGAQGPPGATGFPGAAGRVGPPGSNGNPGPPGPPGPSGKDGPKGARGDSGPPGRAGEPGLQGPAGPPGEKGEPGDDGPSGAEGPPGPQGLAGQRGIVGLPGQRGERGFPGLPGPSGEPGKQGAPGASGDRGPPGPVGPPGLTGPAGEPGREGSPGADGPPGRDGAAGVKGDRGETGAVGAPGAPGPPGSPGPAGPTGKQGDRGEAGAQGPMGPSGPAGARGIQGPQGPRGDKGEAGEPGERGLKGHRGFTGLQGLPGPPGPSGDQGASGPAGPSGPRGPPGPVGPSGKDGANGIPGPIGPPGPRGRSGETGPAGPPGNPGPPGPPGPPGPGIDMSAFAGLGPREKGPDPLQYMRADQAAGGLRQHDAEVDATLKSLNNQIESIRSPEGSRKNPARTCRDLKLCHPEWKSGDYWIDPNQGCTLDAMKVFCNMETGETCVYPNPANVPKKNWWSSKSKEKKHIWFGETINGGFHFSYGDDNLAPNTANVQMTFLRLLSTEGSQNITYHCKNSIAYLDEAAGNLKKALLIQGSNDVEIRAEGNSRFTYTALKDGCTKHTGKWGKTVIEYRSQKTSRLPIIDIAPMDIGGPEQEFGVDIGPVCFL

SEQ ID NO: 227432 - protein, 563 aa, Artificial Sequence
  derived and/or modified sequence
MDDFERRRELRRQKREEMRLEAERIAYQRNDDDEEEAARERRRRARQERLRQKQEEESLGQVTDQVEVNAQNSVPDEEAKTTTTNTQVEGDDEAAFLERLARREERRQKRLQEALERQKEFDPTITDASLSLPSRRMQNDTAENETTEKEEKSESRQERYEIEETETVTKSYQKNDWRDAEENKKEDKEKEEEEEEKPKRGSIGENQGEEKGTKVQAKREKLQEDKPTFKKEEIKDEKIKKDKEPKEEVKSFMDRKKGFTEVKSQNGEFMTHKLKHTENTFSRPGGRASVDTKEAEGAPQVEAGKRLEELRRRRGETESEEFEKLKQKQQEAALELEELKKKREERRKVLEEEEQRRKQEEADRKLREEEEKRRLKEEIERRRAEAAEKRQKMPEDGLSDDKKPFKCFTPKGSSLKIEERAEFLNKSVQKSGVKSTHQAAIVSKIDSRLEQYTSAIEGTKSAKPTKPAASDLPVPAEGVRNIKSMWEKGNVFSSPTAAGTPNKETAGLKVGVSSRINEWLTKTPDGNKSPAPKPSDLRPGDVSSKRNLWEKQSVDKVTSPTKV

SEQ ID NO: 227433 - protein, 175 aa, Artificial Sequence
  derived and/or modified sequence
MPEDGLSDDKKPFKCFTPKGSSLKIEERAEFLNKSVQKSGVKSTHQAAIVSKIDSRLEQYTSAIEGTKSAKPTKPAASDLPVPAEGVRNIKSMWEKGNVFSSPTAAGTPNKETAGLKVGVSSRINEWLTKTPDGNKSPAPKPSLTFCSSLFGLWLIGNLLLLPSFLPLLPEWVFL

SEQ ID NO: 227434 - DNA, 2163 bp, Artificial Sequence
  derived and/or modified sequence
gatttcctgagcatgcctagggaatgacaggcatctccacaggcaggctgcatccaccttggctggggtgtcgtcattggctgcctattagaaaaacgacaggacaatgcataccaccgcctcccgactgtaaacataggggatatgtgttcacttagcatggacttctgggaggggccaaggaagggcggtctggagttttattgaatagagcagtgtgtattcggctgcctgcctgcccgcctgcttgctctctggctgtgctcctgcttaaagaaatcagtccttcctttccgacttagtcctcgggaagaagtttcagactacaaggtatcattggaacatttcaagatcatcaaatcaaattccacagggattggtgaccaaccagaaggctcagacatctgattgctgacctgtccagacatcatctggtctccctgaacctgaaatcacaccatggatgattttgagcgtcgcagagaacttagaaggcaaaagagggaggagatgcgactcgaagcagaaagaatcgcctaccagaggaatgacgatgatgaagaggaggcagcccgggaacggcgccgccgagcccgacaggaacggctgcggcagaagcaggaggaagaatccttgggacaggtgaccgaccaggtggaggtgaatgcccagaacagtgtgcctgacgaggaggccaagacaaccaccacaaacactcaagtggaaggggatgatgaggccgcattcctggagcgcctggctcggcgtgaggaaagacgccaaaaacgccttcaggaggctctggagcggcagaaggagttcgacccaacaataacagatgcaagtctgtcgctcccaagcagaagaatgcaaaatgacacagcagaaaatgaaactaccgagaaggaagaaaaaagtgaaagtcgccaagaaagatacgagatagaggaaacagaaacagtcaccaagtcctaccagaagaatgattggagggatgctgaagaaaacaagaaagaagacaaggaaaaggaggaggaggaagaggagaagccaaagcgagggagcattggagaaaatcagggagaagagaagggaactaaagtgcaagctaaaagagaaaagctccaagaagacaagcctaccttcaaaaaagaagagatcaaagatgaaaagattaaaaaggacaaagaacccaaagaagaagttaagagcttcatggatcgaaagaagggatttacagaagttaagtcgcagaatggagaattcatgacccacaaacttaaacatactgagaatactttcagccgccctggagggagggccagcgtggacaccaaggaggctgagggcgccccccaggtggaagccggcaaaaggctggaggagcttcgtcgtcgtcgcggggagaccgagagcgaagagttcgagaagctcaaacagaagcagcaggaggcggctttggagctggaggaactcaagaaaaagagggaggagagaaggaaggtcctggaggaggaagagcagaggaggaagcaggaggaagccgatcgaaaactcagagaggaggaagagaagaggaggctaaaggaagagattgaaaggcgaagagcagaagctgctgagaaacgccagaagatgccagaagatggcttgtcagatgacaagaaaccattcaagtgtttcactcctaaaggttcatctctcaagatagaagagcgagcagaatttttgaataagtctgtgcagaaaagtggtgtcaaatcgacccatcaagcagcaatagtctccaagattgacagcagactggagcagtataccagtgcaattgagggaacaaaaagcgcaaaacctacaaagccggcagcctcggatcttcctgttcctgctgaaggtgtacgcaacatcaagagtatgtgggagaaagggaatgtgttttcatcccccactgcagcaggcacaccaaataaggaaactgctggcttgaaggtaggggtttctagccgcatcaatgaatggctaactaaaaccccagatggaaacaagtcacctgctcccaaaccttctctgaccttctgttcctcactctttggtctctggttgattggaaacctgcttctcctgccttcatttctccctcttcttccggagtgggtctttctctaa

SEQ ID NO: 227435 - protein, 435 aa, Artificial Sequence
  derived and/or modified sequence
MAAHLLPICALFLTLLDMAQGFRGPLLPNRPFTTVWNANTQWCLERHGVDVDVSVFDVVANPGQTFRGPDMTIFYSSQLGTYPYYTPTGEPVFGGLPQNASLIAHLARTFQDILAAIPAPDFSGLAVIDWEAWRPRWAFNWDTKDIYRQRSRALVQAQHPDWPAPQVEAVAQDQFQGAARAWMAGTLQLGRALRPRGLWGFYGFPDCYNYDFLSPNYTGQCPSGIRAQNDQLGWLWGQSRALYPSIYMPAVLEGTGKSQMYVQHRVAEAFRVAVAAGDPNLPVLPYVQIFYDTTNHFLPLDELEHSLGESAAQGAAGVVLWVSWENTRTKESCQAIKEYMDTTLGPFILNVTSGALLCSQALCSGHGRCVRRTSHPKALLLLNPASFSIQLTPGGGPLSLRGALSLEDQAQMAVEFKCRCYPGWQAPWCERKSMW

SEQ ID NO: 227436 - protein, 103 aa, Artificial Sequence
  derived and/or modified sequence
MAAHLLPICALFLTLLDMAQGFRGPLLPNRPFTTVWNANTQWCLERHGVDVDVSVFDVVANPGQTFRGPDMTIFYSSQLGTYPYYTPTGEPVFGGLPQNASLI

SEQ ID NO: 227437 - protein, 69 aa, Artificial Sequence
  derived and/or modified sequence
MAAHLLPICALFLTLLDMAQGFRGPLLPNRPFTTVWNANTQWCLERHGVDVDVSVFDVVANPGQTFRGP

SEQ ID NO: 227438 - protein, 253 aa, Artificial Sequence
  derived and/or modified sequence
MAGTLQLGRALRPRGLWGFYGFPDCYNYDFLSPNYTGQCPSGIRAQNDQLGWLWGQSRALYPSIYMPAVLEGTGKSQMYVQHRVAEAFRVAVAAGDPNLPVLPYVQIFYDTTNHFLPLDELEHSLGESAAQGAAGVVLWVSWENTRTKESCQAIKEYMDTTLGPFILNVTSGALLCSQALCSGHGRCVRRTSHPKALLLLNPASFSIQLTPGGGPLSLRGALSLEDQAQMAVEFKCRCYPGWQAPWCERKSMW

SEQ ID NO: 227439 - DNA, 1308 bp, Artificial Sequence
  derived and/or modified sequence
atggccgcccacctgctgcccatctgcgccctgttcctgaccctgctggacatggcccagggcttcagaggccccctgctgcccaacagacccttcaccaccgtgtggaacgccaacacccagtggtgcctggagagacacggcgtggacgtggacgtgagcgtgttcgacgtggtggccaaccccggccagaccttcagaggccccgacatgaccatcttctacagcagccagctgggcacctacccctactacacccccaccggcgagcccgtgttcggcggcctgccccagaacgccagcctgatcgcccacctggccagaaccttccaggacatcctggccgccatccccgcccccgacttcagcggcctggccgtgatcgactgggaggcctggagacccagatgggccttcaactgggacaccaaggacatctacagacagagaagcagagccctggtgcaggcccagcaccccgactggcccgccccccaggtggaggccgtggcccaggaccagttccagggcgccgccagagcctggatggccggcaccctgcagctgggcagagccctgagacccagaggcctgtggggcttctacggcttccccgactgctacaactacgacttcctgagccccaactacaccggccagtgccccagcggcatcagagcccagaacgaccagctgggctggctgtggggccagagcagagccctgtaccccagcatctacatgcccgccgtgctggagggcaccggcaagagccagatgtacgtgcagcacagagtggccgaggccttcagagtggccgtggccgccggcgaccccaacctgcccgtgctgccctacgtgcagatcttctacgacaccaccaaccacttcctgcccctggacgagctggagcacagcctgggcgagagcgccgcccagggcgccgccggcgtggtgctgtgggtgagctgggagaacaccagaaccaaggagagctgccaggccatcaaggagtacatggacaccaccctgggccccttcatcctgaacgtgaccagcggcgccctgctgtgcagccaggccctgtgcagcggccacggcagatgcgtgagaagaaccagccaccccaaggccctgctgctgctgaaccccgccagcttcagcatccagctgacccccggcggcggccccctgagcctgagaggcgccctgagcctggaggaccaggcccagatggccgtggagttcaagtgcagatgctaccccggctggcaggccccctggtgcgagagaaagagcatgtggtag

SEQ ID NO: 227440 - DNA, 1308 bp, Artificial Sequence
  derived and/or modified sequence
atggccgcccaccttcttccaatttgtgccctgttcttgacgctcctggacatggcccaggggtttcgagggccacttttgccgaatcgaccattcacaacagtatggaacgccaatacacagtggtgcctggaacggcacggggtggatgtggatgtaagtgtgttcgatgttgtcgcaaaccctggccagacatttaggggaccggacatgacaatattctacagcagtcagctgggcacttatccctattacaccccaacaggtgagccagtgtttggtgggctgcctcaaaacgccagccttatcgcccatttggctcgaacttttcaagacatactcgcggccattcccgcccctgactttagcggcctggccgtgatcgactgggaggcttggcgcccaagatgggcctttaattgggataccaaagacatctataggcagcggtctagggcgcttgtccaggcccaacatcccgactggcccgcaccacaagttgaggccgtggctcaggaccagttccagggtgctgcccgcgcctggatggctggaaccctgcagctgggccgcgctctccgccctagaggcctgtggggattctacggattccctgattgttacaattatgactttctgtctccgaactacacggggcagtgcccatccgggatacgtgcccagaatgatcagcttgggtggctgtggggacagtcgcgcgcgctctacccttccatttacatgccagccgtcctggagggcactgggaagtcccagatgtacgtgcaacaccgcgtagctgaggcctttcgggtggcagtggccgctggagatccaaatctacctgtgctgccctacgtccaaattttttacgacactacgaaccattttttacctctcgacgagctagagcactcactgggtgaaagtgccgcccaaggcgccgcaggcgtggtgctttgggtcagctgggaaaacactagaaccaaggaaagctgtcaggctatcaaagaatacatggatacaactctcggcccgttcatcttgaacgtgacatcgggtgctctcttgtgttctcaggccctgtgtagcggccacggtcggtgtgtgcgacgcaccagccatccaaaagctctcctgttactgaaccccgcatcgttcagtatccagctcaccccaggggggggacccctatcacttcgcggtgccctgtcactggaggaccaggcgcagatggcagtggaatttaaatgtagatgctatcctggctggcaggcaccttggtgtgaaagaaagtcaatgtggtag

SEQ ID NO: 227441 - DNA, 1308 bp, Artificial Sequence
  derived and/or modified sequence
atggcagcccacctgctcccgatttgtgccctctttctcacattgctggatatggcacaaggttttagaggaccactcctcccaaatcgtccctttaccacggtctggaacgcaaacactcaatggtgcttggaaaggcacggcgtggatgtggatgtcagtgtgtttgatgtcgtcgccaatccggggcagactttcagagggccagacatgaccatcttctacagttcccagttagggacctacccttactacacccccacaggtgaacccgtattcggtggcctccctcagaacgcctcactgatcgcccatcttgcccgcacatttcaggatatcttggctgcaatacccgcacctgacttttctggcctggctgtgatcgattgggaagcttggcgaccccgttgggcgttcaactgggatactaaggacatatatcgtcaacggagtcgtgctctcgtacaagctcaacatcctgactggccagcccctcaggtggaagccgtggcccaagatcagtttcaaggtgctgctcgcgcttggatggcaggcaccctccagctcgggagagctctgcggcctagaggtctatggggcttctatgggtttcctgattgttacaattacgattttttatcccccaattatactgggcaatgtccctctggcattcgagcccagaatgatcagttgggatggctctggggccagtcgagggcattgtatcccagtatttacatgcctgccgtgcttgaggggacaggaaagtcacaaatgtacgtccagcaccgagtggccgaagcttttagagtggctgtcgcagctggcgacccaaatctccccgtcctgccctacgtgcagatattctacgatactactaatcacttcctcccgctggacgagctggaacacagcctaggggagagtgccgctcaaggggcagccggggtggtattgtgggtctcgtgggagaacaccagaacaaaggagagctgccaagccatcaaagaatacatggacaccaccctcggccccttcatcctcaacgtgactagtggcgctctgctttgttcgcaggctctctgttcaggccacggtaggtgcgtgcgcagaacttcccacccaaaggcccttctcttgcttaatcccgccagcttttcaattcagctgacaccaggagggggccccctgagcttacggggcgctctcagccttgaagaccaggcacagatggccgtggagttcaagtgcaggtgctacccgggatggcaggcgccttggtgtgagcgaaaatccatgtggtag

SEQ ID NO: 227442 - DNA, 1308 bp, Artificial Sequence
  derived and/or modified sequence
atggccgcccacctgctgcccatctgtgccctcttcctgaccctgctggacatggcccagggcttccggggccccctgctgcccaaccggcccttcaccaccgtgtggaatgccaacacccagtggtgcctggagagacatggagtggatgtggatgtgtctgtgtttgatgtggtggccaaccctggccagaccttccggggccctgacatgaccatcttctacagcagccagctgggcacctacccctactacacccccaccggggagcctgtgtttggaggcctgccccagaatgccagcctgattgcccacctggcccggaccttccaggacatcctggccgccatcccagccccagacttcagcggcctggccgtcatcgactgggaggcctggaggccccgctgggccttcaactgggacaccaaggacatctaccggcagaggagccgggccctggtgcaggcccagcacccagactggccagccccccaggtggaggccgtggcccaggaccagttccagggcgccgcccgggcctggatggccggcaccctgcagctgggccgggccctgcggccccggggcctgtggggcttctacggcttcccagactgctacaactatgacttcctgagccccaactacacaggccagtgccccagcggcatccgggcccagaatgaccagctgggctggctgtggggccagagccgggccctgtaccccagcatctacatgcctgctgtgctggagggcaccgggaagagccagatgtatgtgcagcaccgggtggccgaggccttccgggtggccgtggccgccggggaccccaacctgcctgtgctgccctacgtgcagatcttctatgacaccaccaaccacttcctgcccctggatgagctggagcacagcctgggggagagcgctgcccagggcgccgccggcgtggtgctgtgggtgtcctgggagaacaccaggaccaaggagagctgccaggccatcaaggagtacatggacaccaccctgggccccttcatcctgaatgtgaccagcggggccctgctgtgcagccaggccctgtgcagcggccacggccgctgtgtgcggaggaccagccaccccaaggccctgctgctgctgaacccagccagcttcagcatccagctgaccccaggcggcggccccctgagcctgcggggggccctgagcctggaggaccaggcccagatggctgtggagttcaagtgccgctgctacccaggctggcaggccccctggtgtgagaggaagtccatgtggtag

SEQ ID NO: 227443 - DNA, 2081 bp, Artificial Sequence
  derived and/or modified sequence
gggtggggtgaccccctacaaaagctcagaatttccagcagcggctccttcctccaggagtctctggtgcagctggggtggaatctggccaggccctgcttaggcccccatcctggggtcaggaaatttggaggataaggcccttcagccccaaggttgtcctcgaccagtcccgtgccatggcagcccacctgcttcccatctgcgccctcttcctgaccttactcgatatggcccaaggctttaggggccccttgctacccaaccggcccttcaccaccgtctggaatgcaaacacccagtggtgcctggagaggcacggtgtggacgtggatgtcagtgtcttcgatgtggtagccaacccagggcagaccttccgcggccctgacatgacaattttctatagctcccagctgggcacctacccctactacacgcccactggggagcctgtgtttggtggtctgccccagaatgccagcctgattgcccacctggcccgcacattccaggacatcctggctgccatacctgctcctgacttctcagggctggcagtcatcgactgggaggcatggcgcccacgctgggccttcaactgggacaccaaggacatttaccggcagcgctcacgggcactggtacaggcacagcaccctgattggccagctcctcaggtggaggcagtagcccaggaccagttccagggagctgcacgggcctggatggcaggcaccctccagctggggcgggcactgcgtcctcgcggcctctggggcttctatggcttccctgactgctacaactatgactttctaagccccaactacaccggccagtgcccatcaggcatccgtgcccaaaatgaccagctagggtggctgtggggccagagccgtgccctctatcccagcatctacatgcccgcagtgctggagggcacagggaagtcacagatgtatgtgcaacaccgtgtggccgaggcattccgtgtggctgtggctgctggtgaccccaatctgccggtgctgccctatgtccagatcttctatgacacgacaaaccactttctgcccctggatgagctggagcacagcctgggggagagtgcggcccagggggcagctggagtggtgctctgggtgagctgggaaaatacaagaaccaaggaatcatgtcaggccatcaaggagtatatggacactacactggggcccttcatcctgaacgtgaccagtggggcccttctctgcagtcaagccctgtgctccggccatggccgctgtgtccgccgcaccagccaccccaaagccctcctcctccttaaccctgccagtttctccatccagctcacgcctggtggtgggcccctgagcctgcggggtgccctctcacttgaagatcaggcacagatggctgtggagttcaaatgtcgatgctaccctggctggcaggcaccgtggtgtgagcggaagagcatgtggtgattggccacacactgagttgcacatattgagaacctaatgcactctgggtctggccagggcttcctcaaatacatgcacagtcatacaagtcatggtcacagtaaagagtacactcagccactgtcacaggcatattccctgcacacacatgcatacttacagactggaatagtggcataaggagttagaaccacagcagacaccattcattccatgtccatatgcatctacttggcaaggtcatagacaattcctccagagacactgagccagtctttgaactgcagcaatcacaaaggctgacattcactgagtgcctactctttgccaatccccgtgctaagcgttttatgtggacttattcattcctcacaatgaggctatgaggaaactgagtcactcacattgagagtaagcacgttgcccaaggttgcacagcaagaaaagggagaagttgagattcaaacccaggctgtctagctccgggggtacagcccttgcactcctactgagtttgtggtaaccagccctgcacgacccctgaatctgctgagaggcaccagtccagcaaataaagcagtcatgatttactta

SEQ ID NO: 227444 - DNA, 2324 bp, Artificial Sequence
  derived and/or modified sequence
agatgtggggagcgcctctgccctgtcgccccgtccgggatgtgaggagcgtctctccctggccgccccgtctgagaagtgaggagcccctccgcccagcagccgccctgtctgagaagctagtcttgaattcctgacctcaggtgatcctcccgcgttggcctcccaaagtgctgggattacaggcatgagccaccactcctggccccagaaagtgacattctttacttaccacaggaggaaaagatccacgaaagtaaagtgcctagggcccatcaatgtcagatgcagccacgtggacaaagaacactccctgagcacaagacacgaaagaacccggtctccagtgtcacaaacaggcctgcccagcagggtctgcccctgcccacctcctccagcctaggttgtcctcgaccagtcccgtgccatggcagcccacctgcttcccatctgcgccctcttcctgaccttactcgatatggcccaaggctttaggggccccttgctacccaaccggcccttcaccaccgtctggaatgcaaacacccagtggtgcctggagaggcacggtgtggacgtggatgtcagtgtcttcgatgtggtagccaacccagggcagaccttccgcggccctgacatgacaattttctatagctcccagctgggcacctacccctactacacgcccactggggagcctgtgtttggtggtctgccccagaatgccagcctgattgcccacctggcccgcacattccaggacatcctggctgccatacctgctcctgacttctcagggctggcagtcatcgactgggaggcatggcgcccacgctgggccttcaactgggacaccaaggacatttaccggcagcgctcacgggcactggtacaggcacagcaccctgattggccagctcctcaggtggaggcagtagcccaggaccagttccagggagctgcacgggcctggatggcaggcaccctccagctggggcgggcactgcgtcctcgcggcctctggggcttctatggcttccctgactgctacaactatgactttctaagccccaactacaccggccagtgcccatcaggcatccgtgcccaaaatgaccagctagggtggctgtggggccagagccgtgccctctatcccagcatctacatgcccgcagtgctggagggcacagggaagtcacagatgtatgtgcaacaccgtgtggccgaggcattccgtgtggctgtggctgctggtgaccccaatctgccggtgctgccctatgtccagatcttctatgacacgacaaaccactttctgcccctggatgagctggagcacagcctgggggagagtgcggcccagggggcagctggagtggtgctctgggtgagctgggaaaatacaagaaccaaggaatcatgtcaggccatcaaggagtatatggacactacactggggcccttcatcctgaacgtgaccagtggggcccttctctgcagtcaagccctgtgctccggccatggccgctgtgtccgccgcaccagccaccccaaagccctcctcctccttaaccctgccagtttctccatccagctcacgcctggtggtgggcccctgagcctgcggggtgccctctcacttgaagatcaggcacagatggctgtggagttcaaatgtcgatgctaccctggctggcaggcaccgtggtgtgagcggaagagcatgtggtgattggccacacactgagttgcacatattgagaacctaatgcactctgggtctggccagggcttcctcaaatacatgcacagtcatacaagtcatggtcacagtaaagagtacactcagccactgtcacaggcatattccctgcacacacatgcatacttacagactggaatagtggcataaggagttagaaccacagcagacaccattcattccatgtccatatgcatctacttggcaaggtcatagacaattcctccagagacactgagccagtctttgaactgcagcaatcacaaaggctgacattcactgagtgcctactctttgccaatccccgtgctaagcgttttatgtggacttattcattcctcacaatgaggctatgaggaaactgagtcactcacattgagagtaagcacgttgcccaaggttgcacagcaagaaaagggagaagttgagattcaaacccaggctgtctagctccgggggtacagcccttgcactcctactgagtttgtggtaaccagccctgcacgacccctgaatctgctgagaggcaccagtccagcaaataaagcagtcatgattt

SEQ ID NO: 227445 - DNA, 1308 bp, Artificial Sequence
  derived and/or modified sequence
atggccgcccacctgctgcccatctgcgccctgttcctgaccctgctggatatggcgcagggatttagaggtccactgctgcctaaccggccattcacaacagtttggaatgctaatacccagtggtgtttggaacggcacggagttgacgttgatgtgtccgtgttcgacgtcgtggcgaatcccggtcagaccttcagagggcctgatatgacgatcttttacagctctcagttagggacatatccgtactacacacccaccggagaaccagtgttcggagggctcccccagaatgctagcttgatagctcacctcgcaaggaccttccaggatatcctggcagcaatcccagctcctgacttcagtggcctggccgtcatagactgggaggcatggcggccccggtgggccttcaattgggatacaaaggatatttataggcagagatctcgagctcttgtccaggctcagcacccagattggccagcaccacaagtggaggccgtcgcccaggaccaattccaaggtgccgctcgcgcctggatggctggcaccctgcaactcggccgcgcacttcgccctcgcggactgtggggattctatggcttcccagactgttacaattatgatttcctgtcccccaattatactggacagtgcccctccgggatcagggcccagaatgaccaactcgggtggctctggggtcaatctagggccctgtacccctctatctacatgcctgccgttttggagggaactggtaagagccagatgtacgtccagcatagagtggctgaggcattccgtgtcgctgtggccgccggagacccaaacctgcccgtgcttccttacgtgcagattttttacgataccactaaccacttcctacccctggatgagctggaacactctctaggcgaatctgcggctcagggagctgccggcgttgtgctttgggtctcctgggagaatactagaaccaaagagagttgccaagctatcaaagaatacatggacactactctcggtccattcattctcaatgtcacctctggcgctctgctttgctcacaggcattgtgtagtgggcacgggcgatgcgtgcgtcgcacttcccatcccaaagctctgctactgttgaacccggcgagtttctctatacagctgacaccaggcgggggcccattaagcctgagaggcgccctcagcctggaggaccaggctcagatggctgtcgagtttaagtgcagatgctaccccggatggcaggctccgtggtgcgagagaaaatctatgtggtag

SEQ ID NO: 227446 - DNA, 1308 bp, Artificial Sequence
  derived and/or modified sequence
atggccgcccacctgctgcccatctgcgccctgttcctgaccctgctagacatggcgcagggttttcgcgggccattgcttccaaatcgccctttcactacagtatggaatgccaacactcagtggtgtttggagcggcacggcgtagacgtcgatgtctcggtttttgacgtggtggccaatcccggacagacgtttcgggggcccgacatgacaatcttctattcgtctcagctaggcacttacccatattacaccccaacaggagaacccgtctttggtggactcccccaaaacgcttctctgatcgcacacctagcaagaacatttcaggatatcctcgcggccattccagccccagatttctccgggctcgctgtcattgattgggaggcctggcgacctagatgggcctttaattgggacactaaggacatctatagacagaggtcaagagccctcgtgcaggcccagcatccggattggcctgccccgcaggttgaggcagtcgcccaagaccaattccagggcgcagcacgcgcatggatggcagggaccctgcagctcggccgagcactcaggccacgcggtttatggggcttctatggatttcccgactgctataattacgacttcttatctccgaactacactgggcagtgtccttctgggattcgcgctcagaatgatcagctcggctggttgtggggccaatcccgggccttataccccagcatttatatgcccgccgtgcttgagggaaccggtaagtctcagatgtacgtccagcaccgggtagctgaagcttttcgagtggctgtggctgctggggatcccaatctgcccgttctgccctacgtgcagattttctacgacaccactaaccacttccttcctctcgatgaactggagcattctctgggcgaaagcgccgcccagggagcagctggagtggtgctatgggtctcatgggaaaacactagaacgaaagagagctgtcaggcaattaaagaatacatggacactacgctcgggccattcatcttaaacgtgacctctggggcgttgctctgctcccaagccctgtgttctgggcatggccggtgcgtccggcgcacatcccaccccaaagcactcctactgctgaacccggcatctttcagtattcagcttaccccagggggtggccctttatcactccggggcgcactttccctcgaagaccaggcccagatggccgtggaattcaaatgccgatgctatcctggctggcaggccccatggtgcgaaaggaagtcaatgtggtag

SEQ ID NO: 227447 - DNA, 1308 bp, Artificial Sequence
  derived and/or modified sequence
atggccgctcacctcctgccgatttgcgcactgttccttaccttgctggatatggctcaaggctttcgtggcccactgcttcccaacaggccgttcacgacggtctggaatgctaatacccagtggtgtctcgagagacatggagttgacgtggacgtgtccgttttcgatgtcgtcgctaatcctgggcagacattccgtggacccgacatgacaattttctacagctctcagctgggcacatacccctattacacgcccactggcgagcctgtgttcggtgggttgccccagaacgcgtctctgattgcacacctcgcacgaaccttccaggacatcttagccgcaatcccggcaccggattttagcggcctggccgtgatcgactgggaagcctggcgaccgagatgggcgtttaactgggataccaaagacatctatcgtcagcgttcacgcgcactggtacaagcccaacaccccgactggcccgctccccaggtggaagccgtggcccaagaccagttccagggagccgctagagcctggatggctggaactctacagctagggagggctctgcgccctaggggcctctggggcttctatgggttccctgattgctataattatgatttcttgtcgccaaattacactgggcagtgcccaagcgggattagagcccagaacgaccagttgggatggctctgggggcaaagcagggctctttatccatctatctacatgcccgctgtgctggaaggcacaggtaagtcacagatgtatgtgcaacatagggtcgcagaagcttttagggtcgccgtggcagcgggtgacccgaacctacctgtcctcccttacgtccagattttttatgataccactaatcattttctccctttggacgaactggaacacagcttgggagagtccgcggctcagggggcagctggagttgtactgtgggtctcctgggagaatacacgaacaaaagaatcgtgccaggccattaaggagtatatggatacaacactgggcccttttattctcaacgttactagcggtgccctgctttgctcccaggctttatgctcaggccatggcagatgtgtgcgcagaacgtctcaccccaaagcacttttgttactgaatcctgcctcattctcaatacagctcacccccggtggaggtcccctgtccctgaggggtgcactctccctggaggaccaggctcaaatggctgtagaatttaagtgtagatgctatcccggttggcaggcaccctggtgtgagcgaaagtctatgtggtag

SEQ ID NO: 227448 - DNA, 1308 bp, Artificial Sequence
  derived and/or modified sequence
atggctgcccacctcctgcccatctgcgctctgttccttacattactcgacatggctcaaggctttcgtggacccctcctgccaaacaggcccttcactaccgtctggaacgcaaatacgcagtggtgcctggaacgacatggggtggacgtagatgtttcggtgtttgacgtggtggcaaaccccggacaaacattcaggggcccagatatgacaatcttctactcctcgcagctgggcacctacccatactacactccgacaggggagcccgtgtttggcggactgccccagaatgcttctcttatagcacacctcgccaggacttttcaggatatcttggccgctatccctgcccctgacttctcaggcctggccgtgattgattgggaggcttggcgtccacgatgggcattcaactgggataccaaggatatttatcggcagaggtcccgagcactggttcaggcgcaacaccccgactggccagcacctcaggtcgaagcggtcgcccaggaccaatttcagggcgcagcgagagcttggatggccggtactctgcagcttggtagagcgctccgacctcgtggtctctggggtttctacggcttcccagactgttataactacgatttcctgagtcccaactatacgggtcaatgcccttctgggataagggctcagaatgaccagttgggctggctctggggccagagccgggctctctatcccagcatttatatgccagccgtgcttgaaggtactggcaagagccagatgtatgtacagcatagagttgcggaagcattccgcgtggccgtcgccgctggtgaccccaatctgcctgtcctgccttatgtgcagattttctatgacaccactaatcattttttgcccctggacgagctcgaacactctttgggtgagagcgctgcccagggggctgccggtgtcgtactgtgggtgagttgggagaatacccggactaaggaaagctgccaggctattaaggagtacatggacacaactcttggtcctttcattctgaatgttacatccggtgccctactctgttcacaggccttatgctccgggcatgggagatgcgtgaggagaacatcccatcccaaggcactcctccttttaaatcccgctagcttttccatccagctgaccccgggtggagggcctctcagcctgcgcggagcactgagcttggaggatcaagcccaaatggcagtcgaatttaaatgcaggtgttaccccggatggcaagctccatggtgtgagagaaagtctatgtggtag

SEQ ID NO: 227449 - DNA, 1308 bp, Artificial Sequence
  derived and/or modified sequence
atggcagctcatctgctgcctatttgtgctctcttccttacgttgcttgatatggcccagggttttcggggccccttattgccaaaccggccttttacaacagtgtggaacgccaatacacagtggtgcctggaacgccacggggtggacgtcgacgtatctgtctttgatgtggtggctaacccaggccaaacattcaggggacccgacatgaccatcttttattcttcacaactcggcacttacccctactatactcccaccggcgaaccagttttcgggggtctgcctcaaaatgccagtctaatagcccatcttgctcggacctttcaggatatcctcgccgccatcccagccccagacttctctggcctcgccgtgatcgactgggaagcatggagaccgaggtgggccttcaattgggatacgaaagacatctaccgacaacggagtagggcgcttgtacaagcacagcaccccgactggcccgccccccaagtggaggctgtggcccaggaccaatttcagggtgccgctcgtgcgtggatggctgggactttacagctcggtcgtgccctgaggcccagagggttgtggggcttttatgggttcccagattgctacaactacgactttctctcgccaaactacaccggccagtgtccgtcagggatcagagcccagaacgaccagttaggatggctctggggccagtcccgggccttgtacccgagtatttatatgcctgccgtcctcgagggcactggtaaatctcagatgtacgttcagcacagggtggccgaggcctttagagttgccgtggccgcaggcgatccaaacctccccgtccttccctatgtgcaaattttctatgataccacaaaccattttctgcctctggacgagctagaacactccctcggagagtctgcggcacaaggcgctgctggggttgtactatgggtttcatgggagaacacccgcactaaagaatcttgtcaggctataaaggagtacatggacaccacactcggcccgttcattttaaatgtgacctccggggctctcctgtgttcacaggcactctgtagtgggcacggccgatgtgtgcgccggacatcgcatcccaaggctctgttgcttttgaatcccgcttcgttttcgatccagctcactccggggggcggtccactgtctctaagaggcgccctctcattagaggatcaggcccaaatggccgtggaattcaagtgtaggtgctatccaggctggcaagctccctggtgcgaacggaaaagcatgtggtag

SEQ ID NO: 227450 - DNA, 1308 bp, Artificial Sequence
  derived and/or modified sequence
atggcggcacacctgctgccaatttgcgctctctttttgaccttgctggacatggctcagggctttcgcgggccacttctccctaacaggcctttcactacagtatggaatgctaatacccagtggtgccttgaacggcacggggttgatgtagatgttagcgtctttgacgtggtggctaacccagggcagacgttccgcggcccagatatgacgatattctattcttcccagctcggaacctatccatattacacccccactggcgagccggtgttcggtggcctgccccagaacgcttccttaatagcacacctggcccggactttccaggatattctagccgcaatccccgctcccgacttttcaggtctggcagtcatcgactgggaggcttggcgccccagatgggccttcaattgggacacgaaggatatctatagacaacgcagtagagctctggttcaagcccagcaccctgactggccagctccccaggtagaggccgtggcccaagatcagttccagggtgccgcacgcgcctggatggctggcacattgcaacttggccgcgcccttcggcctcgtggattatggggtttttatggattccctgattgttacaattacgattttctcagcccaaattacaccggccagtgtccgtccggtattcgcgcccagaacgatcagcttggatggctgtggggccagtcaagggcgctttaccctagcatatatatgcctgccgtcttagaaggcaccggtaagagccagatgtacgtgcagcacagagtggccgaggcattccgcgtggccgtagccgcaggcgatcccaacctgcctgtgctgccatatgtgcagatcttctacgacactactaaccattttcttccgctagacgagctggaacacagtcttggtgagtctgccgcgcagggtgccgctggcgtggtgctgtgggtgtcctgggaaaacacaaggaccaaggagtcatgccaggctattaaagaatacatggacacgacacttggtccttttattctcaatgtgacctctggagccctcttatgctcccaagccttatgctctggccacggacgctgcgtgcgtaggacttcgcatcccaaggcactccttctgctgaacccagcgagcttttccatccagctgacaccgggcggcggcccactctctctgcgcggagcgttgtccctggaggaccaagcccagatggccgtagagttcaaatgtcgctgctatcccgggtggcaggcaccttggtgcgaacgaaagagcatgtggtag

SEQ ID NO: 227451 - DNA, 1308 bp, Artificial Sequence
  derived and/or modified sequence
atggccgcccatctgcttccaatatgtgcactcttcctgaccctgctagacatggcacagggattcaggggtcccctcttaccaaataggcctttcactacagtttggaatgccaatactcagtggtgtctagaacgacacggagtagatgtcgatgtgagcgtgttcgacgtcgtggctaatcccgggcagactttccgaggccccgatatgacaattttttactcctcacagttgggtacatatccatattacaccccaacaggtgagcccgtcttcggaggtctcccccaaaacgcgtcccttatcgctcatctggcacgcactttccaagacattctagcggccattcccgccccagacttcagcgggctggccgttattgattgggaagcatggcgacccaggtgggcgttcaattgggataccaaagacatttacaggcagagatcccgcgctctggtccaggctcagcacccagactggccagcgccacaggttgaggcagtggcacaagaccagtttcagggagctgcgcgggcctggatggctggtacgctgcagttaggacgggccttgaggcctaggggcctatggggtttctatggatttccagactgctacaattacgactttttgagcccaaattacactggccagtgtccatctgggattagagctcagaatgatcaactcgggtggctttggggccagtcccgcgccctgtacccctctatttatatgcctgccgtcctggaagggacaggcaagagtcaaatgtacgttcagcatagagtcgcagaggccttccgcgtggccgtagctgctggcgaccctaacctgccagtgctgccctatgtgcagatcttttatgacacaactaatcacttcctccctttagatgagcttgaacactcccttggcgagagtgccgctcagggagccgctggagtcgtgctgtgggtaagttgggaaaacactcggacgaaagaatcttgtcaggcaatcaaggaatatatggataccactttggggccgttcattttgaacgtgacctcgggagctttgctttgtagccaggctttgtgtagcggccatggaaggtgcgttcgcaggacttcccatcctaaggccctgctgctgctgaaccccgcttccttcagcattcagctaacacctggcgggggtccactgagtctgaggggagctctttcccttgaggatcaggcccaaatggctgtcgagttcaagtgtcgctgttaccccggatggcaggccccatggtgcgagaggaagtcgatgtggtag

SEQ ID NO: 227452 - DNA, 2517 bp, Artificial Sequence
  derived and/or modified sequence
ttcctccaggagtctctggtgcagctggggtggaatctggccaggccctgcttaggcccccatcctggggtcaggaaatttggaggataaggcccttcagccccaaggtcagcagggacgagcgggcagactggcgggtgtacaggagggctgggttgacctgtccttggtcactgaggccattggatcttcctccagtggctgccaggatttctggtggaagagacaggaaggcctcccccccttggtcgggtcagcctgggggctgagggcctggctgtcagccactcttcccagaacatatgtcatggcctcagtggctcatggggaagcaggggtgggcgagcttaggctagagcaagtcctgtgggagatggcagaggcctggtctgagaggcaactcggatgtgccctccagtggccatgctcccctccatgcgtctcccctgccctcctggagccctgcaggtcaatgtttaacagaaaccagagcagcggtggattaatgcgcaagggctcagccccccagccctgagcagtgggggaatcggagactttgcaacctgttctcagctctgcctcccctggccaggttgtcctcgaccagtcccgtgccatggcagcccacctgcttcccatctgcgccctcttcctgaccttactcgatatggcccaaggctttaggggccccttgctacccaaccggcccttcaccaccgtctggaatgcaaacacccagtggtgcctggagaggcacggtgtggacgtggatgtcagtgtcttcgatgtggtagccaacccagggcagaccttccgcggccctgacatgacaattttctatagctcccagctgggcacctacccctactacacgcccactggggagcctgtgtttggtggtctgccccagaatgccagcctgattgcccacctggcccgcacattccaggacatcctggctgccatacctgctcctgacttctcagggctggcagtcatcgactgggaggcatggcgcccacgctgggccttcaactgggacaccaaggacatttaccggcagcgctcacgggcactggtacaggcacagcaccctgattggccagctcctcaggtggaggcagtagcccaggaccagttccagggagctgcacgggcctggatggcaggcaccctccagctggggcgggcactgcgtcctcgcggcctctggggcttctatggcttccctgactgctacaactatgactttctaagccccaactacaccggccagtgcccatcaggcatccgtgcccaaaatgaccagctagggtggctgtggggccagagccgtgccctctatcccagcatctacatgcccgcagtgctggagggcacagggaagtcacagatgtatgtgcaacaccgtgtggccgaggcattccgtgtggctgtggctgctggtgaccccaatctgccggtgctgccctatgtccagatcttctatgacacgacaaaccactttctgcccctggatgagctggagcacagcctgggggagagtgcggcccagggggcagctggagtggtgctctgggtgagctgggaaaatacaagaaccaaggaatcatgtcaggccatcaaggagtatatggacactacactggggcccttcatcctgaacgtgaccagtggggcccttctctgcagtcaagccctgtgctccggccatggccgctgtgtccgccgcaccagccaccccaaagccctcctcctccttaaccctgccagtttctccatccagctcacgcctggtggtgggcccctgagcctgcggggtgccctctcacttgaagatcaggcacagatggctgtggagttcaaatgtcgatgctaccctggctggcaggcaccgtggtgtgagcggaagagcatgtggtgattggccacacactgagttgcacatattgagaacctaatgcactctgggtctggccagggcttcctcaaatacatgcacagtcatacaagtcatggtcacagtaaagagtacactcagccactgtcacaggcatattccctgcacacacatgcatacttacagactggaatagtggcataaggagttagaaccacagcagacaccattcattccatgtccatatgcatctacttggcaaggtcatagacaattcctccagagacactgagccagtctttgaactgcagcaatcacaaaggctgacattcactgagtgcctactctttgccaatccccgtgctaagcgttttatgtggacttattcattcctcacaatgaggctatgaggaaactgagtcactcacattgagagtaagcacgttgcccaaggttgcacagcaagaaaagggagaagttgagattcaaacccaggctgtctagctccgggggtacagcccttgcactcctactgagtttgtggtaaccagccctgcacgacccctgaatctgctgagaggcaccagtccagcaaataaagcagtcatgatttactt

SEQ ID NO: 227453 - DNA, 1084 bp, Artificial Sequence
  derived and/or modified sequence
cttcctccaggagtctctggtgcagctggggtggaatctggccaggccctgcttaggcccccatcctggggtcaggaaatttggaggataaggcccttcagccccaaggacatcctggctgccatacctgctcctgacttctcagggctggcagtcatcgactgggaggcatggcgcccacgctgggccttcaactgggacaccaaggacatttaccggcagcgctcacgggcactggtacaggcacagcaccctgattggccagctcctcaggtggaggcagtagcccaggaccagttccagggagctgcacgggcctggatggcaggcaccctccagctggggcgggcactgcgtcctcgcggcctctggggcttctatggcttccctgactgctacaactatgactttctaagccccaactacaccggccagtgcccatcaggcatccgtgcccaaaatgaccagctagggtggctgtggggccagagccgtgccctctatcccagcatctacatgcccgcagtgctggagggcacagggaagtcacagatgtatgtgcaacaccgtgtggccgaggcattccgtgtggctgtggctgctggtgaccccaatctgccggtgctgccctatgtccagatcttctatgacacgacaaaccactttctgcccctggatgagctggagcacagcctgggggagagtgcggcccagggggcagctggagtggtgctctgggtgagctgggaaaatacaagaaccaaggaatcatgtcaggccatcaaggagtatatggacactacactggggcccttcatcctgaacgtgaccagtggggcccttctctgcagtcaagccctgtgctccggccatggccgctgtgtccgccgcaccagccaccccaaagccctcctcctccttaaccctgccagtttctccatccagctcacgcctggtggtgggcccctgagcctgcggggtgccctctcacttgaagatcaggcacagatggctgtggagttcaaatgtcgatgctaccctggctggcaggcaccgtggtgtgagcggaagagcatgtggtgat

SEQ ID NO: 227454 - DNA, 1308 bp, Artificial Sequence
  derived and/or modified sequence
atggccgcccacctgctgcccatctgcgccctgttcctgaccctgctggacatggcccaggggttccggggacccttactgcctaaccgaccttttacaaccgtatggaatgcaaacacccagtggtgcttagagagacacggggtcgacgtggatgtcagcgtgttcgacgtcgtggcaaatccaggccagacgtttcgaggaccagatatgactatattttacagcagccagctgggcacatacccgtactacacaccaacaggcgagcctgtctttggcggcctgccacaaaacgcatcactgattgcacatttagctagaactttccaggacatccttgccgctattccagcaccagatttctccggtctggccgtcatcgactgggaggcttggaggccccgctgggccttcaactgggataccaaggacatttacagacagagatcccgcgctttggtacaggcccaacaccctgactggcctgccccgcaggtagaggctgtggcgcaggaccaattccagggcgccgctagggcatggatggccggcaccctgcagctggggagagccctgaggccacgaggtctatggggcttctatgggttccccgactgttataattatgacttcctgtcccccaattacacgggtcagtgcccttccggcatcagggcacagaacgaccagctgggatggttgtggggacaaagtcgggctctgtatccaagcatctatatgcctgccgtgctggagggcacagggaagtcccaaatgtatgtgcaacatagagttgccgaggcgtttagggtcgctgtggctgccggggaccctaacctgcccgtgctcccttatgtgcaaatcttctatgataccactaatcactttctgccgctggatgagctcgaacattcattgggggaaagcgcagcccagggcgcggctggagtcgtgctttgggtttcctgggagaacacacgcaccaaagagtcatgtcaggccatcaaggagtatatggatacaaccttgggcccgtttattctgaacgtgacgagcggcgcactgctttgcagtcaggcgctctgtagtgggcatggacgctgtgtccggcggacttcccaccctaaggcccttttattgctgaaccctgcatcctttagcattcagctcacccccggagggggccccctgtctctgcgaggtgccttgagcctggaggatcaagcccagatggccgtggagttcaaatgtcgatgctatcccggttggcaagcgccatggtgtgagcggaaatctatgtggtag

SEQ ID NO: 227455 - DNA, 1308 bp, Artificial Sequence
  derived and/or modified sequence
atggccgcccacctgctgcccatctgcgccctgttcctgaccctgctggacatggctcaaggcttccggggcccgctcctccccaatcgcccttttacaaccgtgtggaacgctaacacccagtggtgtcttgagagacacggtgttgacgtcgacgtgagtgttttcgatgtggtggccaaccccgggcagacgttccgaggtcccgacatgacaatcttctatagcagccagttggggacatacccgtactacacccctaccggggaaccagtatttggaggcctgcctcaaaatgctagcctcattgctcacttagcaaggaccttccaagatatactggccgccatccctgccccagattttagcggacttgccgtgattgattgggaggcttggcgccccagatgggcttttaactgggataccaaggatatttacagacagcgaagccgcgccctggtgcaggcgcagcacccggattggcccgccccacaggtagaagctgtggcacaggaccagtttcagggtgccgctcgcgcatggatggccggaactctgcagctcggacgagccctgcgtccccgcgggctttggggattctatggcttccctgactgttacaattatgactttctgagtcctaattacaccggccagtgtccctccggaatcagggcccagaacgaccagcttgggtggctttggggacagtctcgtgccctatatccatccatctatatgcctgctgtgctcgaaggaactgggaaatctcaaatgtacgtccagcatcgagtggcggaggctttcagggtcgccgttgccgctggggatcctaatctgcccgtactgccttacgttcagatattttatgataccacaaaccacttcttgccactggatgaactcgagcattctctgggagagtctgctgctcaaggcgctgccggcgtggtcttgtgggtcagttgggaaaatacacggacaaaagaatcctgtcaggcgataaaagagtacatggacacaacactaggaccatttattcttaatgtgacttcaggtgctctgttatgttcccaagcgctgtgtagcggtcatggcaggtgtgtacggagaacatcacatccgaaagcactcttactactgaaccctgcctcgttctctatccagctgactccaggaggaggcccactcagccttcggggggccctgagcctggaggaccaggcccaaatggccgtggagtttaagtgtcgctgctatcccggatggcaggcgccctggtgcgagaggaagagcatgtggtag

SEQ ID NO: 227456 - DNA, 1308 bp, Artificial Sequence
  derived and/or modified sequence
atggccgcccacctgctgcccatctgcgccctgttcctgaccctgctcgacatggcacagggatttagaggacccctgctgcccaatagaccctttactactgtctggaacgcaaatactcagtggtgcctggaaagacatggcgtggacgtcgacgtgagtgtgttcgacgtggtggcaaatccggggcagaccttcagggggccagacatgacaatcttttatagttctcagctggggacttacccttactacacgccaacaggagagcctgtctttggggggctcccgcaaaacgcctctctcattgctcatctggctcggacatttcaagatatcttagccgccattccagcaccagatttcagcgggctggcggtgattgattgggaagcctggcggcctcgctgggcttttaactgggacacaaaggatatctatcgacagcgctcccgtgcactcgttcaagctcagcacccggattggccagctccccaggttgaggctgtggctcaggatcaattccaaggggccgcccgggcgtggatggctggcactctgcaactgggccgagctctgagaccacggggcctctggggcttttacgggttccccgattgttacaactatgattttctttcgccaaactataccgggcaatgccctagtggtatcagagcccaaaacgaccagctagggtggctgtggggccagtcaagagccttataccccagtatctatatgcctgctgtgttagagggaaccggaaaatctcaaatgtatgtgcagcacagggttgccgaggctttccgagtggccgtggctgcaggggacccaaatctgcccgtcctcccctatgtacagattttttatgatacaaccaatcattttctgcccttggatgaacttgaacacagtctgggtgaaagtgctgcacagggcgccgccggggtggttctctgggtgtcttgggagaataccagaactaaggagtcatgccaggccataaaggagtacatggatacgacccttggtccgtttattctaaacgttacctctggtgctctactgtgtagtcaagccctttgcagtggtcacggccgctgtgtccgacgcaccagtcacccaaaggctttactgctccttaatcccgccagtttttcgattcaattaacccctggcggagggccattatctctaagaggggccttaagtctagaggatcaggcacaaatggctgtggaatttaaatgccgctgctaccccggctggcaggcgccctggtgcgaacggaagtccatgtggtag

SEQ ID NO: 227457 - DNA, 1308 bp, Artificial Sequence
  derived and/or modified sequence
atggccgcacaccttctgcctatctgcgcactctttctcactctgctggatatggcacaaggctttcggggacctctcctccccaaccgcccatttaccacggtgtggaacgctaatacacagtggtgtctcgagcgacatggtgtggatgtggatgtaagtgtctttgacgttgtggcaaatccaggacagaccttcagggggccagacatgaccatcttttatagctcccaactcggtacttatccatactatacgcctacaggagaacccgtttttggaggcctgcctcagaatgcatcgctgattgctcacctggctcgaacctttcaggacattctggccgcaatccccgctcccgacttctcaggccttgccgtcattgactgggaagcctggaggccgaggtgggcttttaactgggacaccaaagacatttacagacagcggagcagagccctcgttcaagcccaacacccggattggcctgcacctcaggttgaggccgtggcacaggaccagttccagggagccgcaagagcttggatggcaggcaccttacaactcgggagagccctgaggcccagaggcctctggggtttttacggcttccctgactgttataactatgactttctctccccgaactacaccggccaatgtccatccggaatccgggctcaaaacgaccaattaggctggctttggggccagtcacgcgcactataccccagcatttatatgccagccgtgcttgaggggacaggaaaaagtcaaatgtacgtgcagcatagagtcgccgaggcttttcgggtcgcagtggctgcgggtgaccccaacttacctgtgttgccttacgtacagatcttttatgacacaaccaaccatttcctgccactggatgagcttgagcattccctaggagagtcggccgctcaaggggctgcaggcgtcgttctgtgggtcagctgggaaaacacccgcaccaaagaaagctgtcaagccattaaggaatacatggacaccaccctgggcccttttatcctcaatgttacatctggtgcactgctgtgttcacaggccctttgttcaggtcatgggcgttgcgtccgtcgaactagccatcccaaggccctgctgttattgaaccctgctagctttagtattcagcttacccccggaggcggacccctctcgctgaggggagccctttctctggaagatcaggctcagatggcagtcgaattcaaatgcagatgctaccccggatggcaagcaccctggtgcgaacggaagtccatgtggtag

SEQ ID NO: 227458 - DNA, 1308 bp, Artificial Sequence
  derived and/or modified sequence
atggcagcccatttgttgcccatttgtgctctattccttaccctcctggatatggcccaaggcttccggggaccactcctgccaaaccgaccttttacaacggtgtggaacgccaacactcagtggtgcctggaaaggcacggagtcgacgtagacgtctctgtattcgatgttgtggctaatccaggtcagactttccggggaccagatatgacaattttttactcctcacagctgggcacatacccttactacactccaacgggtgagcccgtgtttggcggattgccacaaaatgcctccttgatcgcgcacctcgcaaggacttttcaagatatcctggccgctattcctgccccagatttctccggtttggccgtcattgattgggaagcatggcggcctcgctgggccttcaattgggacactaaagatatttatcggcagcgcagtagagctttagtccaagctcagcatcctgactggccggctcctcaggtggaggccgtggcgcaggaccagtttcaaggcgcagccagggcttggatggctgggactctgcagctgggcagagctctccggccaagaggcctgtggggcttttatggctttcccgactgctataattatgactttctgagcccaaattacacgggacagtgtcccagcggtattcgagctcaaaatgaccaactgggatggttgtggggtcagagccgcgcactgtacccgtctatctatatgcctgcagtgctggaaggtacggggaaaagccagatgtacgttcaacaccgggtagccgaggccttccgggtggcggtggctgctggcgatcctaacctgcccgtgctgccctatgtgcagattttctacgacacaaccaaccattttctacccctggatgagttagaacacagcctgggcgagtcagccgctcaaggcgctgctggcgtagtgctttgggtgagctgggaaaacactcggactaaggagtcttgccaggcaatcaaggaatatatggataccacattgggacctttcattcttaacgtaacctcaggggcactgctgtgcagccaggccctctgtagcggccatggaagatgtgtgaggcgcacaagccatcccaaagcacttctgttgctaaaccccgcatccttttctatccaattgacacccggtggagggcctttgagcctgaggggagccctgtcactggaggatcaagcccagatggcggtagagtttaagtgcagatgctaccccggttggcaggccccatggtgtgagcggaagtcgatgtggtag

SEQ ID NO: 227459 - DNA, 1308 bp, Artificial Sequence
  derived and/or modified sequence
atggcggctcacctgcttccaatttgcgctttgtttctgaccttgctggatatggcacagggatttcggggacccctgttgcctaatcgcccattcactacagtgtggaatgctaacacccagtggtgtcttgagaggcatggcgtggacgtagacgtgtctgtgttcgacgtggtcgctaatcccggtcagacattcagaggccctgatatgacaatcttttatagctcccagcttgggacttatccatactacacccccacaggagagccagtattcggaggcctcccccagaatgcatccctcatcgcccacctggcgagaactttccaggatatcctggctgctatccccgcacctgacttcagcgggttggctgttattgactgggaggcctggcgcccaagatgggcctttaattgggacacaaaggatatttatcgacagcggagtcgcgcactggtgcaggcacagcacccagattggcctgcccctcaagtggaggcagtggcccaagaccagtttcaaggggctgcgcgagcctggatggccggtactctccagctgggtcgagcccttcggcctcgtggactgtggggtttctatggattccccgattgctacaattatgatttcctgtcccccaactacactggacagtgcccttcaggtatcagggctcagaatgaccagctgggttggctgtggggacagtctagagcactctacccgtctatttatatgcctgcggtgctcgaaggaacaggaaaaagtcagatgtatgtgcagcaccgggtcgcggaagcctttcgagtggctgttgctgcaggggacccgaacctgccggtgttaccctacgtgcagatcttctacgacacgaccaaccactttctgccgcttgatgaactcgagcattccctgggtgagagcgctgcccagggcgctgccggtgttgttctttgggtgtcgtgggagaatacaaggacaaaggagtcgtgtcaagcaatcaaggaatacatggacaccactctgggaccctttattcttaatgtgactagcggggctctcctgtgtagccaggctctgtgctcgggacatgggcgttgcgtccgcagaacttcccatccaaaggcgctgctcctgctcaacccagccagctttagcattcagctgaccccgggagggggtcccctctccctgagaggtgccctgtccctcgaggaccaggcacagatggcagttgagtttaagtgcagatgttatcccggatggcaggcgccttggtgcgaacggaaaagcatgtggtag

SEQ ID NO: 227460 - protein, 269 aa, Artificial Sequence
  derived and/or modified sequence
MGQNDLMGTAEDFADQFLRVTKQYLPHVARLCLISTFLEDGIRMWFQWSEQRDYIDTTWNCGYLLASSFVFLNLLGQLTGCVLVLSRNFVQYACFGLFGIIALQTIAYSILWDLKFLMRNLALGGGLLLLLAESRSEGKSMFAGVPTMRESSPKQYMQLGGRVLLVLMFMTLLHFDASFFSIVQNIVGTALMILVAIGFKTKLAALTLVVWLFAINVYFNAFWTIPVYKPMHDFLKYDFFQTMSVIGGLLLVVALGPGGVSMDEKKKEW

SEQ ID NO: 227461 - protein, 186 aa, Artificial Sequence
  derived and/or modified sequence
MGQNDLMGTAEDFADQFLRVTKQYLPHVARLCLISTFLEDGIRMWFQWSEQRDYIDTTWNCGYLLASSFVFLNLLGQLTGCVLVLSRNFVQYACFGLFGIIALQTIAYSILWDLKFLMRNLALGGGLLLLLAESRSEGKSMFAGVPTMRESSPKQYMQLGGRVLLVLMFMTLLHFDASFFSQPSQQ

SEQ ID NO: 227462 - protein, 188 aa, Artificial Sequence [sequence omitted]

SEQ ID NO: 227463 - DNA, 810 bp, Artificial Sequence
  derived and/or modified sequence
atgggccagaacgacctgatgggcaccgccgaggacttcgccgaccagttcctgagagtgaccaagcagtacctgccccacgtggccagactgtgcctgatcagcaccttcctggaggacggcatcagaatgtggttccagtggagcgagcagagagactacatcgacaccacctggaactgcggctacctgctggccagcagcttcgtgttcctgaacctgctgggccagctgaccggctgcgtgctggtgctgagcagaaacttcgtgcagtacgcctgcttcggcctgttcggcatcatcgccctgcagaccatcgcctacagcatcctgtgggacctgaagttcctgatgagaaacctggccctgggcggcggcctgctgctgctgctggccgagagcagaagcgagggcaagagcatgttcgccggcgtgcccaccatgagagagagcagccccaagcagtacatgcagctgggcggcagagtgctgctggtgctgatgttcatgaccctgctgcacttcgacgccagcttcttcagcatcgtgcagaacatcgtgggcaccgccctgatgatcctggtggccatcggcttcaagaccaagctggccgccctgaccctggtggtgtggctgttcgccatcaacgtgtacttcaacgccttctggaccatccccgtgtacaagcccatgcacgacttcctgaagtacgacttcttccagaccatgagcgtgatcggcggcctgctgctggtggtggccctgggccccggcggcgtgagcatggacgagaagaagaaggagtggtag

SEQ ID NO: 227464 - DNA, 561 bp, Artificial Sequence
  derived and/or modified sequence
atgggccagaacgacctgatgggcaccgccgaggacttcgccgaccagttcctgagagtgaccaagcagtacctgccccacgtggccagactgtgcctgatcagcaccttcctggaggacggcatcagaatgtggttccagtggagcgagcagagagactacatcgacaccacctggaactgcggctacctgctggccagcagcttcgtgttcctgaacctgctgggccagctgaccggctgcgtgctggtgctgagcagaaacttcgtgcagtacgcctgcttcggcctgttcggcatcatcgccctgcagaccatcgcctacagcatcctgtgggacctgaagttcctgatgagaaacctggccctgggcggcggcctgctgctgctgctggccgagagcagaagcgagggcaagagcatgttcgccggcgtgcccaccatgagagagagcagccccaagcagtacatgcagctgggcggcagagtgctgctggtgctgatgttcatgaccctgctgcacttcgacgccagcttcttcagccagcccagccagcagtag

SEQ ID NO: 227465 - DNA, 810 bp, Artificial Sequence
  derived and/or modified sequence
atgggacagaatgacctcatggggactgccgaggatttcgccgaccaattcctgcgggtgacaaagcagtatttacctcacgttgcaaggctgtgcctaattagtacattcctggaggatggtattaggatgtggttccagtggtctgaacagagggactacatcgacacgacatggaactgcggttatctgctggcgagttcctttgtgtttctgaatctccttgggcaactcacggggtgcgtattagttttgagccgcaacttcgtccagtatgcatgctttggactattcgggatcatcgcgcttcagacaatagcttactccatactgtgggatctgaagtttctcatgcggaacctggcactggggggaggtctcctcctgctactcgcggaatcccgctcggagggcaaaagcatgtttgcaggagtgcccacaatgcgagagtcgagtcctaagcagtatatgcagctcggcggaagggtactgctggtgttaatgttcatgaccctcttacacttcgacgcgtcctttttctccatcgtgcagaacatagtaggtaccgccctgatgatccttgtcgcgattggctttaaaacgaaactggctgctctcacgcttgtggtgtggctgtttgccatcaatgtttactttaacgctttttggactatcccagtttacaagccaatgcacgattttctcaaatacgacttcttccagacaatgtccgtgatcggcgggctgttacttgtcgtggctcttggccccggaggagtctctatggacgaaaaaaaaaaggagtggtag

SEQ ID NO: 227466 - DNA, 561 bp, Artificial Sequence
  derived and/or modified sequence
atgggccagaacgatctcatgggcacagctgaagacttcgccgatcagtttcttagagtcactaaacagtaccttcctcacgttgctagactttgtttgatcagcaccttcctggaggatgggattagaatgtggtttcaatggtccgagcagcgagattatattgacactacttggaactgtggatatctgctggcctcctcatttgtgtttctaaacttactcgggcaactgactggctgcgttctagtccttagtcggaactttgtgcagtacgcatgcttcggattgttcggaatcattgctctccaaacaatcgcatactccatcctttgggatctcaagttcttaatgaggaacctggcactggggggcggtctgctgcttcttcttgccgagagccgttctgaaggcaagtccatgttcgccggcgtgcccaccatgcgggagtcaagccctaagcagtacatgcagctgggcggccgggtcctcctcgtgctgatgtttatgaccctgctgcactttgacgctagcttttttagccagccatctcaacaatag

SEQ ID NO: 227467 - DNA, 810 bp, Artificial Sequence
  derived and/or modified sequence
atgggccagaatgacctgatgggcacagcagaagattttgctgaccagttcctgcgggtgaccaagcagtacctgccccacgtggcccggctgtgcctgatcagcaccttcctggaggatggcatccgcatgtggttccagtggagcgagcagagggactacatcgacaccacctggaactgtggctacctgctggccagcagctttgtgttcctgaacctgctgggccagctgaccggctgtgtgctggtgctgagcaggaactttgtgcagtatgcctgcttcggcctgtttggcatcatcgccctgcagaccatcgcctacagcatcctgtgggacctgaagttcctgatgaggaacctggccctgggcggcggcctgctgctgctgctggccgagagccgctctgagggcaagtccatgtttgctggggtgcccaccatgagggagagcagccccaagcagtacatgcagctgggcggccgggtgctgctggtgctgatgttcatgaccctgctgcactttgatgccagcttcttcagcatcgtgcagaacatcgtgggcacagccctgatgatcctggtggccatcggcttcaagaccaagctggccgccctgaccctggtggtgtggctgtttgccatcaacgtgtacttcaatgccttctggaccatccctgtgtacaagcccatgcatgacttcctgaagtatgacttcttccagaccatgtctgtcatcggcggcctgctgctggtggtggccctgggccctggaggagtgtccatggatgagaagaagaaggagtggtag

SEQ ID NO: 227468 - DNA, 561 bp, Artificial Sequence
  derived and/or modified sequence
atgggccagaatgacctgatgggcacagcagaagattttgctgaccagttcctgcgggtgaccaagcagtacctgccccacgtggcccggctgtgcctgatcagcaccttcctggaggatggcatccgcatgtggttccagtggagcgagcagagggactacatcgacaccacctggaactgtggctacctgctggccagcagctttgtgttcctgaacctgctgggccagctgaccggctgtgtgctggtgctgagcaggaactttgtgcagtatgcctgcttcggcctgtttggcatcatcgccctgcagaccatcgcctacagcatcctgtgggacctgaagttcctgatgaggaacctggccctgggcggcggcctgctgctgctgctggccgagagccgctctgagggcaagtccatgtttgctggggtgcccaccatgagggagagcagccccaagcagtacatgcagctgggcggccgggtgctgctggtgctgatgttcatgaccctgctgcactttgatgccagcttcttcagccagcccagccagcagtag

SEQ ID NO: 227469 - DNA, 810 bp, Artificial Sequence
  derived and/or modified sequence
atgggccagaacgacctgatgggcaccgccgaggacttcgccgaccaatttctccgggttacgaagcaatatttaccacacgtagcacgcctgtgcctcatatcaaccttcctagaagatggcatccgcatgtggtttcagtggtccgagcaacgggattatatcgacacgacctggaattgtggataccttttggccagttcattcgtctttctgaatttgctaggccagcttactggatgcgtcctggtgttgagtaggaatttcgtgcagtacgcatgcttcggtctgtttggaataatcgcactgcaaaccatcgcgtactctatcctgtgggacctgaaatttctgatgcggaatctggctctcggtggtggcttgctgttgctgctggctgaaagtcgctctgagggcaagagtatgttcgccggtgtgcccactatgcgcgagtcctcaccaaaacagtatatgcaactcggggggcgcgtcttgttggtactgatgtttatgaccctcttgcacttcgacgcttcattctttagcatcgtgcaaaacatcgtcggcacagccctgatgatcctggtcgccattggcttcaagactaaattggctgcactcacactcgttgtctggctcttcgctatcaacgtttattttaatgccttttggactatcccagtgtataaaccgatgcatgattttctaaagtatgattttttccagaccatgtcagtgatcggaggcctcttactggtcgtggcacttggtcctggcggagtcagcatggacgagaagaagaaggagtggtag

SEQ ID NO: 227470 - DNA, 561 bp, Artificial Sequence
  derived and/or modified sequence
atgggccagaacgacctgatgggcaccgccgaggacttcgccgaccagttcttgagggtgaccaaacaatatttacctcacgtcgccagactgtgccttatatcgaccttcctcgaagatggtattcgaatgtggttccaatggtcagagcaacgagactacatagataccacctggaactgcggatacctgctggcctcgtctttcgtgtttctcaacctgctgggacagctgaccggatgcgtactggtgctgagcaggaactttgtccaatatgcctgtttcggactgtttggcattatcgcgctgcaaaccatcgcctacagtatcctttgggatttgaaatttctgatgagaaatttagctctgggtggggggctgctgctcctgctggccgagagccgcagtgagggcaaatctatgtttgctggcgtacctacaatgagggagagctcccccaagcagtacatgcagcttggcggaagggtgcttctcgtgctgatgtttatgactctgctgcattttgacgctagctttttttctcagcccagccagcagtag

SEQ ID NO: 227471 - DNA, 810 bp, Artificial Sequence
  derived and/or modified sequence
atgggccagaatgaccttatgggcaccgccgaggactttgccgatcagtttctgagggtgaccaaacagtacctgcctcatgtagctcgcctgtgcctcatatcaaccttcctggaggacggcatccggatgtggttccagtggtcagaacaacgcgattatatagataccacatggaactgcggttatctgctggccagttcctttgtcttcctcaacctcttaggccagctgaccgggtgcgtattggtcttatcaagaaacttcgtccaatatgcttgttttggcttgttcgggataattgcgttacagactatagcctattcaatattgtgggatttgaaatttctcatgcgcaacctggctctcggcggagggctcctcctgctgctggcggagagccggtctgagggtaagtccatgtttgcaggggtccccaccatgcgtgagtcttcacctaagcaatatatgcagctggggggtcgggtgctcctggtgctcatgtttatgacgctcctgcattttgacgccagcttcttttcaatcgtccaaaatatcgtaggcaccgcgctaatgatcctggtggcaatcgggttcaagacaaagctggctgccttgacccttgtggtctggcttttcgcgattaacgtgtactttaatgccttctggactataccggtgtacaagccaatgcatgattttctaaaatacgatttttttcagacaatgagcgtcattggtgggcttctcctcgtcgttgcgctgggcccaggaggggtgagtatggatgaaaagaagaaagagtggtag

SEQ ID NO: 227472 - DNA, 561 bp, Artificial Sequence
  derived and/or modified sequence
atgggccagaatgatttaatgggcactgctgaggattttgctgaccaatttctgcgagtaacgaaacagtatctgcctcatgttgccaggttgtgtctgatctctacgttcctcgaggacggaatccggatgtggtttcaatggtcggagcaacgagactatatagataccacgtggaactgcggctatctgttagccagtagctttgtcttccttaatcttctcggacaacttaccggatgtgtcttagtcctgtccagaaatttcgtgcaatatgcatgcttcggattatttggaatcatcgcacttcagaccatcgcctacagcatcctttgggatctgaagtttctgatgagaaacctggccctcggcggaggattactgctgttactagccgagagtaggtccgagggcaaatcaatgttcgccggtgttcccaccatgagagagtcttcacctaagcagtacatgcagctcggcggacgggttttgctggtgctcatgttcatgaccttgctgcatttcgatgcctcatttttttcccagccttctcagcagtag

SEQ ID NO: 227473 - DNA, 2984 bp, Artificial Sequence
  derived and/or modified sequence
ggagccgcagccgacgcggagcgaggccggccgccgggcacttcctgtggaggccgcagcgggtgcgggcgccgacgggcgagagccagcgagcgagcgagcgagccgagccgagcctcccgccgtcgccatgggccagaacgacctgatgggcacggccgaggacttcgccgaccagttcctccgtgtcacaaagcagtacctgccccacgtggcgcgcctctgtctgatcagcaccttcctggaggacggcatccgtatgtggttccagtggagcgagcagcgcgactacatcgacaccacctggaactgcggctacctgctggcctcgtccttcgtcttcctcaacttgctgggacagctgactggctgcgtcctggtgttgagcaggaacttcgtgcagtacgcctgcttcgggctctttggaatcatagctctgcagacgattgcctacagcattttatgggacttgaagtttttgatgaggaacctggccctgggaggaggcctgttgctgctcctagcagaatcccgttctgaagggaagagcatgtttgcgggcgtccccaccatgcgtgagagctcccccaaacagtacatgcagctcggaggcagggtcttgctggttctgatgttcatgaccctccttcactttgacgccagcttcttttctattgtccagaacatcgtgggcacagctctgatgattttagtggccattggttttaaaaccaagctggctgctttgactcttgttgtgtggctctttgccatcaacgtatatttcaacgccttctggaccattccagtctacaagcccatgcatgacttcctgaaatacgacttcttccagaccatgtcggtgattgggggcttgctcctggtggtggccctgggccctgggggtgtctccatggatgagaagaagaaggagtggtaacagtcacagatccctacctgcctggctaagacccgtggccgtcaaggactggttcggggtggattcaacaaaactgccagcttttatgtatcctcttcccttcccctcccttggtaaaggcacagatgttttgagaactttatttgcagagacacctgagaatcgatggctcagtctgctctggagccacagtctggcgtctgacccttcagtgcaggccagcctggcagctggaagcctcccccacgccgaggctttggagtgaacagcccgcttggctgtggcatctcagtcctatttttgagtttttttgtgggggtacaggagggggccttcaagctgtactgtgagcagacgcattggtattatcattcaaagcagtctccctcttatttgtaagtttacatttttagcggaaactactaaattattttgggtggttcagccaaacctcaaaacagttaatctccctggtttaaaatcacaccagtggctttgatgttgtttctgccccgcattgtattttataggaatagtgaaaacatttagggacacccaaagaatgatgcagtattaaaggggtggtagaagctgctgtttatgataaaagtcatcggtcagaaaatcagcttggattggtgccaagtgttttattgggtaacaccctgggagttttagtagcttgaggcaaggtggaggggcaagaagtccttggggaagctgctggtctgggtgctgctggcctccaagctggcagtgggaagggctagtgagaccacacaggggtagccccagcagcagcaccctgcaagccagcctggccagctgctcagaccagcttgcagagccgcagccgctgtgggcagggggtgtggcaggagctcccagcactggagacccacggactcaacccagttacctcacatggggccttttctgagcaaggtctcgaaagcgcaggccgccctggctgagcagcaccgccctttcccagctgcactcgccctgtggacagccccgacacaccactttcctgaggctgtcgctcactcagattgtccgtttgctatgccgaatgcagccaaaattcctttttacaatttgtgatgccttaccgatttgatcttaatcctgtatttaaagttttctaacactgccttatactgtgtttctctttttgggggagcttaactgcttgttgctccctgtcgtctgcaccatagtaaatgccacaagggtagtcgaacacctctctggcccctagacctatctggggacaggctggctcagcctgtctccagggctgctgcggcccagccccgagcctgcctccctcttggcctctcatccattggctctgcagggcaggggtgaggcaggtttctgctcataagtgcttttggaagtcacctacctttttaacacagccgaactagtcccaacgcgtttgcaaatattcccctggtagcctacttccttacccccgaatattggtaagatcgagcaatggcttcaggacatgggttctcttctcctgtgatcattcaagtgctcactgcatgaagactggcttgtctcagtgtttcaacctcaccagggctgtctcttggtccacacctcgctccctgttagtgccgtatgacagcccccatcaaatgaccttggccaagtcacggtttctctgtggtcaaggttggttggctgattggtggaaagtagggtggaccaaaggaggccacgtgagcagtcagcaccagttctgcaccagcagcgcctccgtcctagtgggtgttcctgtttctcctggccctgggtgggctagggcctgattcgggaagatgcctttgcagggaggggaggataagtgggatctaccaattgattctggcaaaacaatttctaagatttttttgctttatgtgggaaacagatctaaatctcattttatgctgtattttatatcttagttgtgtttgaaaacgttttgatttttggaaacacatcaaaataaataatggcgtttgttgtatgcagtgtgatccta

SEQ ID NO: 227474 - DNA, 715 bp, Artificial Sequence
  derived and/or modified sequence
cagcgggtgcgggcgccgacgggcgagagccagcgagcgagcgagcgagccgagccgagcctcccgccgtcgccatgggccagaacgacctgatgggcacggccgaggacttcgccgaccagttcctccgtgtcacaaagcagtacctgccccacgtggcgcgcctctgtctgatcagcaccttcctggaggacggcatccgtatgtggttccagtggagcgagcagcgcgactacatcgacaccacctggaactgcggctacctgctggcctcgtccttcgtcttcctcaacttgctgggacagctgactggctgcgtcctggtgttgagcaggaacttcgtgcagtacgcctgcttcgggctctttggaatcatagctctgcagacgattgcctacagcattttatgggacttgaagtttttgatgaggaacctggccctgggaggaggcctgttgctgctcctagcagaatcccgttctgaagggaagagcatgtttgcgggcgtccccaccatgcgtgagagctcccccaaacagtacatgcagctcggaggcagggtcttgctggttctgatgttcatgaccctccttcactttgacgccagcttcttttctcagccgtctcagcagtagctacatcagcctgatggatagagacttcatgacgtgcagcagctggaacttttgtttataaagcatctcttttcctcaca

SEQ ID NO: 227475 - protein, 244 aa, Artificial Sequence
  derived and/or modified sequence
MGSPRSALSCLLLHLLVLCLQAQEGPGRGPALGRELASLFRAGREPQGVSQQVTVQSSPNFTQHVREQSLVTDQLSRRLIRTYQLYSRTSGKHVQVLANKRINAMAEDGDPFAKLIVETDTFGSRVRVRGAETGLYICMNKKGKLIAKSNGKGKDCVFTEIVLENNYTALQNAKYEGWYMAFTRKGRPRKGSKTRQHQREVHFMKRLPRGHHTTEQSLRFEFLNYPPFTRSLRGSQRTWAPEPR

SEQ ID NO: 227476 - DNA, 735 bp, Artificial Sequence
  derived and/or modified sequence
atgggcagccccagaagcgccctgagctgcctgctgctgcacctgctggtgctgtgcctgcaggcccaggagggccccggcagaggccccgccctgggcagagagctggccagcctgttcagagccggcagagagccccagggcgtgagccagcaggtgaccgtgcagagcagccccaacttcacccagcacgtgagagagcagagcctggtgaccgaccagctgagcagaagactgatcagaacctaccagctgtacagcagaaccagcggcaagcacgtgcaggtgctggccaacaagagaatcaacgccatggccgaggacggcgaccccttcgccaagctgatcgtggagaccgacaccttcggcagcagagtgagagtgagaggcgccgagaccggcctgtacatctgcatgaacaagaagggcaagctgatcgccaagagcaacggcaagggcaaggactgcgtgttcaccgagatcgtgctggagaacaactacaccgccctgcagaacgccaagtacgagggctggtacatggccttcaccagaaagggcagacccagaaagggcagcaagaccagacagcaccagagagaggtgcacttcatgaagagactgcccagaggccaccacaccaccgagcagagcctgagattcgagttcctgaactacccccccttcaccagaagcctgagaggcagccagagaacctgggcccccgagcccagatag

SEQ ID NO: 227477 - DNA, 735 bp, Artificial Sequence
  derived and/or modified sequence
atgggctctcctcgaagcgctctgtcatgtttgctgttgcacctgttggtgctttgccttcaagctcaggaaggacccggcaggggccctgcactcgggcgagaactagccagcctattccgcgccggcagggagcctcagggtgtgtcgcagcaggtgaccgttcagtcttcccctaattttacacagcatgtgcgcgagcagagtcttgttaccgatcaactatctcgcaggctgattaggacctaccaactctatagtaggacttccggcaagcacgttcaagtgctggcgaataaaagaatcaacgcaatggcggaagatggcgacccttttgcgaaactcattgtggagaccgacacttttggaagtagagtgagagtgagaggcgccgaaacgggactctacatatgtatgaacaagaaaggcaaactcatagctaagagcaacggtaaaggtaaagactgcgttttcaccgaaatcgtcctagaaaacaattatacggccctgcagaatgctaaatatgaaggatggtacatggccttcactcgtaaaggtaggcctcggaaagggtccaaaacccggcagcaccagagagaggtccatttcatgaaacgcttgcccagaggacatcacactactgaacagtccctgagattcgaatttctcaattatccccccttcaccaggtccctgcgagggtcacagagaacctgggctccggaaccgcgatag

SEQ ID NO: 227478 - DNA, 735 bp, Artificial Sequence
  derived and/or modified sequence
atgggcagccccaggtctgccctgagctgcctgctgctgcacctgctggtgctgtgcctgcaggcccaggagggccctggccggggccctgccctgggccgggagctggccagcctcttccgggccggccgggagccccagggcgtgtcccagcaggtgacagtgcagagcagccccaacttcacccagcacgtgcgggagcagagcctggtgacagaccagctgagcagaagactcatccgcacctaccagctgtacagcaggaccagcggcaagcacgtgcaggtgctggccaacaagaggatcaatgccatggctgaagatggagacccctttgccaagctgattgtggagacagacaccttcggcagccgggtgcgggtgagaggagctgagaccggcctgtacatctgcatgaacaagaagggcaagctgattgccaagagcaatggcaagggcaaggactgtgtgttcacagaaattgtgctggagaacaactacacagccctgcagaatgccaagtatgagggctggtacatggccttcaccaggaagggccggcccaggaagggcagcaagacccggcagcaccagcgggaggtgcacttcatgaagaggctgccccggggccaccacaccacagagcagagcctgcgctttgagttcctgaactacccacccttcaccaggagcctgcggggcagccagaggacctgggcccctgagcccaggtag

SEQ ID NO: 227479 - DNA, 735 bp, Artificial Sequence
  derived and/or modified sequence
atgggcagcccccggagcgccctgagctgcctgctgctgcacctgcttgtcctgtgcctgcaagcacaagagggaccaggtcgcgggccagccctggggagggaactcgcatcgctgtttagggccggcagggaaccacaaggcgtttcacagcaagttactgtccagtctagccctaacttcacacagcacgtgcgagaacagtctctggtaacagatcagctgtctcgccgactcattcgtacttaccagttgtactctcggacttccggcaagcatgtccaggttctcgccaacaaacggataaacgctatggccgaagatggggaccccttcgctaaactgattgtagaaaccgacacattcggatcccgcgtgagggttcggggagctgaaacaggtctgtacatttgcatgaacaagaagggaaagcttatcgccaaaagcaatggtaaaggcaaggattgtgtgtttactgagattgtgttggaaaacaattacacagcccttcagaatgcaaagtatgagggttggtacatggcttttacgagaaaggggagacccagaaaagggagtaagactcggcagcaccagcgagaggttcattttatgaagaggcttccacggggccatcataccacggagcagtctttacggttcgagtttctgaattacccacctttcacacgctcattacgcggctcccaaaggacatgggcaccagagcccagatag

SEQ ID NO: 227480 - DNA, 735 bp, Artificial Sequence
  derived and/or modified sequence
atgggctctccacgttcagccctgagctgcttgctcctccatctcctggtgctgtgcctacaggcccaggaaggacccggacgcggaccagctctgggccgagaactggcatccctgtttagggctgggagggaaccccagggtgttagccagcaggtgacagttcagtcctccccgaatttcacacagcatgtgcgggagcagtcgttggtaaccgatcagctgtcccgcaggcttataagaacttaccagctctatagccgtacttccgggaagcacgtgcaggtgcttgcaaataagcggattaatgctatggcagaagacggggacccctttgccaagcttatagtcgaaacagatacgtttggttcaagagtgagggttcggggagcagagaccggcttgtatatttgcatgaataagaagggtaagctaattgctaaaagtaacggcaagggcaaggattgtgtgttcaccgagatcgtgttagagaacaactataccgccctgcagaatgcaaagtacgaaggctggtatatggcattcacaagaaaagggaggccacggaaagggtcaaagaccaggcagcaccagagagaagttcattttatgaaaaggctccctcgcggtcaccacactactgaacaatctctacgcttcgaattcctcaattacccgccttttacccgcagcctgaggggctcacagaggacatgggcccctgagcctaggtag

SEQ ID NO: 227481 - DNA, 799 bp, Artificial Sequence
  derived and/or modified sequence
gcggcggcccgcgggacggcgtgacccgccgggctctcggtgccccggggccgcgcgccatgggcagcccccgctccgcgctgagctgcctgctgttgcacttgctggtcctctgcctccaagcccaggaaggcccgggcaggggccctgcgctgggcagggagctcgcttccctgttccgggctggccgggagccccagggtgtctcccaacaggtaactgttcagtcctcacctaattttacacagcatgtgagggagcagagcctggtgacggatcagctcagccgccgcctcatccggacctaccaactctacagccgcaccagcgggaagcacgtgcaggtcctggccaacaagcgcatcaacgccatggcagaggacggcgaccccttcgcaaagctcatcgtggagacggacacctttggaagcagagttcgagtccgaggagccgagacgggcctctacatctgcatgaacaagaaggggaagctgatcgccaagagcaacggcaaaggcaaggactgcgtcttcacggagattgtgctggagaacaactacacagcgctgcagaatgccaagtacgagggctggtacatggccttcacccgcaagggccggccccgcaagggctccaagacgcggcagcaccagcgtgaggtccacttcatgaagcggctgccccggggccaccacaccaccgagcagagcctgcgcttcgagttcctcaactacccgcccttcacgcgcagcctgcgcggcagccagaggacttgggcccccgagccccgataggtgct

SEQ ID NO: 227482 - DNA, 1036 bp, Artificial Sequence
  derived and/or modified sequence
acccgcaccctctccgctcgcgccctgctcagcgcgtcctcccgcggcggcccgcgggacggcgtgacccgccgggctctcggtgccccggggccgcgcgccatgggcagcccccgctccgcgctgagctgcctgctgttgcacttgctggtcctctgcctccaagcccaggaaggcccgggcaggggccctgcgctgggcagggagctcgcttccctgttccgggctggccgggagccccagggtgtctcccaacaggtaactgttcagtcctcacctaattttacacagcatgtgagggagcagagcctggtgacggatcagctcagccgccgcctcatccggacctaccaactctacagccgcaccagcgggaagcacgtgcaggtcctggccaacaagcgcatcaacgccatggcagaggacggcgaccccttcgcaaagctcatcgtggagacggacacctttggaagcagagttcgagtccgaggagccgagacgggcctctacatctgcatgaacaagaaggggaagctgatcgccaagagcaacggcaaaggcaaggactgcgtcttcacggagattgtgctggagaacaactacacagcgctgcagaatgccaagtacgagggctggtacatggccttcacccgcaagggccggccccgcaagggctccaagacgcggcagcaccagcgtgaggtccacttcatgaagcggctgccccggggccaccacaccaccgagcagagcctgcgcttcgagttcctcaactacccgcccttcacgcgcagcctgcgcggcagccagaggacttgggcccccgagccccgataggtgctgcctggccctccccacaatgccagaccgcagagaggctcatcctgtagggcacccaaaactcaagcaagatgagctgtgcgctgctctgcaggctggggaggtgctgggggagccctgggttccggttgttgatattgtttgctgttgggtttttgctgtttttttttttttttttttttttaaaacaaaagag

SEQ ID NO: 227483 - protein, 233 aa, Artificial Sequence
  derived and/or modified sequence
MGSPRSALSCLLLHLLVLCLQAQEGPGRGPALGRELASLFRAGREPQGVSQQHVREQSLVTDQLSRRLIRTYQLYSRTSGKHVQVLANKRINAMAEDGDPFAKLIVETDTFGSRVRVRGAETGLYICMNKKGKLIAKSNGKGKDCVFTEIVLENNYTALQNAKYEGWYMAFTRKGRPRKGSKTRQHQREVHFMKRLPRGHHTTEQSLRFEFLNYPPFTRSLRGSQRTWAPEPR

SEQ ID NO: 227484 - DNA, 702 bp, Artificial Sequence
  derived and/or modified sequence
atgggcagccccagaagcgccctgagctgcctgctgctgcacctgctggtgctgtgcctgcaggcccaggagggccccggcagaggccccgccctgggcagagagctggccagcctgttcagagccggcagagagccccagggcgtgagccagcagcacgtgagagagcagagcctggtgaccgaccagctgagcagaagactgatcagaacctaccagctgtacagcagaaccagcggcaagcacgtgcaggtgctggccaacaagagaatcaacgccatggccgaggacggcgaccccttcgccaagctgatcgtggagaccgacaccttcggcagcagagtgagagtgagaggcgccgagaccggcctgtacatctgcatgaacaagaagggcaagctgatcgccaagagcaacggcaagggcaaggactgcgtgttcaccgagatcgtgctggagaacaactacaccgccctgcagaacgccaagtacgagggctggtacatggccttcaccagaaagggcagacccagaaagggcagcaagaccagacagcaccagagagaggtgcacttcatgaagagactgcccagaggccaccacaccaccgagcagagcctgagattcgagttcctgaactacccccccttcaccagaagcctgagaggcagccagagaacctgggcccccgagcccagatag

SEQ ID NO: 227485 - DNA, 702 bp, Artificial Sequence
  derived and/or modified sequence
atgggcagcccacggtccgcactctcctgtctgcttctccatctgctcgtcttgtgtcttcaggctcaagaggggcctggacgcggcccagctttagggcgcgaactggcctctctgtttagggcaggcagggagcctcagggagtttcccagcaacatgtgagagagcagtcattggtgaccgaccaactgagccggcgacttattaggacgtatcagttgtacagccgaaccagcggcaagcatgttcaagtgctcgccaataaaaggataaatgcgatggccgaggatggagatccgtttgctaagctcatagtggagactgacacgttcggctcacgagtccgtgtccggggcgcagagaccgggctatatatctgcatgaataagaagggtaagttgatcgccaaatccaacgggaaaggtaaggactgcgttttcactgagattgtactagagaacaattataccgccctgcaaaacgccaagtatgagggctggtacatggctttcacaaggaaaggccgcccacgaaaaggcagcaagacccgccagcatcaacgggaagtccatttcatgaagcgccttccgagagggcatcatactaccgaacagtctcttaggtttgagtttctaaactacccaccatttacaaggagcctgaggggatcacagcgcacatgggctcctgaacctcgctag

SEQ ID NO: 227486 - DNA, 702 bp, Artificial Sequence
  derived and/or modified sequence
atgggcagccccaggtctgccctgagctgcctgctgctgcacctgctggtgctgtgcctgcaggcccaggagggccctggccggggccctgccctgggccgggagctggccagcctcttccgggccggccgggagccccagggcgtgtcccagcagcacgtgcgggagcagagcctggtgacagaccagctgagccggcggctcatccgcacctaccagctgtacagcaggaccagcggcaagcacgtgcaggtgctggccaacaagaggatcaatgccatggccgaggatggagacccctttgccaagctgattgtggagacagacaccttcggcagccgggtgcgggtgagaggagctgagaccggcctgtacatctgcatgaacaagaagggcaagctgattgccaagagcaatggcaagggcaaggactgtgtgttcacagagatcgtgctggagaacaactacacagccctgcagaatgccaagtatgagggctggtacatggccttcaccaggaagggccggcccaggaagggcagcaagacccggcagcaccagcgggaggtgcacttcatgaagaggctgccccggggccaccacaccacagagcagagcctgcgctttgagttcctgaactacccacccttcaccaggagcctgcggggcagccagaggacctgggcccctgagcccaggtag

SEQ ID NO: 227487 - DNA, 702 bp, Artificial Sequence
  derived and/or modified sequence
atgggcagcccccggagcgccctgagctgcctgctgctgcacctgctcgtgctatgcctgcaggcccaagaaggccccggccgaggtccagccctcgggcgcgagctcgcctcgctgttcagggccggacgtgagcctcagggggtgtcgcaacagcacgtcagagagcagtcactcgttaccgatcaactaagtagaaggctgatcagaacctaccaattgtactccaggacctccggcaagcacgttcaggtgctggccaataagcgcatcaacgctatggccgaagatggggatcccttcgccaaactgattgtggaaactgacacctttggatccagagtccgagtaagaggcgctgaaacaggactatacatttgcatgaataaaaagggaaaactcatcgcgaaatctaacggtaaggggaaagattgcgtgttcacagaaatagtgcttgagaacaattacacggcattgcagaatgcaaaatacgagggctggtatatggcctttacacgaaagggtcggccgagaaaagggtctaaaacccgtcagcaccagagagaagttcacttcatgaagcgcttgcctcgggggcatcacactacggaacaaagccttcggttcgaattcctgaactacccgcctttcacgcgaagcctcagaggatctcaaagaacatgggcccccgaaccaaggtag

SEQ ID NO: 227488 - DNA, 702 bp, Artificial Sequence
  derived and/or modified sequence
atgggaagccctcgctctgccctttcctgcctcttgttacatctattggtactgtgtttacaggcgcaggaggggcctgggagaggacctgctctgggtagggagcttgcgtctttattcagagccggacgggaacctcagggagtctctcagcaacacgtacgggagcagtcgctcgttactgaccagctctcacggaggcttatccgcacatatcagttgtatagcagaacctctggaaagcatgtgcaagtgttagcaaataagcgcattaatgccatggcggaggatggagatcccttcgcaaaattgatcgtggaaacagatacatttggatcccgtgtccgggtgaggggggctgagaccggtctatacatttgcatgaataaaaaggggaaacttatagcgaaaagtaacgggaagggaaaggactgtgtgttcacggagatagtgctcgaaaataactacaccgccctgcagaacgcaaagtacgagggctggtacatggccttcacaagaaagggcagaccacgcaagggctcaaaaactcgacagcaccagcgcgaagtgcacttcatgaaaagattgcccaggggccaccacaccaccgaacaatcgttacgcttcgagttcctgaactatcccccttttacgcgaagtcttcgtgggtcgcagcggacatgggcacctgaacctcgatag

SEQ ID NO: 227489 - DNA, 707 bp, Artificial Sequence
  derived and/or modified sequence
atgggcagcccccgctccgcgctgagctgcctgctgttgcacttgctggtcctctgcctccaagcccaggaaggcccgggcaggggccctgcgctgggcagggagctcgcttccctgttccgggctggccgggagccccagggtgtctcccaacagcatgtgagggagcagagcctggtgacggatcagctcagccgccgcctcatccggacctaccaactctacagccgcaccagcgggaagcacgtgcaggtcctggccaacaagcgcatcaacgccatggcagaggacggcgaccccttcgcaaagctcatcgtggagacggacacctttggaagcagagttcgagtccgaggagccgagacgggcctctacatctgcatgaacaagaaggggaagctgatcgccaagagcaacggcaaaggcaaggactgcgtcttcacggagattgtgctggagaacaactacacagcgctgcagaatgccaagtacgagggctggtacatggccttcacccgcaagggccggccccgcaagggctccaagacgcggcagcaccagcgtgaggtccacttcatgaagcggctgccccggggccaccacaccaccgagcagagcctgcgcttcgagttcctcaactacccgcccttcacgcgcagcctgcgcggcagccagaggacttgggcccccgagccccgataggtgct

SEQ ID NO: 227490 - DNA, 1003 bp, Artificial Sequence
  derived and/or modified sequence
acccgcaccctctccgctcgcgccctgctcagcgcgtcctcccgcggcggcccgcgggacggcgtgacccgccgggctctcggtgccccggggccgcgcgccatgggcagcccccgctccgcgctgagctgcctgctgttgcacttgctggtcctctgcctccaagcccaggaaggcccgggcaggggccctgcgctgggcagggagctcgcttccctgttccgggctggccgggagccccagggtgtctcccaacagcatgtgagggagcagagcctggtgacggatcagctcagccgccgcctcatccggacctaccaactctacagccgcaccagcgggaagcacgtgcaggtcctggccaacaagcgcatcaacgccatggcagaggacggcgaccccttcgcaaagctcatcgtggagacggacacctttggaagcagagttcgagtccgaggagccgagacgggcctctacatctgcatgaacaagaaggggaagctgatcgccaagagcaacggcaaaggcaaggactgcgtcttcacggagattgtgctggagaacaactacacagcgctgcagaatgccaagtacgagggctggtacatggccttcacccgcaagggccggccccgcaagggctccaagacgcggcagcaccagcgtgaggtccacttcatgaagcggctgccccggggccaccacaccaccgagcagagcctgcgcttcgagttcctcaactacccgcccttcacgcgcagcctgcgcggcagccagaggacttgggcccccgagccccgataggtgctgcctggccctccccacaatgccagaccgcagagaggctcatcctgtagggcacccaaaactcaagcaagatgagctgtgcgctgctctgcaggctggggaggtgctgggggagccctgggttccggttgttgatattgtttgctgttgggtttttgctgtttttttttttttttttttttttaaaacaaaagag

SEQ ID NO: 227491 - protein, 204 aa, Artificial Sequence
  derived and/or modified sequence
MGSPRSALSCLLLHLLVLCLQAQHVREQSLVTDQLSRRLIRTYQLYSRTSGKHVQVLANKRINAMAEDGDPFAKLIVETDTFGSRVRVRGAETGLYICMNKKGKLIAKSNGKGKDCVFTEIVLENNYTALQNAKYEGWYMAFTRKGRPRKGSKTRQHQREVHFMKRLPRGHHTTEQSLRFEFLNYPPFTRSLRGSQRTWAPEPR

SEQ ID NO: 227492 - DNA, 615 bp, Artificial Sequence
  derived and/or modified sequence
atgggcagccccagaagcgccctgagctgcctgctgctgcacctgctggtgctgtgcctgcaggcccagcacgtgagagagcagagcctggtgaccgaccagctgagcagaagactgatcagaacctaccagctgtacagcagaaccagcggcaagcacgtgcaggtgctggccaacaagagaatcaacgccatggccgaggacggcgaccccttcgccaagctgatcgtggagaccgacaccttcggcagcagagtgagagtgagaggcgccgagaccggcctgtacatctgcatgaacaagaagggcaagctgatcgccaagagcaacggcaagggcaaggactgcgtgttcaccgagatcgtgctggagaacaactacaccgccctgcagaacgccaagtacgagggctggtacatggccttcaccagaaagggcagacccagaaagggcagcaagaccagacagcaccagagagaggtgcacttcatgaagagactgcccagaggccaccacaccaccgagcagagcctgagattcgagttcctgaactacccccccttcaccagaagcctgagaggcagccagagaacctgggcccccgagcccagatag

SEQ ID NO: 227493 - DNA, 615 bp, Artificial Sequence
  derived and/or modified sequence
atgggttccccccgcagtgccctctcttgtctgcttctgcacctcctggtgttgtgtttacaggcgcagcatgtcagagagcagagcctggtgaccgatcagcttagcagacggctgattcgtacttatcaactgtactcaaggaccagcggtaaacacgtccaagtgctggctaacaaaagaataaacgccatggccgaggatggagatccattcgcgaagctaattgtggagacagacacctttggctcccgagttcgggtgaggggggccgaaaccggtttgtacatctgcatgaacaaaaaaggcaagcttatcgccaagagcaatggtaagggaaaagattgtgttttcacagaaatcgtccttgaaaacaattatacagcacttcagaacgcaaaatacgaggggtggtatatggccttcacaaggaagggtaggccccgaaaaggatccaaaacgcgccagcaccaacgggaggtgcattttatgaagcgcttgccaagaggccaccatacaacagagcagtccttacgctttgaatttctcaactatccgccttttacccgttcgctgcgtggcagccagcgcacctgggcacccgagcctcgctag

SEQ ID NO: 227494 - DNA, 615 bp, Artificial Sequence
  derived and/or modified sequence
atgggcagccccaggtctgccctgagctgcctgctgctgcacctgctggtgctgtgcctgcaggcccagcacgtgcgggagcagagcctggtgacagaccagctgagcagaagactcatccgcacctaccagctgtacagcaggaccagcggcaagcacgtgcaggtgctggccaacaagaggatcaatgccatggctgaagatggagacccctttgccaagctgattgtggagacagacaccttcggcagccgggtgcgggtgagaggagctgagaccggcctgtacatctgcatgaacaagaagggcaagctgattgccaagagcaatggcaagggcaaggactgtgtgttcacagaaattgtgctggagaacaactacacagccctgcagaatgccaagtatgagggctggtacatggccttcaccaggaagggccggcccaggaagggcagcaagacccggcagcaccagcgggaggtgcacttcatgaagaggctgccccggggccaccacaccacagagcagagcctgcgctttgagttcctgaactacccacccttcaccaggagcctgcggggcagccagaggacctgggcccctgagcccaggtag

SEQ ID NO: 227495 - DNA, 615 bp, Artificial Sequence
  derived and/or modified sequence
atgggcagcccccggagcgccctgagctgcctgctgctgcacctgctggtgttgtgccttcaagcccaacatgtgagggaacagtcactcgtgacagaccaactgagcagacgccttattcgtacctatcaactatactccagaacatcaggaaagcacgtccaggtattggccaataagcgcatcaatgctatggcggaagatggagatccctttgccaagttgatcgtcgagaccgacactttcggcagtagggttcgagttagaggtgctgaaacagggctgtatatctgcatgaacaaaaagggcaaactcatcgctaagtccaacggaaaaggcaaagactgtgttttcaccgaaatcgtactggagaacaactacaccgccctgcaaaacgcaaaatatgagggctggtacatggcattcacaaggaaagggcgacctcggaaggggagtaagacacggcaacatcagcgggaagtgcatttcatgaaaaggttaccacggggtcatcatacaacagagcagtcactgagattcgagttccttaattatccgccctttaccaggagcctcagaggtagccagcggacatgggccccagagccccgatag

SEQ ID NO: 227496 - DNA, 615 bp, Artificial Sequence
  derived and/or modified sequence
atggggtcaccacggtcagccttgtcttgtctgttgctgcatctgctggtgctgtgccttcaggctcaacacgtccgggagcagagtctggtcacagatcagttgtcaaggcgtctgattagaacctatcaactgtattccaggacatcaggaaagcacgtgcaggtgctcgcgaacaaaagaataaatgccatggcagaagatggggatcctttcgccaagctgattgtagaaactgataccttcggctccagggtccgggtgaggggggcagagacaggcctttacatatgtatgaacaagaaggggaagttaatagcaaagtctaacgggaaagggaaagactgcgttttcacagaaatagtcctggaaaacaactacactgcccttcaaaacgcgaagtacgaaggatggtatatggctttcacccgaaaaggcaggcccaggaagggcagcaaaactagacaacaccagagagaagtccatttcatgaaacgcctgccaagggggcaccacacaactgaacagagcctccggttcgaatttctgaattacccacctttcactcgctccctaagaggatctcaacgcacttgggccccagagccacggtag

SEQ ID NO: 227497 - DNA, 694 bp, Artificial Sequence
  derived and/or modified sequence
tcagcgcgtcctcccgcggcggcccgcgggacggcgtgacccgccgggctctcggtgccccggggccgcgcgccatgggcagcccccgctccgcgctgagctgcctgctgttgcacttgctggtcctctgcctccaagcccagcatgtgagggagcagagcctggtgacggatcagctcagccgccgcctcatccggacctaccaactctacagccgcaccagcgggaagcacgtgcaggtcctggccaacaagcgcatcaacgccatggcagaggacggcgaccccttcgcaaagctcatcgtggagacggacacctttggaagcagagttcgagtccgaggagccgagacgggcctctacatctgcatgaacaagaaggggaagctgatcgccaagagcaacggcaaaggcaaggactgcgtcttcacggagattgtgctggagaacaactacacagcgctgcagaatgccaagtacgagggctggtacatggccttcacccgcaagggccggccccgcaagggctccaagacgcggcagcaccagcgtgaggtccacttcatgaagcggctgccccggggccaccacaccaccgagcagagcctgcgcttcgagttcctcaactacccgcccttcacgcgcagcctgcgcggcagccagaggacttgggcccccgagccccgataggtgct

SEQ ID NO: 227498 - DNA, 916 bp, Artificial Sequence
  derived and/or modified sequence
acccgcaccctctccgctcgcgccctgctcagcgcgtcctcccgcggcggcccgcgggacggcgtgacccgccgggctctcggtgccccggggccgcgcgccatgggcagcccccgctccgcgctgagctgcctgctgttgcacttgctggtcctctgcctccaagcccagcatgtgagggagcagagcctggtgacggatcagctcagccgccgcctcatccggacctaccaactctacagccgcaccagcgggaagcacgtgcaggtcctggccaacaagcgcatcaacgccatggcagaggacggcgaccccttcgcaaagctcatcgtggagacggacacctttggaagcagagttcgagtccgaggagccgagacgggcctctacatctgcatgaacaagaaggggaagctgatcgccaagagcaacggcaaaggcaaggactgcgtcttcacggagattgtgctggagaacaactacacagcgctgcagaatgccaagtacgagggctggtacatggccttcacccgcaagggccggccccgcaagggctccaagacgcggcagcaccagcgtgaggtccacttcatgaagcggctgccccggggccaccacaccaccgagcagagcctgcgcttcgagttcctcaactacccgcccttcacgcgcagcctgcgcggcagccagaggacttgggcccccgagccccgataggtgctgcctggccctccccacaatgccagaccgcagagaggctcatcctgtagggcacccaaaactcaagcaagatgagctgtgcgctgctctgcaggctggggaggtgctgggggagccctgggttccggttgttgatattgtttgctgttgggtttttgctgtttttttttttttttttttttttaaaacaaaagag

SEQ ID NO: 227499 - DNA, 856 bp, Artificial Sequence
  derived and/or modified sequence
accttgcgtccgcagtaccgacccgcacgctcttcagcgcatccctagtgaaggaggttctcccccagcccgtggctgttgcacttgctggtcctctgcctccaagcccagcatgtgagggagcagagcctggtgacggatcagctcagccgccgcctcatccggacctaccaactctacagccgcaccagcgggaagcacgtgcaggtcctggccaacaagcgcatcaacgccatggcagaggacggcgaccccttcgcaaagctcatcgtggagacggacacctttggaagcagagttcgagtccgaggagccgagacgggcctctacatctgcatgaacaagaaggggaagctgatcgccaagagcaacggcaaaggcaaggactgcgtcttcacggagattgtgctggagaacaactacacagcgctgcagaatgccaagtacgagggctggtacatggccttcacccgcaagggccggccccgcaagggctccaagacgcggcagcaccagcgtgaggtccacttcatgaagcggctgccccggggccaccacaccaccgagcagagcctgcgcttcgagttcctcaactacccgcccttcacgcgcagcctgcgcggcagccagaggacttgggcccccgagccccgataggtgctgcctggccctccccacaatgccagaccgcagagaggctcatcctgtagggcacccaaaactcaagcaagatgagctgtgcgctgctctgcaggctggggaggtgctgggggagccctgggttccggttgttgatattgtttgctgttgggtttttgctgtttttttttttttttttttttttaaaacaaaagag

SEQ ID NO: 227500 - protein, 310 aa, Artificial Sequence
  derived and/or modified sequence
MAFPKMRLMYICLLVLGALCLYFSMYSLNPFKEQSFVYKKDGNFLKLPDTDCRQTPPFLVLLVTSSHKQLAERMAIRQTWGKERMVKGKQLKTFFLLGTTSSAAETKEVDQESQRHGDIIQKDFLDVYYNLTLKTMMGIEWVHRFCPQAAFVMKTDSDMFINVDYLTELLLKKNRTTRFFTGFLKLNEFPIRQPFSKWFVSKSEYPWDRYPPFCSGTGYVFSGDVASQVYNVSKSVPYIKLEDVFVGLCLERLNIRLEELHSQPTFFPGGLRFSVCLFRRIVACHFIKPRTLLDYWQALENSRGEDCPPV

SEQ ID NO: 227501 - DNA, 933 bp, Artificial Sequence
  derived and/or modified sequence
atggccttccccaagatgagactgatgtacatctgcctgctggtgctgggcgccctgtgcctgtacttcagcatgtacagcctgaaccccttcaaggagcagagcttcgtgtacaagaaggacggcaacttcctgaagctgcccgacaccgactgcagacagaccccccccttcctggtgctgctggtgaccagcagccacaagcagctggccgagagaatggccatcagacagacctggggcaaggagagaatggtgaagggcaagcagctgaagaccttcttcctgctgggcaccaccagcagcgccgccgagaccaaggaggtggaccaggagagccagagacacggcgacatcatccagaaggacttcctggacgtgtactacaacctgaccctgaagaccatgatgggcatcgagtgggtgcacagattctgcccccaggccgccttcgtgatgaagaccgacagcgacatgttcatcaacgtggactacctgaccgagctgctgctgaagaagaacagaaccaccagattcttcaccggcttcctgaagctgaacgagttccccatcagacagcccttcagcaagtggttcgtgagcaagagcgagtacccctgggacagatacccccccttctgcagcggcaccggctacgtgttcagcggcgacgtggccagccaggtgtacaacgtgagcaagagcgtgccctacatcaagctggaggacgtgttcgtgggcctgtgcctggagagactgaacatcagactggaggagctgcacagccagcccaccttcttccccggcggcctgagattcagcgtgtgcctgttcagaagaatcgtggcctgccacttcatcaagcccagaaccctgctggactactggcaggccctggagaacagcagaggcgaggactgcccccccgtgtag

SEQ ID NO: 227502 - DNA, 933 bp, Artificial Sequence
  derived and/or modified sequence
atggctttcccaaaaatgcggctgatgtacatctgtctgctcgtgttgggagctttgtgcctctacttttcgatgtacagtctgaatcctttcaaagaacaatcctttgtatataaaaaggacggaaatttcctgaaactgcccgacaccgactgtagacagacacctccatttttagtcctgctggtgactagctcacacaagcagctggccgaaagaatggctataaggcagacttggggcaaagagcggatggtgaaaggcaaacagctgaagactttcttcctactaggcactacctcctctgcagcggaaaccaaggaggtggaccaggaatcacagagacatggagacatcatccaaaaggatttcctcgatgtttattacaacctgacgctcaagaccatgatgggcatcgagtgggtgcaccgcttttgcccacaggccgctttcgtaatgaaaaccgattctgacatgtttattaacgtcgattatctgacggagcttctgctgaaaaaaaataggaccacaaggttcttcacagggtttctgaaactgaacgaatttcctatacgtcagccgttttctaagtggttcgtgagtaagagtgagtacccttgggaccggtatcccccattttgctccggaactggctacgtattctctggcgatgtggccagccaggtatacaatgtgtccaagagtgtgccatatatcaagctggaggatgtgtttgtgggcttgtgcctcgagagacttaatattagacttgaggaattacactcccagccaacctttttccccggaggcctgcgtttcagcgtctgcttgtttcgccgcatcgttgcgtgccatttcatcaaaccgcgtactttgctggattactggcaggccctcgaaaacagtagaggtgaggattgccctcctgtctag

SEQ ID NO: 227503 - DNA, 933 bp, Artificial Sequence
  derived and/or modified sequence
atggctttcccaaagatgcgcctaatgtacatatgcctcctggtcctgggggctctatgcctctacttttctatgtattccctgaatccttttaaggagcagtcctttgtttacaaaaaggacggaaatttcctcaagctccctgacaccgattgcagacagacaccacctttcctcgtgctgctcgtgacctcatcccacaaacagctggcagagcgaatggctatccgccaaacctggggaaaagagagaatggtaaagggcaaacaactcaagaccttcttcctgctgggtacaacaagttccgctgcagagaccaaggaagtcgatcaggagagccagcggcacggcgatatcatacagaaagacttcctggatgtctattataaccttacacttaagacaatgatgggaattgagtgggtacataggttctgcccacaggccgcctttgtcatgaagacggacagtgacatgttcatcaatgtcgactacctgaccgagctgctactgaagaagaatcgtaccacccgcttttttacgggattcctcaagctcaatgagttccctatcagacagccgttttctaaatggttcgtcagcaagtccgagtacccttgggacagatatccacccttttgttctggtacagggtacgttttcagcggcgacgtggccagtcaggtgtacaacgtgtcaaagtcagtgccctacataaagctggaggatgtgtttgtcggcttgtgtctggaacggctcaatatccgtctggaggagctacattctcagcctactttttttcctgggggcctgaggtttagcgtatgcctctttcggagaatcgttgcatgccacttcattaaaccaagaacccttctggactattggcaggctttggaaaattcccggggagaggattgcccaccggtttag

SEQ ID NO: 227504 - DNA, 933 bp, Artificial Sequence
  derived and/or modified sequence
atggcttttccaaagatgcggctgatgtacatctgtctgctggtgcttggagcactgtgtctctatttcagcatgtatagtttaaacccttttaaagagcagtcatttgtttacaaaaaagatggcaacttcctcaaattaccagacacagattgccgacaaactcctccattcttggtactgctggtgaccagtagtcacaagcagctagcagagaggatggcgatccgccagacctggggaaaggaacgcatggttaaaggcaagcaactgaagactttcttcttgctgggaacaacctcttcagcagcggaaacgaaggaagtggaccaggagagccagaggcatggagatatcatccaaaaagattttctggatgtatactataacctgaccttgaagactatgatggggattgagtgggtccaccgcttctgtccccaggccgcttttgtcatgaagactgattccgacatgttcatcaacgttgactacctgaccgaactgctgttaaagaagaacaggacaacacgatttttcaccgggtttctgaaactcaacgaatttcctatcagacagccattctccaagtggttcgtgtctaagtccgagtacccatgggacaggtacccacccttctgcagcggtacaggatacgtttttagcggagacgtggcctcacaggtgtacaacgtttccaagagcgtgccttacattaagcttgaggatgtgtttgtggggctctgcctggaacgccttaatattcggctggaagaactccactcacaacccacattcttcccaggaggactaagatttagtgtctgcctgtttcgccgtatcgtggcttgtcactttattaagccaaggacattactcgattactggcaggccctcgagaacagccgcggggaggattgccctcccgtctag

SEQ ID NO: 227505 - DNA, 933 bp, Artificial Sequence
  derived and/or modified sequence
atggctttccccaaaatgcgcctgatgtatatttgtctgctagttctgggggcactttgtttatatttcagcatgtactcccttaaccccttcaaggagcagagcttcgtgtataaaaaggacggtaacttcttgaagctacctgacacagattgcaggcagactccccctttcctggtgctcttggtgacttcgtctcataaacagcttgccgagagaatggcgatccggcagacttgggggaaggagagaatggtgaaaggcaaacaactgaagacatttttcttgcttgggaccacatctagtgccgcagagacgaaggaggtggaccaagagtctcagaggcatggtgatattatccaaaaagacttcttggacgtttattacaacctgaccctcaaaacaatgatggggatagaatgggtccatagattctgtcctcaggcagcttttgtgatgaagaccgactccgatatgttcattaacgtggactacctgacggagctcctgctgaaaaagaaccgtacaacacggttctttactggttttctgaaactgaacgaattccccattagacaaccattttctaagtggtttgtctctaagtcggagtacccatgggatcgatatcctcctttctgctctgggacaggttatgtattctccggagatgtggccagtcaggtttacaacgtatctaaaagcgtcccttacattaagctggaggacgtgttcgtggggttgtgtctggaaagactgaacatcaggctggaggaattgcacagccagcccacattttttccgggagggttgaggttttctgtgtgcctcttccgcaggatcgtggcgtgccacttcatcaagcccagaaccctcctcgattattggcaggccctcgagaactcccgtggcgaggactgtcctcctgtgtag

SEQ ID NO: 227506 - DNA, 933 bp, Artificial Sequence
  derived and/or modified sequence
atggccttccccaagatgaggctgatgtacatctgcctgctggtgctgggcgccctgtgcctgtacttctccatgtacagcctgaaccccttcaaggagcagagctttgtgtacaagaaggatggcaacttcctgaagctgcctgacacagactgccggcagaccccacccttcctggtgctgctggtgaccagcagccacaagcagctggccgagaggatggccatccggcagacctggggcaaggagaggatggtgaagggcaagcagctgaagaccttcttcctgctgggcaccaccagcagcgctgctgagaccaaggaggtggaccaggagagccagagacatggagacatcatccagaaggacttcctggatgtgtactacaacctgaccctgaagaccatgatgggcatcgagtgggtgcaccgcttctgcccccaggccgcctttgtgatgaagacagacagcgacatgttcatcaacgtggactacctgacagagctgctgctgaagaagaacagaaccacccgcttcttcaccggcttcctgaagctgaatgagttccccatccggcagcccttcagcaagtggtttgtgtccaagtctgagtacccctgggaccgctacccacccttctgcagcggcaccggctacgtgttttctggagatgtggccagccaggtgtacaacgtgtccaagtctgtgccctacatcaagctggaggatgtgtttgtgggcctgtgcctggagcggctgaacatccggctggaggagctgcacagccagcccaccttcttccctgggggcctgcgcttctctgtgtgcctcttcagaagaattgtggcctgccacttcatcaagcccaggaccctgctggactactggcaggccctggagaacagcagaggagaggactgcccccctgtgtag

SEQ ID NO: 227507 - DNA, 933 bp, Artificial Sequence
  derived and/or modified sequence
atggccttccccaagatgcggctgatgtacatctgcctgctggtgcttggcgcgctgtgcctgtacttcagcatgtacagtcttaaccccttcaaagaacagtccttcgtctataagaaggatggcaacttcttaaagcttccagatacggactgccggcaaacccccccattcctggtgctcttagtgaccagctcacacaagcagttggccgagcggatggccatccgccagacatggggcaaagagaggatggtgaagggcaagcaattaaagacattcttcctgctgggcacaacatcttccgccgctgagacaaaggaggtggaccaggagtcccagcgacatggcgatataatacaaaaggatttcttggatgtgtactacaatctgacactgaaaaccatgatgggcatcgagtgggtccaccgcttctgccctcaggccgcattcgtgatgaaaactgatagcgatatgttcatcaacgtggactatcttactgaactgctgctgaagaaaaatcgcacaacacgtttctttacagggtttctcaagctgaacgaattccctattcgccagccgttttccaagtggttcgtgagcaagtctgagtacccgtgggaccggtacccccccttctgtagcggcacaggttacgtgttttcgggagacgttgccagtcaggtgtataatgtctccaaatcagtgccctatattaagctcgaggatgtctttgtcgggctttgcctggagcgactcaatatccgactcgaggaacttcatagccagcctaccttcttccccggcggtctgcggttttctgtgtgcctgtttagacggatcgtggcctgtcactttatcaagccgcggactttacttgactactggcaagcgctcgagaactccaggggagaggactgcccaccggtgtag

SEQ ID NO: 227508 - DNA, 933 bp, Artificial Sequence
  derived and/or modified sequence
atggccttccccaagatgcggctgatgtacatctgcctgctggtgctgggggctctttgtctgtattttagcatgtatagcctgaaccctttcaaagagcagtcatttgtctataaaaaagatgggaacttcctcaagctgcctgacaccgactgcagacagactcccccctttctcgtcctgctggtgacctcaagtcataagcagctggctgagaggatggccatccgccagacttggggcaaagagaggatggtcaaggggaagcagctgaagactttttttctgctgggtactacaagttctgccgccgagaccaaggaggtggaccaagagtctcaacggcatggcgatatcatccagaaagacttcctggatgtttactacaacttaactctaaagactatgatgggaatagagtgggtgcacaggttttgtccccaggccgcatttgtgatgaaaaccgattctgatatgtttatcaacgtggactatttaactgaactgttactgaagaagaatcgaacgacacggttcttcactggatttctgaagttaaacgagttccccattcggcagccttttagtaaatggtttgtgtctaaaagcgagtatccttgggacagataccccccattttgtagtggtaccggttatgtctttagtggagacgtcgcttcgcaggtttataatgttagcaagtctgtcccgtacatcaagctcgaagatgtgttcgtgggtctttgtctcgagcgtcttaacattcgtttggaggagctacatagccaaccaacattttttccaggaggattacgatttagtgtttgtcttttcagaagaattgtggcatgtcacttcattaaacctcgaaccttgctggactattggcaagcgcttgagaactcccgaggcgaggactgccctcccgtgtag

SEQ ID NO: 227509 - DNA, 933 bp, Artificial Sequence
  derived and/or modified sequence
atggccttccccaagatgcggctgatgtacatctgcctgctggtgctgggcgctctctgcctatatttcagcatgtacagcttgaacccattcaaggagcagagtttcgtgtacaagaaggatggtaatttcctcaaattgccagacaccgattgtagacagacccccccgttcttggtgcttctggtgacgagcagtcacaagcagcttgcggagcgaatggccattagacagacctggggcaaagagcggatggtaaaggggaaacagctgaagacattcttcctactaggcacgactagttctgcagccgagacaaaggaggttgaccaggagtcacagcggcatggcgatataattcagaaagactttcttgatgtttactacaatttgaccttaaagactatgatggggattgaatgggttcacaggttttgtcctcaggctgccttcgttatgaagaccgactctgacatgttcataaacgtggactacctcaccgagcttctccttaagaagaaccgtacaacgcgattcttcacaggcttccttaagctcaacgaatttcccattagacaacccttcagcaagtggttcgttagcaagagtgagtacccttgggaccgctaccctccgttctgctccgggactggctacgttttttctggcgacgtagcttcgcaggtttataacgtaagcaagagcgtgccctacattaaactggaggacgtcttcgtgggactgtgtctggaacgccttaacataaggctggaagaactgcatagccagccaacgttttttccaggtggtctccgtttctccgtgtgcttattcaggagaatagtggcgtgccattttattaagcctaggacactattggactattggcaagctttagagaatagccggggagaagactgtcctcccgtttag

SEQ ID NO: 227510 - DNA, 933 bp, Artificial Sequence
  derived and/or modified sequence
atggccttccccaagatgcggctgatgtacatctgcctgctggtgttgggggctctgtgcctatatttttccatgtattctctcaatccttttaaggaacaatcttttgtctacaaaaaagacggcaattttttaaaacttcctgacacagattgtcggcagaccccccccttcctcgtcctgctggttacaagctcccacaagcagctggctgagcgaatggcaatccggcagacgtggggcaaggagaggatggtgaaaggcaagcagctaaagacctttttcctgctcgggacaacctcttcggctgcagaaacgaaggaggtggatcaggagagccagcgccatggagatatcatccaaaaggacttcctcgacgtgtactacaacctcacattgaagactatgatgggaatcgaatgggtccataggttctgccctcaagccgcgttcgttatgaagactgacagcgacatgttcatcaacgttgactatttgaccgaactactgctcaaaaagaaccgcacaacacgcttcttcaccgggttcctgaaactaaacgagtttcccatacgacagccctttagcaaatggttcgtcagtaaatccgagtatccctgggaccgctaccccccattctgttccggtaccggctacgtatttagcggagatgtggcctcccaagtgtataacgtgagtaagagcgtgccctacataaagttggaggacgtatttgttggtctgtgtctagagcgtcttaacatccgactcgaggaactgcacagtcagcccactttctttccagggggccttcgattctccgtctgtcttttcagacgcatagtggcatgtcattttatcaaacctagaactctgctggattactggcaggccctcgagaacagccggggcgaagactgtcctcctgtatag

SEQ ID NO: 227511 - DNA, 933 bp, Artificial Sequence
  derived and/or modified sequence
atggcctttcccaaaatgcgcctcatgtatatctgtctactcgtcctgggagccctgtgcctctatttctcaatgtattcgctaaatccattcaaagagcagtcatttgtatacaaaaaggacggtaacttcctgaagctgcccgatacagactgcagacagacccctccattcttggtgcttctcgtcacaagcagccacaagcagctggccgaacgcatggccatacgtcagacctggggaaaagaacggatggtgaagggaaaacagcttaaaaccttcttccttttgggtaccacttcttccgccgctgagaccaaggaagtcgatcaggaaagccaacggcatggcgatataattcaaaaggattttttggatgtatattacaaccttaccctcaaaacaatgatgggcattgaatgggtacaccgcttctgcccccaggccgcatttgtcatgaaaaccgactccgatatgttcatcaacgtcgactatctgacggagcttctactcaagaaaaaccggactacacgtttcttcacgggcttcctgaaacttaatgaattcccgatacggcaaccattcagcaagtggttcgtcagcaaaagcgaatatccctgggacaggtaccccccattttgcagcggtaccggatatgtcttctctggcgacgtcgcaagccaagtgtataatgtaagtaaatccgtgccgtatatcaaacttgaggatgtattcgtgggactttgcctggaacggctgaacattagacttgaagagttacactcccaacccaccttcttcccgggtggactgcgattctcagtgtgtttatttcgcaggatagtggcgtgtcactttatcaaaccacggacactcttggattattggcaggctctggagaactcccggggagaagactgcccgcctgtgtag

SEQ ID NO: 227512 - DNA, 933 bp, Artificial Sequence
  derived and/or modified sequence
atggccttcccaaagatgcggctcatgtacatatgtttactggtactcggcgcactgtgtctctatttctccatgtactcactgaaccccttcaaagagcaaagtttcgtgtacaagaaagacggcaactttctcaaactgcccgacacagattgcagacaaacaccccctttccttgttctgcttgtgacttcctcccacaaacagctggctgagcggatggcaatccggcaaacgtggggcaaggaaagaatggtgaaaggcaagcaactgaagacctttttccttttgggaaccacttctagcgcagcggaaaccaaagaggtcgatcaggaatctcagaggcacggggatatcatccagaaggactttctcgacgtgtactataaccttaccctgaaaacaatgatgggcatcgagtgggtgcatcgcttctgccctcaggcagcattcgtgatgaagactgatagtgatatgtttattaatgttgattacttgaccgagctactcctgaaaaagaatagaactacgcggtttttcactgggtttttgaagctgaacgagtttccaatccggcagccgtttagcaaatggtttgtcagcaagtctgagtacccgtgggaccgctatcctcctttctgttccgggacagggtacgtgttctccggggatgtggccagtcaagtgtacaatgtgtctaagtccgtcccttacataaaactggaggatgtttttgtaggtctgtgcctggaacggctgaatattcgtttagaggagctccacagccagccaactttcttccctgggggtcttcgattctctgtatgcctgttccgcaggattgtagcttgtcactttataaaaccgaggactttacttgactactggcaggccctggaaaattcgcgcggagaggactgtccccctgtgtag

SEQ ID NO: 227513 - DNA, 933 bp, Artificial Sequence
  derived and/or modified sequence
atggcattccccaaaatgagactgatgtatatttgcctgctcgtgctgggagctctttgtctgtatttcagcatgtactcactgaacccattcaaagagcaatcattcgtgtacaagaaagatgggaactttctgaaactgcctgatacggattgccggcagaccccgccattcctggtgttactggtgactagctcccataaacagctggctgagaggatggctatccgtcagacttggggaaaagaacgaatggtcaaaggcaaacagttaaaaactttctttctactaggcactacatcaagcgctgcggagactaaggaagtggaccaggagtcccagcggcatggcgatatcatccagaaagacttccttgatgtgtattacaacttaactttgaagaccatgatgggaatcgaatgggtccataggttctgtccccaggctgcctttgtcatgaagacagattctgacatgttcatcaacgtggattacctgaccgaactgctcctcaaaaaaaatagaactacccgatttttcacaggctttctgaagctgaacgagttcccgattcgccagcctttttccaaatggtttgtgtccaaatcagaatatccctgggaccgatacccccctttctgcagtggaaccggctatgtgttctcaggagacgtcgcctctcaggtgtacaatgttagcaaatctgttccctacataaagttggaggacgttttcgtgggtctgtgcctcgaacggcttaacatccgcctggaagagctgcactcacagcccactttctttcccggaggacttcggttcagcgtgtgtctgttcaggagaatcgtcgcatgccattttatcaaaccacgaactctgctggactactggcaggccttagaaaactctcgaggtgaggattgccctcccgtttag

SEQ ID NO: 227514 - DNA, 933 bp, Artificial Sequence
  derived and/or modified sequence
atggcatttccaaaaatgcgacttatgtacatctgtctgcttgtgttgggcgctctgtgtctatactttagcatgtacagtctaaacccgttcaaggagcaaagcttcgtgtacaagaaagatggaaactttttgaagctgccggacaccgactgtaggcagacccccccatttcttgtcctcctggtgacgtccagccataagcagttagccgaaagaatggctatcaggcagacctggggaaaggagagaatggtgaaagggaagcaattaaagactttcttcttgctgggcaccacatcctctgccgcagagactaaagaagtagatcaggaaagccagcgccacggggatatcattcagaaggatttcctagatgtctactataatctcactttgaagacgatgatggggattgagtgggtacaccggttttgcccgcaggcggcttttgtgatgaaaaccgattcagacatgttcattaatgtggattatctgaccgagttactgctgaaaaagaataggacaacaagattcttcactggtttcctgaaactaaacgaattcccaatccgccaacccttcagcaaatggtttgtgtccaaaagcgaatacccttgggacagatatccaccattctgctctgggacgggatacgtcttctccggcgatgttgcttctcaggtctacaatgtcagtaagagtgtgccgtatatcaaactggaggatgtcttcgtcgggctgtgcctggaaagactaaatattcgcctcgaggagctgcatagccagcctaccttcttccccggtggacttcgcttctccgtctgcctcttcagacgaattgtggcctgccatttcattaagccgagaaccttgctggattactggcaggcgctcgaaaactcacgtggcgaggactgtcccccagtgtag

SEQ ID NO: 227515 - DNA, 2606 bp, Artificial Sequence
  derived and/or modified sequence
ctctctagagaaccctgactaatacacctggagtgcagaatctgctggagaaactgccattccgttattgactggctggtcaggccatacagcctggtggtctagatgtgtttggagtgattcctgtcagaatcaccatttttggtaaacaaaccaagcccagaacctgataattatggagcattctacactgacagttctttgagacaaatttcctcttggcatttacactgtggctttagctttcaaaccagaggttcctcttacccagcaaaaaatggctttcccgaagatgagattgatgtatatttgccttctggttctgggggctctttgtttgtattttagcatgtacagtctaaatcctttcaaagaacagtcctttgtttacaagaaagacgggaacttccttaagctcccagatacagactgcaggcagacacctcccttcctcgtcctgctggtgacctcatcccacaaacagttggctgagcgcatggccatccggcagacgtgggggaaagagaggatggtgaagggaaagcagctgaagacattcttcctcctggggaccaccagcagtgcagcggaaacgaaagaggtggaccaggagagccagcgacacggggacattatccagaaggatttcctagacgtctattacaatctgaccctgaagaccatgatgggcatagaatgggtccatcgcttttgtcctcaggcggcgtttgtgatgaaaacagactcagacatgttcatcaatgttgactatctgactgaactgcttctgaagaaaaacagaacaaccaggtttttcactggcttcttgaaactcaatgagtttcccatcaggcagccattcagcaagtggtttgtcagtaaatctgaatatccgtgggacaggtacccaccattctgctccggcaccggctacgtgttttctggcgacgtggcgagtcaggtgtacaatgtctccaagagcgtcccatacattaaactggaagacgtgtttgtggggctctgcctcgaaaggctgaacatcagattggaggagctccactcccagccgaccttttttccagggggcttacgcttctccgtatgcctcttcaggaggatcgtggcctgccacttcatcaagcctcggactctcttggactactggcaggctctagagaattcccggggggaagattgtccgcctgtctgaggggagcccagaggcacatccggacaagtttcagataacccgtggggatagtttttgctagattttggaagagggggcgggacagaggatgctgttcttcagtgctgaaatccacgccagaatgtcggtgttcatgaagtcactgattagttcccacttggtgccccaggcaataataggcccgtctcttgggcacgcacactcttcatactaagtgtttgacatacacctggatttttgcatttcaggggtcagtatcctatgacatgatgggtgttaccatcctaattttacaggcaaggacacagcagctgcgagaggtacagaaacttgtcccaaggctcacagccagtaggcataggagcgggaatgaaaatcgagcactgtcagaatctggtgggcagcccctgacttgaaccactcccacgtgctgcctcccttaggaggggacactgatgatgaggtctcggagccggcatccttccatccctgtcgagtcccctccacctcagctcccagtccttgtgctttttggagctaagcctgggatgaccaaattcaccccagctccttcattcacagggctggatgtagctgggattgagtccatgttatcggctcggtactcaacacaacccaagtttcatccgaggaaatgtccccgcagtggatgcagctcacatgctgaggaacacccagctctggacagagttcttataaatgtataaattaggctcagaaaccactgcattctgacctgctgtacagactgcccacactgctgacctgcctagcgagcaggacatcccttctgagccatctgctgctctctcatttcatcaccccaactgtcccttgtttttgatcaatggggaccagccactgccccaggagcactttagggctctcagttcaaactgaaggacagttgaactcagatggggttcatgtgggattctgggagctttctgggaattcagttggagtcaagtcaggatgctctcaaggacccctcgggctcagagccctaaagtgggccctggtgaagcagggtggtcctgcgtccacttcccaagcctgagccaagctcatcttcattgaatgtctcatttggccgaggaacaactgaactttgtggtttgctgtttagccttcagtttgctccgctgcctcctacccagaggtttgtgcgagcctgtgttgcagggttgtataaaaccaaggtacttcgttagttttgcccattcagccatggtcacgtgacatgcaaagtaatcttgctcctaattatagaaatgatttttcttttaattttttactttaccagactttactttgtactcagagaagaggcctcacatggctgtgtcacatataaatgttggactaaactctt

SEQ ID NO: 227516 - DNA, 2763 bp, Artificial Sequence
  derived and/or modified sequence
gggcccagatagaacaagaaggcagaagaaatgtgaattcctctttctctgctggagctgggatattcttcttctcctgcccttggacatcagagctgcaggctctctggcctttggacccgaggatttataccaagcaggtttctgggttctcaggcctttggccttggactgatagttacaccattggcatatctggttctgaggctcttggtcttggactgagccacactcctggcatcccagcgtctccagcttgcatggcctgtcacgtgattcctgtcagaatcaccatttttggtaaacaaaccaagcccagaacctgataattatggagcattctacactgacagttctttgagacaaatttcctcttggcatttacactgtggctttagctttcaaaccagaggttcctcttacccagcaaaaaatggctttcccgaagatgagattgatgtatatttgccttctggttctgggggctctttgtttgtattttagcatgtacagtctaaatcctttcaaagaacagtcctttgtttacaagaaagacgggaacttccttaagctcccagatacagactgcaggcagacacctcccttcctcgtcctgctggtgacctcatcccacaaacagttggctgagcgcatggccatccggcagacgtgggggaaagagaggatggtgaagggaaagcagctgaagacattcttcctcctggggaccaccagcagtgcagcggaaacgaaagaggtggaccaggagagccagcgacacggggacattatccagaaggatttcctagacgtctattacaatctgaccctgaagaccatgatgggcatagaatgggtccatcgcttttgtcctcaggcggcgtttgtgatgaaaacagactcagacatgttcatcaatgttgactatctgactgaactgcttctgaagaaaaacagaacaaccaggtttttcactggcttcttgaaactcaatgagtttcccatcaggcagccattcagcaagtggtttgtcagtaaatctgaatatccgtgggacaggtacccaccattctgctccggcaccggctacgtgttttctggcgacgtggcgagtcaggtgtacaatgtctccaagagcgtcccatacattaaactggaagacgtgtttgtggggctctgcctcgaaaggctgaacatcagattggaggagctccactcccagccgaccttttttccagggggcttacgcttctccgtatgcctcttcaggaggatcgtggcctgccacttcatcaagcctcggactctcttggactactggcaggctctagagaattcccggggggaagattgtccgcctgtctgaggggagcccagaggcacatccggacaagtttcagataacccgtggggatagtttttgctagattttggaagagggggcgggacagaggatgctgttcttcagtgctgaaatccacgccagaatgtcggtgttcatgaagtcactgattagttcccacttggtgccccaggcaataataggcccgtctcttgggcacgcacactcttcatactaagtgtttgacatacacctggatttttgcatttcaggggtcagtatcctatgacatgatgggtgttaccatcctaattttacaggcaaggacacagcagctgcgagaggtacagaaacttgtcccaaggctcacagccagtaggcataggagcgggaatgaaaatcgagcactgtcagaatctggtgggcagcccctgacttgaaccactcccacgtgctgcctcccttaggaggggacactgatgatgaggtctcggagccggcatccttccatccctgtcgagtcccctccacctcagctcccagtccttgtgctttttggagctaagcctgggatgaccaaattcaccccagctccttcattcacagggctggatgtagctgggattgagtccatgttatcggctcggtactcaacacaacccaagtttcatccgaggaaatgtccccgcagtggatgcagctcacatgctgaggaacacccagctctggacagagttcttataaatgtataaattaggctcagaaaccactgcattctgacctgctgtacagactgcccacactgctgacctgcctagcgagcaggacatcccttctgagccatctgctgctctctcatttcatcaccccaactgtcccttgtttttgatcaatggggaccagccactgccccaggagcactttagggctctcagttcaaactgaaggacagttgaactcagatggggttcatgtgggattctgggagctttctgggaattcagttggagtcaagtcaggatgctctcaaggacccctcgggctcagagccctaaagtgggccctggtgaagcagggtggtcctgcgtccacttcccaagcctgagccaagctcatcttcattgaatgtctcatttggccgaggaacaactgaactttgtggtttgctgtttagccttcagtttgctccgctgcctcctacccagaggtttgtgcgagcctgtgttgcagggttgtataaaaccaaggtacttcgttagttttgcccattcagccatggtcacgtgacatgcaaagtaatcttgctcctaattatagaaatgatttttcttttaattttttactttaccagactttactttgtactcagagaagaggcctcacatggctgtgtcacatataaatgttggactaaactctta

SEQ ID NO: 227517 - DNA, 2922 bp, Artificial Sequence
  derived and/or modified sequence
acaggaaagccgctggttgtgatggtggctatgacaaaccttcagcctgaagacccgggagggaaaaatgaagctgacaagaagcacgttgctgagtgatcctgggttcccatcctccgcacccgtgcatccacgcgtgggcccagccagcaaggagaagtctaacaggcaggaggaggggagacacaaggagcccccgcatttcatctggaagagaggccattgaaaccaagcatttgtgttcaagtaagaaaatgtatccaagtcacaaagaaacataatttggcttttggagacatgagcagcttcatttctcatttgttcattcgaaagtctccactgggcttctgagtgccacatcctgtccagaatgatgaaagatacagaaaatggtgcctgctgaccttctggagttattggctagtaagaaagtgattcctgtcagaatcaccatttttggtaaacaaaccaagcccagaacctgataattatggagcattctacactgacagttctttgagacaaatttcctcttggcatttacactgtggctttagctttcaaaccagaggttcctcttacccagcaaaaaatggctttcccgaagatgagattgatgtatatttgccttctggttctgggggctctttgtttgtattttagcatgtacagtctaaatcctttcaaagaacagtcctttgtttacaagaaagacgggaacttccttaagctcccagatacagactgcaggcagacacctcccttcctcgtcctgctggtgacctcatcccacaaacagttggctgagcgcatggccatccggcagacgtgggggaaagagaggatggtgaagggaaagcagctgaagacattcttcctcctggggaccaccagcagtgcagcggaaacgaaagaggtggaccaggagagccagcgacacggggacattatccagaaggatttcctagacgtctattacaatctgaccctgaagaccatgatgggcatagaatgggtccatcgcttttgtcctcaggcggcgtttgtgatgaaaacagactcagacatgttcatcaatgttgactatctgactgaactgcttctgaagaaaaacagaacaaccaggtttttcactggcttcttgaaactcaatgagtttcccatcaggcagccattcagcaagtggtttgtcagtaaatctgaatatccgtgggacaggtacccaccattctgctccggcaccggctacgtgttttctggcgacgtggcgagtcaggtgtacaatgtctccaagagcgtcccatacattaaactggaagacgtgtttgtggggctctgcctcgaaaggctgaacatcagattggaggagctccactcccagccgaccttttttccagggggcttacgcttctccgtatgcctcttcaggaggatcgtggcctgccacttcatcaagcctcggactctcttggactactggcaggctctagagaattcccggggggaagattgtccgcctgtctgaggggagcccagaggcacatccggacaagtttcagataacccgtggggatagtttttgctagattttggaagagggggcgggacagaggatgctgttcttcagtgctgaaatccacgccagaatgtcggtgttcatgaagtcactgattagttcccacttggtgccccaggcaataataggcccgtctcttgggcacgcacactcttcatactaagtgtttgacatacacctggatttttgcatttcaggggtcagtatcctatgacatgatgggtgttaccatcctaattttacaggcaaggacacagcagctgcgagaggtacagaaacttgtcccaaggctcacagccagtaggcataggagcgggaatgaaaatcgagcactgtcagaatctggtgggcagcccctgacttgaaccactcccacgtgctgcctcccttaggaggggacactgatgatgaggtctcggagccggcatccttccatccctgtcgagtcccctccacctcagctcccagtccttgtgctttttggagctaagcctgggatgaccaaattcaccccagctccttcattcacagggctggatgtagctgggattgagtccatgttatcggctcggtactcaacacaacccaagtttcatccgaggaaatgtccccgcagtggatgcagctcacatgctgaggaacacccagctctggacagagttcttataaatgtataaattaggctcagaaaccactgcattctgacctgctgtacagactgcccacactgctgacctgcctagcgagcaggacatcccttctgagccatctgctgctctctcatttcatcaccccaactgtcccttgtttttgatcaatggggaccagccactgccccaggagcactttagggctctcagttcaaactgaaggacagttgaactcagatggggttcatgtgggattctgggagctttctgggaattcagttggagtcaagtcaggatgctctcaaggacccctcgggctcagagccctaaagtgggccctggtgaagcagggtggtcctgcgtccacttcccaagcctgagccaagctcatcttcattgaatgtctcatttggccgaggaacaactgaactttgtggtttgctgtttagccttcagtttgctccgctgcctcctacccagaggtttgtgcgagcctgtgttgcagggttgtataaaaccaaggtacttcgttagttttgcccattcagccatggtcacgtgacatgcaaagtaatcttgctcctaattatagaaatgatttttcttttaattttttactttaccagactttactttgtactcagagaagaggcctcacatggctgtgtcacatataaatgttggactaaactctta

SEQ ID NO: 227518 - DNA, 2446 bp, Artificial Sequence
  derived and/or modified sequence
ctctctagagaaccctgactaatacacctggagtgcagaatctgctggagaaactgccattccgttattgactggctggtcaggccatacagcctggtggtctagatgtgtttggagatggctttcccgaagatgagattgatgtatatttgccttctggttctgggggctctttgtttgtattttagcatgtacagtctaaatcctttcaaagaacagtcctttgtttacaagaaagacgggaacttccttaagctcccagatacagactgcaggcagacacctcccttcctcgtcctgctggtgacctcatcccacaaacagttggctgagcgcatggccatccggcagacgtgggggaaagagaggatggtgaagggaaagcagctgaagacattcttcctcctggggaccaccagcagtgcagcggaaacgaaagaggtggaccaggagagccagcgacacggggacattatccagaaggatttcctagacgtctattacaatctgaccctgaagaccatgatgggcatagaatgggtccatcgcttttgtcctcaggcggcgtttgtgatgaaaacagactcagacatgttcatcaatgttgactatctgactgaactgcttctgaagaaaaacagaacaaccaggtttttcactggcttcttgaaactcaatgagtttcccatcaggcagccattcagcaagtggtttgtcagtaaatctgaatatccgtgggacaggtacccaccattctgctccggcaccggctacgtgttttctggcgacgtggcgagtcaggtgtacaatgtctccaagagcgtcccatacattaaactggaagacgtgtttgtggggctctgcctcgaaaggctgaacatcagattggaggagctccactcccagccgaccttttttccagggggcttacgcttctccgtatgcctcttcaggaggatcgtggcctgccacttcatcaagcctcggactctcttggactactggcaggctctagagaattcccggggggaagattgtccgcctgtctgaggggagcccagaggcacatccggacaagtttcagataacccgtggggatagtttttgctagattttggaagagggggcgggacagaggatgctgttcttcagtgctgaaatccacgccagaatgtcggtgttcatgaagtcactgattagttcccacttggtgccccaggcaataataggcccgtctcttgggcacgcacactcttcatactaagtgtttgacatacacctggatttttgcatttcaggggtcagtatcctatgacatgatgggtgttaccatcctaattttacaggcaaggacacagcagctgcgagaggtacagaaacttgtcccaaggctcacagccagtaggcataggagcgggaatgaaaatcgagcactgtcagaatctggtgggcagcccctgacttgaaccactcccacgtgctgcctcccttaggaggggacactgatgatgaggtctcggagccggcatccttccatccctgtcgagtcccctccacctcagctcccagtccttgtgctttttggagctaagcctgggatgaccaaattcaccccagctccttcattcacagggctggatgtagctgggattgagtccatgttatcggctcggtactcaacacaacccaagtttcatccgaggaaatgtccccgcagtggatgcagctcacatgctgaggaacacccagctctggacagagttcttataaatgtataaattaggctcagaaaccactgcattctgacctgctgtacagactgcccacactgctgacctgcctagcgagcaggacatcccttctgagccatctgctgctctctcatttcatcaccccaactgtcccttgtttttgatcaatggggaccagccactgccccaggagcactttagggctctcagttcaaactgaaggacagttgaactcagatggggttcatgtgggattctgggagctttctgggaattcagttggagtcaagtcaggatgctctcaaggacccctcgggctcagagccctaaagtgggccctggtgaagcagggtggtcctgcgtccacttcccaagcctgagccaagctcatcttcattgaatgtctcatttggccgaggaacaactgaactttgtggtttgctgtttagccttcagtttgctccgctgcctcctacccagaggtttgtgcgagcctgtgttgcagggttgtataaaaccaaggtacttcgttagttttgcccattcagccatggtcacgtgacatgcaaagtaatcttgctcctaattatagaaatgatttttcttttaattttttactttaccagactttactttgtactcagagaagaggcctcacatggctgtgtcacatataaatgttggactaaactctt

SEQ ID NO: 227519 - protein, 356 aa, Artificial Sequence
  derived and/or modified sequence
MSRPLLITFTPATDPSDLWKDGQQQPQPEKPESTLDGAAARAFYEALIGDESSAPDSQRSQTEPARERKRKKRRIMKAPAAEAVAEGASGRHGQGRSLEAEDKMTHRILRAAQEGDLPELRRLLEPHEAGGAGGNINARDAFWWTPLMCAARAGQGAAVSYLLGRGAAWVGVCELSGRDAAQLAEEAGFPEVARMVRESHGETRSPENRSPTPSLQYCENCDTHFQDSNHRTSTAHLLSLSQGPQPPNLPLGVPISSPGFKLLLRGGWEPGMGLGPRGEGRANPIPTVLKRDQEGLGYRSAPQPRVTHFPAWDTRAVAGRERPPRVATLSWREERRREEKDRAWERDLRTYMNLEF

SEQ ID NO: 227520 - protein, 165 aa, Artificial Sequence
  derived and/or modified sequence
MSRPLLITFTPATDPSDLWKDGQQQPQPEKPESTLDGAAARAFYEALIGDESSAPDSQRSQTEPARERKRKKRRIMKAPAAEAVAEGASGRHGQGRSLEAEDKMTHRILRAAQEGDLPELRRLLEPHEAGGAGGNINARDAFWWTPLMCAARAGQGAAVSYLLGR

SEQ ID NO: 227521 - protein, 152 aa, Artificial Sequence
  derived and/or modified sequence
MSRPLLITFTPATDPSDLWKDGQQQPQPEKPESTLDGAAARAFYEALIGDESSAPDSQRSQTEPARERKRKKRRIMKAPAAEAVAEGASGRHGQGRSLEAEDKMTHRILRAAQEGDLPELRRLLEPHEAGGAGGNINARDAFWWTPLMCAAR

SEQ ID NO: 227522 - protein, 107 aa, Artificial Sequence
  derived and/or modified sequence
MSRPLLITFTPATDPSDLWKDGQQQPQPEKPESTLDGAAARAFYEALIGDESSAPDSQRSQTEPARERKRKKRRIMKAPAAEAVAEGASGRHGQGRSLEAEDKMTHR

SEQ ID NO: 227523 - DNA, 1598 bp, Artificial Sequence
  derived and/or modified sequence
cagagacccttgacgggcatactgtttcctccgggctcctgcctcatgaggggagaggtgcggcttggctccaatggcgccattttgcggtacggaagctacacagcaacacgtataggagactctccccgagatcttctagggagtgacccatctatttttgtttgggaagaggaaactccgaaatgggatcgcggaagacttaaagggccaggctgatttttttttcctactgcaggtctctgaggctgtggttgctacagggtcaccacgagcttggcttacttgtctcatccttcccttgcctggtatcattttctcagttctcccaaaagccatgtcccggcccttgctcatcaccttcaccccagccactgaccccagcgacctctggaaggatgggcagcagcagccacagcccgagaagccagagtccaccctggatggggctgcagcccgagctttctatgaggccctgattggggatgagagcagcgctcctgactcccagagatctcagactgaacctgccagagaaagaaagagaaagaaaagaagaataatgaaggcaccagcagcagaagcagtggcagaaggagcatcaggaagacatggacaagggagatcccttgaggctgaggataagatgactcaccggatactgagggcagcccaggagggggacctgccagaacttaggagactgctggaaccgcatgaggcaggaggagctggggggaatatcaacgcccgggatgccttctggtggaccccactgatgtgtgctgctcgagcgggccagggggcagctgtgagctatctcctgggccgtggggctgcctgggtgggggtctgtgagctgagtggcagggatgcggctcagctcgctgaagaagctggcttccctgaggtagcccgcatggtcagggagagccatggagagacaaggagcccggaaaaccggtctcctactccctccctccagtactgcgagaactgtgacacccacttccaagattccaaccaccgcacatccactgctcacctgctgtcactgtcgcagggtcctcagcctcccaaccttccacttggggtgcccatctccagcccgggcttcaaactgctgctgagggggggctgggagccaggaatggggctgggaccccggggtgagggccgtgccaatcccatccccactgtcctcaagagggaccaggaaggactaggctacagatcagcaccccagccccgagtgacacatttcccagcttgggatacccgagctgtggctgggagggagagaccccctcgggtggccacactgagctggagggaggagagaaggagggaggagaaagacagggcttgggagcgggatctaaggacttacatgaacctcgagttctgactttggtaaagtctgaccctagtctgctgctgaagtctgaacttgggcctctgacctgggccctttgacttccccttcctgggatctgctcagatgcagatcctgaagtttttggtcaataggctctgtcttcgtgagagacgggctgagagtcagaaataaatcaaccatttgtggtttattcactttt

SEQ ID NO: 227524 - DNA, 1800 bp, Artificial Sequence
  derived and/or modified sequence
cggggcccgggagtctgggcaatacagttttgtgctcactgggtgaagaggctgacttagggcggggaaaggagggagccaggctggatctctttccgcagctctcctcacgttcccctctagtcccggcgcggcgctgctgcccaggggactggcctatcctcggccaatccgctgggtccttattgcctgttgggcccctagtgcgaatcagtcccgccagagacccttgacgggcatactgtttcctccgggctcctgcctcatgaggggagagaatggcgccattttgcggtacggaagctacacagcaacacgtataggagactctccccgagatcttctagggagtgacccatctatttttgtttgggaagaggaaactccgaaatgggatcgcggaagacttaaagggccaggctgatttttttttcctactggtctctgaggctgtggttgctacagggtcaccacgagcttggcttacttgtctcatccttcccttgcctggtatcattttctcagttctcccaaaagccatgtcccggcccttgctcatcaccttcaccccagccactgaccccagcgacctctggaaggatgggcagcagcagccacagcccgagaagccagagtccaccctggatggggctgcagcccgagctttctatgaggccctgattggggatgagagcagcgctcctgactcccagagatctcagactgaacctgccagagaaagaaagagaaagaaaagaagaataatgaaggcaccagcagcagaagcagtggcagaaggagcatcaggaagacatggacaagggagatcccttgaggctgaggataagatgactcaccggatactgagggcagcccaggagggggacctgccagaacttaggagactgctggaaccgcatgaggcaggaggagctggggggaatatcaacgcccgggatgccttctggtggaccccactgatgtgtgctgctcgagcgggccagggggcagctgtgagctatctcctgggccgtggggctgcctgggtgggggtctgtgagctgagtggcagggatgcggctcagctcgctgaagaagctggcttccctgaggtagcccgcatggtcagggagagccatggagagacaaggagcccggaaaaccggtctcctactccctccctccagtactgcgagaactgtgacacccacttccaagattccaaccaccgcacatccactgctcacctgctgtcactgtcgcagggtcctcagcctcccaaccttccacttggggtgcccatctccagcccgggcttcaaactgctgctgagggggggctgggagccaggaatggggctgggaccccggggtgagggccgtgccaatcccatccccactgtcctcaagagggaccaggaaggactaggctacagatcagcaccccagccccgagtgacacatttcccagcttgggatacccgagctgtggctgggagggagagaccccctcgggtggccacactgagctggagggaggagagaaggagggaggagaaagacagggcttgggagcgggatctaaggacttacatgaacctcgagttctgactttggtaaagtctgaccctagtctgctgctgaagtctgaacttgggcctctgacctgggccctttgacttccccttcctgggatctgctcagatgcagatcctgaagtttttggtcaataggctctgtcttcgtgagagacgggctgagagtcagaaataaatcaaccatttgtggtttattcactttt

SEQ ID NO: 227525 - DNA, 1910 bp, Artificial Sequence
  derived and/or modified sequence
aggcgtgacgttatttcattacacggcttctcggcattccacaggtttccctccgcctcctgagggcctttcctaacccacagagtggattcctggctccagaaaatgggcttggagcgggggccacgttgaggaaggcgaagggcattgtgggggcgttatgtaaaagtaggaccccaaccgacagatcctagtgctcgcgccacctgggcgcgcggagctttgctcgtttactattgaaaaagttccagcgcgggaaactgaacccggagctttgcgcacgcccgagccctcaagtaatgtgggttgtggtttttgttgttgttgtcgccacgcatgcgtcttcgtgccgtgtggctatttgattgtgtcaactcttctgattagaatggcgccattttgcggtacggaagctacacagcaacacgtataggagactctccccgagatcttctagggagtgacccatctatttttgtttgggaagaggaaactccgaaatgggatcgcggaagacttaaagggccaggctgatttttttttcctactggtctctgaggctgtggttgctacagggtcaccacgagcttggcttacttgtctcatccttcccttgcctggtatcattttctcagttctcccaaaagccatgtcccggcccttgctcatcaccttcaccccagccactgaccccagcgacctctggaaggatgggcagcagcagccacagcccgagaagccagagtccaccctggatggggctgcagcccgagctttctatgaggccctgattggggatgagagcagcgctcctgactcccagagatctcagactgaacctgccagagaaagaaagagaaagaaaagaagaataatgaaggcaccagcagcagaagcagtggcagaaggagcatcaggaagacatggacaagggagatcccttgaggctgaggataagatgactcaccggatactgagggcagcccaggagggggacctgccagaacttaggagactgctggaaccgcatgaggcaggaggagctggggggaatatcaacgcccgggatgccttctggtggaccccactgatgtgtgctgctcgagcgggccagggggcagctgtgagctatctcctgggccgtggggctgcctgggtgggggtctgtgagctgagtggcagggatgcggctcagctcgctgaagaagctggcttccctgaggtagcccgcatggtcagggagagccatggagagacaaggagcccggaaaaccggtctcctactccctccctccagtactgcgagaactgtgacacccacttccaagattccaaccaccgcacatccactgctcacctgctgtcactgtcgcagggtcctcagcctcccaaccttccacttggggtgcccatctccagcccgggcttcaaactgctgctgagggggggctgggagccaggaatggggctgggaccccggggtgagggccgtgccaatcccatccccactgtcctcaagagggaccaggaaggactaggctacagatcagcaccccagccccgagtgacacatttcccagcttgggatacccgagctgtggctgggagggagagaccccctcgggtggccacactgagctggagggaggagagaaggagggaggagaaagacagggcttgggagcgggatctaaggacttacatgaacctcgagttctgactttggtaaagtctgaccctagtctgctgctgaagtctgaacttgggcctctgacctgggccctttgacttccccttcctgggatctgctcagatgcagatcctgaagtttttggtcaataggctctgtcttcgtgagagacgggctgagagtcagaaataaatcaaccatttgtggtttattcactttt

SEQ ID NO: 227526 - DNA, 1814 bp, Artificial Sequence
  derived and/or modified sequence
ggtatggcgttcggggcccgggagtctgggcaatacagttttgtgctcactgggtgaagaggctgacttagggcggggaaaggagggagccaggctggatctctttccgcagctctcctcacgttcccctctagtcccggcgcggcgctgctgcccaggggactggcctatcctcggccaatccgctgggtccttattgcctgttgggcccctagtgcgaatcagtcccgccagagacccttgacgggcatactgtttcctccgggctcctgcctcatgaggggagagaatggcgccattttgcggtacggaagctacacagcaacacgtataggagactctccccgagatcttctagggagtgacccatctatttttgtttgggaagaggaaactccgaaatgggatcgcggaagacttaaagggccaggctgatttttttttcctactgcaggtctctgaggctgtggttgctacagggtcaccacgagcttggcttacttgtctcatccttcccttgcctggtatcattttctcagttctcccaaaagccatgtcccggcccttgctcatcaccttcaccccagccactgaccccagcgacctctggaaggatgggcagcagcagccacagcccgagaagccagagtccaccctggatggggctgcagcccgagctttctatgaggccctgattggggatgagagcagcgctcctgactcccagagatctcagactgaacctgccagagaaagaaagagaaagaaaagaagaataatgaaggcaccagcagcagaagcagtggcagaaggagcatcaggaagacatggacaagggagatcccttgaggctgaggataagatgactcaccggatactgagggcagcccaggagggggacctgccagaacttaggagactgctggaaccgcatgaggcaggaggagctggggggaatatcaacgcccgggatgccttctggtggaccccactgatgtgtgctgctcgagcgggccagggggcagctgtgagctatctcctgggccgtggggctgcctgggtgggggtctgtgagctgagtggcagggatgcggctcagctcgctgaagaagctggcttccctgaggtagcccgcatggtcagggagagccatggagagacaaggagcccggaaaaccggtctcctactccctccctccagtactgcgagaactgtgacacccacttccaagattccaaccaccgcacatccactgctcacctgctgtcactgtcgcagggtcctcagcctcccaaccttccacttggggtgcccatctccagcccgggcttcaaactgctgctgagggggggctgggagccaggaatggggctgggaccccggggtgagggccgtgccaatcccatccccactgtcctcaagagggaccaggaaggactaggctacagatcagcaccccagccccgagtgacacatttcccagcttgggatacccgagctgtggctgggagggagagaccccctcgggtggccacactgagctggagggaggagagaaggagggaggagaaagacagggcttgggagcgggatctaaggacttacatgaacctcgagttctgactttggtaaagtctgaccctagtctgctgctgaagtctgaacttgggcctctgacctgggccctttgacttccccttcctgggatctgctcagatgcagatcctgaagtttttggtcaataggctctgtcttcgtgagagacgggctgagagtcagaaataaatcaaccatttgtggtttattcactttt

SEQ ID NO: 227527 - DNA, 2793 bp, Artificial Sequence
  derived and/or modified sequence
cacatcaaagtccggagaccccatgtgccgctcccagcgacaagggactcggagcagcgacgacttcagactcaccggctggacggggaccaggactggggtggggtagggaagttgctacttccagggaacggcggcgaccgctacagcgcaggccgcggacccgaccgcggcaggcgaagtggggtggggggagtggaaattagggagggtggggaagagggcaacacgcaagcgccaagggtcaggtgccgcggtggatgccgggacacggagtccccggtagagaaagaaactggctaaatgagagaaagcgaactaccaatcccaggatgacccgcgcacgacctggctgtcacgaaggcccggaggagggcgcttgcgggcggggcacaacgagaagccaccggaagcggaagccagaatggcgccattttgcggtacggaagctacacagcaacacgtataggagactctccccgagatcttctagggagtgacccatctatttttgtttgggaagaggaaactccgaaatgggatcgcggaagacttaaagggccaggctgatttttttttcctactggtctctgaggctgtggttgctacagggtcaccacgagcttggcttacttgtctcatccttcccttgcctggtatcattttctcagttctcccaaaagccatgtcccggcccttgctcatcaccttcaccccagccactgaccccagcgacctctggaaggatgggcagcagcagccacagcccgagaagccagagtccaccctggatggggctgcagcccgagctttctatgaggccctgattggggatgagagcagcgctcctgactcccagagatctcagactgaacctgccagagaaagaaagagaaagaaaagaagaataatgaaggcaccagcagcagaagcagtggcagaaggagcatcaggaagacatggacaagggagatcccttgaggctgaggataagatgactcaccggatactgagggcagcccaggagggggacctgccagaacttaggagactgctggaaccgcatgaggcaggaggagctggggggaatatcaacgcccgggatgccttctggtggaccccactgatgtgtgctgctcgagcgggccagggggcagctgtgagctatctcctgggccgtggggctgcctgggtgggggtctgtgagctgagtggcagggatgcggctcagctcgctgaagaagctggcttccctgaggtagcccgcatggtcagggagagccatggagagacaaggagcccggaaaaccggtctcctactccctccctccagtactgcgagaactgtgacacccacttccaagattccaaccaccgcacatccactgctcacctgctgtcactgtcgcagggtcctcagcctcccaaccttccacttggggtgcccatctccagcccgggcttcaaactgctgctgagggggggctgggagccaggaatggggctgggaccccggggtgagggccgtgccaatcccatccccactgtcctcaagagggaccaggaaggactaggctacagatcagcaccccagccccgagtgacacatttcccagcttgggatacccgagctgtggctgggagggagagaccccctcgggtggccacactgagctggagggaggagagaaggagggaggagaaagacagggcttgggagcgggatctaaggacttacatgaacctcgagttctgactttggtaaagtctgaccctagtctgctgctgaagtctgaacttgggcctctgacctgggccctttgacttccccttcctgggatctgctcagatgcagatcctgaagtttttggtcaataggctctgtcttcgtgagagacgggctgagagtcagaaataaatcaaccatttgtggtttattcacttttctggaagctattttgaggaagccaaacagaagcctgggagccacatgcaagtcccacctgagtcagaaggggcagcctctccaggtggcatgataaggtcacctccctgccaatctgggttcactttcaggtcccagaccctcctgggagtcccccacctattctttcaacccccctggaccaagaattgcccagcttcgtgcaagtctcacttcccccaggaggagttccctgactacagccaattcactgatttcacaaacataagtccatatactatgtgccaagaatacaggtaaagacattcccaaccctcaaagagttcacagctggagagggaaagtgccatgttatcaatttttttcttttttttttgagatgcagtttcgctctcattgcccaggctggagtgcaatggcatgatctcggctcaccacaacctctgccccccgagttcaagggattctcctgcctcagcctccccagtagctgggattacaggcatgccccaccacgcccagctaattttgtatttttagtagagacggggtttctccatgttggccaagctggtcttgaactcccgacctcaggtgatccgccggcctcggcttcccaaagtgctggggttgcaggcatgagccaccactcccggcccatgttatcaaatattataatgcagggtgataagggaagtcaaggcctctagagatgagaatgggtagggttttgctggaagaggccagtgtgataggaaggcccacgattatcaagcttgtacacttagttgaactgggaccagaactctagcccccaaatctaaactttaaacttctttgttccaccc

SEQ ID NO: 227528 - DNA, 802 bp, Artificial Sequence
  derived and/or modified sequence
cttaggctctaagtgtgaccttcgaaccctggtcagagtaatgaatggcgccattttgcggtacggaagctacacagcaacacgtataggagactctccccgagatcttctagggagtgacccatctatttttgtttgggaagaggaaactccgaaatgggatcgcggaagacttaaagggccaggctgatttttttttcctactgcaggtctctgaggctgtggttgctacagggtcaccacgagcttggcttacttgtctcatccttcccttgcctggtatcattttctcagttctcccaaaagccatgtcccggcccttgctcatcaccttcaccccagccactgaccccagcgacctctggaaggatgggcagcagcagccacagcccgagaagccagagtccaccctggatggggctgcagcccgagctttctatgaggccctgattggggatgagagcagcgctcctgactcccagagatctcagactgaacctgccagagaaagaaagagaaagaaaagaagaataatgaaggcaccagcagcagaagcagtggcagaaggagcatcaggaagacatggacaagggagatcccttgaggctgaggataagatgactcaccggatactgagggcagcccaggagggggacctgccagaacttaggagactgctggaaccgcatgaggcaggaggagctggggggaatatcaacgcccgggatgccttctggtggaccccactgatgtgtgctgctcgagcgggccagggggcagctgtgagctatctcctgggccg

SEQ ID NO: 227529 - DNA, 822 bp, Artificial Sequence
  derived and/or modified sequence
cgccacctgggcgcgcggagctttgctcgtttactattgaaaaagttccagcgcgggaaactgaacccggagctttgcgcacgcccgagccctcaagtaataatggcgccattttgcggtacggaagctacacagcaacacgtataggagactctccccgagatcttctagggagtgacccatctatttttgtttgggaagaggaaactccgaaatgggatcgcggaagacttaaagggccaggctgatttttttttcctactgcaggtctctgaggctgtggttgctacagggtcaccacgagcttggcttacttgtctcatccttcccttgcctggtatcattttctcagttctcccaaaagccatgtcccggcccttgctcatcaccttcaccccagccactgaccccagcgacctctggaaggatgggcagcagcagccacagcccgagaagccagagtccaccctggatggggctgcagcccgagctttctatgaggccctgattggggatgagagcagcgctcctgactcccagagatctcagactgaacctgccagagaaagaaagagaaagaaaagaagaataatgaaggcaccagcagcagaagcagtggcagaaggagcatcaggaagacatggacaagggagatcccttgaggctgaggataagatgactcaccggatactgagggcagcccaggagggggacctgccagaacttaggagactgctggaaccgcatgaggcaggaggagctggggggaatatcaacgcccgggatgccttctggtggaccccactgatgtgtgctgctcga

SEQ ID NO: 227530 - DNA, 751 bp, Artificial Sequence
  derived and/or modified sequence
gggcaatacagttttgtgctcactgggtgaagaggctgacttagggcggggaaaggagggagccaggctggatctctttccgcagctctcctcacgttcccctctagtcccggcgcggcgctgctgcccaggggactggcctatcctcggccaatccgctgggtccttattgcctgttgggcccctagtgcgaatcagtcccgccagagacccttgacgggcatactgtttcctccgggctcctgcctcatgaggggagaggaagaggaaactccgaaatgggatcgcggaagacttaaagggccaggctgatttttttttcctactgcaggtctctgaggctgtggttgctacagggtcaccacgagcttggcttacttgtctcatccttcccttgcctggtatcattttctcagttctcccaaaagccatgtcccggcccttgctcatcaccttcaccccagccactgaccccagcgacctctggaaggatgggcagcagcagccacagcccgagaagccagagtccaccctggatggggctgcagcccgagctttctatgaggccctgattggggatgagagcagcgctcctgactcccagagatctcagactgaacctgccagagaaagaaagagaaagaaaagaagaataatgaaggcaccagcagcagaagcagtggcagaaggagcatcaggaagacatggacaagggagatcccttgaggctgaggataagatgactcaccgg

SEQ ID NO: 227531 - DNA, 986 bp, Artificial Sequence
  derived and/or modified sequence
gacttagggcggggaaaggagggagccaggctggatctctttccgcagctctcctcacgttcccctctagtcccggcgcggcgctgctgcccaggggactggcctatcctcggccaatccgctgggtccttattgcctgttgggcccctagtgcgaatcagtcccgccagagacccttgacgggcatactgtttcctccgggctcctgcctcatgaggggagaggaagaggaaactccgaaatgggatcgcggaagacttaaagggccaggctgatttttttttcctactggtctctgaggctgtggttgctacagggtcaccacgagcttggcttacttgtctcatccttcccttgcctggtatcattttctcagttctcccaaaagccatgtcccggcccttgctcatcaccttcaccccagccactgaccccagcgacctctggaaggatgggcagcagcagccacagcccgagaagccagagtccaccctggatggggctgcagcccgagctttctatgaggccctgattggggatgagagcagcgctcctgactcccagagatctcagactgaacctgccagagaaagaaagagaaagaaaagaagaataatgaaggcaccagcagcagaagcagtggcagaaggagcatcaggaagacatggacaagggagatcccttgaggctgaggataagatgactcaccggatactgagggcagcccaggagggggacctgccagaacttaggagactgctggaaccgcatgaggcaggaggagctggggggaatatcaacgcccgggatgccttctggtggaccccactgatgtgtgctgctcgagcgggccagggggcagctgtgagctatctcctgggccgtggggctgcctgggtgggggtctgtgagctgagtggcagggatgcggctcagctcgctgaagaagctggcttccctgaggtagcccgcatggtcagggagag

SEQ ID NO: 227532 - DNA, 627 bp, Artificial Sequence
  derived and/or modified sequence
cctgggcgcgcggagctttgctcgtttactattgaaaaagttccagcgcgggaaactgaacccggagctttgcgcacgcccgagccctcaagtaataatggcgccattttgcggtacggaagctacacagcaacacgtataggagactctccccgagatcttctagggagtgacccatctatttttgtttgggaagaggaaactccgaaatgggatcgcggaagacttaaagggccaggctgatttttttttcctactggtctctgaggctgtggttgctacagggtcaccacgagcttggcttacttgtctcatccttcccttgcctggtatcattttctcagttctcccaaaagccatgtcccggcccttgctcatcaccttcaccccagccactgaccccagcgacctctggaaggatgggcagcagcagccacagcccgagaagccagagtccaccctggatggggctgcagcccgagctttctatgaggccctgattggggatgagagcagcgctcctgactcccagagatctcagactgaacctgccagagaaagaaagagaaagaaaagaagaataatgaaggcaccagcagcagaagcagtggcagaaggagcatcagg

SEQ ID NO: 227533 - DNA, 986 bp, Artificial Sequence
  derived and/or modified sequence
gacttagggcggggaaaggagggagccaggctggatctctttccgcagctctcctcacgttcccctctagtcccggcgcggcgctgctgcccgggggactggcctatcctcggccaatccgctgggtccttattgcctgttgggcccctagtgcgaatcagtcccgccagagacccttgacgggcatactgtttcctccgggctcctgcctcatgaggggagaggaagaggaaactccgaaatgggatcgcggaagacttaaagggccaggctgatttttttttcctactggtctctgaggctgtggttgctacagggtcaccacgagcttggcttacttgtctcatccttcccttgcctggtatcattttctcagttctcccaaaagccatgtcccggcccttgctcatcaccttcaccccagccactgaccccagcgacctctggaaggatgggcagcagcagccacagcccgagaagccagagtccaccctggatggggctgcagcccgagctttctatgaggccctgattggggatgagagcagcgctcctgactcccagagatctcagactgaacctgccagagaaagaaagagaaagaaaagaagaataatgaaggcaccagcagcagaagcagtggcagaaggagcatcaggaagacatggacaagggagatcccttgaggctgaggataagatgactcaccggatactgagggcagcccaggagggggacctgccagaacttaggagactgctggaaccgcatgaggcaggaggagctggggggaatatcaacgcccgggatgccttctggtggaccccactgatgtgtgctgctcgagcgggccagggggcagctgtgagctatctcctgggccgtggggctgcctgggtgggggtctgtgagctgagtggcagggatgcggctcagctcgctgaagaagctggcttccctgaggtagcccgcatggtcagggagag

SEQ ID NO: 227534 - DNA, 2793 bp, Artificial Sequence
  derived and/or modified sequence
cacatcaaagtccggagaccccatgtgccgctcccagcgacaagggactcggagcagcgacgacttcagactcaccggctggacggggaccaggactggggtggggtagggaagttgctacttccagggaacggcggcgaccgctacagcgcaggccgcggacccgaccgcggcaggcgaagtggggtggggggagtggaaattagggagggtggggaagagggcaacacgcaagcgccaagggtcaggtgccgcggtggatgccgggacacggagtccccggtagagaaagaaactggctaaatgagagaaagcgaactaccaatcccaggatgacccgcgcacgacctggctgtcacgaaggcccggaggagggcgcttgcgggcggggcacaacgagaagccaccggaagcggaagccagaatggcgccattttgcggtacggaagctacacagcaacacgtataggagactctccccgagatcttctagggagtgacccatctatttttgtttgggaagaggaaactccgaaatgggatcgcggaagacttaaagggccaggctgatttttttttcctactggtctctgaggctgtggttgctacagggtcaccacgagcttggcttacttgtctcatccttcccttgcctggtatcattttctcagttctcccaaaagccatgtcccggcccttgctcatcaccttcaccccagccactgaccccagcgacctctggaaggatgggcagcagcagccacagcccgagaagccagagtccaccctggatggggctgcagcccgagctttctatgaggccctgattggggatgagagcagcgctcctgactcccagagatctcagactgaacctgccagagaaagaaagagaaagaaaagaagaataatgaaggcaccagcagcagaagcagtggcagaaggagcatcaggaagacatggacaagggagatcccttgaggctgaggataagatgactcaccggatactgagggcagcccaggagggggacctgccagaacttaggagactgctggaaccgcatgaggcaggaggagctggggggaatatcaacgcccgggatgccttctggtggaccccactgatgtgtgctgctcgagcgggccagggggcagctgtgagctatctcctgggccgtggggctgcctgggtgggggtctgtgagctgagtggcagggatgcggctcagctcgctgaagaagctggcttccctgaggtagcccgcatggtcagggagagccatggagagacaaggagcccggaaaaccggtctcctactccctccctccagtactgcgagaactgtgacacccacttccaagattccaaccaccgcacatccactgctcacctgctgtcactgtcgcagggtcctcagcctcccaaccttccacttggggtgcccatctccagcccgggcttcaaactgctgctgagggggggctgggagccaggaatggggctgggaccccggggtgagggccgtgccaatcccatccccactgtcctcaagagggaccaggaaggactaggctacagatcagcaccccagccccgagtgacacatttcccagcttgggatacccgagctgtggctgggagggagagaccccctcgggtggccacactgagctggagggaggagagaaggagggaggagaaagacagggcttgggagcgggatctaaggacttacatgaacctcgagttctgactttggtaaagtctgaccctagtctgctgctgaagtctgaacttgggcctctgacctgggccctttgacttccccttcctgggatctgctcagatgcagatcctgaagtttttggtcaataggctctgtcttcgtgagagacgggctgagagtcagaaataaatcaaccatttgtggtttattcacttttctggaagctattttgaggaagccaaacagaagcctgggagccacatgcaagtcccacctgagtcagaaggggcagcctctccaggtggcatgataaggtcacctccctgccaatctgggttcactttcaggtcccagaccctcctgggagtcccccacctattctttcaacccccctggaccaagaattgcccagcttcgtgcaagtctcacttcccccaggaggagttccctgactacagccaattcactgatttcacaaacataagtccatatactatgtgccaagaatacaggtaaagacattcccaaccctcaaagagttcacagctggagagggaaagtgccatgttaccaatttttttcttttttttttgagatgcagtttcgctctcattgcccaggctggagtgcaatggcatgatctcggctcaccacaacctctgccccccgagttcaagggattctcctgcctcagcctccccagtagctgggattacaggcatgccccaccacgcccagctaattttgtatttttagtagagacggggtttctccatgttggccaagctggtcttgaactcccgacctcaggtgatccgccggcctcggcttcccaaagtgctggggttgcaggcatgagccaccactcccggcccatgttatcaaatattataatgcagggtgataagggaagtcaaggcctctagagatgagaatgggtagggttttgctggaagaggccagtgtgataggaaggcccacgattatcaagcttgtacacttagttgaactgggaccagaactctagcccccaaatctaaactttaaacttctttgttccaccc

SEQ ID NO: 227535 - DNA, 751 bp, Artificial Sequence
  derived and/or modified sequence
gggcaatacagttttgtgctcactgggtgaagaggctgacttagggcggggaaaggagggagccaggctggatctctttccgcagctctcctcacgttcccctctagtcccggcgcggcgctgctgcccgggggactggcctatcctcggccaatccgctgggtccttattgcctgttgggcccctagtgcgaatcagtcccgccagagacccttgacgggcatactgtttcctccgggctcctgcctcatgaggggagaggaagaggaaactccgaaatgggatcgcggaagacttaaagggccaggctgatttttttttcctactgcaggtctctgaggctgtggttgctacagggtcaccacgagcttggcttacttgtctcatccttcccttgcctggtatcattttctcagttctcccaaaagccatgtcccggcccttgctcatcaccttcaccccagccactgaccccagcgacctctggaaggatgggcagcagcagccacagcccgagaagccagagtccaccctggatggggctgcagcccgagctttctatgaggccctgattggggatgagagcagcgctcctgactcccagagatctcagactgaacctgccagagaaagaaagagaaagaaaagaagaataatgaaggcaccagcagcagaagcagtggcagaaggagcatcaggaagacatggacaagggagatcccttgaggctgaggataagatgactcaccgg

SEQ ID NO: 227536 - DNA, 1071 bp, Artificial Sequence
  derived and/or modified sequence
atgagccggcctttgctgatcacctttactcctgcaaccgacccaagcgacctctggaaagacggccagcaacaacctcagcctgaaaagcccgagtccaccttagatggggccgcagcgcgtgctttctacgaggctctgattggagacgagtcaagtgcccccgatagccagagaagccaaaccgagcctgcgcgagaaaggaagcggaaaaagcgtcgaatcatgaaggcgcccgccgccgaggccgtggctgagggagccagcggccggcacgggcagggccgctcactggaagccgaggataaaatgacccatagaatcctccgcgctgcacaggaaggcgatctgcctgagttgagacgattacttgagcctcatgaggctggaggcgccggtggaaatatcaatgcacgggatgccttttggtggactccacttatgtgcgctgcccgcgccggtcagggagcagcagtcagttacctgctgggaaggggcgctgcatgggtaggggtgtgcgagctctctggccgggacgctgcccagctcgccgaggaagcaggatttcccgaggtagcgcggatggtgagagagagccatggcgagacacgatcccccgaaaaccgatcgcctacaccaagcctgcagtactgcgaaaattgtgacacccacttccaggatagcaaccacaggacatcaaccgcccacctactatcgctgtcccaagggccccagcccccgaacttaccactgggagtacccatctcaagtccgggtttcaagttgcttctgcgggggggatgggagcccgggatgggtctgggcccaaggggggagggaagagccaatcccattcctacagtcctgaagagagaccaggaagggctgggctatcggagcgcaccacagccccgtgttacccatttcccggcctgggatacccgggccgttgccggtagagagcggcccccccgcgtggccaccctttcctggagggaggaaaggcggagggaggaaaaggatcgggcctgggaacgcgatctacggacatacatgaaccttgaattctag

SEQ ID NO: 227537 - DNA, 1071 bp, Artificial Sequence
  derived and/or modified sequence
atgtctcgacccctgttgataaccttcacccccgccacagaccccagcgacctgtggaaggatggacaacagcagccacagccagaaaaacctgagtccacactggatggagcggccgctcgcgccttctatgaggcattgataggtgacgaatcaagcgccccggacagccagcgctcccagaccgagccagctcgcgaacggaaacggaaaaagcgaagaatcatgaaggcccctgctgctgaagcggttgcagagggagcctccgggcgccacggccagggacgcagcctggaggcagaggacaaaatgacccatcgaatcctccgcgccgcgcaggagggtgatctgccagagctccgacgcttactcgagccccacgaagctggaggtgccgggggcaacatcaatgccagggacgccttctggtggacccccctgatgtgcgcagccagagcaggccaaggggccgctgtctcttacctcctggggaggggggcggcttgggtgggtgtctgcgagctgtcaggccgagatgctgcacagttggcagaggaggccgggtttcccgaagtagcccgtatggtccgcgagtcccacggggagacacgaagtccagaaaacaggtcccctaccccttccctgcagtactgcgaaaactgcgacactcatttccaagattcaaaccatcgcacctccaccgctcatctgctgagtctgtcccaggggccccaaccacccaatctcccattaggagtgcccatctcttccccaggtttcaagctgttgcttcgtggaggctgggagcctggtatgggtctgggaccacgaggcgaaggacgagcaaaccctatcccgactgtgttaaaacgggatcaggagggtctgggctatagaagtgcccctcagccacgggtaactcactttcctgcctgggacacccgcgctgtggcgggtcgcgagcggcctcctagggtggcaacactgtcctggagagaggagaggaggcgggaagagaaagaccgggcttgggagagagacctgcggacctatatgaacctggaattctag

SEQ ID NO: 227538 - DNA, 1071 bp, Artificial Sequence
  derived and/or modified sequence
atgagccgccccttgctgatcacatttacacctgccaccgatccatctgacctctggaaggacggacagcagcagccccagcctgagaaacctgagtctacgctggatggggccgcagcacgggccttttacgaggccctgatcggcgatgaatcttccgcacctgatagccaacgatctcagaccgaacctgcccgcgaacgaaaacgcaagaaaagaagaataatgaaagcgccagccgctgaagccgtagcagaaggcgcttccggcaggcacggtcaggggagatcacttgaggcagaagataagatgactcacaggattctccgggctgcccaggaaggtgacctgcccgagctgcgccgcctcctggagccccatgaagctgggggagccggtggcaatattaacgcccgcgacgcgttttggtggactcccttaatgtgcgctgcccgggccggacaaggggccgctgtgtcctaccttctgggccggggggcagcttgggtaggcgtttgtgagttaagtggccgggatgccgcccaacttgctgaggaagctggtttcccggaagttgcccgaatggtgagggaatcccacggagagacccgctctcccgaaaatagatcacccactccttctctccagtattgtgaaaactgcgacacccatttccaggactcgaatcaccgcacgagtaccgctcatctgttatccttgagccaaggcccacaaccccccaaccttcccttaggcgttcctattagcagccctggttttaagttactcctgcgtggtggttgggaacccggtatgggcctggggccccggggtgaaggccgagctaaccctatcccaacagtactgaaaagggaccaggagggcttaggatatcggagtgccccacagccgcgcgtaacccattttcccgcctgggatacacgtgctgtcgcagggcgggaacgtccgccacgggtagcgactctgtcgtggcgggaggagcgcagaagggaagaaaaggatcgcgcctgggagcgggacctgaggacttatatgaatctcgagttttag

SEQ ID NO: 227539 - DNA, 1071 bp, Artificial Sequence
  derived and/or modified sequence
atgagccgacctttgcttattaccttcactcctgcgacagatccttctgacttatggaaagatgggcagcagcaaccccagcccgagaaacctgaatctacactcgacggtgccgctgctagagcattctatgaggccctgattggagacgagtccagcgctcctgatagtcagaggagtcagacggagcctgcaagagagaggaagcgaaaaaaaagacgaataatgaaggctcccgcggctgaggccgttgcggaaggcgcaagtgggcgccacgggcagggccggagcctcgaggcagaggataagatgacccatcggatcctgagggcggcgcaggagggagacctgccagagctccgtcgacttctggaaccccacgaggctggaggagccgggggaaacatcaacgccagagacgctttctggtggaccccactgatgtgtgcagcccgcgctgggcagggagctgctgtatcttatctgcttggccgtggggcggcatgggtgggagtatgcgagctcagcggaagagacgcagcacagcttgctgaggaagcggggtttccagaggtcgccagaatggttcgagagtcccatggagagaccaggagccccgagaaccgatcaccgacccctagtctgcaatattgtgagaactgcgatactcatttccaggacagcaaccacaggacatcaaccgcccacctgttatcattgtctcagggtccgcagccaccaaatttgccactcggcgtccccatatcttctcccgggtttaagctgctactgcgtggaggttgggaacccggcatgggcttggggcctcggggggaaggacgggccaacccgatccctaccgttctaaagagggaccaggagggtttagggtacagatcggcaccccagccgcgtgttacccacttccccgcctgggacactcgggccgtggcagggcgggagagacctcctcgcgtagctaccctttcttggagagaagagcgtcggagggaggaaaaggatcgggcttgggagagggacctgcggacatacatgaatttggagttctag

SEQ ID NO: 227540 - DNA, 1071 bp, Artificial Sequence
  derived and/or modified sequence
atgagtcgccctctgctgatcacattcacccctgccacggatccttctgatctttggaaggacggacaacagcagcctcagcctgagaagcctgagtcgactctagacggagcagcagctcgtgccttctatgaagcacttattggagacgaatcctcagcccctgattcacagagaagccagacggagcccgcgcgagaacgaaagcgtaagaagcgcagaattatgaaagcaccggccgccgaagcggtggcagaaggcgcatccgggaggcatggtcagggtcggtcactggaggcagaggacaaaatgacccaccggattctgcgagctgcccaagaaggagatttgcctgaattacgtaggcttttagaacctcacgaggccggtggcgctgggggcaatatcaatgctcgggatgcattttggtggactcctctgatgtgtgcagcccgggccggacagggcgcagccgtctcatacctccttgggcgaggcgccgcctgggtgggggtgtgtgagctgagcggcagagatgccgctcagctcgccgaggaagccggcttccctgaggtcgccaggatggttagggagtctcatggagaaaccagaagcccagaaaatcgcagcccgacaccaagccttcagtactgcgaaaattgtgacacacactttcaggatagcaatcatagaacttccaccgctcatttgctttcattgagccaagggcctcagcccccaaacttgcccctgggagtgcctatctcatcaccagggtttaaactcctcctcagaggtggctgggagccaggcatgggactcggcccacgaggtgaaggacgggctaacccaatccccacggtgttaaagcgagaccaggagggactcggctacagatccgccccgcagccccgggttacccactttcctgcttgggacacgcgagctgtagcgggcagagaaaggccaccaagggtcgcaactctatcttggcgggaggagcgacggagagaagagaaggatagagcgtgggagcgagacctgcggacgtacatgaacctcgagttttag

SEQ ID NO: 227541 - DNA, 498 bp, Artificial Sequence
  derived and/or modified sequence
atgagccgccctttgttgattacttttacaccggcgactgatccgagcgacctgtggaaagatgggcagcagcagccccagcccgaaaagcctgagtctacgctcgatggcgctgccgcgcgcgctttctacgaggccctgattggggacgagagtagcgcacccgacagccagcgttctcaaaccgagcctgcgcgcgaacgtaagcgcaagaagcggcggattatgaaggcccccgccgctgaggccgttgcagagggcgccagcgggcgacacggacaagggagatccctggaagcagaagacaagatgactcatagaattctccgtgccgcgcaagaaggagacctccctgaattaaggcgacttctcgaaccgcacgaagccgggggagctggcggtaatatcaacgccagagatgccttctggtggacccccctcatgtgtgctgcccgtgctggtcagggagctgcagtgagttaccttcttggaagatag

SEQ ID NO: 227542 - DNA, 459 bp, Artificial Sequence
  derived and/or modified sequence
atgtcccgcccactgctcatcacattcactcccgcaacagacccaagcgacctctggaaagatggccagcagcaaccacagccagagaagcctgagtctacactcgacggagctgccgctcgagccttctatgaagccctgatcggcgatgagagctccgcgcccgactctcagcgctcacagaccgaacctgcacgggaaagaaaacggaaaaaacggcggattatgaaagctcccgccgcagaggcagttgctgagggcgcttccggacgccacggccaaggtcgctctttagaagccgaggacaaaatgacccataggattctcagagccgcccaggagggagacttgcccgaactccgaagactcctcgagccgcatgaagctggcggtgcgggaggtaacattaatgcaagagacgccttttggtggacacccttaatgtgtgctgctagatag

SEQ ID NO: 227543 - DNA, 1071 bp, Artificial Sequence
  derived and/or modified sequence
atgtcacggccgttactgattacattcacccctgctaccgatccatctgacttatggaaggacggacagcagcagcctcagcctgagaagcccgagtctacccttgatggggcggctgccagagctttctacgaggcactgatcggtgacgagtcttctgcacctgatagccagcgttcccagactgaaccagcgcgcgagcgcaagaggaaaaagaggagaattatgaaggccccggccgctgaagctgtggccgagggcgcatcaggcagacacgggcaggggagatccctagaagcggaggacaagatgacccaccgtatactgcgggctgcccaggaaggtgatctgcctgaattgcggcgtttgctcgagcctcacgaggctggcggtgcaggtggcaatatcaacgcgcgggatgccttctggtggacacccttaatgtgtgcggcccgggcggggcagggagctgctgtgtcatacctcttgggaagaggcgccgcttgggttggcgtttgcgaattgtccggccgagacgccgcccagctggctgaggaagccggctttcccgaagtggcacgtatggttcgcgaatcacacggagaaacccggtcccctgaaaataggtcgcctaccccaagtttgcagtattgtgagaactgcgacacacatttccaagattcgaaccacaggactagcacggcccatctgctctccctatcgcagggcccccagcctcctaacctccctttgggcgttccaatttcatcacccggctttaagctgttactgaggggtggctgggaacccggaatgggattagggccgaggggcgagggtcgagcaaatcccatcccgaccgttctgaaacgcgatcaggaaggccttggctacagaagcgctccccaacctcgggtcactcacttccccgcttgggatacgcgggcggttgccggcagagagagaccccctcgagtagccactctgagctggcgcgaggagcgtagaagagaagagaaggaccgtgcgtgggagagagatttgcgaacctacatgaacctggaattttag

SEQ ID NO: 227544 - DNA, 1071 bp, Artificial Sequence
  derived and/or modified sequence
atgagcagaccgctgcttatcacctttactcctgcaaccgacccctcagacctgtggaaggatggccagcaacagccacagccagagaagcccgagtctacactggacggtgctgctgcaagagccttctatgaggccctgattggtgacgagtcctctgcccccgattcccagcgaagtcaaactgagcccgccagagagcgtaaacgtaaaaagcgcagaatcatgaaagctcccgctgcggaagcagtggcggaaggtgcctccggccgacatgggcagggaagatcactggaagccgaagacaagatgactcatcggattctgagggccgctcaggagggtgatctgcccgaattgagaagactgctggaaccacatgaggctggcggtgcaggtgggaacatcaatgcacgggacgctttttggtggactcctctaatgtgtgctgccagggccgggcagggggcagcggtgtcctacctgctggggcgaggcgctgcctgggtgggggtctgcgagttgtccggccgcgatgccgcacaattggcagaagaggctggcttccccgaggtggctaggatggtccgcgagtctcacggagagacacgctctcctgaaaataggtccccgaccccttctctgcaatactgcgagaactgtgatacacacttccaggactccaaccacagaacaagcacagctcacctcctttccctctcgcagggcccacagccaccaaacttaccactcggagtgccgatatcatcccctggctttaagctgctcctcaggggtggatgggaacccggcatggggctgggccctcgtggcgagggccgcgccaatccgatccccaccgttcttaagagggatcaggaaggactggggtaccgctccgccccgcagccccgggttacccactttcccgcatgggacacacgggcagtcgccggaagagagcggccacccagagtcgctaccctgagctggagagaggagagaagaagggaggaaaaggacagagcatgggaaagagacctcagaacgtacatgaatctggagttctag

SEQ ID NO: 227545 - DNA, 324 bp, Artificial Sequence
  derived and/or modified sequence
atgtctcgtcccctgttgatcacattcactccagccacggatccatccgacctatggaaagatggccagcagcagccacagcctgaaaagccggagagtaccctggacggtgcagctgcccgggctttctacgaggcgctgatcggggacgaaagctctgcgcccgatagtcagaggtcgcagaccgagcctgctagggagcggaagcgtaagaagcgccgaatcatgaaggcccctgccgcagaagctgtggcagaaggagctagcggccgacatgggcaggggcgctccctggaggctgaggataagatgacccatagatag

SEQ ID NO: 227546 - DNA, 1071 bp, Artificial Sequence
  derived and/or modified sequence
atgagcagacccttgctgataacgttcacgcctgcaactgacccctccgatctgtggaaagacgggcagcagcagcctcagccggagaagcctgaaagtactctggacggcgcagccgctcgagccttttatgaagctctaatcggggatgagtcgtctgcacctgactcccaacggagccagactgagccagccagagaacgcaagcgaaaaaagcggcggattatgaaggctcccgccgccgaggctgtggctgagggtgcctctgggagacatggtcaggggcgctccctggaggccgaagataagatgacgcatcggattcttagagccgctcaggagggtgatctgcctgaacttagaagactgctggaaccccatgaggccggcggtgccggaggaaatatcaacgcccgcgatgcattctggtggacccctctgatgtgtgccgcccgcgcaggccagggcgctgctgtgagttacctcctaggccgcggggcagcatgggttggtgtgtgcgaattgagcggacgggacgctgctcaactcgctgaagaggccggatttcccgaagtggcacgtatggtgagagagtcacacggtgagacacggagccctgagaacagaagccctactccttcacttcagtattgcgaaaactgcgacacccacttccaggactccaaccatcggaccagtactgcccatctcctgagtctcagccagggaccacagccacccaatcttccactaggggtgccaatctcctctcctggcttcaagctgcttctgcgtgggggttgggaaccagggatgggactggggcctcggggggagggccgcgccaaccctatcccaacagtgcttaaaagagaccaggaaggcctagggtaccgcagtgcaccacagccaagagtcactcactttcccgcttgggacacacgagccgtggcaggtcgagaacgccctccaagggtcgctaccctgtcttggcgcgaggaaaggagacgtgaggaaaaagaccgcgcctgggagcgcgatttacgcacatacatgaacctcgaattctag

SEQ ID NO: 227547 - DNA, 498 bp, Artificial Sequence
  derived and/or modified sequence
atgagtcgaccactcttgatcaccttcacccccgctactgatccaagcgatctttggaaagatgggcaacaacagccccagcccgagaaacccgagagcaccctggacggcgcagctgcccgggctttctatgaggccctgatcggtgacgaatcctctgcacctgattctcagcgatcccagactgagcctgctcgtgagcggaaacgcaagaaacgcagaatcatgaaggccccggctgcagaggccgtggcagagggagcgtcagggaggcacgggcagggaaggagcttggaagctgaagacaagatgacccaccgtattctgcgggccgcacaggaaggcgatctgcccgaactccgtcgactgcttgagccccacgaggccggcggagccggtggcaacataaatgctcgcgacgctttttggtggacaccactgatgtgtgccgcacgggctggtcagggcgcggctgtgtcatatctgctaggtcgttag

SEQ ID NO: 227548 - DNA, 1071 bp, Artificial Sequence
  derived and/or modified sequence
atgtcacgccccctcctgatcactttcacgcctgcgaccgaccctagtgatctttggaaagatgggcagcaacagcctcagcctgagaagcctgaatcaacgctagatggagctgcagcaagagcattctacgaagccctcattggagatgagtcatcagcccctgattcccagaggtcacaaactgagcccgccagggaacgcaagcggaagaaacgacgaatcatgaaagcgcctgccgccgaggccgtcgccgagggagcttctggacgtcacggccaaggacgaagcttggaggccgaagacaaaatgacccaccggattctgcgtgctgcccaagaaggtgatctccccgaattgcggagactcctcgagcctcatgaggccggcggagctggagggaatatcaacgcccgagatgctttctggtggactcccctgatgtgcgccgcccgtgccggacaaggtgcagctgtgtcctacctactggggcgaggtgccgcctgggtgggggtgtgcgagttgtcgggtagggatgccgcccaactagccgaagaagctggctttcctgaggtggcccggatggtcagagagtctcatggcgagacccgctcccccgagaacagaagccctacccccagcctccagtattgtgagaattgtgatacccattttcaggattcaaatcaccgcacttcaacagcacacttgctttctctttcccagggccctcaaccccctaatctgcccttaggtgtgcccataagctctccagggtttaagctccttctccgcggcggttgggaaccaggtatgggattgggacccaggggcgagggaagggccaaccccattcccaccgtgctaaagagggaccaggaaggattggggtatcgatccgccccccagccacgagtcacgcacttccctgcctgggacaccagggccgtagccgggagggagcgcccaccaagggtggcgaccctgagctggcgggaggagcggaggcgagaagagaaggaccgggcttgggaacgagacttgaggacctacatgaatctggagttctag

SEQ ID NO: 227549 - DNA, 597 bp, Artificial Sequence
  derived and/or modified sequence
atgtctagacctctcctgatcacattcacacccgcgaccgatcctagcgatctgtggaaagacgggcagcaacagccccaacccgagaaacccgaatccaccctcgacggagcggccgcgcgggccttctacgaggcactgatcggggacgaaagctcggcccctgactcccagcgcagtcagaccgaacctgcgcgtgaacgaaaaaggaaaaaacgccgaataatgaaagctccagctgcagaagctgtggcagagggagcctctgggcgccatggtcagggcaggtctctggaggccgaggacaagatgacacataggatcttaagagcagctcaagaaggcgatttgcccgaactcaggaggctccttgaaccccatgaggcaggcggcgctggcgggaacattaacgctcgggacgccttctggtggacgccacttatgtgcgcagcaagggcaggccagggcgccgccgtgtcttatctgctgggcaggggggcagcttgggttggtgtgtgtgagttgtctgggagagacgccgcacagctggcagaagaggcaggattcccagaggtagctaggatggtgcgcgaatag

SEQ ID NO: 227550 - DNA, 597 bp, Artificial Sequence
  derived and/or modified sequence
atgagccggcccctccttatcacgttcacgcccgctaccgatccgagcgacctgtggaaggacgggcagcagcagccacagccagagaagccagagtcaacactcgatggcgccgccgctcgcgccttctacgaggccctcatcggagatgagagctccgccccagactcgcagagatctcagactgagcccgctcgtgaacgcaagcgtaaaaagcgcaggatcatgaaggcaccagccgccgaggccgtagccgagggggcatcggggcggcatggccaaggcagatccctggaggccgaagataaaatgacacatagaatcttacgtgccgcccaggagggagaccttcctgaacttcgtagactcctagagccccacgaggccggaggcgcgggaggcaacatcaacgcccgagatgcgttttggtggacacctttgatgtgtgcggcgcgggctggtcagggtgccgcggtgtcctatcttctcggcagaggtgccgcttgggtgggcgtctgcgaattgtcaggacgcgacgccgcacaactagctgaggaggccggcttcccagaagtggcgcgtatggtgcgagagtag

SEQ ID NO: 227551 - DNA, 1071 bp, Artificial Sequence
  derived and/or modified sequence
atgtcacgccctcttctaatcacattcactcctgccacagatcctagtgatctgtggaaagacggccagcaacagccccagcccgagaaacctgaatctactctggacggcgcagccgccagagccttttacgaggcgttgatcggtgacgagagcagcgctccagatagtcagaggagccaaactgagccagctcgtgaaagaaagcgaaagaagcgacgaattatgaaggccccagccgcagaagctgtggctgagggagcgtcagggcggcacggtcagggtcggtcactggaggccgaagataaaatgacccatcgcattttgagagccgctcaagagggtgacctgcccgagctacgtaggttattagagccccacgaggccgggggcgccggcggcaacattaatgcgcgtgacgcgttttggtggacgcctctcatgtgtgccgcccgtgccggacaaggtgcagctgtctcgtatctgcttggccgcggtgctgcttgggttggcgtgtgtgagctcagcggcagggatgctgcccagctcgctgaggaggccgggtttccagaggtggcccggatggtgagagaaagccatggggaaacccgcagccctgagaatcggtcaccgactcctagcttacagtactgcgagaactgcgacacacattttcaggatagtaaccaccgtacctctacagcacacctgctgtcgctttcccagggccctcagccacctaatctgcctctcggtgtgccaatttcaagtcctggcttcaagctcctgctaagaggaggctgggaacctgggatgggtttaggacctagaggagaaggacgagccaaccctatacctaccgtgctcaaacgggaccaggagggcctaggctaccgtagtgcccctcagcccagagttacccattttccggcctgggatacgcgcgccgtggccggaagggagagacccccaagggtagcaacactgagttggcgggaggaacgccgaagggaagaaaaagacagggcttgggaaagagatctgaggacttacatgaaccttgagttttag

SEQ ID NO: 227552 - DNA, 324 bp, Artificial Sequence
  derived and/or modified sequence
atgtccaggcccctgctcatcactttcaccccagccaccgatcccagcgacctgtggaaagatggccagcagcagccacaacctgaaaaacccgagtcaaccctagacggggcggcggctcgcgctttctatgaggcacttatcggggacgagagcagcgctcctgatagccagaggagccagacagagcctgctagggaaagaaaaaggaagaagaggagaatcatgaaagcacccgctgcagaggccgtggccgaaggcgcctccggcaggcatggtcaaggccgaagtctggaagctgaggataaaatgacccataggtag

SEQ ID NO: 227553 - DNA, 324 bp, Artificial Sequence
  derived and/or modified sequence
atgagcaggcctctcctcattaccttcacccccgctaccgatccgagcgacctgtggaaggatggccagcagcagcctcagcctgagaaaccagaaagcaccttggacggagctgccgcccgcgcattttacgaggcgctgatcggtgatgagagcagtgcacctgattcacagcggtcccagactgagccagctcgagaacggaaacgcaagaagagacggatcatgaaggcgcctgccgccgaagccgtggctgagggtgcctcaggaaggcacggacagggaagaagcctcgaggccgaggacaaaatgactcataggtag

SEQ ID NO: 227554 - DNA, 459 bp, Artificial Sequence
  derived and/or modified sequence
atgtcacgcccattactgattaccttcacgcccgctaccgacccctcagatctgtggaaggacgggcaacagcaaccccagcctgaaaaaccagagtccacactcgacggagcagcggccagagccttttatgaagcccttataggcgacgagagtagtgcaccggactcacagagatctcagactgagccggcccgggaacggaaacgtaagaagcggcgcattatgaaagcgcccgccgctgaagctgtggctgaaggggcttctggccgccacgggcagggacggagtcttgaagccgaagacaaaatgacccacagaattctgcgggctgcccaggagggcgatttgccggagctccgtcggttgctggagccccatgaagctgggggcgcaggcggcaacatcaacgccagggacgccttctggtggacacctttgatgtgtgccgctcgctag

SEQ ID NO: 227555 - DNA, 498 bp, Artificial Sequence
  derived and/or modified sequence
atgagccgtcccttgctgattaccttcacaccagccacagacccatccgacctttggaaggatggccagcagcagcctcagccagaaaagccagaaagtacccttgatggcgcggctgcacgcgccttttatgaggccctcattggagacgagtcaagtgccccagattctcagcgatcacagacggaaccggcaagggagcgcaagcgtaagaagaggcggatcatgaaagctcccgccgcggaggctgtagccgagggagccagtggtcgacacggccagggtcgaagcctcgaggcagaggacaaaatgacacatcgcatattaagagctgcgcaggaaggtgatttgcccgaactgagacgcctgcttgagcctcatgaggctgggggagctggaggaaacattaacgcccgggatgccttttggtggacaccactgatgtgcgccgctcgagccggacaaggggccgcagtatcctacctgctgggcagatag

SEQ ID NO: 227556 - DNA, 1071 bp, Artificial Sequence
  derived and/or modified sequence
atgagccgccctctgttgattacattcaccccggccaccgatccatcagatctctggaaggacggacaacaacagccacagcctgagaaacctgagtctactctcgatggagccgccgcgcgtgctttttacgaagccctgatcggtgatgagtcttccgccccagactctcaacgatcccagactgagccagctcgcgaacgaaaaaggaaaaaacgcaggatcatgaaggctcctgctgcagaggccgtcgccgagggggcctccggccgccacggccagggccgttctctggaagcagaggacaaaatgacccaccgcatactgcgcgccgcccaagaaggggacctcccagagctgcgccgtctgctggaaccccacgaggcaggaggcgccggaggcaacatcaatgccagggatgcattctggtggacccccctgatgtgtgccgcccgcgcaggccagggggcagcagtcagctacctgctgggcaggggcgccgcctgggtcggcgtctgtgagctctccggacgggatgcagctcagttggcggaagaggctggctttccggaggtggcccggatggtaagagagtctcatggggagacgaggagcccagaaaatcgatctccaacccctagcctacagtattgtgaaaactgcgatacacacttccaggactccaaccacaggacctctaccgctcatctcctgagtctttctcagggcccccagccgcctaacctaccactgggcgttccaatcagtagccctggcttcaaattgctgctcagaggcgggtgggagccgggaatgggactgggtcctcgcggcgaggggagagctaatcctattccaacagtactgaaacgagaccaggaaggtctcggctatcgcagcgcaccccagcccagggtgacgcacttccctgcctgggacaccagagcggtcgccggtagggagagaccaccccgcgtcgccacactcagctggagggaagagagacggcgcgaggagaaggacagggcatgggagagggatctgagaacttatatgaacctggagttttag

SEQ ID NO: 227557 - DNA, 1071 bp, Artificial Sequence
  derived and/or modified sequence
atgtcgcggccactgctcatcacatttacccccgcaaccgatcctagtgatttatggaaggacgggcagcagcagccgcagccagaaaaaccagagtccaccctggatggtgctgctgcccgtgcattttacgaggctttaataggggatgagtcatccgcacccgactcacagcgctcccagaccgagcctgcgagggagcgcaagcggaaaaagcggcgcattatgaaggcaccagcagccgaagccgttgcagagggtgcttcggggcggcatggacagggtagatcccttgaagcagaagataagatgacacatcgaatactgcgcgccgcccaggagggggacctgcccgagctgagacggctgctggagcctcatgaagctggtggcgccggaggaaatattaatgcgagggatgcattttggtggaccccccttatgtgtgccgctcgggctggtcagggagctgccgtgtcttatctgttaggacgcggcgctgcgtgggtgggcgtttgcgagctgagtggccgcgatgccgcgcaactggccgaagaagctggttttcccgaagtggccagaatggtgcgagaaagtcatggggagactcggagcccagagaaccgcagcccaacgcccagcttgcaatattgcgagaactgcgatacccatttccaggactccaatcatagaactagcacagcccatctgctgagtctcagccaggggcctcagccccctaaccttcctctcggggtgccgatttcttctcctggtttcaagctgctgctgagagggggatgggagcccgggatgggcttgggcccccgaggagaaggccgtgccaaccccatccctaccgtgctgaagcgagaccaggagggtctgggctacaggagcgcccctcagcctagggtcacacactttcctgcctgggacactcgggcggtggcgggacgcgagcgacctcctagagtcgctacccttagttggcgggaggagcgccgccgagaagagaaagatcgggcatgggaaagagacctgcgcacttacatgaacctggaattctag

SEQ ID NO: 227558 - DNA, 597 bp, Artificial Sequence
  derived and/or modified sequence
atgtctcgccctctcctgatcactttcactcctgccaccgacccatcggacctttggaaggatggccagcagcagccacagcctgagaaaccggaaagcacacttgatggcgctgctgcacgcgccttctatgaggcgctcattggcgacgagagttctgcacctgactctcaaaggtcccagaccgagccagcaagagagcgtaaacgaaaaaagaggcgcattatgaaggcccccgccgcagaagccgtcgccgagggcgcaagtggaagacatgggcagggcaggtccctggaggcggaggataagatgacccatcgcatcctgcgcgcggcccaggagggcgacctcccagaacttaggcgtctccttgaacctcacgaagccggtggggctggtgggaatattaatgctcgggatgctttttggtggactcccctgatgtgcgctgcccgagccggccaaggggccgcggtgtcctacctgctcggacgtggggccgcgtgggtgggcgtttgcgagttaagtgggagggatgctgctcagcttgcggaggaagccggatttcctgaagtcgccagaatggtgcgtgaatag

SEQ ID NO: 227559 - DNA, 273 bp, Artificial Sequence
  derived and/or modified sequence
atgtctcgccccctgcttataacgttcactcctgcaaccgacccgtccgacctctggaaagatggccagcagcagccacaacccgagaaacctgaaagcacgcttgacggggcagcagcccgggctttttacgaagccctgatcggcgacgaatctagcgcaccagactcccagaggagtcagacagagcctgctagagaaagaaaaaggaagaaacgcagaatcatgaaggcccctgccgctgaagccgttgcagaaggcgcttctgggtag

SEQ ID NO: 227560 - DNA, 273 bp, Artificial Sequence
  derived and/or modified sequence
atgtcacgaccactcttgatcacttttacaccggctactgatccttccgacttgtggaaagacggacagcagcagcctcaaccagaaaaacccgaatccacattagacggagcagccgcccgggccttctatgaggctctgatcggagatgagagctccgccccagactctcagcgtagccagaccgagccagctcgggagaggaaacgtaagaagcgcaggatcatgaaagcaccagccgctgaagcagtggctgagggcgcctcgggttag

SEQ ID NO: 227561 - DNA, 459 bp, Artificial Sequence
  derived and/or modified sequence
atgtcacggcccctcctaatcacattcacacccgcaaccgacccatccgacctgtggaaagacggacaacagcagccacagccggaaaaaccggagtccacactcgatggggctgctgcccgcgctttctatgaggccctgatcggggatgagagctccgcaccagattctcagaggtcgcagacagagccagcacgcgagaggaagaggaagaagagacgaatcatgaaggcccctgctgctgaagcagttgctgaaggcgcatccggccggcatggtcaaggaaggagcctggaggctgaggataaaatgacacaccgtatactgcgtgcagcacaggagggcgacctacccgagctacggaggctattagagccacatgaagccgggggagcaggtggaaacatcaacgcccgagatgctttctggtggaccccactcatgtgtgcggccagatag

SEQ ID NO: 227562 - DNA, 597 bp, Artificial Sequence
  derived and/or modified sequence
atgtcacggccgctactcattacttttactcccgcaaccgatccttcagatctctggaaggatggccagcagcagccccagcccgagaaacccgagtccacactcgatggggccgccgcccgggccttctacgaagctctcatcggagatgagagttctgctcccgattcccagaggagtcagacagagccggcacgcgaacgcaagaggaaaaagagaagaatcatgaaggctccagccgccgaggccgttgcggaaggcgcctcgggaaggcacggccaggggcgaagcctcgaggcggaagacaaaatgacccaccggattctccgcgctgcccaggaaggagatctgcctgaactacgtaggctgctagagccacatgaagccggcggtgcaggcgggaacattaatgcacgcgatgctttctggtggaccccactcatgtgcgccgctagagctggccagggggctgcagtgtcataccttctgggccggggggccgcctgggtgggggtctgtgaactgagcggcagggatgcagctcaattggccgaagaggccgggtttcctgaagtggcgaggatggtcagggagtag

SEQ ID NO: 227563 - DNA, 1071 bp, Artificial Sequence
  derived and/or modified sequence
atgtcccgaccgctccttataaccttcacacctgcgaccgaccctagtgacctttggaaagacggacagcagcagccccagcctgagaagccggaaagtaccctggatggagcagccgcacgtgctttctacgaggctctcatcggagatgaaagttcagctccagattctcaaagatcacagacagagcccgccagagaacgtaaacgaaagaaacgcagaattatgaaggctcccgctgcggaggctgttgcggaaggcgcaagtggaaggcacgggcagggtcggagcttagaggctgaggataagatgactcaccgcatccttcgcgccgcccaggagggggatctccccgaactgagacggcttctggaaccacacgaggccggcggagctggtggtaatattaacgccagggacgccttttggtggaccccacttatgtgtgcagctcgtgccggacaaggggccgccgtgagctatttactggggaggggcgccgcctgggtcggagtttgcgagctctcaggccgggacgccgcacagttggctgaggaagccggatttcccgaagttgctagaatggtgcgcgaatcacacggcgaaacacggagccccgagaacagatcccctacaccctccctgcagtactgcgaaaattgtgacacccatttccaggattcaaaccaccggactagtaccgctcacttgctcagcctcagccagggccctcagcctcctaacttgccactcggagtccccataagtagtcccggatttaaacttctgcttagggggggctgggagccagggatgggcctgggcccccgaggggagggcagagctaatcccatccctaccgtcctcaaacgcgaccaggaaggattaggatatcgctccgcccctcagccaagagtcacccattttccggcatgggacacccgggctgtagccggtcgcgagcgtcctcctagagtggccaccctgtcctggagggaggagagacggagggaggagaaagatagggcctgggagagagatctgagaacatatatgaatctggagttttag

SEQ ID NO: 227564 - DNA, 1071 bp, Artificial Sequence
  derived and/or modified sequence
atgtctcggccactgctcatcaccttcactcctgcaaccgacccctcagatctgtggaaagatggacagcagcaacctcagcccgagaagcctgagtccacgctagatggggccgcagcccgcgcattttacgaagcgctgattggggacgagagttccgctcccgattcgcaacggagccagactgaacccgctcgcgaaagaaagagaaagaagcgccggatcatgaaggccccagccgctgaagctgtagccgagggtgcttccggacggcatggccagggccgcagccttgaagctgaggataagatgacccacagaatccttcgggctgcgcaggagggtgacctgcccgaactccgccgcttgttggagccacacgaggccggaggtgccggcggcaacatcaacgctcgggatgctttctggtggactccactcatgtgcgctgccagggccggacaaggcgcagctgtgtcttatttgctcggtcgcggcgcggcttgggtcggggtgtgtgaactctcagggcgggacgccgcccagctcgccgaggaggcaggctttcctgaagttgctcggatggttagggaaagccatggcgaaaccagatccccagaaaatagatcccctaccccctccctgcagtattgcgagaattgcgatacccatttccaagactctaatcatcggacttcaactgcccatcttctgtccttaagtcaggggccgcagcctccaaatctgcctttgggcgtcccgatctcctcaccaggttttaaactgctcttgagaggcgggtgggagccggggatgggcttaggcccccgaggcgaaggtagggccaaccctatcccgaccgtcctgaagcgcgatcaggagggactgggatatcggtccgcaccacagccgcgcgtgacccactttccagcatgggacacccgcgcagtggccggacgtgagcgtcctccgcgagtggccaccctgtcttggcgcgaagagcgtagaagggaagaaaaggacagggcctgggagagagacttgcgaacatacatgaatctggagttctag

SEQ ID NO: 227565 - DNA, 273 bp, Artificial Sequence
  derived and/or modified sequence
atgtcacggccgctgttgatcacctttacaccggcaactgatccgagcgacctgtggaaagacggtcaacagcagcctcagccggagaagccggaatccaccctcgatggggctgcagccagagccttttacgaagccctgataggggatgaatcgagcgctccagatagccagaggtcacagaccgagcctgcacgcgagcgaaagcgcaaaaagcggcgcatcatgaaagcacctgcggctgaggccgtggccgagggcgcttccggctag

SEQ ID NO: 227566 - DNA, 324 bp, Artificial Sequence
  derived and/or modified sequence
atgagccgccctctgctgatcacttttacgcctgctactgatcccagcgatctatggaaggacggacagcagcaaccccaacctgagaagcccgagagcacgctagacggcgccgccgcgcgagcattctacgaggctctgataggtgatgagagtagtgcgccagatagtcagagatcccagacagaaccagctcgtgaaaggaagcgaaaaaagagacgcatcatgaaggctcctgccgccgaggccgtcgcagagggggcaagcggcagacacggacaggggagatcacttgaagccgaggataaaatgacacatcggtag

SEQ ID NO: 227567 - DNA, 1071 bp, Artificial Sequence
  derived and/or modified sequence
atgagcagaccactactcataacatttacaccagccaccgatccgagtgacctgtggaaagacggacagcagcagcctcagcctgaaaaaccagagtctactctggacggcgctgccgccagggccttttacgaagcactgataggggacgagtcctccgccccagactcacagcggtctcaaactgagccagctcgggagagaaagcggaagaagaggcgtattatgaaggcgcctgcagccgaagcggtggccgagggtgcttctgggcggcatggacaagggcgctcgctggaggctgaggataagatgactcataggattcttagggctgcccaggaaggcgatctgccggagctgcgccgcttgctggaacctcatgaggcggggggcgcaggaggaaatatcaacgcccgggacgctttttggtggacccccctgatgtgtgcagcacgggctggccagggcgcagctgttagctaccttctcgggcgcggggcagcttgggtgggggtgtgcgagctgtctggacgtgacgctgctcagctggcggaagaggcggggttccctgaagtagcccgcatggtccgagaaagccacggtgaaacacgctcaccggaaaatagaagtccgaccccatctcttcagtattgcgaaaactgcgatacacactttcaagatagcaaccaccggacatccacggctcacctgctttctttatcccagggccctcaaccccccaatctgcctttgggcgttcccattagttcaccaggctttaaattattgctgagaggagggtgggagcctggaatggggctcgggccacgtggagaaggtagagctaatcctattccgacagtcctgaagcgcgatcaggagggcttgggctatagaagcgccccccagccacgggtgacccatttccccgcctgggatactagagccgtggctgggcgggaacgaccaccaagggtagcaaccctaagttggcgggaggaaaggagaagggaggagaaggaccgggcctgggagcgggatctgagaacctacatgaatctcgaattctag

SEQ ID NO: 227568 - DNA, 273 bp, Artificial Sequence
  derived and/or modified sequence
atgagcagaccccttctgatcactttcacacctgccacagacccctcagatttgtggaaggacggccagcagcagcctcagccagaaaaaccagagtctactcttgatggtgcagccgccagagccttttatgaagctttgatcggcgatgagtcaagcgcaccagacagccagcgatcccagacagagccagcacgggagcggaagcggaagaaaaggcggatcatgaaagctcccgccgccgaagccgtggccgaaggcgcatcgggatag

SEQ ID NO: 227569 - DNA, 498 bp, Artificial Sequence
  derived and/or modified sequence
atgtcgagaccacttctgattacttttacaccagccacggatccgtccgatctgtggaaagatggtcaacaacaaccgcaacccgaaaagcctgagtccaccctggacggggcagccgcacgggccttctacgaggctctgatcggagacgaatctagtgcaccagattcccagcgcagccagaccgagccagctcgagaacggaagcgaaaaaagcgccggatcatgaaagccccagccgccgaggcagtggctgaaggagcatctggacgtcatggccaaggtcggtcattggaggctgaggacaaaatgacccacaggatattgcgtgcggctcaggaaggagacctgccagagctccgccgcttactggagcctcacgaggctggcggagctggtgggaatatcaatgccagagatgccttctggtggaccccactgatgtgcgcagcaagagccgggcagggagctgccgtgtcttacctcctcggccggtag

SEQ ID NO: 227570 - DNA, 459 bp, Artificial Sequence
  derived and/or modified sequence
atgtctcgccccctgctgatcactttcacgcccgcaactgaccctagtgacctgtggaaggacggccagcaacagcctcagcccgaaaagcctgaatctaccctggatggggcagcagctcgcgccttctatgaggctttaatcggagacgagtcgagtgcacccgacagtcagaggtctcagacagaacccgcccgtgagaggaagagaaagaagcggagaatcatgaaggcacccgctgcagaagccgtggcagagggtgcttccggaaggcatggacaagggaggtcattagaagcggaagacaagatgactcatcggatcctccgagccgctcaggaaggcgacctgcccgaactccgtaggctactcgagccacacgaggctggcggcgcgggcgggaatattaacgcgcgagatgccttttggtggactcctctgatgtgcgcagccagatag

SEQ ID NO: 227571 - DNA, 1071 bp, Artificial Sequence
  derived and/or modified sequence
atgagccggcccctgctgatcaccttcaccccagccacagaccccagcgacctgtggaaggatggccagcagcagccccagcctgagaagccagagagcaccctggatggagctgctgcccgggccttctatgaggccctgattggagatgagagcagcgccccagacagccagaggagccagacagagcccgcccgggagaggaagaggaagaagaggcgcatcatgaaggccccagctgctgaggccgtggccgagggcgccagcggccgccacggccagggccgcagcctggaggccgaggacaagatgacccaccgcatcctgcgggccgcccaggagggggacctgcctgagctgcggcggctgctggagccccatgaagctggaggagctgggggcaacatcaatgccagagatgccttctggtggacccccctgatgtgtgccgcccgggccggccagggcgctgctgtgtcctacctgctgggcagaggagctgcctgggtgggcgtgtgtgagctgagcggcagagatgctgcccagctggccgaggaggccggcttccctgaggtggccaggatggtgcgggagagccacggggagaccaggagcccagaaaatagaagccccacccccagcctgcagtactgtgagaactgtgacacccacttccaggacagcaaccacaggaccagcacagcccacctgctgagcctgagccagggcccccagccccccaacctgcccctgggcgtgcccatcagcagccctggcttcaagctgctgctgcggggcggctgggagcccggcatgggcctgggccccagaggagagggccgggccaaccccatccccaccgtgctgaagagggaccaggagggcctgggctaccgcagcgccccccagccccgggtgacccacttccctgcctgggacaccagggctgtggccggccgggagaggcctccccgggtggccaccctgtcctggagggaggagcggcggcgggaggagaaggaccgggcctgggagcgggacctgcggacctacatgaacctggagttctag

SEQ ID NO: 227572 - DNA, 498 bp, Artificial Sequence
  derived and/or modified sequence
atgagccggcccctgctgatcaccttcaccccagccacagaccccagcgacctgtggaaggatggccagcagcagccccagcctgagaagccagagagcaccctggatggagctgctgcccgggccttctatgaggccctgattggagatgagagcagcgccccagacagccagaggagccagacagagcccgcccgggagaggaagaggaagaagaggcgcatcatgaaggccccagctgctgaggccgtggccgagggcgccagcggccgccacggccagggccgcagcctggaggccgaggacaagatgacccaccgcatcctgcgggccgcccaggagggggacctgcctgagctgcggcggctgctggagccccatgaagctggaggagctgggggcaacatcaatgccagagatgccttctggtggacccccctgatgtgtgccgcccgggccggccagggcgctgctgtgtcctacctgctgggccgctag

SEQ ID NO: 227573 - DNA, 459 bp, Artificial Sequence
  derived and/or modified sequence
atgagccggcccctgctgatcaccttcaccccagccacagaccccagcgacctgtggaaggatggccagcagcagccccagcctgagaagccagagagcaccctggatggagctgctgcccgggccttctatgaggccctgattggagatgagagcagcgccccagacagccagaggagccagacagagcccgcccgggagaggaagaggaagaagaggcgcatcatgaaggccccagctgctgaggccgtggccgagggcgccagcggccgccacggccagggccgcagcctggaggccgaggacaagatgacccaccgcatcctgcgggccgcccaggagggggacctgcctgagctgcggcggctgctggagccccatgaagctggaggagctgggggcaacatcaatgccagagatgccttctggtggacccccctgatgtgtgccgccaggtag

SEQ ID NO: 227574 - DNA, 324 bp, Artificial Sequence
  derived and/or modified sequence
atgagccggcccctgctgatcaccttcaccccagccacagaccccagcgacctgtggaaggatggccagcagcagccccagcctgagaagccagagagcaccctggatggagctgctgcccgggccttctatgaggccctgattggagatgagagcagcgccccagacagccagaggagccagacagagcccgcccgggagaggaagaggaagaagaggcgcatcatgaaggccccagctgctgaggccgtggccgagggcgccagcggccgccacggccagggccgcagcctggaggccgaggacaagatgacccacaggtag

SEQ ID NO: 227575 - DNA, 597 bp, Artificial Sequence
  derived and/or modified sequence
atgagccggcccctgctgatcaccttcaccccagccacagaccccagcgacctgtggaaggatggccagcagcagccccagcctgagaagccagagagcaccctggatggagctgctgcccgggccttctatgaggccctgattggagatgagagcagcgccccagacagccagaggagccagacagagcccgcccgggagaggaagaggaagaagaggcgcatcatgaaggccccagctgctgaggccgtggccgagggcgccagcggccgccacggccagggccgcagcctggaggccgaggacaagatgacccaccgcatcctgcgggccgcccaggagggggacctgcctgagctgcggcggctgctggagccccatgaagctggaggagctgggggcaacatcaatgccagagatgccttctggtggacccccctgatgtgtgccgcccgggccggccagggcgctgctgtgtcctacctgctgggcagaggagctgcctgggtgggcgtgtgtgagctgagcggcagagatgctgcccagctggccgaggaggccggcttccctgaggtggccaggatggtgcgggagtag

SEQ ID NO: 227576 - DNA, 273 bp, Artificial Sequence
  derived and/or modified sequence
atgagccggcccctgctgatcaccttcaccccagccacagaccccagcgacctgtggaaggatggccagcagcagccccagcctgagaagccagagagcaccctggatggagctgctgcccgggccttctatgaggccctgattggagatgagagcagcgccccagacagccagaggagccagacagagcccgcccgggagaggaagaggaagaagaggcgcatcatgaaggccccagctgctgaggccgtggccgagggcgccagcggctag

SEQ ID NO: 227577 - DNA, 1071 bp, Artificial Sequence
  derived and/or modified sequence
atgagccggcccctgctgatcaccttcacccccgccaccgaccccagcgatctgtggaaggatggccagcaacaaccccagccagagaagccagaaagtacactagatggggccgccgcacgagccttttacgaagcgctgataggggacgaaagtagtgcacccgatagccagcgatcgcaaacagagcccgcacgcgagaggaagagaaaaaaacggcggattatgaaggcgcccgccgctgaggctgtggcagagggagcgtcgggcaggcatggccaagggaggtctctggaggccgaagataaaatgacccacagaatcctgcgtgctgctcaggagggtgatctgccagagttacggagactcctggagccacacgaggccggaggtgccggcgggaacatcaatgccagggatgccttctggtggaccccgctcatgtgcgctgcacgggcgggtcagggagccgccgtctcctatctcttggggagaggcgccgcttgggttggtgtgtgtgagttatccggccgcgacgccgctcagctcgccgaggaggctggcttcccagaagtcgctaggatggtgcgggaatcacacggtgagaccaggtcccctgaaaatcgcagtccgacaccgtcattgcagtattgcgagaattgtgatacacacttccaggactcaaatcacagaacatctactgcccatctcctgtcgttgagccaaggccctcaaccgccgaacctcccattgggggttccaatttcatcacccggatttaaactcctgctgcgaggcggttgggaacctggcatgggtttagggcccagaggcgaaggcagggccaaccctattcctacggttcttaagagagatcaggagggactgggctacaggagcgctcctcagcccagggtgacacattttcctgcttgggacacacgggccgtggctggacgcgaaagaccacccagggtagccacactgtcctggcgcgaggagcgccgcagagaagagaaggacagagcttgggaaagggatctcagaacttacatgaacctggaattctag

SEQ ID NO: 227578 - DNA, 1071 bp, Artificial Sequence
  derived and/or modified sequence
atgagccggcccctgctgatcaccttcacccccgccaccgacccctctgacctgtggaaggacggccagcagcagccccaaccggaaaaacccgaaagcacgctggacggagccgctgcaagggcattctacgaagcactgattggtgacgaatcttccgcccccgactctcagaggagtcagactgagcctgcaagagaacgaaaacgtaagaaaagaaggatcatgaaggccccagccgccgaggcagtggctgagggcgcttcgggtaggcatggtcagggccgctccttagaggcggaagacaaaatgacgcatcgcatcctgagggctgcccaggaaggagacttgcctgaactgaggaggctgctggagccgcatgaggccggaggagctgggggcaacatcaacgcccgggatgcattctggtggaccccgctgatgtgtgctgccagagcaggacagggtgctgccgtgtcttacctgttgggcagaggagcggcatgggtgggcgtgtgcgaactttccggccgggacgcggcccagctcgcagaagaggccggcttccctgaggtcgctagaatggtgcgagaaagccacggggagacacgttctccggagaacagaagtcctaccccttcgctccaatactgcgaaaattgcgatacacactttcaggacagcaatcatcggacgagcactgcgcatctcctgtctttgagccagggcccacagccacctaatttgcctttgggcgtgcccattagttcacccggtttcaagctcctgcttcgcggcggatgggaacccggcatgggcctgggccctcggggcgagggcagggccaacccaattcccacagtgctgaagcgggatcaggaaggactgggctacaggtccgcaccacagcccagagtgacacacttccccgcctgggacaccagggcagtggccggcagggaacggcccccgcgggtcgcgaccttaagctggcgcgaagaacgaagacgggaggaaaaggacagagcctgggaaagggacctgagaacctatatgaacctggagttctag

SEQ ID NO: 227579 - DNA, 1071 bp, Artificial Sequence
  derived and/or modified sequence
atgagccggcccctgctgatcaccttcacccccgccaccgacccctccgatctgtggaaggacgggcagcagcagcctcagccagagaaacccgagtccacactggatggcgcagctgcgagagctttttacgaagcacttattggggacgagagttctgcaccagactcacaaaggtcccagaccgagcctgcaagagagagaaagaggaaaaagcgccgcatcatgaaggcaccagccgccgaggctgtcgccgaaggggccagcggccgacatggccagggccgcagtctcgaggccgaggataagatgacacatcggattctccgtgctgcccaagaaggcgatctgccagaactgagaaggctcttagagccccatgaggccgggggcgcgggcgggaacattaatgcccgcgacgcattctggtggacacccttgatgtgtgccgcccgagccggacaaggtgctgctgtctcctacctgctgggccgtggcgccgcctgggtcggcgtgtgtgaactgagcgggagggatgccgcgcagctggctgaagaagcaggcttccccgaggtcgcgcgcatggtaagggaatcccacggcgagactagatcccccgagaacagatcacctaccccatctctgcaatattgcgaaaattgcgacacacactttcaagactcaaaccaccgcacaagcaccgcccacctactctcgctgagccagggcccccagccgcccaatttacccttgggtgtgccgatttcgtctccgggcttcaagcttcttctgaggggaggatgggagcctgggatgggactcggtccacggggggaggggcgggcaaaccctatcccaactgtgctgaagcgggatcaggagggcttgggctaccgtagcgctcctcaacccagagtgactcatttcccggcctgggatacccgcgcagttgccgggcgggaacgccctccaagagttgccactctcagttggcgcgaagagaggcggcgcgaggaaaaggacagagcttgggagcgagatctgcggacctacatgaatctggagttctag

SEQ ID NO: 227580 - DNA, 1071 bp, Artificial Sequence
  derived and/or modified sequence
atgagccggcccctgctgatcaccttcacccccgccaccgacccctcagacctgtggaaagacggccaacaacagccccagcccgagaaacccgagtccactttagacggcgctgctgctcgagccttttatgaggcactgataggggacgagtcaagcgcacctgattctcagcgatcccagacagagcctgccagagagcgcaagaggaagaagagaagaattatgaaggcacctgcggccgaagcagtggccgaaggagcttcaggacggcatggacagggccgaagtttagaagctgaagataagatgacccaccggatcctcagagccgcccaggaaggcgatctaccagaactgcggagactgcttgaaccccatgaggccgggggcgcgggcggaaacattaatgctcgggatgcattctggtggactcctctgatgtgtgccgcccgagctggccagggcgccgcggtcagttacctcctggggcgtggcgctgcctgggtgggggtgtgcgaactgtcagggagggacgccgcccagcttgcggaggaagcgggctttcctgaggtagcccgtatggtcagagaatctcatggagagaccagatccccagagaacagatctccaacaccttccctccaatactgcgaaaactgtgatactcactttcaagattccaatcaccgtacctccacagcccatctactgtccctgtctcaaggaccacagcctcccaacctcccacttggcgttcccatttccagccccggctttaagttgctactgcgtggtggctgggagcctggtatgggtttgggacccaggggcgagggacgagccaatccaattcctacagtgctgaaacgggaccaggaaggtctcgggtatcggtcagccccccagccccgggttacccatttccctgcctgggacaccagagccgtagcgggtcgcgaacgacccccacgcgtggccacgctcagctggcgcgaagagaggcgcagggaggagaaagaccgggcctgggaaagagatcttcgcacatatatgaatttggagttctag

SEQ ID NO: 227581 - DNA, 1071 bp, Artificial Sequence
  derived and/or modified sequence
atgagccggcccctgctgatcaccttcacccccgccaccgaccccagtgatctctggaaggacggacagcagcaaccccagcccgaaaagcctgagtccaccttggacggtgctgcagctagagccttttacgaggctttaattggcgatgagagttcggcgcccgatagccagaggtcccaaacggagccggcccgagaacggaaacgcaagaagcgtaggatcatgaaagctccagctgcagaggccgtggctgaaggcgcgtccggccgccacggtcagggaaggagtctggaagcggaagataagatgacccatagaattctgcgcgcagcccaagaaggagacctacctgaactgagaagactcctcgagccccacgaggccggcggagcgggcgggaacatcaatgctcgggacgcattctggtggacgcccttaatgtgcgccgcgcgggcaggccaaggggcagcggtgagctatctgctgggtagaggggccgcatgggtgggtgtatgtgaactgtctggcagggacgccgcccagctcgccgaggaagctggctttcccgaggtggccagaatggtcagggagtctcacggggaaacccggtccccagagaatcgttcacctactcccagtctgcagtactgtgaaaactgtgacacgcactttcaggactctaatcatcggacaagcacagcacacctgctgtcgctgtcccaggggccacagccccctaatttgccgctgggtgttcccatttcttcacccggctttaagttgttacttagagggggctgggaacctggtatggggctggggccaagaggagagggtcgcgccaatccaatcccaactgtgttaaaaagggatcaagaggggctcgggtaccggtcagcccctcagccaagggtgacccatttccctgcttgggacacacgggccgtcgccggacgggaacggcctccaagggtagccacactctcctggcgcgaggagaggaggagagaagagaaggacagggcttgggagagggacctgcgcacgtacatgaatctggagttctag

SEQ ID NO: 227582 - DNA, 498 bp, Artificial Sequence
  derived and/or modified sequence
atgagccggcccctgctgatcaccttcacccccgccaccgacccctcggacctgtggaaagacgggcaacagcaaccccagcccgagaaacccgaaagcaccttggatggtgctgctgctcgggccttttatgaggccctgattggcgacgagtccagtgctccggatagtcaacggtcacagacagagcccgcacgcgagaggaagaggaagaagcggagaattatgaaggctcctgctgccgaggctgtggcagagggagcaagtggtcggcacggccaaggccgatctctggaagcggaggataaaatgactcaccggattttaagagctgcccaggagggcgatctgcctgaactgcggagactgctggagccccatgaggcaggaggtgccggtgggaacatcaacgcacgcgatgccttctggtggacacctctgatgtgtgcggccagagctggtcagggggcagcggtgtcttacttactgggccggtag

SEQ ID NO: 227583 - DNA, 459 bp, Artificial Sequence
  derived and/or modified sequence
atgagccggcccctgctgatcaccttcacccccgccaccgaccccagcgatctgtggaaagatgggcagcagcaaccacagccagagaaacctgaatctactcttgacggcgccgcggcaagagctttttacgaggccctaatcggcgatgaatcttcagcccccgactcccaacgctcacagacagaacctgcaagggagaggaaacggaagaaacggaggattatgaaggccccagctgccgaggccgtagcagaaggtgccagcgggcgccacggccagggccgctcattagaggccgaggacaagatgacacaccgaatcctaagggccgcccaggaaggcgacctgcccgaattgcgccgtctgctggagccacatgaagctggcggggcaggggggaatatcaatgcaagggatgctttctggtggacgcccctgatgtgcgcagcacgatag

SEQ ID NO: 227584 - DNA, 1071 bp, Artificial Sequence
  derived and/or modified sequence
atgagccggcccctgctgatcaccttcacccccgccaccgacccctctgacttgtggaaggacggccagcagcaaccacagcccgagaagccagaatccaccctggacggtgccgctgcaagagccttttacgaggctcttattggggacgagtcaagcgcccctgactcccaacggagtcaaacggaacctgcacgcgagcgaaagcgcaagaagcgcagaattatgaaggccccagctgctgaggccgtggcagagggcgcgtccgggcggcacggacaagggcggtcattggaggctgaggataaaatgacccacaggatcctgcgcgccgcacaggagggcgatctgcccgagctgaggcgcctgctggagccacacgaagccggaggcgccggaggcaacatcaatgctcgtgatgcattctggtggacgccactaatgtgtgcggcccgagccggtcaaggagccgcggtcagttatttgttgggcagaggggctgcgtgggtcggggtgtgtgaactgagtggaagggacgctgcccagttagcagaagaggcaggatttcccgaggtggcccggatggtacgcgagagccatggcgagacgcggtcacctgagaataggtccccaactccttctttgcagtactgtgaaaactgcgacacgcattttcaagactctaatcatagaaccagcacagcgcatttgttatcgctgtcccagggaccgcagcctcctaatcttccacttggtgttccaatctcttctccaggattcaagcttctgctgcgcgggggctgggaacccggcatgggcttgggcccaagaggtgaagggcgcgctaatccaataccaactgtgctgaagagagaccaagaggggctggggtacaggtccgctcctcagcccagagtgacacacttccccgcatgggatactagagctgtcgcaggccgcgagcgaccaccccgggtggccactctgtcttggagagaggagcgacgcagagaggaaaaggatagggcctgggagcgcgatttgaggacctatatgaacctggaattttag

SEQ ID NO: 227585 - DNA, 1071 bp, Artificial Sequence
  derived and/or modified sequence
atgagccggcccctgctgatcaccttcacccccgccaccgacccctccgacttgtggaaggacggtcaacagcagcctcagccagaaaagccggagtctacccttgatggcgccgccgcacgggctttttatgaggctctgattggtgatgagtcctctgccccggatagtcagagatcccaaacagagccggctagggaacgcaaaaggaaaaagaggcgcatcatgaaagccccagccgcagaggcagtcgcagaaggcgctagcggccggcatggtcaagggagaagccttgaagccgaggacaaaatgacgcatagaatactgagggcggcccaggaaggcgacctacccgagctaagacggttgctggaacctcacgaggcaggcggcgccggggggaacattaacgcccgtgacgcattttggtggacccctctcatgtgtgcagcacgcgcaggtcagggcgcagcggtgtcctacctgttaggacgcggtgcggcctgggtcggcgtttgtgaactgtccggaagagatgcagcccagctcgccgaagaagccgggttccccgaggtcgccagaatggttcgagaatctcacggcgagactaggtcaccagagaacagaagcccaaccccgagtttacagtattgtgagaactgtgacactcacttccaggactccaaccaccggacgtccactgcccatttattaagtctcagccaggggccacagccgccaaacttaccgctcggagttcccatttcaagtcccggatttaaacttttactgcgcggcggctgggaaccaggcatgggcctagggcctcggggagagggcagagccaacccgattccgaccgtactcaagagagatcaggaggggctcggctaccggtccgccccccaaccacgggtcactcattttcctgcttgggatacacgggctgttgcgggacgagagcgaccaccccgtgtggcaacgctctcttggagagaggaacgccgccgagaggaaaaagatcgagcatgggagagagatctgcgtacttatatgaatttagagttctag

SEQ ID NO: 227586 - DNA, 324 bp, Artificial Sequence
  derived and/or modified sequence
atgagccggcccctgctgatcaccttcacccccgccaccgaccccagtgatctgtggaaggatggacagcagcaaccccaaccggaaaagcctgagtcgactctggatggggctgccgcacgcgccttctacgaggcattaattggcgacgaaagtagcgcacccgacagtcagcggtcacagacggaacccgcgagggaacggaagaggaaaaagaggcggattatgaaagctcctgccgctgaagccgttgcagagggcgcctcaggaaggcatggccaaggacggagcttggaagccgaggataagatgacccatcgctag

SEQ ID NO: 227587 - DNA, 1071 bp, Artificial Sequence
  derived and/or modified sequence
atgagccggcccctgctgatcaccttcacccccgccaccgacccctccgatctttggaaggatgggcaacagcagccacagccagagaagccagaaagtaccctggacggtgccgctgcacgtgccttttacgaggcccttatcggcgatgagagcagcgcccctgactcgcaacgtagccaaaccgaacccgctcgcgaaagaaagcgcaaaaaacggagaatcatgaaggcccctgccgccgaggccgtggccgagggcgcttcaggtcgccacggccaaggccggtccttagaggcagaggataaaatgactcacagaatcctacgggctgcgcaagagggagatttgcctgagctgcggcggcttctggagccccatgaggctgggggagctggggggaacattaatgcaagggacgcgttctggtggactcccctcatgtgcgctgctcgggctggccagggcgctgctgtttcttatcttctggggcggggagcggcttgggtgggcgtctgcgagctgagcggcagggacgctgctcaactggcagaggaagccggcttcccagaggtcgcccggatggtacgggaatctcacggtgaaactaggtcacctgaaaatcgttccccaaccccaagcttacagtattgcgaaaactgcgacactcatttccaagattccaaccatcgcactagcacggcccacctgctgtcattgagtcaaggcccacagccccctaacctcccactgggggtacccatctcatcccccggttttaagcttttattaagaggcggttgggagcctgggatgggcttagggcctcgaggcgaggggagagccaacccaattcccaccgtgctcaagcgggaccaggaggggcttggctatagatctgctccacagccccgagtgactcatttccccgcatgggacacccgggcagtcgcagggcgagagcgaccacccagggtggcaacactgtcctggcgagaggagcggcggcgtgaggagaaagaccgagcatgggaacgggatctgcgcacatacatgaacttggagttctag

SEQ ID NO: 227588 - DNA, 498 bp, Artificial Sequence
  derived and/or modified sequence
atgagccggcccctgctgatcaccttcacccccgccaccgacccctccgacctctggaaggatggacagcagcagcctcagcccgaaaagcccgagagtaccctggatggcgccgccgcccgggcgttctacgaagcattaattggggacgagagcagtgcccccgactcccagcggtctcagactgagcctgctcgggaacgcaagagaaagaaacggaggataatgaaggcacccgctgctgaagccgtggcagaaggcgccagtgggcgacacggacagggaagatcgctcgaagcagaagataagatgacccaccggattctccgggcagctcaagaaggtgatctccccgagcttcgcaggctgttagaaccgcatgaagccggaggcgccggcggcaatataaatgccagggatgctttttggtggacccccctgatgtgcgctgcgagagcaggacagggtgcggccgtcagctatctccttggcagatag

SEQ ID NO: 227589 - DNA, 1071 bp, Artificial Sequence
  derived and/or modified sequence
atgagccggcccctgctgatcaccttcacccccgccaccgacccctccgacctgtggaaagacggccaacagcagccccaacctgaaaagccagagagcacactagatggtgccgctgcacgagcattctacgaggccctcatcggggatgaaagtagcgcccctgatagccaacgctctcaaaccgagcccgcccgagaacggaagcgcaagaagaggcggataatgaaggcccctgctgcagaggcagtcgcggaaggcgcctccggccggcacggccagggtcgaagcctggaggccgaggataaaatgactcaccggatcctccgcgctgcacaagaaggagacttgcctgagttgcggaggttgctagaacctcacgaagccggcggtgcgggcgggaatataaacgctagagacgcattttggtggacaccgctgatgtgcgcggccagggccggtcagggcgctgcggtgagctacctgctggggcgtggggcagcctgggtcggcgtgtgcgagctaagtggtagggacgccgcacagttggcagaggaagccggctttcctgaggtggcacgcatggtgagagaaagccatggggaaaccagatctcctgagaaccgtagccccacgccaagtctccagtattgtgagaactgtgatactcatttccaggacagcaatcacaggacttcgaccgcacacttattgtcacttagtcaggggcctcagcctcctaatcttcccctgggggttccgatcagctcccccggcttcaagctgctcctgcgaggcgggtgggagcccggcatgggcttgggaccccggggcgaaggaagagctaatccaattcccactgttttgaagagagaccaagaggggctcgggtatcggagcgcaccccagccgcgtgtgacccacttccctgcctgggacacgagagcagttgcagggagagagaggcccccccgcgtcgccacactgtcgtggcgggaagagaggcggcgcgaagaaaaggatcgcgcctgggagcgcgatcttagaacatacatgaatcttgagttctag

SEQ ID NO: 227590 - DNA, 597 bp, Artificial Sequence
  derived and/or modified sequence
atgagccggcccctgctgatcaccttcacccccgccaccgacccctctgacctgtggaaggatggacagcagcagccccaacccgaaaagccggaatccactctcgatggagccgccgcccgtgccttttatgaagcgttgattggcgacgagtcgtccgcccctgatagccagagatcccaaacagaacctgcccgggagaggaaacgtaagaagcggcgaatcatgaaggctcccgccgccgaagccgtggctgaaggcgcctctggaaggcacggacaaggacggagtttggaagcagaggataagatgactcatcggatattgcgggcagcccaggagggtgatctgccggaactcaggcggttgctggaacctcacgaggctggcggcgccggcggaaacatcaatgcccgcgacgcattctggtggactcctttgatgtgtgcagccagggcggggcagggcgctgcggtgtcttatctgctcggccggggagccgcttgggtgggcgtctgcgagctgtctggacgcgatgccgcccagctcgcggaagaggcaggctttcctgaagtggcaagaatggtgagagaatag

SEQ ID NO: 227591 - DNA, 597 bp, Artificial Sequence
  derived and/or modified sequence
atgagccggcccctgctgatcaccttcacccccgccaccgaccccagcgatctgtggaaggacggacagcagcagccccagcccgagaagcccgaatcaacactggacggagcagccgccagagccttttacgaagcactgattggagatgaatccagtgcacctgattcacagagaagccagactgagcccgcaagggagaggaagaggaaaaaaaggcgaatcatgaaagctccggcagcagaggccgtcgcagagggtgcctctggtagacacgggcagggtaggtctttggaagcagaagataagatgacccatagaatcctacgcgctgcgcaggaaggcgacctccccgagcttcgtcgacttcttgagccacatgaagcaggcggcgctggggggaatattaacgcaagggatgccttttggtggacacctctgatgtgcgccgctcgtgcaggtcagggcgccgccgtttcctatctactcgggcgaggcgccgcgtgggtcggcgtgtgtgaactatccggtcgtgacgctgcccagttggcagaggaagcaggctttcccgaggtggctcggatggtgagagagtag

SEQ ID NO: 227592 - DNA, 1071 bp, Artificial Sequence
  derived and/or modified sequence
atgagccggcccctgctgatcaccttcacccccgccaccgacccctcagatctgtggaaggacggccaacaacagccacagcccgagaaaccagagtccacccttgatggggcagccgctcgggctttctacgaggcattaatcggtgacgagtcctcagcgcctgactctcagcgttcccaaaccgagcccgccagggaacggaaacggaagaaacggcggattatgaaagccccagcggccgaagcagtggcagagggtgcatctggccggcatgggcaaggccgcagccttgaagccgaggataaaatgacgcaccgcatcctgcgcgccgctcaagagggtgatctgcccgagctgaggcgcctgctggagcctcacgaagccgggggggcaggcggcaacatcaacgcacgggatgccttctggtggacaccactcatgtgcgcagcacgcgcaggacagggcgcggctgtctcttatctactcggccggggagcggcatgggttggcgtgtgcgaactgagtggccgcgatgcggcacagctggccgaggaagccggcttcccagaggttgctcgaatggtacgagaatcacacggcgagaccaggtctccagaaaaccgtagtcctactccttcactgcagtattgtgagaactgtgacacccatttccaagattcaaaccaccgaacctccacagctcacctactgtcccttagtcagggtccacagcctccgaacttgcctctgggcgtgcccatatccagtccaggtttcaaattgctgctgcgtggcggatgggagccagggatgggtcttggccccagaggagaaggccgtgccaatccgattcccacagtccttaagcgggatcaagaaggcctgggttaccggtccgcaccacaaccacgcgtgacccacttccctgcctgggacactcgcgccgtcgctgggagagagagaccaccaagggttgctacattgtcctggcgcgaagagaggagacgcgaagagaaagatcgggcgtgggagagagacctgcgtacttacatgaatttggaattttag

SEQ ID NO: 227593 - DNA, 324 bp, Artificial Sequence
  derived and/or modified sequence
atgagccggcccctgctgatcaccttcacccccgccaccgacccctctgatttgtggaaagacggccagcaacaaccccagcccgaaaagcctgaatcgactctcgacggtgccgcggcgagagcattctacgaagccctgattggcgatgagtcgagcgcccctgatagtcagagaagccaaacagagcctgcgagggaaaggaaacgcaagaaaaggaggatcatgaaggcgccggccgctgaggctgtggctgaaggggcctcaggccgacatggccaggggcgttccctggaagcagaagacaagatgacccataggtag

SEQ ID NO: 227594 - DNA, 324 bp, Artificial Sequence
  derived and/or modified sequence
atgagccggcccctgctgatcaccttcacccccgccaccgacccctccgacctgtggaaagatggccagcagcagcctcaacccgagaagcccgagagcacactggacggagctgcggcacgcgccttttacgaagccctgattggagacgagtcgtccgccccggactctcagcggtctcagaccgagccagccagggaaagaaaacgcaaaaaaagaagaataatgaaggccccggctgccgaagctgtcgcagagggagctagtggcagacatggtcagggaaggtctctggaggccgaagacaagatgacccaccgctag

SEQ ID NO: 227595 - DNA, 459 bp, Artificial Sequence
  derived and/or modified sequence
atgagccggcccctgctgatcaccttcacccccgccaccgaccccagcgacctatggaaagacggccagcagcagccacagcccgaaaagcccgaaagtaccctcgacggcgccgcggctcgcgcgttttacgaagccctgataggagacgaaagctcggcccctgactcccagcggagtcagacggagccggcgagggaacggaagcgaaagaaaaggcgtatcatgaaggctccagctgcagaggccgtggccgaaggcgcgtccgggagacatggccaaggccgctctcttgaggcagaggacaaaatgactcatcgtattctgcgagccgctcaggagggtgacctgcctgaacttcgaaggctgttagaaccacatgaagcaggaggagcgggcggcaatataaatgctcgggatgctttctggtggacgccacttatgtgcgcagcccgttag

SEQ ID NO: 227596 - DNA, 498 bp, Artificial Sequence
  derived and/or modified sequence
atgagccggcccctgctgatcaccttcacccccgccaccgacccctctgacctgtggaaagatggacaacaacagccccagcctgagaaacctgagagcacactagacggggccgcggcccgcgctttctacgaggctctcattggggatgagtcatccgctcccgatagccagaggtcccaaaccgagcctgcccgagaacgtaagcgcaaaaaaagaagaattatgaaagcccctgccgcagaagcagtggctgaaggggcctcgggaaggcatggccagggacgctctctcgaagctgaggacaagatgactcataggattttgcgcgccgcccaagaaggtgacctgccggaactgcgacgcctacttgaaccccatgaagcagggggcgcaggcggtaacatcaacgctcgcgatgccttttggtggacccctctgatgtgcgcggctagagcagggcagggggccgccgttagctacctccttggccgatag

SEQ ID NO: 227597 - DNA, 1071 bp, Artificial Sequence
  derived and/or modified sequence
atgagccggcccctgctgatcaccttcacccccgccaccgacccctcagatctgtggaaagatggccagcagcagccacagcccgaaaagcctgaaagcacgctcgacggggcggcagcccgggccttctatgaggccctgattggcgatgagagctccgctccagatagccagaggtctcaaacagaacctgctcgggagagaaagagaaaaaagcgtcggataatgaaagcccccgcagccgaggcagtggcagaaggagcatccggcagacacgggcaaggcaggtcccttgaagctgaggacaagatgacacataggatcctccgcgccgctcaagaaggtgatctaccagagcttcgccgactgctggagccccatgaagccggtggtgctggcgggaacatcaacgcccgagatgcattttggtggactccattaatgtgtgccgccagggcgggacaaggggcggccgtttcttacttgctgggtcggggtgctgcttgggtgggcgtgtgcgaacttagcggccgcgacgccgcccagctcgccgaggaggcaggctttccagaagtggcacgcatggttagagaaagtcacggggaaacaagaagccccgagaataggtcgcccactccatcacttcagtactgcgagaactgcgatacacacttccaggactccaaccatagaaccagcaccgcccacctgctcagcctgagccagggtccccaacctcctaacttgcccctgggggtaccaatctcctctcccggattcaagcttttgctaagaggaggatgggagccagggatgggcctcggcccacggggcgagggtagagctaaccccattcccaccgtactcaaacgagatcaggaggggctcggctatcgcagtgccccacagcctagggtaacccacttcccagcctgggacacccgcgccgtggctggacgcgagcgaccccccagagttgcaactctatcgtggcgggaggagaggcgccgtgaggagaaagatcgcgcttgggaacgtgatctgcgcacttatatgaatctggaattctag

SEQ ID NO: 227598 - DNA, 1071 bp, Artificial Sequence
  derived and/or modified sequence
atgagccggcccctgctgatcaccttcacccccgccaccgacccctccgacctatggaaggatgggcagcagcagccccagccagagaaaccggaatcaactctggatggcgctgctgctagagctttctatgaggcgcttatcggagatgaatcctcagcgcccgattcacaacgttcacagaccgaaccagcccgggagcggaaaagaaaaaagaggcgaatcatgaaggcaccagctgcagaagccgtggcagaaggggctagcggtcgtcacggccaaggtcggtcgttggaggccgaggacaagatgacccatagaatcctgcgagcggcccaggagggcgatctgccagagctccgacgtcttttagagccacacgaagcagggggcgccggtggcaatatcaacgcgcgggacgcgttctggtggacccctctgatgtgcgccgcaagggctggtcagggggccgccgtgagttacctgttggggcgcggtgcagcttgggtaggtgtgtgtgaattatctggcagagacgcagctcagcttgcagaggaggcaggctttccagaagtagccaggatggttagagaatcacatggggagacaaggagcccagagaataggtcaccaacgcccagtctgcagtattgcgagaactgcgacacgcacttccaggatagtaaccaccgcacaagcactgcccatttactttcgctgagccaggggcctcagccaccaaacctgccgctcggagtcccaattagttcaccagggttcaagttgctgctgagaggcggctgggagccgggcatgggcctgggacccaggggggaagggcgagccaatccaattcctacagtcctgaaacgggaccaggagggcctggggtaccgaagtgcaccacagccccgcgtcacacacttccctgcctgggacacacgcgccgtagcagggcgcgagaggccgccgagggtggccacgctgagttggagagaagagcgacggagagaggagaaggatcgagcctgggaaagagacctgcgcacctacatgaacctggagttttag

SEQ ID NO: 227599 - DNA, 597 bp, Artificial Sequence
  derived and/or modified sequence
atgagccggcccctgctgatcaccttcacccccgccaccgaccccagcgatctttggaaggacggtcagcaacagcctcagcccgaaaagcctgaatccaccctcgatggggccgccgcccgagccttctacgaggccttaatcggcgacgaatccagcgcccccgacagtcagagatctcagactgaacctgcccgcgagcggaaacgaaagaagcgcagaattatgaaggcccccgcagccgaggccgtggcggaaggcgcatctggccgccatgggcaagggagaagtctggaagctgaagacaagatgacccatcgcatcttaagagcggcgcaggaaggagacttgccggaactgagaaggcttctcgaaccacacgaagccggtggcgcaggggggaacatcaatgctagagacgccttctggtggactccactaatgtgcgctgccagggcgggccaaggagcggccgtgtcgtacctcctgggaaggggtgccgcttgggtgggtgtttgcgagttgtcaggacgcgacgctgcccagctggcggaagaagctggctttcccgaggttgcacgaatggtgcgggaatag

SEQ ID NO: 227600 - DNA, 273 bp, Artificial Sequence
  derived and/or modified sequence
atgagccggcccctgctgatcaccttcacccccgccaccgacccctctgatctttggaaagacggccagcagcagcctcagccagaaaaacctgaaagcaccctcgatggggcagccgccagagcattctatgaagctctgatcggcgacgaatcctctgcaccagacagccaacggtcccagaccgaaccagcccgcgagaggaaacgcaagaaaaggcgtatcatgaaggctccagccgccgaggcagtagccgaaggagccagcggatag

SEQ ID NO: 227601 - DNA, 273 bp, Artificial Sequence
  derived and/or modified sequence
atgagccggcccctgctgatcaccttcacccccgccaccgaccccagtgacctgtggaaggatggacaacaacagccccaaccggaaaagccggagtcaacactggacggagcagccgctagagcattttacgaggccctcatcggagatgagtccagtgcccccgactctcagaggtcccagactgagcctgcacgagaaaggaaacggaagaagagaaggatcatgaaggctcctgcagcggaggcggtcgccgagggagcttctgggtag

SEQ ID NO: 227602 - DNA, 459 bp, Artificial Sequence
  derived and/or modified sequence
atgagccggcccctgctgatcaccttcacccccgccaccgaccccagcgacttgtggaaagacggccagcagcagccccagcccgaaaagcctgagagtacgctggacggcgccgctgctagagccttctacgaggccttaatcggtgacgagtcttccgcaccagattcgcagcgatcccagacagaacccgctcgagaaagaaagcgcaagaagcggagaattatgaaggcacccgctgccgaggccgtagccgagggagcctctgggaggcatggtcagggccgatctcttgaagcggaagacaagatgacacacaggatacttagggctgcccaagaaggcgatctcccggaactgcgaaggttattggaaccccacgaagctgggggggccggaggcaacattaacgcccgcgacgccttctggtggacgccccttatgtgcgcagctcggtag

SEQ ID NO: 227603 - DNA, 597 bp, Artificial Sequence
  derived and/or modified sequence
atgagccggcccctgctgatcaccttcacccccgccaccgaccccagtgatttgtggaaagatggccagcaacagccgcaacccgaaaaacctgagtccactttggatggtgccgcggcacgggctttctacgaggccctgattggggatgaatcaagcgctcctgacagtcagagaagccagacagagcccgcacgcgagcgcaagcgaaagaagcgcagaattatgaaagctccagccgctgaggccgtagctgagggcgcgtccggtagacacggtcagggccgctcgcttgaggctgaagacaaaatgacgcacaggattctgagagcggcccaggaaggcgacctcccagagctgcgccgactgttggagcctcacgaagccgggggcgccggagggaatataaatgcccgagatgccttttggtggacacccctaatgtgtgctgctagagctggtcagggcgcggccgtgtcatatttgttgggaagaggagccgcctgggtgggggtttgtgagttgagcggccgggatgcggcccagctggccgaggaggctggctttccagaagtggccagaatggtgagggagtag

SEQ ID NO: 227604 - DNA, 1071 bp, Artificial Sequence
  derived and/or modified sequence
atgagccggcccctgctgatcaccttcacccccgccaccgacccctcagacttgtggaaagacggacagcagcagccacagcctgagaaacccgaaagcaccctggacggagcagccgcccgcgccttctatgaggcactgatcggagacgaatcgtctgcacccgattctcaaaggagtcagactgagccagctcgggaaagaaagaggaagaagcgtaggataatgaaggctccagctgcggaagctgttgctgaaggggcttcggggcgccacgggcagggcagatctctggaggcggaggacaagatgacccatcggattctccgtgccgcccaggagggcgacctccctgaactgcgccggttactcgaaccacatgaagccgggggcgctggcggaaacatcaacgctagggatgctttctggtggactccccttatgtgtgccgcgcgggctggtcagggagcagccgtatcttacctgctcggtcggggcgccgcgtgggtgggagtttgcgagctgtctggccgcgatgccgcccagttagccgaggaggctggctttccagaagtcgctaggatggtgcgcgagagtcatggtgagactcggtcacctgagaacaggtcacccaccccttccctccagtactgcgaaaattgtgatactcacttccaggattcaaatcatcgaaccagcacagcacacctgctctccctttcacagggcccacaacctcccaatctccctcttggcgtacctattagctccccagggttcaagctgttattgcgtggtggctgggaaccaggtatgggcctaggacccaggggggaaggcagggccaaccccattcctaccgtgctaaagagggatcaggaaggtctggggtatagaagtgcaccccagcctagggttacccactttccggcctgggataccagagcagtggccggcagggaacgccccccacgggttgctactctgtcctggagagaagagcggaggagggaggagaaggatcgggcctgggagcgcgatctgcggacctacatgaacctggagttctag

SEQ ID NO: 227605 - DNA, 1071 bp, Artificial Sequence
  derived and/or modified sequence
atgagccggcccctgctgatcaccttcacccccgccaccgacccctccgacttatggaaagacggacagcaacagcctcaacccgagaagcccgagtcaacccttgatggtgcagcggccagagccttttacgaggcgctcataggcgatgaatcctcagcccccgattcgcagcgtagccagacagaacctgcaagagagcggaagcggaagaagcgacgtatcatgaaggcacccgcagcagaagccgtggcagaaggcgctagcgggagacacggacagggccgttcattagaagcagaggacaaaatgacccatcggatcctgcgggctgctcaagaaggcgacctacctgagctcaggcggctacttgagccccacgaggccggcggcgcaggtggcaatatcaatgcaagagacgcgttctggtggactcctctgatgtgcgccgcccgcgccgggcagggagcggcagttagctatctccttgggaggggcgccgcctgggtgggggtgtgtgagctctccggtcgcgatgcagcccaacttgctgaagaagccggctttccagaggtggccagaatggtcagggaatcacacggagagactagatcaccggaaaatagatccccaactccatcacttcagtactgcgagaattgtgatactcattttcaggactcaaaccatagaaccagcacagcccatctgctctcactgtcgcaagggccgcagcccccaaacctgcctcttggagtccccatatcgtctcctggtttcaaactgctgctccggggcggatgggagcctgggatgggccttgggcctcgtggggaaggcagagccaaccccattccgacggttttgaagcgagaccaagaggggttaggttatagatcggctccccagcctagggttacacatttccccgcctgggatacaagagctgtggccggcagggagaggccacctcgcgtggcgaccctcagttggcgagaggaaagaaggcgcgaggagaaggacagggcctgggagcgcgatctccgaacatatatgaaccttgagttctag

SEQ ID NO: 227606 - DNA, 273 bp, Artificial Sequence
  derived and/or modified sequence
atgagccggcccctgctgatcaccttcacccccgccaccgacccctcagacctgtggaaggatggacaacagcagccgcaacccgagaagccagagtccaccctggatggagctgcagcaagagccttctacgaggccctgattggggatgagagtagcgctccagactctcaacgatcccagacagaaccagcgcgtgagcgaaagagaaagaaacgaagaataatgaaggcacctgctgccgaagccgttgctgagggagcgagtggctag

SEQ ID NO: 227607 - DNA, 324 bp, Artificial Sequence
  derived and/or modified sequence
atgagccggcccctgctgatcaccttcacccccgccaccgacccctccgatctgtggaaggatggccagcagcagcctcagccagaaaagcctgagagcaccctggacggagctgcagcgcgggctttctatgaggccctgattggcgatgagtcttccgccccagactctcagcggtcgcagacagaaccggccagggagaggaagaggaaaaagcggaggatcatgaaggctccagccgcagaggccgtcgccgaaggagccagtgggcgacatggacagggccgctctctggaggccgaggataaaatgacacaccgttag

SEQ ID NO: 227608 - DNA, 1071 bp, Artificial Sequence
  derived and/or modified sequence
atgagccggcccctgctgatcaccttcacccccgccaccgaccccagtgatctttggaaggatgggcagcagcaaccacagccggagaaacccgagtcaactcttgacggagccgcagcaagagcattctatgaggccctaatcggggacgagtcttctgcgcctgattcacagagaagccagacggaacctgcccgcgaacgcaaacgcaaaaaaaggcgtataatgaaggcccccgctgcagaagccgtcgccgaaggagccagcgggagacatgggcagggcagatctctagaggctgaggacaagatgacccacaggattctgcgagctgctcaagagggggatctccccgagctgcggaggctgctcgaacctcacgaagcaggcggagcagggggaaacatcaacgcccgcgacgcgttttggtggacaccattgatgtgcgccgcccgggccggacaaggtgcagctgtatcttacctgctcgggcggggtgcagcttgggtcggagtttgtgaactgagcggccgcgatgcggcgcagttagcagaggaagccggattccctgaagtcgcacgcatggtgagagaaagccacggggagacacgtagtccggagaatcggagcccaaccccatctctacagtactgtgaaaattgcgacacacacttccaagatagtaatcaccgaacctccaccgcccatctcttatcgctgtcacagggcccccagccccctaacctccccctgggggtccctatctcctcacctggatttaagcttctgctcaggggcggctgggagccaggcatgggcctcggcccccggggcgaaggtagagctaaccccatccccactgttttgaagagagatcaggagggtctaggctacaggagtgctccccaacctcgtgtgacccacttccccgcatgggacacacgagccgtcgctggaagggaacgcccaccgcgcgtggcaaccctcagctggcgagaggagcgccgacgtgaagaaaaagaccgggcttgggagcgggatctgaggacgtatatgaatctcgaattctag

SEQ ID NO: 227609 - DNA, 273 bp, Artificial Sequence
  derived and/or modified sequence
atgagccggcccctgctgatcaccttcacccccgccaccgacccctccgatctttggaaggatgggcagcagcagccgcagcccgagaagccggaatccaccctggatggtgcagccgcgcgagcgttctacgaggcacttatcggagatgagtcatccgctcccgactcccaacgatctcaaaccgaaccagctagagaaaggaagcggaagaagcgaagaatcatgaaagccccggcggcagaggctgtcgctgagggggcatcaggctag

SEQ ID NO: 227610 - DNA, 498 bp, Artificial Sequence
  derived and/or modified sequence
atgagccggcccctgctgatcaccttcacccccgccaccgacccctcagacctatggaaagatggtcagcagcagccacagcccgagaagcccgaatccactcttgatggcgccgccgctagggccttttatgaggccctgatcggggacgagtccagtgcaccagactctcagagatcacagacagaaccggcccgagaacgcaaacggaagaagaggcggattatgaaagcgcctgctgccgaagctgtcgcggaaggcgcctctggcagacatggtcaggggcgctccctggaggctgaggataagatgacccaccggattctgcgcgcagcccaggagggcgatcttccagagttgagacgtctattagagccacacgaagctggcggggctggcggcaatatcaacgcacgagacgcattttggtggacccccctcatgtgtgcagccagagcaggccagggagccgccgtgtcctacctgctcgggcgctag

SEQ ID NO: 227611 - DNA, 459 bp, Artificial Sequence
  derived and/or modified sequence
atgagccggcccctgctgatcaccttcacccccgccaccgaccccagcgatctgtggaaggatggacaacagcaacctcagcctgagaaacctgaatcaacgttagatggagcagctgcaagggcattttacgaggcattaattggcgatgagtcttccgccccagactcccagcgcagtcaaactgagccagcacgcgaacgaaaacgaaagaagcgacgtattatgaaggcgcccgctgccgaggctgtcgcggaaggtgcaagtgggagacatgggcagggtcgctctctggaggccgaagataagatgactcataggatccttcgagctgcccaagagggagacctacctgagctacggcgccttctggagccccatgaagccgggggcgcgggtggcaacatcaatgccagggacgctttctggtggaccccattaatgtgtgcagcaagatag

SEQ ID NO: 227612 - DNA, 1071 bp, Artificial Sequence
  derived and/or modified sequence
atgtctagacctctcctcatcacctttacgcccgctactgaccctagcgatctgtggaaggatgggcagcagcagccccaacccgaaaagcctgagtccacgctcgatggcgcagcagcccgagccttctatgaagcactgataggcgacgagagctctgcacccgactcacagaggtctcaaacagagcctgccagggagcgcaaaagaaagaagaggagaattatgaaagcccctgcagctgaagccgtcgccgaaggagcaagtggacggcacggccagggacggagtctggaagctgaggataagatgacacacagaatcctcagagccgctcaggagggagatctacccgagctccggcgactgcttgaaccccacgaggctggaggagccggagggaacatcaacgctcgggatgccttttggtggactccgctgatgtgcgctgcaagagcaggacagggcgctgccgtgtcttatctgctgggtaggggcgctgcttgggtgggcgtctgcgaattgtctggaagggacgccgcacaactcgccgaggaagcagggttccccgaggtggcacggatggtacgcgaatcgcacggggaaacccgtagcccagaaaatagatcccctaccccctccctacaatattgcgagaactgcgatacccactttcaggacagcaatcacaggacgagcacagcgcacttgttatctctgtctcagggaccgcagccacccaatctgccgctgggagtgcctatttcatctcctgggtttaaactcctgcttcgaggcggatgggagccgggtatgggactgggccctcgcggagaggggagagcaaatcccattccgaccgtgctgaagcgagatcaggaaggccttggttacaggagcgcgccacagcccagggtgactcatttccctgcttgggatacaagggccgtggccggtcgggaaaggccaccaagagttgctaccttgtcctggagggaagaacgccgtagggaggagaaagaccgagcctgggaaagagacctgcggacgtatatgaacctagaattctag

SEQ ID NO: 227613 - DNA, 1071 bp, Artificial Sequence
  derived and/or modified sequence
atgtcacgtcctctgttgataaccttcactcccgcaaccgatcccagcgacctgtggaaagatggccagcagcaacctcagccagagaagcccgagagcacactagacggcgctgcagctagggcattttacgaggctttgataggcgacgagagttcagctccagatagccagagatctcaaacagaacccgctagagagagaaaacgcaaaaagcgccgaattatgaaggctcccgctgcagaagctgtggctgagggagcctccggccgtcacggccaggggaggtccctggaggcagaggataagatgactcaccgcatactgcgcgcagcccaggaaggtgacttgcctgagctccgccgtctgctggaaccccacgaggccggaggggctggcggtaatatcaatgctagggacgccttttggtggacacctctgatgtgcgccgcaagggcaggtcaaggagctgcggtgtcctatttgttgggtcgcggagccgcttgggtgggggtgtgcgagctcagtggccgagatgccgcacagttagctgaagaagcgggttttccggaagtagccagaatggttcgagaaagccatggggagacgcgatcccctgagaaccgaagcccaacccctagccttcagtactgtgagaattgtgatacacactttcaggactctaaccacaggacatcaacggcacacctgctgtcgctctcacaaggtccacagcctccaaacctgcccctcggcgtccccatctccagcccaggtttcaaactccttctgcggggtggttgggaaccagggatgggattaggaccaagaggagagggacgggcaaacccaatacccacagttctgaaacgagaccaagaggggcttggctatcgtagcgcccctcagcccagggtgacacattttcctgcttgggacacgcgggcagtcgccggacgggaacggccacccagggtggctaccttatcttggcgggaggaaagaagacgcgaggaaaaggaccgtgcctgggaacgcgacctcaggacatacatgaacttagagttttag

SEQ ID NO: 227614 - DNA, 1071 bp, Artificial Sequence
  derived and/or modified sequence
atgtccaggccccttctgatcacctttacccctgcgaccgacccatctgacttgtggaaagacggtcaacagcagccacagcctgaaaaacctgaatccaccctggacggtgccgcagcaagagcattttatgaagccctcattggggacgagtcaagcgcgccagactcccagaggtcacagacagagcccgcaagagagagaaaacgtaaaaaacggaggatcatgaaggcccctgctgccgaagcggtggcggagggcgcttcaggtagacatggtcagggacgcagccttgaggctgaggacaagatgacacatcggattttgcgcgctgcccaggagggtgatctgcccgagctgcggcgactgcttgagccccacgaggctggcggagctggaggcaacatcaacgctcgggatgccttttggtggacacctcttatgtgcgccgctagagccggtcagggtgcagctgtatcttatttgctgggccgtggggcagcatgggttggtgtttgtgagttaagtggtagggatgccgctcagttagcggaggaagcaggatttcccgaggttgcgaggatggttagggaaagccacggcgaaacccgcagcccagagaacagatctcccacgcctagcctgcagtactgtgagaactgtgatacccacttccaagatagcaaccacagaacctctactgcccaccttctcagcttgtcacagggcccacaacctccaaacctcccgctaggagtgcccatttccagcccaggtttcaagctgttgctgcggggtggttgggaaccgggaatgggacttggacctcgcggagagggacgtgcgaatccgataccaaccgtcctgaagagggatcaggagggactcggttatcggagtgctccccagcctagagtgacacatttccctgcctgggatacacgggctgttgctgggagagaaagacctcctcgcgtggcaacgctgagttggagagaggaacgcaggcgagaagaaaaggaccgggcatgggaaagggatctgaggacgtacatgaacctggagttctag

SEQ ID NO: 227615 - DNA, 1071 bp, Artificial Sequence
  derived and/or modified sequence
atgagccgcccattgctgattacatttaccccggctacagacccctcggacctctggaaggacgggcagcagcaacctcagccagagaagcccgaatcaacattggacggggcagccgcacgagcgttctacgaggctctgatcggggatgagtcttctgcaccggatagccagcggtcgcaaaccgaacccgcaagggaaaggaagcggaagaagaggcggatcatgaaggcacccgcagccgaagccgtggccgagggggctagtggccgtcacggacaggggaggtcccttgaagccgaagataaaatgacccatagaatcctgcgggcagcccaggagggcgaccttcctgagctcaggcggcttctggagcctcacgaggccggaggcgcagggggaaatattaacgcgagggatgccttttggtggaccccattgatgtgcgctgcaagggccggacagggcgctgccgtgtcgtatttattagggcgtggcgcagcttgggtgggcgtctgtgaactgtccggcagggatgccgctcagcttgccgaggaggcgggtttccccgaggtcgccaggatggtcagggaaagtcacggggaaaccaggtcaccagagaacaggagccctacgccgtcacttcagtactgcgagaattgtgacactcattttcaagattctaatcaccggacctcaacggcccaccttctatccctttctcagggtccacagccccctaacctcccactgggtgttcctatttcctcgccgggtttcaaattgctactgagaggcggatgggagcccggaatgggtttaggccctcggggtgaaggcagggccaatccgattccgacagtccttaagagggaccaagagggcctcgggtatcgctccgcgcctcaacctcgggttactcacttccccgcttgggacacacgtgccgtggccggtagggagcggcctcctagagtggcaactctgagctggagggaagaacgtcgcagagaggagaaagacagggcatgggaacgggacctgcgaacttatatgaatttggaattttag

SEQ ID NO: 227616 - DNA, 1071 bp, Artificial Sequence
  derived and/or modified sequence
atgtcccggcctctcctgatcacctttacccctgcgaccgatcctagtgatctttggaaggacggtcaacaacagccgcaaccagagaaacctgaaagtacactggacggcgctgccgctcgggcattctatgaggcactgatcggagacgaaagttcagcacctgatagtcaaagatcccagaccgaacctgccagggaacgtaaaagaaagaaacgcaggataatgaaagcaccagctgctgaggcggtcgccgagggcgcatccggcaggcacgggcagggacgtagcctagaagccgaagacaagatgactcacaggatactacgggctgcgcaggagggcgacctgcctgaacttagaagactactcgaaccacacgaagccggaggggctgggggaaacattaacgctagagatgcgttttggtggacccccctgatgtgcgcggcacgggcaggccagggagcggctgtgtcctacttactaggccgaggggctgcttgggtgggcgtgtgcgagttaagtggacgcgatgctgctcagttagccgaggaggccggattcccagaagtggcaagaatggtgagggaatcacacggggaaacacgaagcccagagaaccgctctccgacgccatctctccaatactgcgaaaactgtgatactcattttcaggatagcaatcaccgcaccagcactgcccatcttcttagtctttctcaaggcccacagccccctaatttacctctcggtgtccccatatcatcaccagggtttaagcttctcttgcggggaggatgggagcctggcatgggactcgggccaagaggcgagggaagagcgaacccaataccaaccgtgttgaagagagatcaggaggggttgggatatagaagtgctccccagccccgagttacccatttcccagcttgggataccagagcggtcgccggacgcgagagaccaccaagagttgccacactgagttggagggaggaacgcaggcgggaggaaaaggaccgggcatgggagcgcgacctccgtacgtatatgaatctcgagttctag

SEQ ID NO: 227617 - DNA, 498 bp, Artificial Sequence
  derived and/or modified sequence
atgtctagaccgctgctcattacatttacaccagccaccgatccaagcgacctctggaaggacggacagcagcagcctcagcccgaaaaacccgaaagtaccctggacggagctgccgcacgggctttctatgaggccctgattggtgatgagtccagcgctccagactctcaaaggtcccaaaccgagccagcaagggaacgtaagagaaagaaaaggcgtatcatgaaggcaccagccgcagaggctgttgccgagggagccagcggaaggcatgggcagggccgttctctggaagctgaagataagatgacacacaggatccttcgggcagcacaggagggcgatttgcccgaattacggcgacttctcgagcctcacgaagccggaggggctggaggaaatatcaatgccagagacgctttttggtggacgcccctgatgtgcgcagccagggccggacagggcgctgccgtgagttatcttctgggtaggtag

SEQ ID NO: 227618 - DNA, 459 bp, Artificial Sequence
  derived and/or modified sequence
atgtcccggccactgttaatcacctttaccccagctactgacccctccgacctctggaaagatggtcagcagcagccacaaccagaaaagcctgaatctactttagacggagctgccgcacgggctttttacgaggctcttataggagacgaaagcagtgccccagactcccaacgttcccagacagaaccggctcgagagaggaagcgaaagaagcggcgaatcatgaaagcccctgctgcagaggccgtcgcggagggcgcatccggccgtcacgggcagggacggagcctggaagcagaagataaaatgacccatagaatcctccgcgcagcacaggagggagatctccccgagttaagaagacttctggagccccatgaggccggaggagcaggcggaaatatcaatgccagagacgccttctggtggacacctctcatgtgcgccgctcgttag

SEQ ID NO: 227619 - DNA, 1071 bp, Artificial Sequence
  derived and/or modified sequence
atgagccggccactgctgatcacatttacaccggctacagatccttccgatctatggaaagacgggcagcagcagccccagccagagaagccggaaagtacccttgacggcgctgccgctagggccttttacgaagccctgattggcgatgaaagtagcgcccctgattctcagcgctcccagactgagcccgctagggaacggaagcggaaaaaaagacggatcatgaaggctccagcggctgaggctgttgcagaaggggcaagcggacgtcacggtcaggggaggagtctggaagccgaggataaaatgacccaccggatcctgcgagccgctcaggagggtgacctgcctgagcttcggcgactgcttgaacctcacgaagctggtggcgcaggtggcaatattaatgccagggatgctttctggtggacgcctctgatgtgcgcagctagggctggccaaggtgcagcagtgtcctatctccttggacggggagcagcatgggtgggggtctgcgagctgagtggcagggatgcggctcagctggcggaggaagcgggattccctgaggtcgccaggatggttcgcgagtctcacggagagacgagatctcccgaaaaccgcagcccaacaccatcacttcagtactgtgaaaactgtgatactcactttcaggacagtaaccacagaaccagtacggcccaccttctcagcttgagccagggcccacagccacccaacctgccactcggcgtgccgatcagcagtcctggcttcaagctcctactgcgaggcggatgggagcccggtatgggcctgggacctcggggagagggcagggcgaaccctattcctacagtgctgaaaagggatcaggaaggtctgggctaccgctctgctccacaacctcgggtcacccacttcccagcttgggatactcgcgctgtggccggacgggaacgccctcctagagttgccacactcagttggcgggaggagcgaagaagagaagaaaaagatagggcttgggagagagatctgcgaacctacatgaatctcgagttctag

SEQ ID NO: 227620 - DNA, 1071 bp, Artificial Sequence
  derived and/or modified sequence
atgagtagacccctgctgatcactttcacaccagctaccgacccaagcgatctctggaaggatggacagcaacaaccccaaccggaaaagccagaatccaccctcgatggggcagctgcaagggctttctacgaagcccttatcggcgatgagtcctcagccccagatagtcagaggagccagaccgaacctgccagggagcgaaaacgcaaaaagcgcaggataatgaaggcaccggctgcagaggccgtcgctgagggtgcatccggtagacatggccagggaagaagcttggaagccgaagacaagatgacacatcgtatacttcgagcggcacaagaaggggatctacctgaattgcggaggctccttgagccccatgaagccggaggcgcaggcggaaatatcaatgctagagacgctttttggtggacccccttaatgtgtgccgctagggcaggccaaggggcagctgtcagctatctcttaggacgcggagcagcctgggtaggggtgtgcgagctgtccggaagagatgccgctcagctcgctgaggaggcgggttttcccgaggttgcaagaatggtgagagaaagtcatggcgaaactagatcgcctgaaaaccggagtcccacaccatcacttcagtactgcgagaattgcgacactcactttcaggattccaatcacagaaccagtaccgcccatctgctgtccttgtcgcagggccctcagcctcccaatttgccattgggagtgccaatctcttcaccaggattcaaactactgctgagaggcggatgggagccagggatggggctgggtccacggggagagggaagagctaaccccatccctacagtactgaagagggaccaggaggggttaggataccgttcagctccccaaccccgagtgacacattttccggcatgggatacccgggcagtggccggtcgcgaacgcccaccgagagtagccactctctcctggcgggaagagcgcaggagggaagaaaaagaccgcgcttgggaaagggacctgcggacgtatatgaacctggagttttag

SEQ ID NO: 227621 - DNA, 324 bp, Artificial Sequence
  derived and/or modified sequence
atgtccagaccactgctaatcacttttaccccagcaaccgatccttccgatctgtggaaggacggtcagcagcagccccagccggaaaagcccgagagcaccttagacggagctgccgcacgggctttctacgaggccctcatcggggatgagagttccgccccagattctcagcgatctcagaccgaacctgcccgtgagcggaaacggaagaagaggagaatcatgaaagccccagcagccgaagcggtcgccgagggagcctctggaaggcacggtcagggcagatcactggaagctgaagataaaatgacccaccgatag

SEQ ID NO: 227622 - DNA, 1071 bp, Artificial Sequence
  derived and/or modified sequence
atgtcaaggccgcttctgatcactttcactccggctaccgatccctcggacctgtggaaggacggacagcagcagccacaaccagagaagccagagtcgacgttggacggagccgcagcccgtgcattctatgaagccctgatcggggacgaatcttctgcaccagactcgcagcgctcccagactgaacccgctagagagcgcaagcgtaaaaagcgacgtataatgaaggcaccagccgctgaggctgtggcagagggcgcatccggcaggcatggccaaggaagatccctggaagccgaagacaagatgacccacaggattctgagagccgcacaagagggagatttacccgagctccgtaggttgcttgaaccccacgaagcgggtggagctggcggtaacatcaacgctagggatgctttctggtggactcctttgatgtgcgccgctagggccggacaaggagcagccgtgagctatttgcttggcagaggagccgcttgggtgggggtatgtgagcttagtgggagagacgccgcacagttggccgaagaggcaggctttcccgaggtggccagaatggtccgcgagagccatggtgagacacgctcgccggaaaacaggtctccgaccccaagtttgcagtactgtgagaattgtgacacgcatttccaggactccaaccacagaacgtctacagctcaccttctgtcgctgtcccagggtcctcagcctcctaacctgcccttgggcgttcctatatcatctccaggatttaagctgctgctgcgaggtggttgggaacccggaatgggactaggccctagaggcgagggcagagccaatcccattccaaccgtactcaaacgggatcaggaaggcctgggttatcggtctgcacctcaacccagagtcacccacttcccggcttgggacacacgggctgtggccggtagggaaagaccaccacgggttgctactctgagttggagggaagaacgtcgcagagaggaaaaggacagggcgtgggagcgggacctgcggacgtatatgaacctagaattctag

SEQ ID NO: 227623 - DNA, 498 bp, Artificial Sequence
  derived and/or modified sequence
atgtcaaggcctctcctgattactttcaccccagccaccgaccccagtgacctctggaaagacggacagcaacagccccagcccgagaagcctgagtccaccctcgacggcgctgcagccagagccttttacgaagcactgattggggatgagagttccgctcctgactcccagaggagtcaaacagagcctgcccgtgagcgtaagcggaagaaaagacggattatgaaggcccctgctgcggaggccgtcgcagagggggctagtgggaggcacggtcaggggaggagccttgaggcagaagataagatgactcacaggattctgcgcgcagctcaggagggtgaccttcctgaacttcggaggctgctggaacctcatgaagctggtggtgctgggggtaatatcaacgctagggacgccttttggtggacaccgttaatgtgtgcagccagggctggtcagggtgctgctgtttcctacctactgggcaggtag

SEQ ID NO: 227624 - DNA, 1071 bp, Artificial Sequence
  derived and/or modified sequence
atgtcacgacctcttctaattacctttactcccgcaaccgaccctagtgatctgtggaaggacggccagcagcagccccaaccagagaaaccagaatccaccttggacggagccgcagcccgagctttttacgaggccctgattggggatgagagcagcgccccagactcacagagatcacagactgaacccgctcgcgaaagaaagagaaagaagcgcagaattatgaaagctccggctgcggaggccgtcgccgaaggtgcaagcggacgtcatgggcaggggagatccttggaagcagaagataagatgactcacaggatactgagggctgcccaagaaggggatctgcccgaactgaggcgccttctagaaccgcacgaggcaggcggagcgggagggaatatcaacgccagggatgcattttggtggacccccctgatgtgcgcagcccgagctgggcagggggcagcagtgtcctacctcctgggcagaggagccgcatgggttggtgtctgtgagttgagcggacgtgacgccgcacagctggctgaagaagcagggttccccgaagtggccaggatggttcgtgagtcacacggtgaaacccgttcgccagaaaataggtccccaacgccatccctgcagtactgtgagaattgtgatactcatttccaagactctaaccacaggacgtctacggcccatctgctcagtctctcccaaggccctcagccgcctaacctacccttgggcgtgcctattagcagcccgggattcaaactcctgctgcgcggaggttgggagcctgggatggggctaggtcctcgtggggagggtcgggctaatcctatccccaccgtcctaaaaagggaccaggagggcttaggctaccgctcggcgcctcaacctagagtgacacatttccccgcttgggatactagggctgtggccggaagagaacgcccacctcgggtggctacgctttcctggagggaagagaggaggagggaagaaaaagatagagcctgggagagggatctccggacttacatgaatcttgaattttag

SEQ ID NO: 227625 - DNA, 597 bp, Artificial Sequence
  derived and/or modified sequence
atgtcaaggccgttgctgataacattcacccctgctacggatccatctgatttgtggaaagacggacagcaacaaccacagcctgagaagccagagtcgacattggacggagccgctgcgcgagcattctatgaggcccttatcggagatgaatcctccgcacctgatagccagagatcccagacagaaccggcacgcgagaggaaacgaaagaagcgaagaattatgaaagcaccggctgcagaggcagttgctgaaggagcttctggaagacatggacagggaagatcccttgaagccgaagataaaatgacccacagaattctgagggccgctcaggagggtgacttgcctgaactgcgaaggcttttggagcctcatgaggcagggggtgcaggcggaaatatcaatgccagagacgccttttggtggacgccactcatgtgtgctgcaagggccggtcagggcgctgcagtctcatacttactaggaaggggcgcagcgtgggtgggagtctgcgaattgagcgggagagacgctgcccagcttgccgaagaagctggctttccagaggtggctcggatggtccgcgagtag

SEQ ID NO: 227626 - DNA, 597 bp, Artificial Sequence
  derived and/or modified sequence
atgagccggcctctgttaattacctttactccggctactgatccttctgatctttggaaggacggccaacagcagccccagcctgagaagcctgagtcgacactggacggcgctgccgcaagggccttttacgaagccctgataggcgacgagtcgtccgcaccagactcccaaaggtcacagacagaacctgccagggagcgcaaacggaagaagcggcgaattatgaaagcgccagccgctgaagccgttgcagagggggctagcggccgacatgggcagggacgaagtctcgaagcggaagacaaaatgacacatcgaatcctacgtgctgcccaagaaggtgacctaccagaacttaggaggctgttagagccacatgaggcgggtggagccggtggaaacattaatgcacgcgatgccttctggtggacccctctcatgtgcgctgccagagccggtcagggcgcagccgtgtcttacctcctggggcgtggtgcagcatgggtgggggtttgcgagttgagcgggagggacgcggcacagttggcagaggaagccggattccccgaagtggcacggatggtgagagaatag

SEQ ID NO: 227627 - DNA, 1071 bp, Artificial Sequence
  derived and/or modified sequence
atgtcccgccctctgctcatcactttcacacctgccacagacccatcagacctatggaaggatggtcagcagcagccgcagcctgagaaacccgagagcacacttgatggtgctgcagcaagagcgttttatgaagctttaatcggagatgagtcaagtgctccagattcgcagaggtcccagaccgaacctgccagagagcgcaagaggaagaagaggaggatcatgaaggccccagctgcggaggctgtagctgaaggtgcatccggcagacacgggcaaggtcgttccttggaggccgaagacaagatgactcataggattctcagggcagctcaggaaggcgatctgcccgagctcagaagactgttggaaccacacgaggccggaggtgcaggcggaaacatcaacgcccgtgatgcattttggtggacccccttgatgtgcgcagccagggcaggccagggagctgcggtgtcctacttgcttggcagaggtgctgcgtgggtcggtgtttgcgaacttagtggccgtgacgctgcacagttggctgaggaagcagggtttcctgaggtcgccaggatggtccgcgagtcccacggggaaaccaggagtcctgagaatcggtctccaacccctagtttacaatattgcgagaactgcgacactcatttccaagattccaaccatcgcacttccacggcccatctgctaagcctcagccagggaccgcagcccccaaacctgcctctgggagttccaatttctagccccggttttaaactactgcttagggggggatgggaaccaggaatgggtcttgggcctaggggcgaaggtagggccaaccccattcctacggttctgaagcgtgatcaggagggcctcggctataggtcagcacctcagcccagagttactcactttccagcctgggacacccgcgcagtggcgggacgggagcgaccacccagggtcgccacactttcatggcgggaagaacggcgacgggaggagaaagatagagcatgggaaagagatttgcgtacttatatgaacctggagttttag

SEQ ID NO: 227628 - DNA, 324 bp, Artificial Sequence
  derived and/or modified sequence
atgtcacggccactcctgatcaccttcactcccgctactgacccgtccgacttgtggaaagacggccaacagcagccgcaacccgagaagccggagagcacactggatggcgcagctgcaagggctttctatgaggcgctgatcggcgacgaatcgtccgccccagactctcagcgaagtcagactgaacctgctcgggagagaaagcgtaaaaaaaggcgaattatgaaagcacccgctgcagaagccgtagcagagggggctagcgggaggcacgggcagggcaggagcttggaggctgaagataagatgacacacagatag

SEQ ID NO: 227629 - DNA, 324 bp, Artificial Sequence
  derived and/or modified sequence
atgtccaggcccctattgataactttcacccccgcaaccgaccctagcgatctgtggaaggacggacagcagcaaccccagccagagaaacccgaatcgacacttgacggagctgccgcaagggcgttctacgaggccctgattggagacgaatcatctgctcccgacagccagcgctctcagaccgagcccgcacgagaacgcaaaaggaagaagagacgaattatgaaagctcccgctgccgaagccgttgcagagggtgcatcagggagacatggccaaggccgaagtctggaagccgaagataagatgacacatcggtag

SEQ ID NO: 227630 - DNA, 459 bp, Artificial Sequence
  derived and/or modified sequence
atgtccaggccactgctgataacttttactcccgcaacagacccctccgatctgtggaaagacggccaacaacagccgcaaccagagaagccagaaagcaccttggacggtgccgctgcacgggcattctatgaggcactgataggcgatgaaagcagcgccccagattcccaacggagtcagaccgaacctgcacgcgaacgtaagcgcaagaagcgtcggatcatgaaagcacctgctgcagaggccgtggccgaaggagcttccggaaggcatggccaggggaggtccttagaggccgaggacaagatgacacacaggattcttcgggctgcacaggagggcgatctccccgaattgaggcgactcctggaacctcatgaggctgggggagccggaggaaacataaatgcccgtgacgccttttggtggacgcccctgatgtgcgcagccagatag

SEQ ID NO: 227631 - DNA, 498 bp, Artificial Sequence
  derived and/or modified sequence
atgagcaggccactgttgattacattcacaccagctaccgatcccagcgacttatggaaggatggacagcagcagccacaacctgagaaacccgaaagtacgctcgacggcgctgccgcacgagcattctacgaagcactcattggcgatgagtcctccgctccggattcacagaggtcacagaccgaaccggcacgtgagcgcaaaaggaagaaacgcaggatcatgaaagcgcctgcagctgaggctgtggcagagggcgctagcgggaggcacggccaaggcaggagcctggaagcagaggacaaaatgacacacagaatcttgcgggcagcacaggaaggcgatctgcctgagttgagacgactcctagaaccccacgaggcgggaggagcaggcggaaatattaacgctcgtgatgcattctggtggaccccactcatgtgtgcagcccgagcagggcagggcgctgcagtgagctacctcctaggtagatag

SEQ ID NO: 227632 - DNA, 1071 bp, Artificial Sequence
  derived and/or modified sequence
atgagccgcccattactgatcacttttactccagctacagaccccagtgacctatggaaggatgggcaacagcagcctcaaccagagaagccagagtctactctcgacggagcagccgcacgtgcattttatgaagcattgataggcgatgaatcctctgcccctgacagtcagcgttcccagactgagcctgcaagagagcgcaagcgcaagaagaggcggatcatgaaggcacctgcagcagaagccgtcgcggagggtgccagcggcagacacgggcaaggcagatctcttgaagcggaggacaagatgacgcaccgaatattgagggctgcccaagaaggtgaccttcccgaactgcgaagactgctggagcctcacgaggctggaggggctggcggaaatattaatgctagggacgccttctggtggacccctctcatgtgtgccgctagagccggacagggagccgcagtgtcgtatctcttagggagaggggctgcgtgggtgggcgtctgtgaactgtcaggaagagacgctgcccagctcgctgaggaggcgggttttccagaagtagcccgtatggtaagggagagccatggagaaactcgctctccggaaaatcggagtcccacccctagcttgcaatactgcgagaattgcgacactcacttccaagactccaatcatagaacatccactgcccacctgttatcgctctcccaagggccacagcctccgaatcttcccctgggcgtgcctatcagcagcccaggcttcaagctgctcctgagaggagggtgggagccagggatggggctcggccctcggggagaaggcagggccaacccaattcccaccgtgttgaaacgggatcaggaagggttgggttaccgatcggcacctcagcctcgcgtgacccacttccctgcctgggatactcgagcagttgctggcagagagaggccgccacgtgtggccactttgtcttggagagaggaacgcaggcgggaagagaaggatcgcgcttgggaacgtgatctgaggacttatatgaatttggagttttag

SEQ ID NO: 227633 - DNA, 1071 bp, Artificial Sequence
  derived and/or modified sequence
atgtcaagacccctgctcatcacatttactcctgctacggacccgtcggacctgtggaaggatggccagcagcaaccccaacctgagaagcccgagagcactctggatggagcagccgctcgcgctttctacgaagcgctgattggcgatgaaagttcggctcctgacagccagagatcacagactgagcccgctagggagcgcaaaagaaagaagcggaggattatgaaagctccagcggcagaagctgtcgcagagggggcttcaggacggcatggccagggccgttccttagaagccgaagataagatgacccatagaatcttgcgggcagctcaggagggtgacctgccagaactccgcagactgcttgaaccccatgaggccggtggcgctgggggaaacatcaacgcccgtgacgctttttggtggaccccactgatgtgtgcagcacgtgccggacagggcgcagccgtgtcgtaccttctgggaagaggtgccgcatgggtcggcgtatgcgagctcagtggaagagacgcagcccagttggccgaagaagcgggattccccgaagtggccaggatggtgagagagtcgcacggggagactcgcagtccagagaatcgatccccgacaccttccttacaatattgtgagaattgtgacactcactttcaggacagcaatcaccgcaccagcacagctcacctgctcagcctgagccagggccctcagcctcctaacctgccgctcggcgtgcccatcagttccccaggctttaaactgctgctgcgcggtggatgggagccaggtatggggctcggtccaaggggggagggcagggcgaatcccataccgaccgtcctgaagcgcgaccaggagggcctaggataccgttcagccccacagcccagagtgacacactttcccgcatgggacacgcgtgctgtggccggtagagaacggccaccgagggtagccacactgtcttggcgtgaggagaggcgacgggaggaaaaagatcgcgcatgggaaagagacctgagaacttacatgaacttggaattttag

SEQ ID NO: 227634 - DNA, 597 bp, Artificial Sequence
  derived and/or modified sequence
atgtctaggccactgctcatcacctttacaccagccaccgatccatctgatctgtggaaagacgggcagcagcagccccagccggagaagcctgaaagcactctcgacggggctgctgccagggccttctatgaagcccttatcggggacgaatcctccgctcctgatagccaaagaagccaaacagagcctgctcgcgagagaaaacggaagaagagaagaatcatgaaagctcccgcagccgaggccgtggccgagggagcgagtggcagacatggacaggggcgatctctggaggcagaggataaaatgactcacaggatcctcagagccgctcaggagggggatctccccgagctgcgacggctgctggagcctcatgaggccggtggcgcaggaggcaacatcaacgccagggatgctttttggtggaccccgctgatgtgtgcagcccgtgccggacaaggcgctgccgtttcctatcttctgggacggggtgcagcttgggtaggcgtgtgtgagctgtccgggcgagacgcagcacaactggccgaggaagctggcttccccgaggtggccaggatggtccgggagtag

SEQ ID NO: 227635 - DNA, 273 bp, Artificial Sequence
  derived and/or modified sequence
atgtctaggcctctcctcatcacttttacgccagctaccgacccaagcgatctctggaaagatgggcagcagcaaccccagcctgagaaacctgagtccactcttgacggagcagctgcccgagctttctatgaggccctaattggcgacgagtcaagtgctccagatagccagcggtcccaaactgaacccgctagggagagaaaacgaaagaagaggagaatcatgaaagcacccgctgcagaggcggttgctgagggggctagtgggtag

SEQ ID NO: 227636 - DNA, 273 bp, Artificial Sequence
  derived and/or modified sequence
atgagcagaccgttgttaattacgtttactcccgcaactgacccatcagacctctggaaggacggtcagcaacagccacagcctgagaagcccgaaagcacgctcgatggcgcagccgcacgggcattttacgaagcgctgatcggagacgaatcttctgcacccgactcacaaaggtcccaaaccgagcccgcaagagagcgcaagagaaaaaaacgtaggatcatgaaggcccctgccgctgaggcagtggctgagggcgcttccggctag

SEQ ID NO: 227637 - DNA, 459 bp, Artificial Sequence
  derived and/or modified sequence
atgagcagacccctgctgataacgttcacacctgctaccgaccccagcgacttgtggaaagacggacaacagcagcctcagccagagaagcccgaatcaactctcgacggcgctgcagcccgtgccttctacgaggcacttattggcgacgagagttcagcacccgacagtcagcggtcacaaaccgaacctgccagggagcggaagaggaaaaagcgaaggatcatgaaggctcccgctgccgaggccgtggctgagggagccagcggcaggcatggacaaggccgaagcctggaggctgaagacaaaatgacacataggatcctcagagctgcccaggaaggggacttgccagagttgcgtaggttgctcgaaccccatgaggcagggggagcaggcggtaacattaatgccagagacgctttctggtggacccctctcatgtgtgctgctcgctag

SEQ ID NO: 227638 - DNA, 597 bp, Artificial Sequence
  derived and/or modified sequence
atgtcccgtccactgctgattaccttcactccagccaccgatcctagtgacttatggaaagacgggcaacagcagccccagccagagaaacccgaaagcactctggacggcgcagcagccagggcattctacgaggcactcatcggagatgagagcagcgccccagattcacagcgctcccagactgaacccgctagggagcggaaaagaaaaaagaggcgaattatgaaggcaccagcggctgaagccgtcgcagaaggagcaagcggtcgccacggccagggacgaagcctggaggctgaagacaagatgacgcacagaatcctgagagcagcacaggagggcgacctccccgagttgagaaggttgctcgaacctcacgaggcaggtggtgcaggtggtaatataaacgccagagacgccttttggtggaccccactgatgtgtgccgctagagccggacagggcgctgctgtgtcttatctgctcggtaggggggctgcctgggtgggcgtgtgcgagctgagcggaagggatgccgcacagttagccgaggaggctggcttcccggaagtggctcggatggtacgggagtag

SEQ ID NO: 227639 - DNA, 1071 bp, Artificial Sequence
  derived and/or modified sequence
atgagccgtcctctactcatcacctttacgcccgcaacagatccctccgatctgtggaaggacggccaacagcagccccagcccgagaagccagaaagtacacttgacggtgccgcagcaagggctttttacgaagccctgatcggcgatgagtcatccgcgcctgacagccagcgatctcagacagagcctgccagagagagaaagagaaaaaagagaagaatcatgaaagcccctgcggcagaggctgtggcggaaggagcctccgggagacacggccaggggcgatcattagaggctgaggataaaatgacccacaggatcttgagggcggcacaagaaggagacttacccgagctgcgaagactcctcgagccacacgaggccggtggcgcaggcggaaacatcaatgccagggacgccttctggtggacgccactcatgtgcgcggctagggctggccaaggcgctgccgtgtcatacctcctcggtcggggagccgcatgggttggagtgtgtgagcttagtgggagagacgctgcacagttggccgaggaggcaggctttccagaggtggcccgtatggttagggaaagccacggagagacccgatctccagagaatagatcccctacccctagcctgcaatattgtgagaactgtgacacccattttcaggattctaatcacagaactagcacagcacacctgctttctctgtctcagggccctcaacctcctaatcttcctcttggcgtacccatatcctctcctggattcaagctgctactgagggggggttgggagccaggaatggggctcgggccacggggagaaggcagagccaaccccattccaactgtgctcaaacgtgaccaggagggcctcgggtatcgaagcgctccgcaaccccgtgttacccacttccctgcttgggatacccgagctgtcgccggaagagagagaccccctagagtagccacactaagctggagagaggagaggcggagggaagaaaaagatcgagcctgggaacgggatcttcggacctacatgaatctggaattctag

SEQ ID NO: 227640 - DNA, 1071 bp, Artificial Sequence
  derived and/or modified sequence
atgtcccggcctctgcttatcacatttacccctgccacagacccatctgacctgtggaaagatggccagcagcaaccccagcccgaaaagccagaatcaacactcgacggtgccgcagccagggccttctatgaggctttaataggcgatgaaagctctgctccagattcccagcggtcccagaccgaaccagcaagggagcgcaagcgaaaaaagcgcaggattatgaaagcacccgcagctgaagcggtggctgaaggggcatcgggacggcatggccagggtagaagtcttgaggcggaggacaaaatgacccaccgcattctgagggcagctcaggaaggagatttgcccgaattaagaagattactggaacctcacgaggctggtggcgcaggtggaaatatcaacgccagagacgcattttggtggacgccgctgatgtgcgctgcgcgagccggtcagggcgcagccgttagctacctgctgggaagaggggcagcgtgggtcggtgtttgcgaactgtctgggagagacgcagcccagctcgctgaggaggcaggatttcctgaagttgcacggatggtgagggaatcacatggggagacgcggagccccgagaaccgcagtcccacacccagcctacaatactgcgagaactgcgatacccatttccaggattcaaaccacaggacatccactgcccatctcctttccctgtcccaagggccacaaccgccaaacctccctctgggggttcctatatcctcccccggattcaaattgttgctgaggggcggatgggaaccgggtatgggtctcggccctaggggagagggccgagcaaacccaatacccactgtcctcaagcgtgaccaggaaggacttggctacaggtctgcacctcaaccaagagtcacccactttccggcttgggatacgcgcgcagtggctggacgtgagcgaccgccaagagtagctaccctgtcttggcgagaggagcgacgaagagaagagaaggatcgtgcctgggaaagagacttgagaacctacatgaacctagagttttag

SEQ ID NO: 227641 - DNA, 273 bp, Artificial Sequence
  derived and/or modified sequence
atgagccgcccactgcttataacttttacccctgcaacagacccttcagatctgtggaaggatggccaacagcaaccgcagccagagaaacccgagtccacacttgacggtgccgcagcgcgtgctttctatgaggctctgatcggagacgagagctcagccccagattctcagcgtagccagactgagcccgcacgagagcggaaacgtaagaagcggcgtataatgaaagctccggctgccgaggccgtggctgaaggcgcttctggatag

SEQ ID NO: 227642 - DNA, 324 bp, Artificial Sequence
  derived and/or modified sequence
atgtctaggccattgctgattaccttcactccagccaccgacccttccgacctctggaaagatggccagcaacagccccagccagagaagcccgaaagtaccctagacggcgcagcagctagggcgttttatgaggctctgattggtgacgagagtagtgcacctgattcccagcgctcccagactgagcccgctcgagaaaggaagcgcaagaaacggcgtattatgaaggcaccagccgctgaggccgttgcagagggagcatcagggcgacatggccaagggaggtccttggaagccgaggataaaatgacccacaggtag

SEQ ID NO: 227643 - DNA, 1071 bp, Artificial Sequence
  derived and/or modified sequence
atgtcacgtcctctgctcattacctttacgcccgctactgaccctagcgacctctggaaggacggacagcaacagccccagccagaaaagccagaaagcacgttagatggtgcagccgctcgcgctttttatgaagcactgatcggcgacgagtccagcgcacccgacagccagcggtcccaaaccgaaccagcacgcgagcgaaaacgcaaaaaaagacgcatcatgaaagccccagctgctgaggccgtagccgaaggcgcaagcggtagacacgggcagggccgttcactggaggccgaagataaaatgacacatcgcatactgcgggcagcgcaggagggagatttacctgagttgcgcaggcttctggagccacacgaggcaggcggagctggaggcaatattaacgcacgtgacgctttctggtggacccccctcatgtgtgccgctcgcgcaggccagggtgctgccgtgtcatacctgctcggacggggagctgcttgggttggagtttgtgagctgtcaggacgcgatgccgcacagctcgccgaggaagctggctttcctgaggtggcccgtatggtccgggaaagccatggggagacccgttcaccagaaaatcggtccccgaccccctctctgcagtactgcgagaactgcgatactcattttcaggactccaatcataggacatcaaccgcacacctcttgagtctgtcccaaggacctcagccacccaatctgcctctgggggtccctatttctagtcctggtttcaagctcctgttgagggggggttgggagcccggaatgggactggggccacgtggcgaggggagagcgaatccaatccccacggtactgaaaagagaccaggagggcctgggttataggtccgcaccacagcctcgcgtgacacatttccccgcttgggatacccgggcagtggccggacgcgagaggcccccacgcgtagccaccctgtcatggcgggaggaaaggagacgcgaagaaaaggatagggcctgggaacgcgatctgcgcacttacatgaatctggaattttag

SEQ ID NO: 227644 - DNA, 273 bp, Artificial Sequence
  derived and/or modified sequence
atgtcacggccactactcattacattcacccccgctacggatcctagtgacctgtggaaagacgggcagcagcagcctcaacctgagaaaccagagtcaaccctggacggggcagcagccagggcgttttacgaggccctcatcggggacgagtcctcagccccagacagtcagagaagtcagaccgagcccgcaagggagaggaaacgaaagaaaagaaggatcatgaaggcccctgcagctgaagctgtggccgaaggcgcttccgggtag

SEQ ID NO: 227645 - DNA, 498 bp, Artificial Sequence
  derived and/or modified sequence
atgtctcgtccactgctgatcaccttcaccccagccaccgacccttccgatttgtggaaggacggacaacaacagccccagcctgagaagccagagagcacactcgatggcgctgctgcccgagccttctatgaggccctcattggcgacgaatctagtgctcctgacagccagcgttcacagaccgaacccgctcgggaaaggaagaggaagaagcgcagaattatgaaggccccagcggctgaggctgtggcggagggggcttctggcagacatggacagggacgctccctggaagcagaggacaaaatgactcaccgcatcctgcgtgccgctcaagagggggatttgcctgagcttcgcaggctgcttgagcctcacgaagccggaggggctgggggaaacattaacgcacgggatgccttctggtggacccccctcatgtgcgccgcacgcgcaggccagggcgcagctgtcagttacctcttggggagatag

SEQ ID NO: 227646 - DNA, 459 bp, Artificial Sequence
  derived and/or modified sequence
atgagcaggcccctgctgattacttttacacctgccaccgacccttcagacctttggaaagacggccagcagcagcctcagcccgagaaaccagagagtacactcgatggagcagcagcgcgtgccttttacgaggcactgataggcgatgagagctctgcccctgatagtcagaggtcacagaccgaaccagccagagagaggaagagaaagaaacgtcgaattatgaaagcgccagcagctgaggctgtagcagaaggagcttccggacggcatggccaaggcaggtctctggaggcagaagacaaaatgacgcatcgcatcttacgggctgcccaggagggagatctgccggaactgaggcgccttctggagcctcacgaagccggaggggctgggggaaacatcaacgcaagggatgctttctggtggaccccattgatgtgtgcggctcggtag

SEQ ID NO: 227647 - DNA, 1071 bp, Artificial Sequence
  derived and/or modified sequence
atgagcagacccctgctgatcaccttcacccccgccaccgaccccagcgacctgtggaaggacggccagcagcagccccagcccgagaagcccgagagcaccctggacggcgccgccgccagagccttctacgaggccctgatcggcgacgagagcagcgcccccgacagccagagaagccagaccgagcccgccagagagagaaagagaaagaagagaagaatcatgaaggcccccgccgccgaggccgtggccgagggcgccagcggcagacacggccagggcagaagcctggaggccgaggacaagatgacccacagaatcctgagagccgcccaggagggcgacctgcccgagctgagaagactgctggagccccacgaggccggcggcgccggcggcaacatcaacgccagagacgccttctggtggacccccctgatgtgcgccgccagagccggccagggcgccgccgtgagctacctgctgggcagaggcgccgcctgggtgggcgtgtgcgagctgagcggcagagacgccgcccagctggccgaggaggccggcttccccgaggtggccagaatggtgagagagagccacggcgagaccagaagccccgagaacagaagccccacccccagcctgcagtactgcgagaactgcgacacccacttccaggacagcaaccacagaaccagcaccgcccacctgctgagcctgagccagggcccccagccccccaacctgcccctgggcgtgcccatcagcagccccggcttcaagctgctgctgagaggcggctgggagcccggcatgggcctgggccccagaggcgagggcagagccaaccccatccccaccgtgctgaagagagaccaggagggcctgggctacagaagcgccccccagcccagagtgacccacttccccgcctgggacaccagagccgtggccggcagagagagaccccccagagtggccaccctgagctggagagaggagagaagaagagaggagaaggacagagcctgggagagagacctgagaacctacatgaacctggagttctag

SEQ ID NO: 227648 - DNA, 498 bp, Artificial Sequence
  derived and/or modified sequence
atgagcagacccctgctgatcaccttcacccccgccaccgaccccagcgacctgtggaaggacggccagcagcagccccagcccgagaagcccgagagcaccctggacggcgccgccgccagagccttctacgaggccctgatcggcgacgagagcagcgcccccgacagccagagaagccagaccgagcccgccagagagagaaagagaaagaagagaagaatcatgaaggcccccgccgccgaggccgtggccgagggcgccagcggcagacacggccagggcagaagcctggaggccgaggacaagatgacccacagaatcctgagagccgcccaggagggcgacctgcccgagctgagaagactgctggagccccacgaggccggcggcgccggcggcaacatcaacgccagagacgccttctggtggacccccctgatgtgcgccgccagagccggccagggcgccgccgtgagctacctgctgggcagatag

SEQ ID NO: 227649 - DNA, 459 bp, Artificial Sequence
  derived and/or modified sequence
atgagcagacccctgctgatcaccttcacccccgccaccgaccccagcgacctgtggaaggacggccagcagcagccccagcccgagaagcccgagagcaccctggacggcgccgccgccagagccttctacgaggccctgatcggcgacgagagcagcgcccccgacagccagagaagccagaccgagcccgccagagagagaaagagaaagaagagaagaatcatgaaggcccccgccgccgaggccgtggccgagggcgccagcggcagacacggccagggcagaagcctggaggccgaggacaagatgacccacagaatcctgagagccgcccaggagggcgacctgcccgagctgagaagactgctggagccccacgaggccggcggcgccggcggcaacatcaacgccagagacgccttctggtggacccccctgatgtgcgccgccagatag

SEQ ID NO: 227650 - DNA, 324 bp, Artificial Sequence
  derived and/or modified sequence
atgagcagacccctgctgatcaccttcacccccgccaccgaccccagcgacctgtggaaggacggccagcagcagccccagcccgagaagcccgagagcaccctggacggcgccgccgccagagccttctacgaggccctgatcggcgacgagagcagcgcccccgacagccagagaagccagaccgagcccgccagagagagaaagagaaagaagagaagaatcatgaaggcccccgccgccgaggccgtggccgagggcgccagcggcagacacggccagggcagaagcctggaggccgaggacaagatgacccacagatag

SEQ ID NO: 227651 - DNA, 597 bp, Artificial Sequence
  derived and/or modified sequence
atgagcagacccctgctgatcaccttcacccccgccaccgaccccagcgacctgtggaaggacggccagcagcagccccagcccgagaagcccgagagcaccctggacggcgccgccgccagagccttctacgaggccctgatcggcgacgagagcagcgcccccgacagccagagaagccagaccgagcccgccagagagagaaagagaaagaagagaagaatcatgaaggcccccgccgccgaggccgtggccgagggcgccagcggcagacacggccagggcagaagcctggaggccgaggacaagatgacccacagaatcctgagagccgcccaggagggcgacctgcccgagctgagaagactgctggagccccacgaggccggcggcgccggcggcaacatcaacgccagagacgccttctggtggacccccctgatgtgcgccgccagagccggccagggcgccgccgtgagctacctgctgggcagaggcgccgcctgggtgggcgtgtgcgagctgagcggcagagacgccgcccagctggccgaggaggccggcttccccgaggtggccagaatggtgagagagtag

SEQ ID NO: 227652 - DNA, 273 bp, Artificial Sequence
  derived and/or modified sequence
atgagcagacccctgctgatcaccttcacccccgccaccgaccccagcgacctgtggaaggacggccagcagcagccccagcccgagaagcccgagagcaccctggacggcgccgccgccagagccttctacgaggccctgatcggcgacgagagcagcgcccccgacagccagagaagccagaccgagcccgccagagagagaaagagaaagaagagaagaatcatgaaggcccccgccgccgaggccgtggccgagggcgccagcggctag

SEQ ID NO: 227653 - protein, 439 aa, Artificial Sequence
  derived and/or modified sequence
MKSILDGLADTTFRTITTDLLGSPFQEKMTAGDNPQLVPADQVNITEFYNKSLSSFKENEENIQCGENFMDIECFMVLNPSQQLAIAVLSLTLGTFTVLENLLVLCVILHSRSLRCRPSYHFIGSLAVADLLGSVIFVYSFIDFHVFHRKDSRNVFLFKLGGVTASFTASVGSLFLTAIDRYISIHRPLAYKRIVTRPKAVVAFCLMWTIAIVIAVLPLLGWNCEKLQSVCSDIFPHIDETYLMFWIGVTSVLLLFIVYAYMYILWKAHSHAVRMIQRGTQKSIIIHTSEDGKVQVTRPDQARMDIRLAKTLVLILVVLIICWGPLLAIMVYDVFGKMNKLIKTVFAFCSMLCLLNSTVNPIIYALRSKDLRHAFRSMFPSCEGTAQPLDNSMGDSDCLHKHANNAASVHRAAESCIKSTVKIAKVTMSVSTDTSAEAL

SEQ ID NO: 227654 - protein, 411 aa, Artificial Sequence
  derived and/or modified sequence
MALQIPPSAPSPLTSCTWAQMTFSTKTSKENEENIQCGENFMDIECFMVLNPSQQLAIAVLSLTLGTFTVLENLLVLCVILHSRSLRCRPSYHFIGSLAVADLLGSVIFVYSFIDFHVFHRKDSRNVFLFKLGGVTASFTASVGSLFLTAIDRYISIHRPLAYKRIVTRPKAVVAFCLMWTIAIVIAVLPLLGWNCEKLQSVCSDIFPHIDETYLMFWIGVTSVLLLFIVYAYMYILWKAHSHAVRMIQRGTQKSIIIHTSEDGKVQVTRPDQARMDIRLAKTLVLILVVLIICWGPLLAIMVYDVFGKMNKLIKTVFAFCSMLCLLNSTVNPIIYALRSKDLRHAFRSMFPSCEGTAQPLDNSMGDSDCLHKHANNAASVHRAAESCIKSTVKIAKVTMSVSTDTSAEAL

SEQ ID NO: 227655 - DNA, 1320 bp, Artificial Sequence
  derived and/or modified sequence
atgaagtccatcttggacggcctcgctgacacaaccttccgtaccattaccacagacctgcttggaagtccttttcaagagaagatgaccgccggtgacaatccccagctggtcccagctgaccaggtgaatatcactgagttctataacaagagtctgagttcctttaaggagaacgaggagaacatccagtgtggggaaaacttcatggatatcgaatgctttatggtactcaatccctctcagcagttggccatagccgtcctttccctgaccctgggaacattcacagtgctggaaaacctgctggtactgtgtgtgatactgcacagccgcagcttgaggtgcagacccagctaccacttcattggcagcctggccgtagctgatctgctgggcagtgtaattttcgtgtatagcttcatcgatttccacgttttccacagaaaggactcccggaatgtgttcctgttcaaactcgggggcgtgacagcgtcttttacagccagcgtgggtagcctcttcctcacagccattgatagatacatcagcatccatcggccactggcatacaagcgcattgtgacccgtccaaaggcggtggtggccttctgtctgatgtggacaattgccattgttattgccgtgctgccactgctcggctggaattgcgaaaagttgcaatcagtttgctcagacatcttcccccatatcgacgaaacatatcttatgttctggatcggggtgaccagcgtgctcctcttgttcatcgtctatgcctatatgtatattctctggaaggctcacagccatgctgtccgcatgattcaacgcgggacccaaaaaagcataatcatccacaccagtgaggatggcaaagtgcaggttacccggcctgatcaggcccgcatggatatccggttagccaagactctggtccttatcctggtggttctgattatttgctggggacccctgctggccatcatggtgtacgacgtctttggaaagatgaacaagctcattaaaaccgtgttcgccttctgctccatgctgtgcttgctcaattcaactgttaacccgatcatctacgccttaagatcaaaagatctgcgtcatgcctttaggagcatgtttccctcgtgtgagggtaccgcccagcccctggacaactctatgggagacagtgattgtctccataagcacgcgaacaatgccgccagtgtgcatagagccgccgagtcatgcatcaagagcacggtcaagatagctaaggtaactatgagtgtctccactgatactagtgccgaggccctgtag

SEQ ID NO: 227656 - DNA, 1236 bp, Artificial Sequence
  derived and/or modified sequence
atggcactgcagattccgccgtccgcaccgagcccgctgacaagctgtacatgggcccagatgaccttcagcactaagacttcaaaggaaaatgaagagaacatccagtgtggcgagaattttatggacatcgaatgcttcatggtcctgaacccttctcaacagctcgccatcgccgtcttgtccctgactctgggaacatttacggtcctagaaaatctgctggtgctttgtgtaattctacacagcaggtcattgaggtgtaggcccagctatcacttcatcgggagcctggccgtcgctgatctcctcggctcggtaatcttcgtctatagtttcatagacttccatgttttccaccgcaaggattcacgcaatgtgtttttatttaaattaggcggcgttacagcttcattcactgcaagtgtcgggtccctgtttctaacagccattgatcgctatattagtattcaccggccactggcatataaacgtatcgtgacccgccccaaggcagtggtggcattctgtttgatgtggaccatagccatcgtcatcgctgttctgccattgctcggatggaactgcgaaaagcttcagagcgtttgcagtgatatcttcccccatattgacgagacctatctcatgttctggatcggggtgacatcagttctgctgctgttcatcgtatacgcttatatgtacatcctgtggaaggcccactctcatgctgttcggatgatccaaagaggcactcagaagtccatcataatacatacttccgaggacgggaaggtccaggtcacccgaccagaccaagctaggatggatatcagactggctaaaaccctggttctgatcctggtggtgctgatcatttgctgggggcctttactggcaatcatggtctacgatgtgttcggaaagatgaacaagctgatcaagactgtcttcgccttctgttccatgctatgtctgcttaactctaccgtcaatcctatcatttatgcactgcgctcaaaagatctccggcatgctttccgatcgatgttcccctcctgtgaagggaccgcacagccactggacaattctatgggagatagcgactgcctccacaaacatgccaacaacgctgcctcggtgcatagggctgcggagtcttgcataaaaagtaccgtgaagattgcgaaagtgacgatgtctgtcagcacagacacgtctgctgaagcattgtag

SEQ ID NO: 227657 - DNA, 1320 bp, Artificial Sequence
  derived and/or modified sequence
atgaagagcatcctggatggcctggccgacaccaccttccgcaccatcaccacagacctgctgggcagccccttccaggagaagatgacagctggggacaacccccagctggtgcctgctgaccaggtgaacatcacagagttctacaacaagagcctgagcagcttcaaggaaaatgaggagaacatccagtgtggggagaacttcatggacatcgagtgcttcatggtgctgaaccccagccagcagctggccatcgctgtgctgagcctgaccctgggcaccttcaccgtgctggagaacctgctggtgctgtgtgtgatcctgcacagccgcagcctgcgctgccggcccagctaccacttcatcggcagcctggccgtggccgacctgctgggcagcgtcatctttgtgtacagcttcatcgacttccacgtgttccacaggaaggacagcagaaatgtgttcctgttcaagctgggcggcgtgacagccagcttcaccgcctctgtgggcagcctcttcctgacagccatcgaccgctacatcagcatccaccggcccctggcctacaagagaattgtgacccggcccaaggctgtggtggccttctgcctgatgtggaccatcgccatcgtgattgctgtgctgcccctgctgggctggaactgtgagaagctgcagagcgtgtgcagcgacatcttcccccacattgatgagacctacctgatgttctggattggagtgacctctgtgctgctgctcttcatcgtgtatgcctacatgtacatcctgtggaaggcccacagccatgctgtgaggatgatccagaggggcacccagaagagcatcatcatccacaccagtgaagatggcaaggtgcaggtgaccaggccagaccaggccaggatggacatccggctggccaagaccctggtgctgatcctggtggtgctgatcatctgctggggccccctgctggccatcatggtgtatgatgtgtttgggaagatgaacaagctgatcaagacagtgtttgccttctgcagcatgctgtgcctgctgaacagcacagtgaaccccatcatctatgccctgcggagcaaggacctgcggcatgccttccgctccatgttccccagctgtgagggcacagcccagcccctggacaacagcatgggagacagcgactgcctgcacaagcacgccaacaatgctgcctctgtgcacagagctgctgagagctgcatcaagagcacagtgaagatcgccaaggtgaccatgtctgtgtccacagacaccagcgctgaggccctgtag

SEQ ID NO: 227658 - DNA, 1236 bp, Artificial Sequence
  derived and/or modified sequence
atggccctgcagatcccccccagcgcccccagccccctgaccagctgcacctgggcccagatgaccttcagcaccaagaccagcaaagaaaatgaggagaacatccagtgtggggagaacttcatggacatcgagtgcttcatggtgctgaaccccagccagcagctggccatcgctgtgctgagcctgaccctgggcaccttcaccgtgctggagaacctgctggtgctgtgtgtgatcctgcacagccgcagcctgcgctgccggcccagctaccacttcatcggcagcctggccgtggccgacctgctgggcagcgtcatctttgtgtacagcttcatcgacttccacgtgttccacaggaaggacagcagaaatgtgttcctgttcaagctgggcggcgtgacagccagcttcaccgcctctgtgggcagcctcttcctgacagccatcgaccgctacatcagcatccaccggcccctggcctacaagagaattgtgacccggcccaaggctgtggtggccttctgcctgatgtggaccatcgccatcgtgattgctgtgctgcccctgctgggctggaactgtgagaagctgcagagcgtgtgcagcgacatcttcccccacattgatgagacctacctgatgttctggattggagtgacctctgtgctgctgctcttcatcgtgtatgcctacatgtacatcctgtggaaggcccacagccatgctgtgaggatgatccagaggggcacccagaagagcatcatcatccacaccagtgaagatggcaaggtgcaggtgaccaggccagaccaggccaggatggacatccggctggccaagaccctggtgctgatcctggtggtgctgatcatctgctggggccccctgctggccatcatggtgtatgatgtgtttgggaagatgaacaagctgatcaagacagtgtttgccttctgcagcatgctgtgcctgctgaacagcacagtgaaccccatcatctatgccctgcggagcaaggacctgcggcatgccttccgctccatgttccccagctgtgagggcacagcccagcccctggacaacagcatgggagacagcgactgcctgcacaagcacgccaacaatgctgcctctgtgcacagagctgctgagagctgcatcaagagcacagtgaagatcgccaaggtgaccatgtctgtgtccacagacaccagcgctgaggccctgtag

SEQ ID NO: 227659 - DNA, 1320 bp, Artificial Sequence
  derived and/or modified sequence
atgaagagcatcctggacggcctggccgacaccaccttccggaccatcacaacagacctgctgggttccccctttcaggagaaaatgactgccggggataaccctcagttggttccagctgaccaggtcaacattactgaattctacaataagtcactctctagttttaaggagaacgaagaaaacatacagtgtggcgaaaattttatggacattgaatgtttcatggtgctcaaccctagtcaacaactggctattgcagttctttccctcacactgggaacattcaccgtgcttgaaaatctgctagtcctgtgtgtgatactgcacagtagaagcctgcgatgccggccctcatatcattttattggatctcttgctgtggccgacctcctgggaagcgtgattttcgtatacagcttcattgactttcacgtcttccatagaaaggactcacgaaatgtcttccttttcaagctcggcggggtgacagcctcatttaccgcatcggtcggaagtctgttcctgacagcaattgacaggtatatctcgatccaccgccccctcgcctataaacggatcgtcacccgccccaaggcagtggtggccttctgtcttatgtggaccattgctatcgtaatcgccgtcctcccgttgctggggtggaactgtgagaaactgcagagcgtgtgcagtgacatttttccacatatagatgaaacctatctgatgttctggataggtgtgacctccgtgcttttgctcttcatcgtttatgcatatatgtatatattgtggaaagctcacagccatgcggtgcgcatgatccagcgtggcacccagaagtctattattatccatacaagtgaggacgggaaagtgcaggtgacccggccggatcaggcacgcatggacatcaggctggcaaagacccttgtcttgatcctcgtagtcctgatcatttgctggggtcccttactggctatcatggtgtatgacgtttttgggaagatgaacaaactaatcaagactgtgtttgctttctgcagcatgctctgcctcttaaatagcaccgtgaaccctatcatatacgccctgcgctcaaaggacttgcggcacgctttcagatctatgtttccaagctgcgaggggacagctcagccgctcgacaattctatgggcgacagtgattgcctccacaagcacgccaacaacgccgccagcgtgcaccgcgccgccgagtcctgtatcaagtccactgtcaagatcgccaaagtcacaatgtccgtgtcaaccgacacgtctgcagaggctctgtag

SEQ ID NO: 227660 - DNA, 1236 bp, Artificial Sequence
  derived and/or modified sequence
atggccctgcagatcccccccagcgcccccagccccctgaccagctgtacctgggcacaaatgaccttcagcacaaagacctctaaggagaatgaggaaaacatccagtgcggggaaaatttcatggatattgagtgcttcatggtcctgaacccatcgcaacagttggccattgctgtcctgtctctgaccctcggtacctttactgtgctcgagaatctgctggtgctgtgcgtcatcttgcatagtcggagtctccgctgtaggccatcctaccacttcattgggtccctcgcagtggcggatcttcttgggagtgtgatctttgtgtattcattcatagatttccacgtttttcacagaaaagactcaaggaacgtcttcttattcaaactggggggagtgaccgcaagcttcacagcctccgtcggatcgttatttctgaccgcgatcgacagatacatctcgatccaccggccgctagcctacaagcgcatcgtcacccgccccaaagccgtcgttgccttttgcctgatgtggaccatagctattgttatcgcagtgttacccttgctcggatggaactgcgaaaaactccaatcagtttgctcagacatctttccccacatcgacgaaacctacctgatgttttggattggagtcacatcagtcctcctgttattcatcgtgtacgcatatatgtacatcctctggaaagcccactcccacgccgtcaggatgattcagagaggcacccagaagtccatcataatccacaccagtgaagatggcaaggtccaagttacacgcccagaccaggccagaatggacatccgcctggcaaaaacactcgtgctgatactggtggtgctgattatctgctggggcccccttctggccatcatggtgtacgacgtattcggaaaaatgaacaaattgattaaaactgtgttcgcgttttgttcaatgctatgtctacttaactcaactgtgaatcccatcatatatgcgttgaggtcaaaggacctacggcatgcattcagatctatgttcccatcttgtgaaggaactgcccagcctctggacaacagcatgggtgactcggattgcctacacaaacatgcgaacaatgcagcctctgtccacagagcagccgagtcctgcataaagtccaccgtaaaaattgcaaaagtgaccatgtccgtctccactgacacctctgcagaagctctgtag

SEQ ID NO: 227661 - DNA, 1320 bp, Artificial Sequence
  derived and/or modified sequence
atgaagtcaatacttgacgggctggccgacacgacctttagaacgatcacgaccgatctcctggggagtcctttccaagaaaagatgaccgccggagacaatccccagctggtcccagccgatcaggtgaatataactgaattttacaataagtcactgagttcattcaaagagaacgaggaaaatatacagtgtggcgagaacttcatggacatcgaatgttttatggttttgaacccatcccagcaattagccatcgccgtcctgtctctgaccctgggaacattcaccgtgctcgaaaacttgctggtgctgtgcgtcattctgcatagcaggtctctcagatgtcggccaagttaccatttcatcggatcactcgccgttgccgatctgctcgggagtgttatcttcgtgtatagctttatcgattttcacgtgttccacaggaaagactcaaggaacgtcttcctcttcaagttgggcggtgtaaccgcctccttcacagcgagcgtggggagtctgtttctgaccgctattgaccgatatatttccatccatcgcccactggcctataaaaggatcgtcacacgcccaaaggccgttgttgccttctgtctcatgtggactatagcaattgtgatcgctgttctgccactgcttgggtggaattgcgagaagcttcagagcgtctgcagtgatatattccctcacatcgatgagacttatctgatgttctggataggcgtcacaagcgttctgctgcttttcatcgtgtatgcgtacatgtacattctttggaaagcccacagccacgccgtccgtatgatccaacggggaacccagaagtccatcatcatccacacaagcgaagacggcaaagtccaggtcacacgaccagatcaggctcggatggacatcaggttggccaaaaccctggtgctgatccttgtggtgctcatcatatgctgggggccactgctggccatcatggtatacgacgtgtttggcaaaatgaacaaactaatcaaaaccgtatttgctttctgcagtatgctctgccttctgaacagcactgtgaatcccattatctacgctctgcgatctaaagacctgcgacacgctttcaggtctatgttcccctcatgcgaaggaaccgcacaacccttggacaacagcatgggtgatagcgactgcctgcataagcacgcaaacaacgcagctagtgtgcacagggccgctgagtcctgcatcaagagtactgtgaagattgccaaggtgacaatgagcgtaagtactgacacatccgccgaagccctttag

SEQ ID NO: 227662 - DNA, 1236 bp, Artificial Sequence
  derived and/or modified sequence
atggcccttcagattccccctagcgcaccctcgcctctgacctcttgcacctgggctcagatgactttcagcacgaaaacttctaaagagaatgaggagaatattcagtgtggcgagaacttcatggatattgagtgttttatggtcctgaatcccagtcaacagcttgctatagccgtcttgtccctcaccctggggacattcaccgtgttggagaatctgttggtactttgtgtgattttacatagcagatcattaagatgtagaccatcctaccacttcattggatccttggcagtagctgatctgcttgggtcagtgatattcgtgtactccttcattgactttcatgtattccataggaaggactcaaggaacgtttttctcttcaagttgggcggagtcaccgcgtccttcaccgcatccgtgggaagcctgttcctgaccgctattgatagatatatttccatccatcgtcccctggcatataagcggatcgttaccagaccaaaggcggtcgtcgctttctgcctgatgtggaccatcgcgatcgtgatcgcagtgcttccattgttgggctggaattgcgagaagctccagagtgtctgttctgatatatttccacacatcgatgagacgtatctaatgttctggattggagtcacttccgtcttactgctgtttatagtttatgcctatatgtacatcctgtggaaggcccactctcatgccgttcggatgatccagcgaggcacccagaaatccattatcattcacaccagtgaagacggcaaagttcaggtgactcggcctgaccaggctaggatggatattagactggcaaagaccctcgtgcttatcctggtggtgctgatcatttgttggggcccactcttagcaataatggtgtacgacgtatttggaaaaatgaataaactcattaagaccgtgttcgctttttgctctatgctgtgtctgctgaattcaaccgtgaaccctatcatttatgcacttagaagcaaagacctgagacacgcatttaggagcatgtttccttcttgcgaaggcactgcacagcccctggataacagcatgggcgattcagactgtctgcataagcacgctaacaacgccgctagtgtgcatcgcgctgctgagagttgcattaagagtactgtgaaaatcgctaaagtcactatgtccgtctccacggacactagcgcagaggctctctag

SEQ ID NO: 227663 - DNA, 1320 bp, Artificial Sequence
  derived and/or modified sequence
atgaagtcgatcctagatggccttgcagataccaccttccgcaccatcaccactgacctcctgggaagtcccttccaagagaagatgactgcgggagacaacccccagctagtcccagcagaccaggtgaacattacagaattttacaacaagtctctctcgtccttcaaggagaatgaggagaacatccagtgtggggagaacttcatggacatagagtgtttcatggtcctgaaccccagccagcagctggccattgcagtcctgtccctcacgctgggcaccttcacggtcctggagaacctcctggtgctgtgcgtcatcctccactcccgcagcctccgctgcaggccttcctaccacttcatcggcagcctggcggtggcagacctcctggggagtgtcatttttgtctacagcttcattgacttccacgtgttccaccgcaaagatagccgcaacgtgtttctgttcaaactgggtggggtcacggcctccttcactgcctccgtgggcagcctgttcctcacagccatcgacaggtacatatccattcacaggcccctggcctataagaggattgtcaccaggcccaaggccgtggtggcgttttgcctgatgtggaccatagccattgtgatcgccgtgctgcctctcctgggctggaactgcgagaaactgcaatctgtttgctcagacattttcccacacattgatgaaacctacctgatgttctggatcggggtcaccagcgtactgcttctgttcatcgtgtatgcgtacatgtatattctctggaaggctcacagccacgccgtccgcatgattcagcgtggcacccagaagagcatcatcatccacacgtctgaggatgggaaggtacaggtgacccggccagaccaagcccgcatggacattaggttagccaagaccctggtcctgatcctggtggtgttgatcatctgctggggccctctgcttgcaatcatggtgtatgatgtctttgggaagatgaacaagctcattaagacggtgtttgcattctgcagtatgctctgcctgctgaactccaccgtgaaccccatcatctatgctctgaggagtaaggacctgcgacacgctttccggagcatgtttccctcttgtgaaggcactgcgcagcctctggataacagcatgggggactcggactgcctgcacaaacacgcaaacaatgcagccagtgttcacagggccgcagaaagctgcatcaagagcacggtcaagattgccaaggtaaccatgtctgtgtccacagacacgtctgccgaggctctgtga

SEQ ID NO: 227664 - DNA, 1236 bp, Artificial Sequence
  derived and/or modified sequence
atggccttgcagataccaccttccgcaccatcaccactgacctcctgtacgtgggctcaaatgacattcagtacgaagacatcaaaggagaatgaggagaacatccagtgtggggagaacttcatggacatagagtgtttcatggtcctgaaccccagccagcagctggccattgcagtcctgtccctcacgctgggcaccttcacggtcctggagaacctcctggtgctgtgcgtcatcctccactcccgcagcctccgctgcaggccttcctaccacttcatcggcagcctggcggtggcagacctcctggggagtgtcatttttgtctacagcttcattgacttccacgtgttccaccgcaaagatagccgcaacgtgtttctgttcaaactgggtggggtcacggcctccttcactgcctccgtgggcagcctgttcctcacagccatcgacaggtacatatccattcacaggcccctggcctataagaggattgtcaccaggcccaaggccgtggtggcgttttgcctgatgtggaccatagccattgtgatcgccgtgctgcctctcctgggctggaactgcgagaaactgcaatctgtttgctcagacattttcccacacattgatgaaacctacctgatgttctggatcggggtcaccagcgtactgcttctgttcatcgtgtatgcgtacatgtatattctctggaaggctcacagccacgccgtccgcatgattcagcgtggcacccagaagagcatcatcatccacacgtctgaggatgggaaggtacaggtgacccggccagaccaagcccgcatggacattaggttagccaagaccctggtcctgatcctggtggtgttgatcatctgctggggccctctgcttgcaatcatggtgtatgatgtctttgggaagatgaacaagctcattaagacggtgtttgcattctgcagtatgctctgcctgctgaactccaccgtgaaccccatcatctatgctctgaggagtaaggacctgcgacacgctttccggagcatgtttccctcttgtgaaggcactgcgcagcctctggataacagcatgggggactcggactgcctgcacaaacacgcaaacaatgcagccagtgttcacagggccgcagaaagctgcatcaagagcacggtcaagattgccaaggtaaccatgtctgtgtccacagacacgtctgccgaggctctgtga

SEQ ID NO: 227665 - DNA, 1320 bp, Artificial Sequence
  derived and/or modified sequence
atgaagagcatcctggacggcctggccgacaccaccttcagaaccatcaccaccgacctgctgggcagccccttccaggagaagatgaccgccggcgacaacccccagctggtgcccgccgaccaggtgaacatcaccgagttctacaacaagagcctgagcagcttcaaggagaacgaggagaacatccagtgcggcgagaacttcatggacatcgagtgcttcatggtgctgaaccccagccagcagctggccatcgccgtgctgagcctgaccctgggcaccttcaccgtgctggagaacctgctggtgctgtgcgtgatcctgcacagcagaagcctgagatgcagacccagctaccacttcatcggcagcctggccgtggccgacctgctgggcagcgtgatcttcgtgtacagcttcatcgacttccacgtgttccacagaaaggacagcagaaacgtgttcctgttcaagctgggcggcgtgaccgccagcttcaccgccagcgtgggcagcctgttcctgaccgccatcgacagatacatcagcatccacagacccctggcctacaagagaatcgtgaccagacccaaggccgtggtggccttctgcctgatgtggaccatcgccatcgtgatcgccgtgctgcccctgctgggctggaactgcgagaagctgcagagcgtgtgcagcgacatcttcccccacatcgacgagacctacctgatgttctggatcggcgtgaccagcgtgctgctgctgttcatcgtgtacgcctacatgtacatcctgtggaaggcccacagccacgccgtgagaatgatccagagaggcacccagaagagcatcatcatccacaccagcgaggacggcaaggtgcaggtgaccagacccgaccaggccagaatggacatcagactggccaagaccctggtgctgatcctggtggtgctgatcatctgctggggccccctgctggccatcatggtgtacgacgtgttcggcaagatgaacaagctgatcaagaccgtgttcgccttctgcagcatgctgtgcctgctgaacagcaccgtgaaccccatcatctacgccctgagaagcaaggacctgagacacgccttcagaagcatgttccccagctgcgagggcaccgcccagcccctggacaacagcatgggcgacagcgactgcctgcacaagcacgccaacaacgccgccagcgtgcacagagccgccgagagctgcatcaagagcaccgtgaagatcgccaaggtgaccatgagcgtgagcaccgacaccagcgccgaggccctgtag

SEQ ID NO: 227666 - DNA, 1236 bp, Artificial Sequence
  derived and/or modified sequence
atggccctgcagatcccccccagcgcccccagccccctgaccagctgcacctgggcccagatgaccttcagcaccaagaccagcaaggagaacgaggagaacatccagtgcggcgagaacttcatggacatcgagtgcttcatggtgctgaaccccagccagcagctggccatcgccgtgctgagcctgaccctgggcaccttcaccgtgctggagaacctgctggtgctgtgcgtgatcctgcacagcagaagcctgagatgcagacccagctaccacttcatcggcagcctggccgtggccgacctgctgggcagcgtgatcttcgtgtacagcttcatcgacttccacgtgttccacagaaaggacagcagaaacgtgttcctgttcaagctgggcggcgtgaccgccagcttcaccgccagcgtgggcagcctgttcctgaccgccatcgacagatacatcagcatccacagacccctggcctacaagagaatcgtgaccagacccaaggccgtggtggccttctgcctgatgtggaccatcgccatcgtgatcgccgtgctgcccctgctgggctggaactgcgagaagctgcagagcgtgtgcagcgacatcttcccccacatcgacgagacctacctgatgttctggatcggcgtgaccagcgtgctgctgctgttcatcgtgtacgcctacatgtacatcctgtggaaggcccacagccacgccgtgagaatgatccagagaggcacccagaagagcatcatcatccacaccagcgaggacggcaaggtgcaggtgaccagacccgaccaggccagaatggacatcagactggccaagaccctggtgctgatcctggtggtgctgatcatctgctggggccccctgctggccatcatggtgtacgacgtgttcggcaagatgaacaagctgatcaagaccgtgttcgccttctgcagcatgctgtgcctgctgaacagcaccgtgaaccccatcatctacgccctgagaagcaaggacctgagacacgccttcagaagcatgttccccagctgcgagggcaccgcccagcccctggacaacagcatgggcgacagcgactgcctgcacaagcacgccaacaacgccgccagcgtgcacagagccgccgagagctgcatcaagagcaccgtgaagatcgccaaggtgaccatgagcgtgagcaccgacaccagcgccgaggccctgtag

SEQ ID NO: 227667 - protein, 159 aa, Artificial Sequence
  derived and/or modified sequence
MQRVGNTFSNESRVASRCPSVGLAERNRVATMPVRLLRDSPAAQEDNDHARDGFQMKLDAHGFAPEELVVQVDGQWLMVTGQQQLDVRDPERVSYRMSQKVHRKMLPSNLSPTAMTCCLTPSGQLWVRGQCVALALPEAQTGPSPRLGSLGSKASNLTR

SEQ ID NO: 227668 - DNA, 480 bp, Artificial Sequence
  derived and/or modified sequence
atgcagagagtgggcaacaccttcagcaacgagagcagagtggccagcagatgccccagcgtgggcctggccgagagaaacagagtggccaccatgcccgtgagactgctgagagacagccccgccgcccaggaggacaacgaccacgccagagacggcttccagatgaagctggacgcccacggcttcgcccccgaggagctggtggtgcaggtggacggccagtggctgatggtgaccggccagcagcagctggacgtgagagaccccgagagagtgagctacagaatgagccagaaggtgcacagaaagatgctgcccagcaacctgagccccaccgccatgacctgctgcctgacccccagcggccagctgtgggtgagaggccagtgcgtggccctggccctgcccgaggcccagaccggccccagccccagactgggcagcctgggcagcaaggccagcaacctgaccagatag

SEQ ID NO: 227669 - DNA, 616 bp, Artificial Sequence
  derived and/or modified sequence
agcggagctgagctcgggtaggccgcgcgaggtccctcctctccgggcgtccgtgcgcctagctctgcgctgggagcctcgcgccctttgacagcagttagttgctgactcggatgcagagagtcggtaacaccttctccaacgagagccgggtggcatcccggtgtcccagcgtgggccttgctgaacggaaccgggtggccacaatgccggtgcggctgctcagggacagtccagcggctcaggaggacaatgaccatgccagagacggtttccaaatgaagctggatgcccacggcttcgccccggaggaactggtggtgcaggtggatggccaatggctgatggtgaccggacagcagcaactggacgtcagggacccggaaagggtcagttaccgcatgtcacagaaggtgcaccggaaaatgctcccgtccaacctgagtcctaccgccatgacctgctgcctgaccccctccgggcagctgtgggtcagaggccagtgtgtggcgctggccctccctgaagcccaaacaggaccgtccccgagactcgggagcctcggctctaaggcttccaacctgacccggtaaacaaacgacgcgatgtgcagcag

SEQ ID NO: 227670 - DNA, 480 bp, Artificial Sequence
  derived and/or modified sequence
atgcagagggtgggtaacacattctcgaatgaatcccgcgtcgcgtctcgatgcccttctgtgggattagcggagcgaaatagggttgccactatgcccgtgcggctcctgcgagactcccctgcagctcaggaggacaacgaccacgctagggacggcttccagatgaagctggatgcccacggctttgcaccagaggagctcgtggtgcaggttgacggccagtggctgatggtcactggccagcagcaactggatgtgagggacccagagcgggtaagctatagaatgtcccaaaaggtccaccggaaaatgttgccgagtaatctttctccgaccgctatgacatgttgccttacgccctcagggcagttgtgggtgagggggcagtgcgttgctttggctctgcccgaggcacagaccggtcccagcccacgactgggtagcctcggttcaaaagcatctaacctgacacgatag

SEQ ID NO: 227671 - DNA, 480 bp, Artificial Sequence
  derived and/or modified sequence
atgcagagggtgggcaacaccttcagcaatgaaagccgggtggccagccgctgccccagcgtgggcctggccgagaggaacagagtggccaccatgcctgtgcggctgctgcgggacagccctgctgcccaggaggacaatgaccacgccagagatggcttccagatgaagctggatgcccacggctttgcccctgaggagctggtggtgcaggtggatggccagtggctgatggtgacaggccagcagcagctggatgtgcgggaccctgagcgggtgtcctacaggatgagccagaaggtgcacaggaagatgctgcccagcaacctgagccccacagccatgacctgctgcctgacccccagcggccagctgtgggtgcggggccagtgtgtggccctggccctgcctgaggcccagacaggccccagcccccggctgggcagcctgggcagcaaggccagcaacctgaccaggtag

SEQ ID NO: 227672 - DNA, 480 bp, Artificial Sequence
  derived and/or modified sequence
atgcagcgggtgggcaacaccttcagcaacgagagccgggtggcctcgcggtgtccatccgtcggcctagctgagcgcaacagagtggcaactatgcccgtccggctgctcagggactcccccgctgcccaggaggataacgatcacgcccgcgatggattccaaatgaagctggacgcgcatggctttgcacccgaggaattggtcgtccaggtcgatggacaatggctgatggttactgggcagcagcaactcgacgtccgggaccctgagagggtgtcctaccgcatgagccagaaagtgcataggaaaatgctgccttccaatctatcgcctactgctatgacttgctgcctgacaccctctgggcagttatgggtgaggggccagtgcgtggccctggctctgcccgaagcccagactggaccgtctcctagattgggctccctcggcagcaaggcaagtaacctgacaagatag

SEQ ID NO: 227673 - DNA, 480 bp, Artificial Sequence
  derived and/or modified sequence
atgcagcgtgtcggaaacacatttagcaatgagagtagggttgcaagtcggtgccctagtgtaggactggccgagcgcaatcgtgtggccaccatgcctgtgagactgctgcgagatagcccggcagcccaggaggataatgatcatgcacgggatggattccagatgaagttagacgcacatggatttgcccctgaggagcttgttgtgcaagtcgatggtcaatggctgatggtgaccggtcaacagcagctagacgtgagagaccctgaaagggtgagctatcgaatgtcgcagaaggttcaccgcaaaatgctaccatctaatctttctccgaccgctatgacatgctgcttgacccctagcggccagctgtgggtaagagggcaatgcgttgccctagccctgcctgaggctcagaccggaccttcccctagactcggtagcctcggaagtaaggcatctaacctgacccggtag

SEQ ID NO: 227674 - protein, 381 aa, Artificial Sequence
  derived and/or modified sequence
MSWTVPVVRASQRVSSVGANFLCLGMALCPRQATRIPLNGTWLFTPVSKMATVKSELIERFTSEKPVHHSKVSIIGTGSVGMACAISILLKGLSDELALVDLDEDKLKGETMDLQHGSPFTKMPNIVCSKDYFVTANSNLVIITAGARQEKGETRLNLVQRNVAIFKLMISSIVQYSPHCKLIIVSNPVDILTYVAWKLSAFPKNRIIGSGCNLDTARFRFLIGQKLGIHSESCHGWILGEHGDSSVPVWSGVNIAGVPLKDLNSDIGTDKDPEQWKNVHKEVTATAYEIIKMKGYTSWAIGLSVADLTESILKNLRRIHPVSTIIKGLYGIDEEVFLSIPCILGENGITNLIKIKLTPEEEAHLKKSAKTLWEIQNKLKL

SEQ ID NO: 227675 - DNA, 1146 bp, Artificial Sequence
  derived and/or modified sequence
atgagttggacagtacctgtggtacgggcgagccaaagggtgtcctctgtgggtgctaacttcctgtgtctcggcatggccttgtgtccacgtcaagcaacacgcattcccctcaacggtacatggctgtttacgcctgtgagcaaaatggctacagtgaaatctgagctgattgagagatttacgtctgaaaagcctgtgcaccacagtaaagtctcaatcatcggaactggctctgtgggcatggcgtgtgctattagtatactattgaagggactgtcggatgaactagccctggttgacctcgatgaggacaagctcaaaggcgagaccatggatctccagcacggctctccattcacaaagatgccaaatatcgtttgcagcaaagactactttgtgactgccaacagcaacctcgtgataatcacggctggagcacgacaggagaagggcgaaacacgcctcaatttagttcagcggaacgtggcgatctttaagctcatgatcagttcgatcgtacagtatagccctcactgcaagctgatcatcgtaagcaaccctgttgatattctgacgtacgtcgcctggaagctttctgccttcccaaagaatcgcatcatcggctcaggctgtaaccttgacacagctcgatttcggttccttattggacagaaactcggaatacattctgagtcttgccatggctggattctaggggaacatggcgactctagcgtgccagtgtggtccggcgtaaacatagcaggggtccctctgaaggatttgaatagcgacatcgggactgataaggatccagagcaatggaagaatgtgcacaaggaggtgaccgcaaccgcctatgaaattatcaaaatgaagggatatacctcatgggccatcgggctctcagtggccgatctaacagagagcattctgaagaacctgcggaggatccatcccgtatcgaccatcatcaaggggctttacggcattgatgaggaagtctttctgtccatcccctgtatcctaggggaaaatggtattaccaatctgatcaagatcaagctcacccctgaagaggaagcacacctgaaaaagtcggccaagacactgtgggaaatccagaataaacttaaactctag

SEQ ID NO: 227676 - DNA, 1146 bp, Artificial Sequence
  derived and/or modified sequence
atgtcctggacagtgcctgtggtgcgggccagccagagggtgtcctctgtgggcgccaacttcctgtgcctgggcatggccctgtgcccccggcaggccacccgcatccccctgaatggcacctggctgttcacccctgtgtccaagatggccaccgtgaagtctgagctgattgagcgcttcaccagcgagaagcctgtgcaccacagcaaggtgtccatcattggaactggatctgtgggcatggcctgtgccatcagcatcctgctgaagggcctgagtgatgagctggccctggtggacctggatgaggacaagctgaagggggagaccatggacctgcagcacggcagccccttcaccaagatgcccaacatcgtgtgcagcaaggactactttgtgacagccaacagcaacctggtgatcatcacagctggggcccggcaggagaagggggagacccggctgaacctggtgcagagaaatgtggccatcttcaagctgatgatcagcagcatcgtgcagtacagcccccactgcaagctgatcatcgtgagcaaccctgtggacatcctgacctacgtggcctggaagctgagcgccttccccaagaaccgcatcatcggcagcggctgcaacctggacacagcccgcttccgcttcctgattggccagaagctgggcatccacagcgagagctgccacggctggatcctgggggagcacggggacagctctgtgcctgtgtggagcggcgtgaacattgctggggtgcccctgaaggacctgaacagcgacattggaacagacaaggaccctgagcagtggaagaatgtgcacaaggaggtgacagccacagcctatgagatcatcaagatgaagggctacacctcctgggccatcggcctgtctgtggccgacctgacagagagcatcctgaagaacctgcggcgcatccaccctgtgtccaccatcatcaagggcctgtatggaattgatgaggaggtgttcctgagcatcccctgcatcctgggggagaatggcatcaccaacctgatcaagatcaagctgaccccagaggaggaggcccacctgaagaagagcgccaagaccctgtgggagatccagaacaagctgaagctgtag

SEQ ID NO: 227677 - DNA, 1146 bp, Artificial Sequence
  derived and/or modified sequence
atgagctggaccgtgcccgtggtgcgggccagccagcgggtgagcagcgtgggggcaaactttctgtgcctcggcatggcactgtgtccccgccaagcgacacgcattccactaaacggaacctggctgtttacccccgtctccaagatggcgacagtgaagtccgagttaatcgaacgctttacgagtgagaaacctgtgcatcacagcaaagttagtatcataggtacaggaagcgttggaatggcttgcgccatttctattctgctgaagggtctgtcggacgagctggctctggtagacctagatgaagacaaattgaagggtgagacgatggatttgcaacacgggagtcctttcacaaagatgcctaatatcgtgtgctcaaaagactactttgtgaccgccaacagtaacctggtcattatcacagctggggctagacaggaaaagggggagactagattaaatctggtacagcgaaatgttgcaatttttaaattgatgatctcctccatagttcagtactccccgcactgcaagctgataattgtcagcaatcctgtggacatcctgacgtacgtagcctggaaactttcggcatttccaaagaatagaatcatcgggagtggctgcaatctcgataccgcacgatttcggttcctgatcggtcagaaacttggcatccatagcgaatcctgtcatggctggattctaggggagcacggcgattcctccgtgccagtctggtctggagtgaatatagcaggcgtccctttgaaggacctgaatagcgacatcggaaccgacaaggacccagagcagtggaaaaacgtccataaagaggttaccgctactgcatatgaaattattaaaatgaagggctatacatcctgggcgatcggtctcagcgttgctgacttaaccgaatctatccttaagaatctcaggaggatccaccctgtctccacaattattaaaggtctgtacggtattgatgaggaggtcttcctctccatcccctgcatccttggcgagaacggcattacaaatcttattaagattaagcttacccctgaagaggaggcacacctcaagaaatctgctaagacactttgggagattcaaaacaagctgaaactgtag

SEQ ID NO: 227678 - DNA, 1146 bp, Artificial Sequence
  derived and/or modified sequence
atgtcatggactgtcccagtcgtgcgtgccagccagagagtgagtagtgtgggggctaactttttatgcctggggatggctctatgtcctagacaggcgactcggatccctttgaatggcacatggctatttacccccgtctccaaaatggctactgtcaagtccgagttgattgagcgattcaccagcgagaagcccgttcatcactcaaaggtgagcattattggaacgggaagtgtgggcatggcatgtgcgatctccattcttctgaagggtctcagcgatgagctggccttagtcgatctggatgaggataagctcaagggagagactatggacttgcagcacggatctcccttcactaaaatgcctaatattgtgtgttcaaaagactattttgtgacggctaactctaaccttgtgataattactgcaggtgctcgacaggagaaaggagagacaagattaaaccttgtgcaacggaatgttgccatctttaagctgatgatctcttctatagttcagtactctcctcattgtaagctcatcatcgtgagtaatcccgtagacatcctgacctacgtggcctggaaactgtccgctttccctaaaaatcgcatcatcggatcgggctgtaacttggacactgcaagatttagattcttgattggccagaagcttggaattcacagtgagagttgccacggctggattttaggagaacacggcgactccagcgtccccgtgtggtctggagtcaacattgccggagtgcccctgaaggacctgaattcagatatcggaactgataaggatccagagcagtggaagaacgtacacaaggaggttaccgccactgcttatgagatcataaagatgaaggggtacacaagctgggcaattggcctctccgtcgcggaccttacagagtccattctcaaaaacctccggaggatccatcctgtttcaaccataatcaaaggcctatacggcattgacgaagaagtgtttctgtccattccttgcatccttggagaaaatggaattactaatttaataaaaattaagttgaccccggaggaagaggcacacctgaaaaagtcggcaaaaaccctctgggagatccagaacaagctgaagctgtag

SEQ ID NO: 227679 - DNA, 1664 bp, Artificial Sequence
  derived and/or modified sequence
agagtgctgaaggtcctgccaacggctctcttggcgtctcaacgttcggatcagcagcttttttccattctctctctccacttcttcagtgagcagccatgagttggactgtgcctgttgtgcgggccagccagagagtgagctcggtgggagcgaatttcctatgcctggggatggccctgtgtccgcgtcaagcaacgcgcatcccgctcaacggcacctggctcttcacccccgtgagcaagatggcgactgtgaagagtgagcttattgagcgtttcacttccgagaagcccgttcatcacagtaaggtctccatcataggaactggatcggtgggcatggcctgcgctatcagcatcttattaaaaggcttgagtgatgaacttgcccttgtggatcttgatgaagacaaactgaagggtgagacgatggatcttcaacatggcagccctttcacgaaaatgccaaatattgtttgtagcaaagattactttgtcacagcaaactccaacctagtgattatcacagcaggtgcacgccaagaaaagggagaaacgcgccttaatttagtccagcgaaatgtggccatcttcaagttaatgatttccagtattgtccagtacagcccccactgcaaactgattattgtttccaatccagtggatatcttaacttatgtagcttggaagttgagtgcatttcccaaaaaccgtattattggaagcggctgtaatctggatactgctcgttttcgtttcttgattggacaaaagcttggtatccattctgaaagctgccatggatggatcctcggagagcatggagactcaagtgttcctgtgtggagtggagtgaacatagctggtgtccctttgaaggatctgaactctgatataggaactgataaagatcctgagcaatggaaaaatgtccacaaagaagtgactgcaactgcctatgagattattaaaatgaaaggttatacttcttgggccattggcctatctgtggccgatttaacagaaagtattttgaagaatcttaggagaatacatccagtttccaccataattaagggcctctatggaatagatgaagaagtattcctcagtattccttgtatcctgggagagaacggtattaccaaccttataaagataaagctgacccctgaagaagaggcccatctgaaaaaaagtgcaaaaacactctgggaaattcagaataagcttaagctttaaagttgcctaaaactaccattccgaaattattgaagagatcatagatacaggattatataacgaaattttgaataaacttgaattcctaaaagatggaaacaggaaagtaggtagagtgattttcctatttatttagtcctccagctcttttattgagcatccacgtgctggacgatacttatttacaattcctaagtatttttggtacctctgatgtagcagcacttgccatgttatatatatgtagttggcatttggttcccaaaaagtaggatgtaggtatttattgtgttctagaaattccgactcttttcattagatatatgctatttctttcattcttgctggtttatacctatgttcatttatatgctgtaaaaaagtagtagcttcttctacaatgtaaaaataaatgtacat

SEQ ID NO: 227680 - DNA, 1146 bp, Artificial Sequence
  derived and/or modified sequence
atgagctggaccgtgcccgtggtgagagccagccagagagtgagcagcgtgggcgccaacttcctgtgcctgggcatggccctgtgccccagacaggccaccagaatccccctgaacggcacctggctgttcacccccgtgagcaagatggccaccgtgaagagcgagctgatcgagagattcaccagcgagaagcccgtgcaccacagcaaggtgagcatcatcggcaccggcagcgtgggcatggcctgcgccatcagcatcctgctgaagggcctgagcgacgagctggccctggtggacctggacgaggacaagctgaagggcgagaccatggacctgcagcacggcagccccttcaccaagatgcccaacatcgtgtgcagcaaggactacttcgtgaccgccaacagcaacctggtgatcatcaccgccggcgccagacaggagaagggcgagaccagactgaacctggtgcagagaaacgtggccatcttcaagctgatgatcagcagcatcgtgcagtacagcccccactgcaagctgatcatcgtgagcaaccccgtggacatcctgacctacgtggcctggaagctgagcgccttccccaagaacagaatcatcggcagcggctgcaacctggacaccgccagattcagattcctgatcggccagaagctgggcatccacagcgagagctgccacggctggatcctgggcgagcacggcgacagcagcgtgcccgtgtggagcggcgtgaacatcgccggcgtgcccctgaaggacctgaacagcgacatcggcaccgacaaggaccccgagcagtggaagaacgtgcacaaggaggtgaccgccaccgcctacgagatcatcaagatgaagggctacaccagctgggccatcggcctgagcgtggccgacctgaccgagagcatcctgaagaacctgagaagaatccaccccgtgagcaccatcatcaagggcctgtacggcatcgacgaggaggtgttcctgagcatcccctgcatcctgggcgagaacggcatcaccaacctgatcaagatcaagctgacccccgaggaggaggcccacctgaagaagagcgccaagaccctgtgggagatccagaacaagctgaagctgtag

SEQ ID NO: 227681 - protein, 484 aa, Artificial Sequence
  derived and/or modified sequence
MAGPWTFTLLCGLLAATLIQATLSPTAVLILGPKVIKEKLTQELKDHNATSILQQLPLLSAMREKPAGGIPVLGSLVNTVLKHIIWLKVITANILQLQVKPSANDQELLVKIPLDMVAGFNTPLVKTIVEFHMTTEAQATIRMDTSASGPTRLVLSDCATSHGSLRIQLLHKLSFLVNALAKQVMNLLVPSLPNLVKNQLCPVIEASFNGMYADLLQLVKVPISLSIDRLEFDLLYPAIKGDTIQLYLGAKLLDSQGKVTKWFNNSAASLTMPTLDNIPFSLIVSQDVVKAAVAAVLSPEEFMVLLDSVLPESAHRLKSSIGLINEKAADKLGSTQIVKILTQDTPEFFIDQGHAKVAQLIVLEVFPSSEALRPLFTLGIEASSEAQFYTKGDQLILNLNNISSDRIQLMNSGIGWFQPDVLKNIITEIIHSILLPNQNGKLRSGVPVSLVKALGFEAAESSLTKDALVLTPASLWKPSSPVSQ

SEQ ID NO: 227682 - protein, 158 aa, Artificial Sequence
  derived and/or modified sequence
MCCPGGHYTLILRRGNRFRREKRPAKVTGAQTEVQLAPPLPRGRARRSPWSVPISLSIDRLEFDLLYPAIKGDTIQLYLGAKLLDSQGKVTKWFNNSAASLTMPTLDNIPFSLIVSQDVVKAAVAAVLSPEEFMVLLDSVLPESAHRLKSSIGLINEK

SEQ ID NO: 227683 - protein, 147 aa, Artificial Sequence
  derived and/or modified sequence
MAGPWTFTLLCGLLAATLIQATLSPTAVLILGPKVIKEKLTQELKDHNATSILQQLPLLSAMREKPAGGIPVLGSLVNTVLKHIIWLKVITANILQLQVKPSANDQELLVKIPLDMVAGFNTPLVKTIVEFHMTTEAQATIRMDTSA

SEQ ID NO: 227684 - DNA, 1455 bp, Artificial Sequence
  derived and/or modified sequence
atggcaggcccttggacctttacactgctgtgtggactgctcgccgctacgctgattcaggcgacactgtcccctacagcggtgctcatcttgggtccgaaggttataaaggagaagctcacgcaggaactaaaagaccataacgctacgagtattcttcagcagctgccccttctgagtgccatgcgagagaaacccgctgggggtataccagtcttgggatccctggtgaatactgttcttaagcatattatttggcttaaagttatcactgccaatattttgcagcttcaggtcaagccctccgcaaatgaccaggagctactggttaaaattccgctcgacatggttgccggatttaacacaccactagtgaaaactatcgtcgaatttcacatgactaccgaagcccaggcaacaatccgaatggacacctcagcatccgggccaacccgtctggtcctgtcagattgtgcaacctcccacgggtccctgagaatacagttgctgcataagttgagctttctggtcaacgctctcgctaagcaggtgatgaacctgttggtgccatccctgccaaatctagtgaagaaccaactttgtcctgtgatagaagcttccttcaacggtatgtacgccgatctgctccagttagtgaaggttcccattagcctaagcatcgaccgactcgagttcgatctgctttaccccgcaatcaagggcgatacaatacagctctatctgggcgctaagttgctggattctcagggtaaagtgactaaatggttcaataatagcgcggctagcctcaccatgcctacactcgacaacattcccttctcattgatcgttagccaagacgtcgttaaggcagctgttgccgctgtgctgtccccggaagagtttatggtgctgctggattctgtcctacccgagtccgcacataggttgaagagctccatcggtctgataaacgagaaagctgccgataagcttggctccactcagatcgtgaaaattctgacgcaggatacccccgagtttttcatcgatcagggacacgccaaagtagcacaactgatcgtcttggaggtgtttccatcctcagaggcgctgcgcccactgttcactcttggaatcgaggcctctagcgaggcacagttttacacaaagggagatcagctgattttaaacctcaacaacatctccagtgatcgcatccagctgatgaacagcggcatcgggtggttccagccagacgttctgaagaatataattaccgagattattcacagcatactgctccctaaccaaaatggtaagctcaggtctggggtgcccgtgtctctcgtgaaagctctgggcttcgaggcagcagagagctctctcaccaaagacgccctagtgctcacacctgcttctctgtggaaaccatcaagccccgtctcgcagtag

SEQ ID NO: 227685 - DNA, 477 bp, Artificial Sequence
  derived and/or modified sequence
atgtgttgcccgggaggccattacaccttgatcctccggaggggcaacaggttcagacgtgagaagagacctgcaaaggtgaccggggctcagaccgaggtacagctggccccacctctaccgagggggagggcacgcaggagcccatggagtgtgccaatatccctgtctattgaccgccttgagttcgacctgctgtaccccgctatcaagggagacaccatccagctgtacctgggtgcaaagcttctggacagtcagggcaaagtcactaaatggttcaacaattctgctgcttctctgacgatgccgaccctggataacatcccatttagcctaattgttagccaggacgtggtgaaagctgctgttgccgctgtgctcagtcctgaggagtttatggtattgttggatagtgttctgcccgaatccgcacacaggctgaagtcctccatcggactaataaatgagaagtag

SEQ ID NO: 227686 - DNA, 444 bp, Artificial Sequence
  derived and/or modified sequence
atggccggaccctggacatttactctcctttgcgggttgctggccgcaaccctcatccaagccactctgtctccaactgccgtgcttatccttggaccgaaagttatcaaggaaaagctgactcaggaactgaaagaccataatgccacgtccatcctacagcagctgcccctgctttccgcaatgagagagaagcccgctggaggaatccccgtcctcgggtccctggtgaatactgtgcttaagcacataatttggcttaaagtgatcacagccaatatactgcagcttcaggttaaaccctcagctaacgatcaggagcttctggtgaagattcctttagacatggtcgccggatttaacacccctctcgtaaaaacgattgtggagtttcatatgactactgaagcccaggctactattagaatggataccagcgcctag

SEQ ID NO: 227687 - DNA, 1455 bp, Artificial Sequence
  derived and/or modified sequence
atggctggcccatggacgtttaccctgttgtgcggccttctggctgccacgcttattcaggccacgctgagccctactgctgttctgattcttggtccaaaagtcataaaagagaagctcactcaggagctgaaggaccacaacgctaccagcattttgcagcagttgccactcctgtctgccatgcgcgaaaaacccgccggcggtattcctgtgctgggatcactggtgaatacagtcctcaagcacatcatttggttaaaagtgatcactgctaatattctgcaactgcaggtcaaaccctctgccaacgaccaggaactcctagttaaaataccccttgatatggtcgcaggtttcaacacacccttagtcaagaccatcgttgaatttcacatgaccactgaggcccaggccacgattcgtatggatacctccgcatccggacccacccggttagtactctctgactgtgctaccagccatgggtccctgcggatccagctgctgcacaagctcagctttctcgttaatgcactggccaagcaggttatgaacttgctggtccctagcttgcccaatctagtgaagaaccaattgtgcccagttattgaagctagctttaatggcatgtacgccgatctcctacagctggtaaaggtgccaatctcgttatcgatagaccgactggagttcgatctcctatatccggcaataaaaggcgataccattcaattgtacttgggtgccaagctgctggactcccagggtaaagttacaaagtggttcaataactctgcagcaagtctcactatgcctacactggacaatataccattttccctgatcgtatcccaagacgttgtgaaggcggccgttgccgcagttctatcacccgaagagttcatggttctgttagactctgtccttccggaaagcgcgcaccggctgaaaagctctatcggattaatcaacgaaaaagcagccgacaaactgggatctacccagatcgtgaaaatcctgacacaggacaccccagagtttttcatcgaccaggggcatgccaaggtggcccaattaatcgttttagaagttttcccctccagcgaagccctgcgtccactcttcaccctgggtattgaggctagcagcgaagctcaattctacacaaaaggagaccagctcatcttgaacttgaacaatatctccagcgaccgcatacaactaatgaactctggcattggctggttccagcccgacgtcctcaagaatattatcacagagatcatacactcaatccttctacctaatcaaaacggtaaactgcgctctggtgtgccggtgagtcttgtgaaggccctgggatttgaagccgcagagtccagcctgaccaaagacgctctagtgctcacacccgcaagtctatggaaacctagcagccccgtttcgcagtag

SEQ ID NO: 227688 - DNA, 658 bp, Artificial Sequence
  derived and/or modified sequence
acaacttcaagggaggtgccctgtggttgccccatgcttccctcctggccaccaggaatcaggacaagcaaagaacacgacattcacagtccagggaggtcacacagtccggaaaggtacaaagggtttggagaactcacttcatttggtttgggagcctccgcaggtggacacggtctggcatcctgcacttgctgccctctgacacctgggaagatggccggcccgtggaccttcacccttctctgtggtttgctggcagccaccttgatccaagccaccctcagtcccactgcagttctcatcctcggcccaaaagtcatcaaagaaaagctgacacaggagctgaaggaccacaacgccaccagcatcctgcagcagctgccgctgctcagtgccatgcgggaaaagccagccggaggcatccctgtgctgggcagcctggtgaacaccgtcctgaagcacatcatctggctgaaggtcatcacagctaacatcctccagctgcaggtgaagccctcggccaatgaccaggagctgctagtcaagatccccctggacatggtggctggattcaacacgcccctggtcaagaccatcgtggagttccacatgacgactgaggcccaagccaccatccgcatggacaccagtgcaa

SEQ ID NO: 227689 - DNA, 477 bp, Artificial Sequence
  derived and/or modified sequence
atgtgttgcccgggagggcattacacactcattttgcggagaggcaatcgttttcgacgagagaagcgtcctgctaaagtcaccggcgcacagaccgaagtacagctcgcgccccccttaccacgcggtagggctcgcagatcgccatggtcagtacccattagtctttccattgataggctggagttcgatctgttataccccgccatcaagggtgacacaatccaactttacttgggcgccaaactgctggactcgcagggcaaggtcactaaatggttcaataactccgctgcttcacttactatgccaacgctcgataacatccccttctcattaatcgtatctcaggacgtagttaaagcagcagtcgcagccgtgttatccccagaagagttcatggtgctgttagattctgtgctgccagagagcgcacatcgcctgaagtcttctataggtctgattaacgaaaagtag

SEQ ID NO: 227690 - DNA, 444 bp, Artificial Sequence
  derived and/or modified sequence
atggccggtccatggacttttacactgctgtgtggccttctagcggccactctgatccaggccaccctatcgcctaccgccgttctgatcctgggacctaaggtgatcaaggaaaaactaacgcaagagctgaaagaccacaacgccacttcaattcttcaacagttaccacttctatctgccatgcgcgaaaaacccgccgggggaatacccgtcctgggatcgctcgttaacaccgttttgaagcatatcatatggttgaaagtgatcactgcaaatattcttcaactacaggtaaagccaagcgccaacgatcaggagctgttagtgaaaatccccctggatatggtggctggctttaacaccccacttgtcaagactatcgtagaattccacatgacaactgaggcacaagcaacaatccgcatggacaccagtgcctag

SEQ ID NO: 227691 - DNA, 1455 bp, Artificial Sequence
  derived and/or modified sequence
atggccggtccatggacatttaccctgctgtgcggtctgttagcagctaccctgatacaggcgacattatctcccacagctgtattaattctgggccctaaggtgattaaggagaagctgactcaagagctgaaggaccataacgctacgtcgattctccagcagcttccacttctaagcgccatgcgagaaaaacccgccggaggcatccctgtcttaggaagtttagtcaacaccgtgttgaagcatatcatctggctgaaagtcattaccgcaaatatcctgcagttacaggtgaagcccagcgcgaacgatcaggagctgttagtcaaaatacccctggacatggtggccggcttcaatacacctctcgtgaagacaattgtggagtttcatatgaccactgaggcccaggctacgattaggatggatacatctgctagtggacccacacggctcgtactgtccgactgcgcaaccagccatggaagtctgcgaattcaacttttgcataaactgtcctttctcgtcaacgctctggccaaacaagtcatgaatttactcgtgcccagcctccccaacctcgtcaagaaccagctctgccccgtgatagaggcttctttcaacggtatgtacgctgatctgcttcaactggtcaaggtccccatatcactttcaatagacaggctggagtttgacttactgtaccccgctattaaaggcgacactattcaactttatcttggcgctaaacttctggattcccaagggaaggtgactaagtggttcaacaactctgcagcatctctcaccatgccaacactcgataatatccctttttctctcatcgtgtctcaagacgtcgttaaagcagcagtcgccgccgtgttgtcacccgaagaatttatggtactgttagactcagtacttcccgagtcagctcacaggctgaaaagtagtattggcttgatcaatgaaaaggctgcagataagttgggctcaacccagatagtaaaaatcttgacacaagacacaccagaatttttcatcgaccagggtcacgccaaggtagctcaactgatcgtgctcgaagtttttccttcttccgaagctctgcgtcctctttttacactagggatcgaggcttcttcagaagctcagttttacacgaaaggcgaccagctgatcctgaatctcaataatatttcatcagataggatacagcttatgaattctgggataggatggtttcaaccagatgttcttaaaaacataataaccgagattatacattcaatcctgctccccaatcaaaacggcaagctaaggtcaggggtgccagttagtttagtcaaagcattgggatttgaggcagcagaaagctctctgaccaaagacgccctggtgctaacacctgccagcctgtggaagccctcgagcccagtaagtcagtag

SEQ ID NO: 227692 - DNA, 477 bp, Artificial Sequence
  derived and/or modified sequence
atgtgttgtccaggcggccattataccttgatcctgagaaggggaaatagatttagacgagagaagcgccctgccaaggtcactggagctcaaaccgaggtgcagctcgctcctcccctgccccgcggccgtgccagacgaagcccttggtcagtcccaatcagcttaagcatcgaccggctggagtttgatctactgtatcccgctatcaagggggacacaattcagttatacctgggggcaaagcttttggattcgcagggcaaggtcacgaagtggtttaacaactctgctgcatcactcaccatgcccaccttggacaatatacccttttctcttattgtgagtcaagatgtagttaaagctgcggtcgccgctgttctgagtcccgaagaattcatggtgctactagacagtgtccttcccgaatccgcccatagattaaaatcatcaataggactgataaatgagaaatag

SEQ ID NO: 227693 - DNA, 444 bp, Artificial Sequence
  derived and/or modified sequence
atggccggtccatggacttttacactgctgtgtggccttctagcggccactctgatccaggccaccctatcgcctaccgccgttctgatcctgggacctaaggtgatcaaggaaaaactaacgcaagagctgaaagaccacaacgccacttcaattcttcaacagttaccacttctatctgccatgcgcgaaaaacccgccgggggaatacccgtcctgggatcgctcgttaacaccgttttgaagcatatcatatggttgaaagtgatcactgcaaatattcttcaactacaggtaaagccttccgctaacgaccaagagcttcttgttaaaattccccttgacatggtggctggattcaatacacccctggtgaagaccattgtagagtttcatatgactactgaggcccaggcaacgatccggatggatacttccgcttag

SEQ ID NO: 227694 - DNA, 1727 bp, Artificial Sequence
  derived and/or modified sequence
ggtctgaggcctctgcctaaagacaaagcctgtgctggggtgtgcaggatataaggttggacttccagacccactgcccgggagaggagaggagcgggccgaggactccagcgtgcccaggtctggcatcctgcacttgctgccctctgacacctgggaagatggccggcccgtggaccttcacccttctctgtggtttgctggcagccaccttgatccaagccaccctcagtcccactgcagttctcatcctcggcccaaaagtcatcaaagaaaagctgacacaggagctgaaggaccacaacgccaccagcatcctgcagcagctgccgctgctcagtgccatgcgggaaaagccagccggaggcatccctgtgctgggcagcctggtgaacaccgtcctgaagcacatcatctggctgaaggtcatcacagctaacatcctccagctgcaggtgaagccctcggccaatgaccaggagctgctagtcaagatccccctggacatggtggctggattcaacacgcccctggtcaagaccatcgtggagttccacatgacgactgaggcccaagccaccatccgcatggacaccagtgcaagtggccccacccgcctggtcctcagtgactgtgccaccagccatgggagcctgcgcatccaactgctgcataagctctccttcctggtgaacgccttagctaagcaggtcatgaacctcctagtgccatccctgcccaatctagtgaaaaaccagctgtgtcccgtgatcgaggcttccttcaatggcatgtatgcagacctcctgcagctggtgaaggtgcccatttccctcagcattgaccgtctggagtttgaccttctgtatcctgccatcaagggtgacaccattcagctctacctgggggccaagttgttggactcacagggaaaggtgaccaagtggttcaataactctgcagcttccctgacaatgcccaccctggacaacatcccgttcagcctcatcgtgagtcaggacgtggtgaaagctgcagtggctgctgtgctctctccagaagaattcatggtcctgttggactctgtgcttcctgagagtgcccatcggctgaagtcaagcatcgggctgatcaatgaaaaggctgcagataagctgggatctacccagatcgtgaagatcctaactcaggacactcccgagttttttatagaccaaggccatgccaaggtggcccaactgatcgtgctggaagtgtttccctccagtgaagccctccgccctttgttcaccctgggcatcgaagccagctcggaagctcagttttacaccaaaggtgaccaacttatactcaacttgaataacatcagctctgatcggatccagctgatgaactctgggattggctggttccaacctgatgttctgaaaaacatcatcactgagatcatccactccatcctgctgccgaaccagaatggcaaattaagatctggggtcccagtgtcattggtgaaggccttgggattcgaggcagctgagtcctcactgaccaaggatgcccttgtgcttactccagcctccttgtggaaacccagctctcctgtctcccagtgaagacttggatggcagccatcagggaaggctgggtcccagctgggagtatgggtgtgagctctatagaccatccctctctgcaatcaataaacacttgcctgtgatgcctgc

SEQ ID NO: 227695 - DNA, 1455 bp, Artificial Sequence
  derived and/or modified sequence
atggccggcccctggaccttcaccctgctgtgcggcctgctggccgccaccctgatccaggccaccctgagccccaccgccgtgctgatcctgggccccaaggtgatcaaggagaagctgacccaggagctgaaggaccacaacgccaccagcatcctgcagcagctgcccctgctgagcgccatgagagagaagcccgccggcggcatccccgtgctgggcagcctggtgaacaccgtgctgaagcacatcatctggctgaaggtgatcaccgccaacatcctgcagctgcaggtgaagcccagcgccaacgaccaggagctgctggtgaagatccccctggacatggtggccggcttcaacacccccctggtgaagaccatcgtggagttccacatgaccaccgaggcccaggccaccatcagaatggacaccagcgccagcggccccaccagactggtgctgagcgactgcgccaccagccacggcagcctgagaatccagctgctgcacaagctgagcttcctggtgaacgccctggccaagcaggtgatgaacctgctggtgcccagcctgcccaacctggtgaagaaccagctgtgccccgtgatcgaggccagcttcaacggcatgtacgccgacctgctgcagctggtgaaggtgcccatcagcctgagcatcgacagactggagttcgacctgctgtaccccgccatcaagggcgacaccatccagctgtacctgggcgccaagctgctggacagccagggcaaggtgaccaagtggttcaacaacagcgccgccagcctgaccatgcccaccctggacaacatccccttcagcctgatcgtgagccaggacgtggtgaaggccgccgtggccgccgtgctgagccccgaggagttcatggtgctgctggacagcgtgctgcccgagagcgcccacagactgaagagcagcatcggcctgatcaacgagaaggccgccgacaagctgggcagcacccagatcgtgaagatcctgacccaggacacccccgagttcttcatcgaccagggccacgccaaggtggcccagctgatcgtgctggaggtgttccccagcagcgaggccctgagacccctgttcaccctgggcatcgaggccagcagcgaggcccagttctacaccaagggcgaccagctgatcctgaacctgaacaacatcagcagcgacagaatccagctgatgaacagcggcatcggctggttccagcccgacgtgctgaagaacatcatcaccgagatcatccacagcatcctgctgcccaaccagaacggcaagctgagaagcggcgtgcccgtgagcctggtgaaggccctgggcttcgaggccgccgagagcagcctgaccaaggacgccctggtgctgacccccgccagcctgtggaagcccagcagccccgtgagccagtag

SEQ ID NO: 227696 - DNA, 477 bp, Artificial Sequence
  derived and/or modified sequence
atgtgctgccccggcggccactacaccctgatcctgagaagaggcaacagattcagaagagagaagagacccgccaaggtgaccggcgcccagaccgaggtgcagctggccccccccctgcccagaggcagagccagaagaagcccctggagcgtgcccatcagcctgagcatcgacagactggagttcgacctgctgtaccccgccatcaagggcgacaccatccagctgtacctgggcgccaagctgctggacagccagggcaaggtgaccaagtggttcaacaacagcgccgccagcctgaccatgcccaccctggacaacatccccttcagcctgatcgtgagccaggacgtggtgaaggccgccgtggccgccgtgctgagccccgaggagttcatggtgctgctggacagcgtgctgcccgagagcgcccacagactgaagagcagcatcggcctgatcaacgagaagtag

SEQ ID NO: 227697 - DNA, 444 bp, Artificial Sequence
  derived and/or modified sequence
atggccggcccctggaccttcaccctgctgtgcggcctgctggccgccaccctgatccaggccaccctgagccccaccgccgtgctgatcctgggccccaaggtgatcaaggagaagctgacccaggagctgaaggaccacaacgccaccagcatcctgcagcagctgcccctgctgagcgccatgagagagaagcccgccggcggcatccccgtgctgggcagcctggtgaacaccgtgctgaagcacatcatctggctgaaggtgatcaccgccaacatcctgcagctgcaggtgaagcccagcgccaacgaccaggagctgctggtgaagatccccctggacatggtggccggcttcaacacccccctggtgaagaccatcgtggagttccacatgaccaccgaggcccaggccaccatcagaatggacaccagcgcctag

SEQ ID NO: 227698 - DNA, 1455 bp, Artificial Sequence
  derived and/or modified sequence
atggcaggcccctggaccttcactctgctgtgcggtctcttagccgccacgctgattcaagcgactctcagccctaccgcggtattgatcctgggccctaaagtgatcaaggaaaagctaacacaggaacttaaagatcacaatgccacctctattctacagcagttgcctttactcagcgccatgcgcgaaaagcctgcgggaggaatcccggtgctgggaagtctcgtgaacacggtgcttaaacacattatctggctcaaggtgattacagccaatatcttacagctgcaggtgaaaccaagtgccaacgatcaggagctgcttgtgaagatccctctagacatggtcgcgggcttcaatacacctctggtgaagactattgtggagttccacatgacaacggaggcccaggctaccattcgtatggacacaagcgcctctgggcccacgcggctggttctttccgactgtgcgacatcccatggttcgctccgtattcagttactacacaagctgagcttcctggtaaatgccttagcaaagcaagttatgaacctgttggtaccaagcctccccaatctggtgaagaatcagctgtgccccgtcatcgaggccagttttaacggaatgtatgccgatttgctgcagctcgtcaaggtccctatcagcctttctatagaccgccttgaattcgatctcctataccccgcaatcaagggcgacactatccaattatacctcggagctaagttactagactcgcaagggaaggtgactaaatggttcaacaactccgccgcatccctgactatgcccaccctagataatattccctttagtttgatcgtgtcccaagatgttgtcaaggcggcagtggccgctgtactcagtccggaagaattcatggtcctcctggattcagtgttgcccgagagcgcccaccgccttaaaagctccatagggctgatcaacgagaaagccgctgacaagctggggagcacccagatcgttaaaatactgacacaggataccccagagttctttattgaccagggacacgcaaaggtagcccagctaattgtcctggaggtgttcccgagcagcgaggctctcaggcccctcttcacactcggaattgaagcctcttccgaggcgcagttctacacaaagggcgatcagctgatactgaatcttaataacatctcaagcgatcgtatccaactgatgaattctggtataggctggttccaacccgatgtgctcaagaacatcattacggaaatcatccacagtatcttgttgcctaaccagaatgggaagctgcgatccggtgttccagtgagccttgttaaagccttgggattcgaggcagcagaatcaagcctgacaaaagatgctctggttctgaccccagctagcctgtggaaaccgagctctccggtgtctcagtag

SEQ ID NO: 227699 - DNA, 477 bp, Artificial Sequence
  derived and/or modified sequence
atgtgttgcccaggagggcactacactctgatactccgacgcggcaacaggttccggcgagaaaaaaggccggctaaggtgactggtgcccaaaccgaggttcagcttgccccccccctcccccgggggagggccagacgctcgccatggtccgtaccaattagccttagtatagatcggctcgagttcgacttgctgtatccagctattaagggcgacacaatccagctctacttaggcgcgaagctgctcgatagccagggtaaagttacaaagtggtttaacaattccgccgcatcactcaccatgccgactctcgacaacatccctttcagcctcatcgtgtcgcaggatgttgtgaaagccgctgttgcggccgtgctttcacccgaggaattcatggtcctgctggattccgtgctgcctgagtccgcccacagattgaaatccagcattggactcattaacgagaagtag

SEQ ID NO: 227700 - DNA, 444 bp, Artificial Sequence
  derived and/or modified sequence
atggcgggaccatggacttttacgctgttgtgcggactgctagctgctacactcatccaggccaccctgtccccaacggctgtgctgatccttgggcctaaggtcattaaggagaaactcacccaagagcttaaggaccacaacgcgaccagcatcttgcaacaattgccgctactatccgccatgagagagaaaccggctggtgggatccccgtcttgggcagtctggttaatacggtgctgaaacatattatttggctcaaggtgattaccgccaacatactccagctccaggtcaaaccatcagcaaatgaccaggaacttcttgtgaaaattcccctggacatggttgccggttttaatacccctctagtgaagaccatcgttgaatttcacatgaccacagaggcccaagccaccattagaatggacacatctgcttag

SEQ ID NO: 227701 - DNA, 1455 bp, Artificial Sequence
  derived and/or modified sequence
atggccggcccctggaccttcaccctgctgtgtggcctgctggccgccaccctcatccaggccaccctgagccccacagctgtgctgatcctgggccccaaggtgatcaaggagaagctgacccaggagctgaaggaccacaatgccaccagcatcctgcagcagctgcccctgctgagcgccatgagggagaagccagctgggggcatccctgtgctgggcagcctggtgaacacagtgctgaagcacatcatctggctgaaggtgatcacagccaacatcctgcagctgcaggtgaagcccagcgccaatgaccaggagctgctggtgaagatccccctggacatggtggccggcttcaacacccccctggtgaagaccatcgtggagttccacatgaccacagaggcccaggccaccatccgcatggacaccagcgccagcggccccacccggctggtgctgagtgactgtgccaccagccacggcagcctgcgcatccagctgctgcacaagctgtccttcctggtgaatgccctggccaagcaggtgatgaacctgctggtgcccagcctgcccaacctggtgaagaaccagctgtgccctgtgattgaggccagcttcaacggcatgtatgctgacctgctgcagctggtgaaggtgcccatcagcctgagcattgaccggctggagtttgacctgctgtacccagccatcaagggggacaccatccagctgtacctgggcgccaagctgctggacagccagggcaaggtgaccaagtggttcaacaacagcgctgccagcctgaccatgcccaccctggacaacatccccttcagcctgattgtgtcccaggatgtggtgaaggctgctgtggccgctgtgctgagccctgaggagttcatggtgctgctggacagcgtgctgcctgagagcgcccaccggctgaagagcagcatcggcctcatcaatgagaaggctgctgacaagctgggcagcacccagatcgtgaagatcctgacccaggacaccccagagttcttcatcgaccagggccacgccaaggtggcccagctgattgtgctggaggtgttccccagcagcgaggccctgcggcccctcttcaccctgggcatcgaggccagcagcgaggcccagttctacaccaagggggaccagctgatcctgaacctgaacaacatcagcagtgaccgcatccagctgatgaacagcggcatcggctggttccagccagatgtgctgaagaacatcatcacagagatcatccacagcatcctgctgcccaaccagaatggcaagctgcggtctggagtgcctgtgtccctggtgaaggccctgggctttgaggccgctgagagcagcctgaccaaggatgccctggtgctgaccccagccagcctgtggaagcccagcagccctgtgtcccagtag

SEQ ID NO: 227702 - DNA, 477 bp, Artificial Sequence
  derived and/or modified sequence
atgtgctgccctgggggccactacaccctcatcctgcggcggggcaaccgcttcagaagagagaagaggcctgccaaggtgactggagcccagacagaggtgcagctggccccacccctgccccggggccgggcccggcgcagcccctggagcgtgcccatcagcctgagcattgaccggctggagtttgacctgctgtacccagccatcaagggggacaccatccagctgtacctgggcgccaagctgctggacagccagggcaaggtgaccaagtggttcaacaacagcgctgccagcctgaccatgcccaccctggacaacatccccttcagcctcatcgtgtcccaggatgtggtgaaggctgctgtggccgctgtgctgagccctgaggagttcatggtgctgctggacagcgtgctgcctgagagcgcccaccggctgaagagcagcatcggcctcatcaatgagaagtag

SEQ ID NO: 227703 - DNA, 444 bp, Artificial Sequence
  derived and/or modified sequence
atggccggcccctggaccttcaccctgctgtgtggcctgctggccgccaccctcatccaggccaccctgagccccacagctgtgctgatcctgggccccaaggtgatcaaggagaagctgacccaggagctgaaggaccacaatgccaccagcatcctgcagcagctgcccctgctgagcgccatgagggagaagccagctgggggcatccctgtgctgggcagcctggtgaacacagtgctgaagcacatcatctggctgaaggtgatcacagccaacatcctgcagctgcaggtgaagcccagcgccaatgaccaggagctgctggtgaagatccccctggacatggtggccggcttcaacacccccctggtgaagaccatcgtggagttccacatgaccacagaggcccaggccaccatccgcatggacaccagcgcctag

SEQ ID NO: 227704 - DNA, 1059 bp, Artificial Sequence
  derived and/or modified sequence
atgtgctgccctggcgggcactataccctcattttaagacgaggaaacagattcagacgcgagaagagaccagccaaggtcactggggctcaaaccgaagtccagctggctcctccgctgccccgaggacgggcccggaggtctccctggagcgtgcccatttccctcagcattgaccgtctggagtttgaccttctgtatcctgccatcaagggtgacaccattcagctctacctgggggccaagttgttggactcacagggaaaggtgaccaagtggttcaataactctgcagcttccctgacaatgcccaccctggacaacatcccgttcagcctcatcgtgagtcaggacgtggtgaaagctgcagtggctgctgtgctctctccagaagaattcatggtcctgttggactctgtgcttcctgagagtgcccatcggctgaagtcaagcatcgggctgatcaatgaaaaggctgcagataagctgggatctacccagatcgtgaagatcctaactcaggacactcccgagttttttatagaccaaggccatgccaaggtggcccaactgatcgtgctggaagtgtttccctccagtgaagccctccgccctttgttcaccctgggcatcgaagccagctcggaagctcagttttacaccaaaggtgaccaacttatactcaacttgaataacatcagctctgatcggatccagctgatgaactctgggattggctggttccaacctgatgttctgaaaaacatcatcactgagatcatccactccatcctgctgccgaaccagaatggcaaattaagatctggggtcccagtgtcattggtgaaggccttgggattcgaggcagctgagtcctcactgaccaaggatgcccttgtgcttactccagcctccttgtggaaacccagctctcctgtctcccagtgaagacttggatggcagccatcagggaaggctgggtcccagctgggagtatgggtgtgagctctatagaccatccctctctgcaatcaataaacacttgcctgtgatgcctgc

SEQ ID NO: 227705 - DNA, 1455 bp, Artificial Sequence
  derived and/or modified sequence
atggccggcccctggaccttcaccctgctgtgcggcctgctggccgccaccttgattcaggctaccctttcgccgactgctgtcctgattctgggtcccaaagtcatcaaagagaagttaactcaagaactgaaagaccacaatgctacgtctatactccagcagttgccactgttgagcgcaatgcgggaaaaacccgctggtggaattcccgtgctaggatctctagtcaacacagtgctgaagcacatcatatggcttaaggtgattacagcaaacatcctgcagctgcaggtgaaaccttcagccaacgatcaggagctcctggtgaagattcctttggacatggtcgccggctttaacaccccactcgtgaagaccatcgtcgagtttcatatgaccaccgaagcccaggcaaccattcgcatggacacctcagctagcggcccgactcgactggttctttcggattgcgcaacttctcacgggtcactgcgaattcagctgctgcataaattgagtttcttggtcaacgccttggcgaaacaggtcatgaatctactggtgccctctctaccaaatctcgtgaagaatcagctctgccccgtcatcgaagcaagctttaatggaatgtatgccgatctcttacaacttgtcaaggtcccaatttcactgtccatcgatcggttagagtttgacctgctttatccagcaataaagggcgacactatccagttgtacctcggagccaagctgctagattctcaagggaaagtcactaaatggtttaataattctgctgccagcctgactatgcccaccctcgataatattccattctcactgatagtctctcaggatgtcgtgaaagccgctgtcgctgcagtgttgtcacctgaggagttcatggttctcctcgatagcgttctgccggagtcagcccatcgccttaaaagctcgattggacttataaatgagaaagcagccgacaagctgggcagcacccagatagtgaagatactgacccaggacacgccagagttctttatcgatcagggacatgcgaaggtggctcagctgatcgttctagaagtcttcccaagctctgaagcactgcgacctttgtttaccctgggcatcgaggcatcgagcgaggcacaattctacacaaagggtgaccagctgattcttaacctcaacaacatcagcagcgatagaatccaactcatgaattctggcatcggatggtttcagccagacgttctcaagaacatcatcaccgagattattcactctatcctgctccccaaccagaatggcaagctgcgcagcggagtacctgtgtctttggtcaaggcactaggtttcgaggcagctgagtccagtctaaccaaggacgccttggtactgaccccagcgagcttgtggaagccgagctcccctgtctctcagtag

SEQ ID NO: 227706 - DNA, 477 bp, Artificial Sequence
  derived and/or modified sequence
atgtgctgccccggcggccactacaccctgatcctgcggcggggcaatcggtttaggcgggagaagcggcctgcaaaagttacaggtgcccaaaccgaagtccagctggctcctccactgccgagagggcgagcaaggcgaagtccatggagcgtcccaatcagcctctctatcgatcggttggagttcgacctcttgtatcccgccattaaaggcgataccatccagttatacctgggagcaaagctcctggatagccagggcaaggtgacaaagtggttcaataactccgctgcctcgcttactatgcctaccctggacaatatcccgttctcattaattgtgtctcaggatgtagtcaaagccgccgtagcagcagttctgagccccgaagaattcatggttttactcgactcggtgctccctgagagcgcccacagactgaagagcagcatcggacttatcaacgagaagtag

SEQ ID NO: 227707 - DNA, 444 bp, Artificial Sequence
  derived and/or modified sequence
atggccggcccctggaccttcaccctgctgtgcggcctgctggccgccacattaatccaggcaactttatcccctacggctgtgctgatcctggggcctaaggtcataaaggagaagttgacccaggagcttaaagaccacaatgcaacaagcatcctgcaacagcttcctctgctgagcgcaatgagggagaagcccgcaggcgggatccccgtcctgggcagtctagtgaacaccgtactgaaacacataatttggctaaaagtgattacggctaacatcctgcaattgcaggtaaaaccaagcgctaacgaccaggagcttttggttaagatccctctggacatggtcgctggattcaatacccccctcgtgaagaccatagtggagttccatatgaccactgaggcccaggcgaccattagaatggacacgagtgcatag

SEQ ID NO: 227708 - RNA, 1455 nt, Artificial Sequence
  derived and/or modified sequence
auggcuggcccauggacguuuacccuguugugcggccuucuggcugccacgcuuauucaggccacgcugagcccuacugcuguucugauucuugguccaaaagucauaaaagagaagcucacucaggagcugaaggaccacaacgcuaccagcauuuugcagcaguugccacuccugucugccaugcgcgaaaaacccgccggcgguauuccugugcugggaucacuggugaauacaguccucaagcacaucauuugguuaaaagugaucacugcuaauauucugcaacugcaggucaaacccucugccaacgaccaggaacuccuaguuaaaauaccccuugauauggucgcagguuucaacacacccuuagucaagaccaucguugaauuucacaugaccacugaggcccaggccacgauucguauggauaccuccgcauccggacccacccgguuaguacucucugacugugcuaccagccaugggucccugcggauccagcugcugcacaagcucagcuuucucguuaaugcacuggccaagcagguuaugaacuugcuggucccuagcuugcccaaucuagugaagaaccaauugugcccaguuauugaagcuagcuuuaauggcauguacgccgaucuccuacagcugguaaaggugccaaucucguuaucgauagaccgacuggaguucgaucuccuauauccggcaauaaaaggcgauaccauucaauuguacuugggugccaagcugcuggacucccaggguaaaguuacaaagugguucaauaacucugcagcaagucucacuaugccuacacuggacaauauaccauuuucccugaucguaucccaagacguugugaaggcggccguugccgcaguucuaucacccgaagaguucaugguucuguuagacucuguccuuccggaaagcgcgcaccggcugaaaagcucuaucggauuaaucaacgaaaaagcagccgacaaacugggaucuacccagaucgugaaaauccugacacaggacaccccagaguuuuucaucgaccaggggcaugccaagguggcccaauuaaucguuuuagaaguuuuccccuccagcgaagcccugcguccacucuucacccuggguauugaggcuagcagcgaagcucaauucuacacaaaaggagaccagcucaucuugaacuugaacaauaucuccagcgaccgcauacaacuaaugaacucuggcauuggcugguuccagcccgacguccucaagaauauuaucacagagaucauacacucaauccuucuaccuaaucaaaacgguaaacugcgcucuggugugccggugagucuugugaaggcccugggauuugaagccgcagaguccagccugaccaaagacgcucuagugcucacacccgcaagucuauggaaaccuagcagccccguuucgcaguag

SEQ ID NO: 227709 - RNA, 477 nt, Artificial Sequence
  derived and/or modified sequence
auguguugcccgggagggcauuacacacucauuuugcggagaggcaaucguuuucgacgagagaagcguccugcuaaagucaccggcgcacagaccgaaguacagcucgcgccccccuuaccacgcgguagggcucgcagaucgccauggucaguacccauuagucuuuccauugauaggcuggaguucgaucuguuauaccccgccaucaagggugacacaauccaacuuuacuugggcgccaaacugcuggacucgcagggcaaggucacuaaaugguucaauaacuccgcugcuucacuuacuaugccaacgcucgauaacauccccuucucauuaaucguaucucaggacguaguuaaagcagcagucgcagccguguuauccccagaagaguucauggugcuguuagauucugugcugccagagagcgcacaucgccugaagucuucuauaggucugauuaacgaaaaguag

SEQ ID NO: 227710 - RNA, 444 nt, Artificial Sequence
  derived and/or modified sequence
auggccgguccauggacuuuuacacugcuguguggccuucuagcggccacucugauccaggccacccuaucgccuaccgccguucugauccugggaccuaaggugaucaaggaaaaacuaacgcaagagcugaaagaccacaacgccacuucaauucuucaacaguuaccacuucuaucugccaugcgcgaaaaacccgccgggggaauacccguccugggaucgcucguuaacaccguuuugaagcauaucauaugguugaaagugaucacugcaaauauucuucaacuacagguaaagccaagcgccaacgaucaggagcuguuagugaaaaucccccuggauaugguggcuggcuuuaacaccccacuugucaagacuaucguagaauuccacaugacaacugaggcacaagcaacaauccgcauggacaccagugccuag

SEQ ID NO: 227711 - RNA, 1455 nt, Artificial Sequence
  derived and/or modified sequence
auggccgguccauggacauuuacccugcugugcggucuguuagcagcuacccugauacaggcgacauuaucucccacagcuguauuaauucugggcccuaaggugauuaaggagaagcugacucaagagcugaaggaccauaacgcuacgucgauucuccagcagcuuccacuucuaagcgccaugcgagaaaaacccgccggaggcaucccugucuuaggaaguuuagucaacaccguguugaagcauaucaucuggcugaaagucauuaccgcaaauauccugcaguuacaggugaagcccagcgcgaacgaucaggagcuguuagucaaaauaccccuggacaugguggccggcuucaauacaccucucgugaagacaauuguggaguuucauaugaccacugaggcccaggcuacgauuaggauggauacaucugcuaguggacccacacggcucguacuguccgacugcgcaaccagccauggaagucugcgaauucaacuuuugcauaaacuguccuuucucgucaacgcucuggccaaacaagucaugaauuuacucgugcccagccuccccaaccucgucaagaaccagcucugccccgugauagaggcuucuuucaacgguauguacgcugaucugcuucaacuggucaagguccccauaucacuuucaauagacaggcuggaguuugacuuacuguaccccgcuauuaaaggcgacacuauucaacuuuaucuuggcgcuaaacuucuggauucccaagggaaggugacuaagugguucaacaacucugcagcaucucucaccaugccaacacucgauaauaucccuuuuucucucaucgugucucaagacgucguuaaagcagcagucgccgccguguugucacccgaagaauuuaugguacuguuagacucaguacuucccgagucagcucacaggcugaaaaguaguauuggcuugaucaaugaaaaggcugcagauaaguugggcucaacccagauaguaaaaaucuugacacaagacacaccagaauuuuucaucgaccagggucacgccaagguagcucaacugaucgugcucgaaguuuuuccuucuuccgaagcucugcguccucuuuuuacacuagggaucgaggcuucuucagaagcucaguuuuacacgaaaggcgaccagcugauccugaaucucaauaauauuucaucagauaggauacagcuuaugaauucugggauaggaugguuucaaccagauguucuuaaaaacauaauaaccgagauuauacauucaauccugcuccccaaucaaaacggcaagcuaaggucaggggugccaguuaguuuagucaaagcauugggauuugaggcagcagaaagcucucugaccaaagacgcccuggugcuaacaccugccagccuguggaagcccucgagcccaguaagucaguag

SEQ ID NO: 227712 - RNA, 477 nt, Artificial Sequence
  derived and/or modified sequence
auguguuguccaggcggccauuauaccuugauccugagaaggggaaauagauuuagacgagagaagcgcccugccaaggucacuggagcucaaaccgaggugcagcucgcuccuccccugccccgcggccgugccagacgaagcccuuggucagucccaaucagcuuaagcaucgaccggcuggaguuugaucuacuguaucccgcuaucaagggggacacaauucaguuauaccugggggcaaagcuuuuggauucgcagggcaaggucacgaagugguuuaacaacucugcugcaucacucaccaugcccaccuuggacaauauacccuuuucucuuauugugagucaagauguaguuaaagcugcggucgccgcuguucugagucccgaagaauucauggugcuacuagacaguguccuucccgaauccgcccauagauuaaaaucaucaauaggacugauaaaugagaaauag

SEQ ID NO: 227713 - RNA, 444 nt, Artificial Sequence
  derived and/or modified sequence
auggccgguccauggacuuuuacacugcuguguggccuucuagcggccacucugauccaggccacccuaucgccuaccgccguucugauccugggaccuaaggugaucaaggaaaaacuaacgcaagagcugaaagaccacaacgccacuucaauucuucaacaguuaccacuucuaucugccaugcgcgaaaaacccgccgggggaauacccguccugggaucgcucguuaacaccguuuugaagcauaucauaugguugaaagugaucacugcaaauauucuucaacuacagguaaagccuuccgcuaacgaccaagagcuucuuguuaaaauuccccuugacaugguggcuggauucaauacaccccuggugaagaccauuguagaguuucauaugacuacugaggcccaggcaacgauccggauggauacuuccgcuuag

SEQ ID NO: 227714 - protein, 112 aa, Artificial Sequence
  derived and/or modified sequence
MTRCALLLLMVLMLGRVLVVPVTPIPTFQLRPQNSPQTTPRPAASESPSAAPTWPWAAQSHCSPTRHPGSRIVLSLDVPIGLLQILLEQARARAAREQATTNARILARVGHC

SEQ ID NO: 227715 - DNA, 339 bp, Artificial Sequence
  derived and/or modified sequence
atgaccagatgcgccctgctgctgctgatggtgctgatgctgggcagagtgctggtggtgcccgtgacccccatccccaccttccagctgagaccccagaacagcccccagaccacccccagacccgccgccagcgagagccccagcgccgcccccacctggccctgggccgcccagagccactgcagccccaccagacaccccggcagcagaatcgtgctgagcctggacgtgcccatcggcctgctgcagatcctgctggagcaggccagagccagagccgccagagagcaggccaccaccaacgccagaatcctggccagagtgggccactgctag

SEQ ID NO: 227716 - DNA, 339 bp, Artificial Sequence
  derived and/or modified sequence
atgacaaggtgtgcccttcttctcctcatggtcctgatgctgggcagagtgctggtcgtacccgtgaccccgatcccgactttccagctgcgcccccagaattcaccccagaccacaccgagacccgcggctagcgaatccccttctgctgccccaacttggccctgggccgcacaatcccactgcagccctaccagacatcctgggagtaggatcgtgctgtctctcgacgtccccataggcctgctgcagatactgcttgaacaggccagggcgagagcagccagggagcaggctaccactaacgctcgtattctagcgagggtgggccattgctag

SEQ ID NO: 227717 - DNA, 339 bp, Artificial Sequence
  derived and/or modified sequence
atgacccgctgtgccctgctgctgctgatggtgctgatgctgggccgggtgctggtggtgcctgtgacccccatccccaccttccagctgcggccccagaacagcccccagaccacccccaggcctgctgccagcgagagccccagcgctgcccccacctggccctgggccgcccagagccactgcagccccaccaggcaccctggcagccgcatcgtgctgagcctggatgtgcccatcggcctgctgcagatcctgctggagcaggcccgggcccgggccgcccgggagcaggccaccaccaatgcccgcatcctggcccgggtgggccactgctag

SEQ ID NO: 227718 - DNA, 339 bp, Artificial Sequence
  derived and/or modified sequence
atgacccggtgcgccctgctgctgctgatggtgctgatgctgggccgtgtcttggtagttccagttacgcccatcccaaccttccaactgcgtccacagaacagcccccagaccacaccacggccagctgcatccgagagtccgtccgccgctcctacttggccctgggcggcccaatctcactgctccccgacaagacacccagggtcgcgaatagtcctgagtttagatgtaccgatcggattgctgcagattctgttggaacaggcccgtgctagagcagctcgagaacaagccactactaacgctcgcatcctcgcacgggtgggccactgctag

SEQ ID NO: 227719 - DNA, 339 bp, Artificial Sequence
  derived and/or modified sequence
atgactcgctgcgccctgcttctactgatggtgttaatgttgggaagggtgctggtagtgccagtaacccccattcctacatttcagttgcgacctcagaacagtccccaaacaacacccaggccggctgccagtgagtctccttctgcggctccaacgtggccctgggcagctcagagccattgctcccccacaagacatccagggagtcgcatcgtgctgagtctcgatgtaccaatagggctcctgcaaatacttttagagcaggcacgcgctcgggcagcccgtgagcaggctacaactaatgctcgcatcctagcccgagtgggccactgttag

SEQ ID NO: 227720 - DNA, 1481 bp, Artificial Sequence
  derived and/or modified sequence
ggacagtagtgcctggccccagccccaggcagccacagcaggctgccttaccccagaagcagctggtggcgcctgacctcacgatgaccaggtgtgctctgctgttgctgatggtcctgatgttgggcagagtcctggttgtcccagtgacccctatcccaaccttccagctccgccctcagaattctccccagaccactccccgacctgcggcctcagagagcccctcagctgctcccacatggccgtgggctgcccagagccactgcagccccacccgccaccctggctcgcgcattgtcctatcgctggatgtccccatcggcctcttgcagatcttactggagcaagcccgggccagggctgccagggagcaggccaccaccaacgcccgcatcctggcccgtgtcggccactgctgagcctgagagagggggtcacagtgatagggccaccctggatgggaagacctggagggcagccacacagctggacggatgctgccacatctgggcatacagtgtctggacgctgccacatctgggcatacagtgtctggacactgccacatggagccactgtcatgcaggtcatatcagatctgagtgccccacagagtcacagtgtgtctggacagcctggacattggacattgctaagttgggtcactgccacatggagtcttgccatgcctgtgtgccccacagacctaatatatgtccggacagcttggatgctgccacgtaaggtcactgctgtggcgagtcttgctatgtctgggtgccccatagtcacagaacacctggacaccgccacatgcagtcatcatcatgttactttcaggagcctcaacacgagagctcaacactgcctccgaccagtccctctgaggcccacaggtctgtcatcccataggccaccacacagagaaatgctggctgagggtcacttgcttgctctgtgccccatgaggcagcacctgccccagatggacggggctgtgaggggtgtctccaggcacaaaggcccgaacacaggaagcctgtgaccatggcagccttgtcttatgggcgcatatgtgcgtgtgtggctgagtctctgacagctgtgagtgtgtgtgagcagggtaagggtacgtgaggggtctgagaggagtgggtgcttgtcccccaaacctgcatgaagcaagaacaactcctggccaggccctgtcctccccacgtacccctgcatccccagcctcgacccagggacatgcagggctcacaggagacagggctcaggctgccggagctccaaccaaactctgtcccacttcacgcacggactgtcctgggcaaaggtgttcacctttccgagcctcggtttccttatctgtaaagcaaagcgacaccagcaagcctgtgagcattgtgtatatagcagacatggaggtcctgcagcaggaggtgctcaataaacacaaagcgactgaaggatgg

SEQ ID NO: 227721 - protein, 206 aa, Artificial Sequence
  derived and/or modified sequence
MEVDINGESRSTLTTLPFPGAEANSPGKAEAEKPRCSSTPCSPMRRTVSGYQILHMDSNYLVGFTTGEELLKLAQKCTGGEESKAEAMPSLRSKQLDAGLARSSRLYKTRSRYYQPYEIPAVNGRRRRRMPSSGDKCTKSLPYEPYKALHGPLPLCLLKGKRAHSKSLDYLNLDKMIKEPADTEVLQYQLQHLTLRGDRVFARNNT

SEQ ID NO: 227722 - DNA, 3049 bp, Artificial Sequence
  derived and/or modified sequence
ggaggcggaggagggggcggggactaagcagggcggtagctggcgccgagcgcggtgggagaggagagggtacccggctggctcggctggcggcctctgcctggatctcggcgccgcagtcctgcgcctctcccgcccctgtctcccgctccgcagccccgggcacggcggaggcagcggagccctgggccatcgtacctggagtagaacagaaaaattattatgtctgtgttcccttgggactcattggaaattgtacagtgacatcttctgggatttagtctggattgtgcagactggtgcttaaaatggaagtcgatattaatggagagtctagaagtaccctgaccaccttgcccttccctggggctgaggccaactccccgggaaaggcggaggcagagaagccccgctgctccagcacaccctgctccccgatgcggaggaccgtgtcaggctaccagatcctacacatggactctaactatttggttggcttcacgactggcgaggaactcctgaagttagctcagaagtgcacaggaggtgaagagagcaaagcagaagccatgccatccttacgctccaaacagctagatgcaggacttgcccgttcctctcgtttgtataaaaccagaagtaggtactaccagccatacgagattccagctgtcaatggcaggaggcgaaggcggatgccaagctcaggagacaagtgcactaaatctttaccttatgaaccttacaaggccctccatgggcctctgcctctttgtcttcttaaaggtaagagggctcactccaaatctctggactacctcaatctagataaaatgatcaaggagccagctgatacagaagtgctacagtaccagcttcaacacctaaccctccgaggggaccgtgtgtttgctaggaataatacatgaatgacttggagagagcttaaaccaatttaggtcagcctacgcttggctagaaaaaacccactgctgtactctgtacatgactcttcacactatagatggttatatcagctaagtgttcctggaacataaaaattgtttgggtcaaatttgaatacaggaatgaaatcacaggtacttgggggggggatatcattctagagcacgcaactgcaaagaaaacagaatgttgactgttagtttgtatagctttttagctaggaaaaaaaggctttggtacagtaatttcatctttatgattctgacactcaaattgggaatgttacctgcttggttgttgctgacttgatatgattcattagaaatttatatcttcagtactcaagtacttcttgaatctctgtattttactataaaatgtatgtaatgatttgttttatgaaatttagaacttgaacattgctgaattggaccactttttatttttaaatattgagtttaaatattttataactggttttgcactgaaaaaattaacatttcagattgacaagagagtaatctttcttcacttgcctcaataatgttattgagcaatgaattttttatttccgcatggaaagttattgatctctatggctgtaaaatatttctttatagcgttattaaagtgtgtcttaataaaattaaatttgggatacaaagtatttattttacaatgggtgggcgggggaaacttttccagaaagtttccaatatgacgttttcataagttgaaaaaactctccttagtgcttattttctaacttaaaattcacctggaactttaaatgggaaaggattcttttaattgtggattataggcataatactgtttgcatctgaattttctgtaagtgaataatagtttaatagaggaactcatgatttgtactattgaatgattaaactaagtatgaagtgataccattcagcatggcatcaggtcattgcagttttagttctgtgtaacacaagcactcactgaaattccagtttctaggattagtgtaggagcctaacgtgcttctactgttttaatgggttaatcctggattacttaacaatttatgtcaattgcactggtttaatttgttgctaaagaaataatgccctgggtttagtaacaaatacagctcaactattcttgaatatattttgaaaaaaaaatgtatgtaacttaccttttgtaaacgttccatttcttttttccctcatttttgactcttaaaggtgcaatttattactgaattgggatttctggcagcacagaactgctttttattttggggtctgtgagtttcttaggtattagcaatcttgcttataaaataagaacaccttttaattaatgagtgggtcattcctggtgcaattgtgatttttctttagccagaatgaatggcaaactctatttagagcaaagtaagtattagaaaaccctaggaactcttaatcaacgtttattacactttcattaaggcaaactacgtgaaagagccttggggaagttggcccatatcttactaagttgatcagatttctcgttgggctggaaatgtttcgctgttgtatattttaaagtaaattgcacctttgtaacatattgtattgacgaatgatcactaagattagctatatctatacagtcattagtttgacaagaaatagaatcctgtcagatgccaaagagtgggatttttatgtttaatgattaaacaccattatttattgacaatttaccctgtggaactgtattatttctaactatgaaataaaggggtgatgtaaacacacattgttgtgtggtgctttaaactaggtccactatcaacaggctacttactgttcaagaattccactgaagcacttattttaaggccctatttttcttaaacaaaacagtgacaacaacaatcaaaccatttacttttgatgctcattggcattttatgataaaagatgtattcatggcaatgatatgtattcaccctattaggaaacacaactggttacctatgagacctgttctgtccgtgtgcctacgttccttaataatagctaaataaaaatttgtagctttt

SEQ ID NO: 227723 - DNA, 2933 bp, Artificial Sequence
  derived and/or modified sequence
cccttggccgctgttcccgcaccgcggggcagcgggcctggaggcccctttgagaagtagctttccccggccggcggcacctttggctgcgtgcccggccgcgctcagggtgcgactgcccgggtcagatagcacctcagggcgagccccggcggtctgatctcgccgaccctcctcgtcctggttgcaacccgcgtgcgaggccgcccgcgccctccgagtgtctgccggtgcagtgggggtggactggccggctgtggccgtgtgtgcgcgtgtggattggggcccggtccgagccagaagcttaagcggcagatgtcgggcattgccaccctcgccccacctgtcgcgggtggactttggggcagtacctggagtagaacagaaaaattattatgtctgtgttcccttgggactcattggaaattgtacagtgacatcttctgggatttagtctggattgtgcagactggtgcttaaaatggaagtcgatattaatggagagtctagaagtaccctgaccaccttgcccttccctggggctgaggccaactccccgggaaaggcggaggcagagaagccccgctgctccagcacaccctgctccccgatgcggaggaccgtgtcaggctaccagatcctacacatggactctaactatttggttggcttcacgactggcgaggaactcctgaagttagctcagaagtgcacaggaggtgaagagagcaaagcagaagccatgccatccttacgctccaaacagctagatgcaggacttgcccgttcctctcgtttgtataaaaccagaagtaggtactaccagccatacgagattccagctgtcaatggcaggaggcgaaggcggatgccaagctcaggagacaagtgcactaaatctttaccttatgaaccttacaaggccctccatgggcctctgcctctttgtcttcttaaaggtaagagggctcactccaaatctctggactacctcaatctagataaaatgatcaaggagccagctgatacagaagtgctacagtaccagcttcaacacctaaccctccgaggggaccgtgtgtttgctaggaataatacatgaatgacttggagagagcttaaaccaatttaggtcagcctacgcttggctagaaaaaacccactgctgtactctgtacatgactcttcacactatagatggttatatcagctaagtgttcctggaacataaaaattgtttgggtcaaatttgaatacaggaatgaaatcacaggtacttgggggggggatatcattctagagcacgcaactgcaaagaaaacagaatgttgactgttagtttgtatagctttttagctaggaaaaaaaggctttggtacagtaatttcatctttatgattctgacactcaaattgggaatgttacctgcttggttgttgctgacttgatatgattcattagaaatttatatcttcagtactcaagtacttcttgaatctctgtattttactataaaatgtatgtaatgatttgttttatgaaatttagaacttgaacattgctgaattggaccactttttatttttaaatattgagtttaaatattttataactggttttgcactgaaaaaattaacatttcagattgacaagagagtaatctttcttcacttgcctcaataatgttattgagcaatgaattttttatttccgcatggaaagttattgatctctatggctgtaaaatatttctttatagcgttattaaagtgtgtcttaataaaattaaatttgggatacaaagtatttattttacaatgggtgggcgggggaaacttttccagaaagtttccaatatgacgttttcataagttgaaaaaactctccttagtgcttattttctaacttaaaattcacctggaactttaaatgggaaaggattcttttaattgtggattataggcataatactgtttgcatctgaattttctgtaagtgaataatagtttaatagaggaactcatgatttgtactattgaatgattaaactaagtatgaagtgataccattcagcatggcatcaggtcattgcagttttagttctgtgtaacacaagcactcactgaaattccagtttctaggattagtgtaggagcctaacgtgcttctactgttttaatgggttaatcctggattacttaacaatttatgtcaattgcactggtttaatttgttgctaaagaaataatgccctgggtttagtaacaaatacagctcaactattcttgaatatattttgaaaaaaaaatgtatgtaacttaccttttgtaaacgttccatttcttttttccctcatttttgactcttaaaggtgcaatttattactgaattgggatttctggcagcacagaactgctttttattttggggtctgtgagtttcttaggtattagcaatcttgcttataaaataagaacaccttttaattaatgagtgggtcattcctggtgcaattgtgatttttctttagccagaatgaatggcaaactctatttagagcaaagtaagtattagaaaaccctaggaactcttaatcaacgtttattacactttcattaaggcaaactacgtgaaagagccttggggaagttggcccatatcttactaagttgatcagatttctcgttgggctggaaatgtttcgctgttgtatattttaaagtaaattgcacctttgtaacatattgtattgacgaatgatcactaagattagctatatctatacagtcattagtttgacaagaaatagaatcctgtcagatgccaaagagtgggatttttatgtttaatgattaaacaccattatttattgacaatttaccctgtggaactgtattatttctaactatgaaataaaggggtgatgtaaacac

SEQ ID NO: 227724 - DNA, 1573 bp, Artificial Sequence
  derived and/or modified sequence
ctctccgcctcgtgtctgggccgggcgcacgatgcccgcggtgctggggaaacccggccggaccagcttctgcgatgggcggcggggcggccccagcgtcccttggccttggtggaccggttcccaggcacccgaaggggactggggtctgtacctggagtagaacagaaaaattattatgtctgtgttcccttgggactcattggaaattgtacagtgacatcttctgggatttagtctggattgtgcagactggtgcttaaaatggaagtcgatattaatggagagtctagaagtaccctgaccaccttgcccttccctggggctgaggccaactccccgggaaaggcggaggcagagaagccccgctgctccagcacaccctgctccccgatgcggaggaccgtgtcaggctaccagatcctacacatggactctaactatttggttggcttcacgactggcgaggaactcctgaagttagctcagaagtgcacaggaggtgaagagagcaaagcagaagccatgccatccttacgctccaaacagctagatgcaggacttgcccgttcctctcgtttgtataaaaccagaagtaggtactaccagccatacgagattccagctgtcaatggcaggaggcgaaggcggatgccaagctcaggagacaagtgcactaaatctttaccttatgaaccttacaaggccctccatgggcctctgcctctttgtcttcttaaaggtaagagggctcactccaaatctctggactacctcaatctagataaaatgatcaaggagccagctgatacagaagtgctacagtaccagcttcaacacctaaccctccgaggggaccgtgtgtttgctaggaataatacatgaatgacttggagagagcttaaaccaatttaggtcagcctacgcttggctagaaaaaacccactgctgtactctgtacatgactcttcacactatagatggttatatcagctaagtgttcctggaacataaaaattgtttgggtcaaatttgaatacaggaatgaaatcacaggtacttgggggggggatatcattctagagcacgcaactgcaaagaaaacagaatgttgactgttagtttgtatagctttttagctaggaaaaaaaggctttggtacagtaatttcatctttatgattctgacactcaaattgggaatgttacctgcttggttgttgctgacttgatatgattcattagaaatttatatcttcagtactcaagtacttcttgaatctctgtattttactataaaatgtatgtaatgatttgttttatgaaatttagaacttgaacattgctgaattggaccactttttatttttaaatattgagtttaaatattttataactggttttgcactgaaaaaattaacatttcagattgacaagagagtaatctttcttcacttgcctcaataatgttattgagcaatgaattttttatttccgcatggaaagttattgatctctatggctgtaaaatatttctttatagcgttattaaagtgtgtcttaataaaattaaa

SEQ ID NO: 227725 - DNA, 621 bp, Artificial Sequence
  derived and/or modified sequence
atggaggtggacatcaacggcgagagcagaagcaccctgaccaccctgcccttccccggcgccgaggccaacagccccggcaaggccgaggccgagaagcccagatgcagcagcaccccctgcagccccatgagaagaaccgtgagcggctaccagatcctgcacatggacagcaactacctggtgggcttcaccaccggcgaggagctgctgaagctggcccagaagtgcaccggcggcgaggagagcaaggccgaggccatgcccagcctgagaagcaagcagctggacgccggcctggccagaagcagcagactgtacaagaccagaagcagatactaccagccctacgagatccccgccgtgaacggcagaagaagaagaagaatgcccagcagcggcgacaagtgcaccaagagcctgccctacgagccctacaaggccctgcacggccccctgcccctgtgcctgctgaagggcaagagagcccacagcaagagcctggactacctgaacctggacaagatgatcaaggagcccgccgacaccgaggtgctgcagtaccagctgcagcacctgaccctgagaggcgacagagtgttcgccagaaacaacacctag

SEQ ID NO: 227726 - DNA, 621 bp, Artificial Sequence
  derived and/or modified sequence
atggaggtggatatcaacggagagtccagaagtaccctcacgactttgccatttccaggggcagaagccaatagtcccggtaaggcagaggcagaaaagccccgctgttctagcacgccatgctctccgatgcggagaacggttagcggctatcagattctgcatatggactcgaactatttagtcggattcacgactggagaggagctgttgaagctagctcagaaatgcacaggcggcgaagagtccaaggccgaggccatgccaagcctgagatcaaagcagctggacgccgggttggctaggtcctcgagactgtataagaccagatctaggtattaccaaccttacgagatacctgcggtcaatggtcgacggagacggagaatgccgtcctctggcgataagtgcacgaagtctttgccgtatgaaccctataaagctctgcacggcccactaccactatgcctgcttaagggtaagagagctcactctaaaagtttggactatctcaacctggataagatgatcaaagagcccgccgataccgaagtcttgcagtaccagctgcagcatctcacattacggggtgatcgcgtatttgcacggaacaacacttag

SEQ ID NO: 227727 - DNA, 621 bp, Artificial Sequence
  derived and/or modified sequence
atggaggttgacattaacggggaaagccgctcaactctgactacactgccctttcctggcgccgaagcaaacagtcctggaaaagcggaagccgaaaaacctaggtgtagctcaaccccttgctccccaatgcgcagaactgtgtctggataccagattctgcatatggactctaactatctggtgggatttactaccggtgaagaactgttgaaactggcccagaagtgtactggcggggaagagagcaaagctgaggccatgccatctctcaggagtaaacagctcgatgccgggcttgctaggagcagccgcctctataagactcgcagtaggtactatcaaccctatgagattcctgctgtaaacgggcgccggaggagaagaatgccctctagtggagacaaatgcacaaaatcgttgccctacgaaccttataaggccctgcatggtcctctccccctgtgcctcttgaagggcaagcgcgcccacagtaaatcactggactacctgaatttggataaaatgattaaggagcctgcagatacagaggtcctgcaatatcagctccagcacctgacccttaggggggacagggtcttcgcaagaaataacacatag

SEQ ID NO: 227728 - DNA, 621 bp, Artificial Sequence
  derived and/or modified sequence
atggaggtcgacatcaacggggagagtaggtcgacccttacgaccctgccttttcctggggcagaggcgaattctccggggaaggccgaggccgagaagcctcggtgttcgtccactccgtgtagccctatgcgcagaacagtgtccggctaccagattttgcacatggattccaactacctcgtgggatttacaaccggtgaggaattgttgaaactggctcaaaaatgcaccggtggggaggaaagtaaagctgaggcaatgccctctctgcggtccaagcagctggatgcaggcctcgcaaggtccagtaggctttacaaaacacgatctcgatattatcagccttatgagataccggccgtgaacggaagacgacgcaggaggatgcctagctctggggataagtgcaccaagtcccttccatacgagccctacaaggctctgcacggtccattgcctctatgccttctgaagggtaagcgagcccactcaaaatcattggattacctgaacctggacaagatgatcaaagaaccagcggacactgaggtcctacagtatcaactgcagcatctaacccttcgcggcgatcgtgtattcgcccgcaataacacttag

SEQ ID NO: 227729 - DNA, 621 bp, Artificial Sequence
  derived and/or modified sequence
atggaagtggatattaatggtgaatccagatctactcttaccactctgcccttccctggggccgaagccaatagtcctggcaaggccgaggccgagaagccccggtgctcttcaaccccttgcagtcccatgaggcgtacagtgagcggctatcagatcctgcacatggattccaattacttagtgggtttcactacaggtgaagagctcctcaagctagcccagaagtgtacaggcggggaagaatccaaagccgaagcaatgcccagcctcagaagcaaacagttggatgccgggctggccagatcttccagactatacaagactagatctagatactaccagccgtacgaaattcccgctgtgaatgggcgcaggcggagacgaatgcctagcagtggagataaatgtacaaagagtctcccttatgaaccctataaagcactgcacgggccactgcccctttgcctgcttaaaggcaaacgcgcacattcaaaatctctcgattacttgaacctcgacaagatgatcaaggagccagccgataccgaagttttacagtaccagctccagcacttaacactgaggggcgacagggttttcgcccgaaacaatacgtag

SEQ ID NO: 227730 - DNA, 621 bp, Artificial Sequence
  derived and/or modified sequence
atggaggtggacatcaacggggagagccgcagcaccctgaccaccctgcccttccctggagctgaggccaacagccctgggaaggccgaggccgagaagccccgctgcagcagcaccccctgcagccccatgagaagaacagtgtctggctaccagatcctgcacatggacagcaactacctggtgggcttcaccaccggggaggagctgctgaagctggcccagaagtgcaccggcggggaggagagcaaggccgaggccatgcccagcctgcggagcaagcagctggatgctggcctggcccggagcagccggctgtacaagaccaggagccgctactaccagccctatgagatcccagctgtgaatggaagaagaagaagaaggatgcccagcagcggggacaagtgcaccaagagcctgccctatgagccctacaaggccctgcacggccccctgcccctgtgcctgctgaagggcaagagggcccacagcaagagcctggactacctgaacctggacaagatgatcaaggagcctgctgacacagaggtgctgcagtaccagctgcagcacctgaccctgcggggggacagagtgtttgccaggaacaacacctag

SEQ ID NO: 227731 - DNA, 621 bp, Artificial Sequence
  derived and/or modified sequence
atggaggtggacatcaacggcgagagccggagcaccctgaccacccttccattccctggtgctgaagctaactctccagggaaagctgaagccgagaagcctaggtgctctagtacaccctgtagccccatgagacggactgtctcaggctaccagatcttgcacatggattccaattacctggtcggcttcacgactggcgaggagcttctgaaactggctcagaagtgcacaggcggagaggagtctaaggcggaggctatgccgtccctgcgcagtaagcaacttgatgcaggtttagcgcgcagctccaggctgtacaagacaagatcgaggtactaccagccttacgaaatcccggctgtgaacggacgcagacggcggcggatgccttcttctggcgacaagtgtaccaaatcacttccttacgagccatataaggccctccatggacccctgccactctgtctgcttaagggcaagagagcacattctaagtccctggattacctcaatttagataagatgatcaaggagcctgcagacacagaggtgctgcagtaccagttgcaacatcttacactcagaggggatcgcgtatttgcaaggaacaacacctag

SEQ ID NO: 227732 - DNA, 621 bp, Artificial Sequence
  derived and/or modified sequence
atggaggtggacatcaacggcgagagccggagcaccctgaccaccctgccgttccccggggccgaagccaactcaccaggaaaggccgaggctgagaaacctaggtgctcctccacaccctgtagccctatgcgcaggacggttagcgggtaccagatcctgcacatggattctaattatctggtgggtttcactacaggggaggagctactgaaactggcgcagaaatgcacggggggggaggaatctaaggccgaggcaatgccttcattacgctcgaaacagttggacgcaggtctcgcccgtagttcacgactctataagacacggagtcggtactaccagccttacgagattcccgccgtgaatgggagacggaggcggcgtatgccctcttctggggacaagtgtaccaaaagtttgccctacgaaccctataaagcccttcatgggcctttacctctttgtctgctaaagggtaagagggctcatagcaaatcactcgattacctgaatttggataagatgatcaaagagcctgcggataccgaggttctgcagtaccagttgcagcatcttacactccgtggtgatagagtgtttgcccggaacaatacatag

SEQ ID NO: 227733 - DNA, 621 bp, Artificial Sequence
  derived and/or modified sequence
atggaggtggacatcaacggcgagagccggagcaccctgaccaccctccctttcccaggggcggaggctaactccccagggaaggccgaagccgagaagccgcggtgcagtagcacaccatgcagccccatgcgccgcaccgtctccggctatcagattttgcacatggactccaactatctggttggttttaccactggtgaagagctgttgaaactggctcagaagtgcaccggcggggaggagtcaaaagctgaggccatgccttcactgagaagtaagcagctggatgcaggattagccaggagtagccgcttgtacaagaccaggtctagatactaccaaccatatgaaatcccggccgttaacgggaggcggaggagaaggatgcctagcagtggggataaatgtactaagtcattgccatacgaaccatataaggccctgcacggcccacttcctctctgcctgctgaaaggaaagcgggctcacagtaaatctctcgattatcttaacctggacaaaatgattaaggagccggccgatacggaggttctgcagtaccaactgcagcatcttacactgcgcggcgaccgggttttcgcaaggaacaatacctag

SEQ ID NO: 227734 - DNA, 621 bp, Artificial Sequence
  derived and/or modified sequence
atggaggtggacatcaacggcgagagccggagcaccctgaccaccctgccattccccggggccgaagcaaattctccggggaaggcagaagctgagaagcctcgatgctccagcaccccttgcagccccatgaggcgcactgtctctggctaccagatattgcatatggacagtaactacctggtcgggtttactaccggcgaagaattgctgaaactcgcacagaaatgcaccggtggtgaggagtctaaagccgaggcaatgccttcattacggtcgaaacaactagatgcagggctcgccagatcgtctcgattatataagacccggagccgctactaccagccgtacgagatacccgccgtaaacggaaggcgcagacggcgaatgccatcaagcggggataaatgtacaaagagtttgccgtacgaaccatacaaggcactgcacggacctctgcctctctgtctcctaaagggtaagagggcccacagcaagtcactggactatttaaatctagacaaaatgatcaaggagcccgcagacacagaggtgctgcagtaccagctgcaacacctgaccctgagaggggatcgggtgttcgctcggaacaacacgtag

SEQ ID NO: 227735 - DNA, 621 bp, Artificial Sequence
  derived and/or modified sequence
atggaggtggacattaatggagaatcgaggagcaccctgacaactctgccattccccggagcagaggccaactctcccggtaaggccgaggctgaaaagccacgctgctcctccactccgtgttctccaatgagaagaactgtttccggctatcaaatcctgcatatggatagcaattatcttgtggggtttaccactggagaggagctactcaaactagcccagaagtgtacaggcggtgaggaatccaaggcagaggctatgccttctctgcggagcaaacagcttgacgccggtctcgccaggagctccaggttgtacaagaccagaagcaggtattatcagccctatgagatccctgccgttaatggacggaggagaagacgcatgcctagctcaggggataaatgcacaaagagccttccatacgagccatacaaagctcttcacggccctttacccctttgcttgctgaagggtaagagagcccactcaaaaagtctggattatctgaatttagataagatgatcaaagagcccgctgatacagaagtgttgcaatatcagcttcaacacctcacgctgcgaggggacagggtattcgcccgtaataatacatag

SEQ ID NO: 227736 - DNA, 621 bp, Artificial Sequence
  derived and/or modified sequence
atggaggtggatatcaacggagagagtagatctaccctaactacactgccctttccgggtgccgaggccaattctcctggcaaagccgaggcagagaaacccagatgcagctcaactccgtgcagccccatgcgtcgaacagtcagcggctatcagatattgcatatggattcgaattatcttgtcggcttcactactggcgaagagttgctgaaactggctcagaaatgtaccgggggtgaggagagtaaggctgaagctatgccttctttacgaagtaaacagttggatgccggactcgcccgaagttctaggttatataagaccagatcccggtactaccagccgtacgagattcctgcggttaatggaaggcgacggaggaggatgccgtcctcaggcgacaaatgcacaaagagtttgccctatgaaccatacaaggcgttacatggacccctcccattatgcttgttaaaaggcaagagggcccacagcaagagcctcgactacctgaatttggataaaatgatcaaggagcccgctgatacagaggtgcttcagtatcagttacaacacctaacactgcggggagaccgggtgttcgccagaaataacacttag

SEQ ID NO: 227737 - DNA, 621 bp, Artificial Sequence
  derived and/or modified sequence
atggaagttgatattaacggcgagagccgttccaccctgaccaccctgccttttccaggcgcagaagctaactctcctggcaaggctgaagccgaaaagccacgatgctcgtccaccccttgcagtccaatgagaagaactgtaagcgggtatcagatactgcacatggacagtaactatctggttggattcaccacaggagaagagctgctgaagctggcccaaaaatgcaccggcggagaagaaagcaaggccgaggccatgccttcccttagatccaagcagttagatgctggcctagccagatcttcaaggctgtacaagacaaggtccaggtactatcagccttacgagatcccggctgtgaacggtcggcgaagaaggagaatgccaagtagtggcgataaatgcacaaagtccttaccctacgagccctacaaggccctccacgggccactccccctgtgtctgcttaaaggaaaacgcgctcattccaaaagcttagactaccttaatcttgataaaatgatcaaagagcccgcagataccgaggtcctacagtaccagctgcaacacctgacccttaggggggaccgtgtgtttgcccgaaataacacttag

SEQ ID NO: 227738 - DNA, 621 bp, Artificial Sequence
  derived and/or modified sequence
atggaagtcgatatcaatggagaaagccgcagcaccctcaccaccctaccttttcctggtgcagaggccaattcccctggtaaagcagaagccgagaagccccgatgtagctcgaccccttgcagccctatgagaagaaccgtgagcggataccagattctacacatggactccaactacttggtgggctttactactggggaagaattgctgaaacttgctcagaagtgcactggcggtgaagagtctaaagctgaggccatgccaagcctgcggagcaaacaactggacgcagggctcgctagaagctcaaggctgtacaaaaccaggtctcggtattatcagccctacgaaattcctgccgtcaatggaaggaggcgaaggaggatgccatcatccggcgacaaatgtaccaagagtctgccttacgaaccctacaaagcactccacggacctctcccactctgcctcctgaaagggaaaagagcccactctaagagccttgattatttgaacctcgataaaatgataaaggagcccgctgatactgaggtgttgcagtaccagctacagcatctcacacttaggggcgaccgcgttttcgctcgcaacaatacctag

SEQ ID NO: 227739 - protein, 467 aa, Artificial Sequence
  derived and/or modified sequence
MAPKLLLLLCLFSGLHARSRKVEEDEYEDSSSNQKWVLAPKSQDTDVTLILNKLLREYDKKLRPDIGIKPTVIDVDIYVNSIGPVSSINMEYQIDIFFAQTWTDSRLRFNSTMKILTLNSNMVGLIWIPDTIFRNSKTAEAHWITTPNQLLRIWNDGKILYTLRLTINAECQLQLHNFPMDEHSCPLIFSSYGYPKEEMIYRWRKNSVEAADQKSWRLYQFDFMGLRNTTEIVTTSAGDYVVMTIYFELSRRMGYFTIQTYIPCILTVVLSWVSFWIKKDATPARTALGITTVLTMTTLSTIARKSLPRVSYVTAMDLFVTVCFLFVFAALMEYATLNYYSSCRKPTTTKKTTSLLHPDSSRWIPERISLQAPSNYSLLDMRPPPTAMITLNNSVYWQEFEDTCVYECLDGKDCQSFFCCYEECKSGSWRKGRIHIDILELDSYSRVFFPTSFLLFNLVYWVGYLYL

SEQ ID NO: 227740 - DNA, 1404 bp, Artificial Sequence
  derived and/or modified sequence
atggcacctaaattgttacttctactctgcctcttctccgggttgcacgctcggagcaggaaagtggaagaagatgagtatgaagactcatcatcgaatcagaagtgggtattggcaccgaagagccaggatactgacgttacgctaattttgaacaaactcttgagggagtacgacaaaaaattgaggccagatatcgggattaaaccgacagtaatcgacgtcgatatctatgttaattccattggcccagtctctagcatcaatatggagtatcaaatagacattttcttcgcgcagacttggacggattcgcgattaaggtttaattccacgatgaaaatacttaccctgaatagcaacatggtgggcctcatatggattcccgacacaatctttcggaatagcaaaaccgctgaggcccattggattacaactcctaaccagctgctgcggatctggaacgacggcaagatcttatacacgttgagactgacaatcaatgcagaatgtcagctgcagctacacaatttccctatggatgaacacagttgccccctgatcttctcaagctatggctaccccaaagaagagatgatctatcggtggcgcaagaactcggtggaagcagctgaccagaaaagctggcggctttatcaattcgattttatgggtctccgaaataccactgagattgtgacaacaagtgccggcgattacgtagtcatgacaatctacttcgagttgtcccgacgaatgggttacttcacaatccaaacatatatcccttgcatactcaccgttgtactgtcatgggtttcattttggattaagaaggacgcaacccctgccaggaccgcactcggcatcaccacagtgctcacaatgactaccctgtccacaatcgctcgcaaaagcctgccccgcgtttcgtacgtgaccgcgatggacctgtttgttacagtgtgcttcctttttgtgtttgccgctctgatggagtacgcaaccttaaactactacagcagctgcaggaagcctactactactaaaaagaccacctcactgcttcatccagatagttccaggtggatcccagaacgtatttctctccaggcaccatcaaattattctctgctggacatgagaccgccaccaacggctatgatcactttgaacaattcagtgtattggcaggagtttgaagatacctgcgtgtatgagtgtctcgacggcaaggattgtcaaagtttcttctgctgctatgaagagtgcaagagcgggagctggagaaaagggagaatacacattgacatcttagagctggactcatactctagggtcttttttccaacaagtttcctgttattcaacctggtgtactgggttggttatctttacctttag

SEQ ID NO: 227741 - DNA, 2004 bp, Artificial Sequence
  derived and/or modified sequence
gccgcccggttgcgcggaccggcgctagtgcgcgggtgggggcggcgcgccgcggtggcccggcgtcccgtgtgcgtccagtgtgcgccccgcgggggcgcggccagcgccagagtagatacctgtcccgcccgccgcggccagcagcctcggaggaagccagggcaaagagggccggcggagaccaggtccgcgccggaggaagccgcgcccggccgaggccccggaccctgcgccccgagctccacggcaccatggccccgaagctgctgctcctcctctgcctgttctcgggcttgcacgcgcggtccagaaaggtggaagaggatgaatatgaagattcatcatcaaaccaaaagtgggtcttggctccaaaatcccaagacaccgacgtgactcttattctcaacaagttgctaagagaatatgataaaaagctgaggccagatattggaataaaaccgaccgtaattgacgttgacatttatgttaacagcattggtcctgtgtcatcaataaacatggaataccaaattgacatattttttgctcagacctggacagatagtcgccttcgattcaacagcacaatgaaaattcttactctgaacagcaacatggtggggttaatctggatcccagacaccatcttccgcaattctaaaaccgcagaggctcactggatcaccacacccaatcagctcctccggatttggaatgacgggaaaatcctttacactttgaggctcaccatcaatgctgagtgccagctgcagctgcacaacttccccatggacgaacactcctgcccgctgattttctccagctatggctatcccaaagaagaaatgatttatagatggagaaaaaattcagtggaggcagctgaccagaaatcatggcggctttatcagtttgacttcatgggcctcagaaacaccacagaaatcgtgacaacgtctgcaggtgattatgttgtcatgactatatattttgaattgagtagaagaatgggatacttcaccattcagacatacattccctgtatactgactgtggttttatcctgggtgtcattttggatcaaaaaagatgctacgccagcaagaacagcattaggcatcaccacggtgctgaccatgaccaccctgagcaccatcgccaggaagtccttgccacgcgtgtcctacgtgaccgccatggacctttttgtgaccgtgtgcttcctgtttgtcttcgccgcgctgatggagtatgccaccctcaactactattccagctgtagaaaaccaaccaccacgaagaagacaacatcgttactacatccagattcctcaagatggattcctgagcgaataagcctacaagccccttccaactattccctcctggacatgaggccaccaccaactgcgatgatcactttaaacaattccgtttactggcaggaatttgaagatacctgtgtctatgagtgtctggatggcaaagactgtcagagcttcttctgctgctatgaagaatgtaaatcaggatcctggaggaaagggcgtattcacatagacatcttggagctggactcgtactcccgggtctttttccccacgtccttcctgctctttaacctggtctactgggttggatacctgtatctctaagtgttgctcagagtgaagagtgaagagcatttggtacacacttgaccttctgtcgtccccagaccagtagtgaccaatcgggagtagcaaggaaggacactgcccagtgtatcttgttataaatgacctttcagcaacacaggaagtacccagcaaaggtttctattatgtattttacacacacacatacatacacacacacagctaattgagttttaaagtaatattcttgctaatccctactgaattgtagcttggtgttgtttctgaatggtttttggatattggaagcagccgctgattacccttgcaaagaaatctgtaaaatgtgcacgtgaatgtctga

SEQ ID NO: 227742 - DNA, 1404 bp, Artificial Sequence
  derived and/or modified sequence
atggcccccaagctgctgctgctgctgtgcctcttcagcggcctgcacgcccggagcaggaaggtggaggaggatgaatatgaggacagcagcagcaaccagaagtgggtgctggcccccaagagccaggacacagatgtgaccctcatcctgaacaagctgctgcgggagtatgacaagaagctgcggccagacatcggcatcaagcccaccgtgattgatgtggacatctacgtgaacagcatcggccctgtgagcagcatcaacatggagtaccagattgacatcttctttgcccagacctggacagacagccggctgcgcttcaacagcaccatgaagatcctgaccctgaacagcaacatggtgggcctcatctggatcccagacaccatcttcaggaacagcaagacagctgaggcccactggatcaccacccccaaccagctgctgcgcatctggaatgatggcaagatcctgtacaccctgcggctgaccatcaatgctgagtgccagctgcagctgcacaacttccccatggatgagcacagctgccccctcatcttcagcagctatggctaccccaaggaggagatgatctaccgctggaggaagaacagcgtggaggccgctgaccagaagtcctggaggctgtaccagtttgacttcatgggcctgaggaacaccacagagatcgtgaccaccagcgctggggactatgtggtgatgaccatctactttgagctgagcaggaggatgggctacttcaccatccagacctacatcccctgcatcctgactgtggtgctgtcctgggtgtccttctggatcaagaaggatgccaccccagccaggacagccctgggcatcaccaccgtgctgaccatgaccaccctgagcaccatcgccaggaagagcctgccccgggtgtcctatgtgacagccatggacctgtttgtgacagtgtgcttcctgtttgtgtttgctgccctgatggagtatgccaccctgaactactacagcagctgcaggaagcccaccaccaccaagaagaccaccagcctgctgcacccagacagcagccgctggatccctgagcgcatcagcctgcaggcccccagcaactacagcctgctggacatgaggcccccacccacagccatgatcaccctgaacaacagcgtgtactggcaggagtttgaggacacctgtgtgtatgaatgtctggatggcaaggactgccagagcttcttctgctgctatgaggagtgcaagagcggctcctggaggaagggccgcatccacatcgacatcctggagctggacagctacagcagggtcttcttccccaccagcttcctgctcttcaacctggtgtactgggtgggctacctgtacctgtag

SEQ ID NO: 227743 - DNA, 1404 bp, Artificial Sequence
  derived and/or modified sequence
atggcccccaagctgctgctgctgctgtgcctgttcagcggcctgcacgctagatcccgtaaagtagaagaggatgagtacgaagattctagcagcaaccaaaaatgggtgctagccccaaagtcccaagacaccgacgtgaccctcatcctgaacaagctgttaagggagtacgataaaaaacttcgacctgatataggcatcaaaccgactgttattgacgttgatatttatgtgaactccattggcccggtgtcgtcaataaacatggagtatcagattgatattttttttgcccagacatggacagatagccgcctgcgctttaacagtactatgaaaatactgactttgaattcgaatatggtgggtcttatctggattcccgacactatctttcgaaacagcaaaacagcagaggctcactggatcacaacacctaaccaactgttgcggatttggaatgatgggaagatcctttatacccttcgcctgacgattaacgctgaatgccagctgcaactccataacttcccaatggatgaacactcctgcccccttatcttttcgagctacggatatcccaaggaagagatgatttaccggtggcggaagaactccgtggaagcggctgaccagaaaagctggaggctctatcaatttgattttatgggattgcgtaatacgaccgagattgtgacaacaagtgccggcgactacgtggtgatgacaatttactttgagctctctcgccgaatggggtacttcaccatccagacctacatcccatgcatattaaccgtggtgttgtcttgggtgagcttttggatcaagaaagatgcaacaccagcacgcacggcgctgggaataactacagttctcaccatgacgaccttgtccaccatagcacgtaagagtctccctcgagtgtcatatgtcactgccatggacctgttcgttactgtctgttttttatttgtgttcgccgccctgatggagtatgccacactcaattactattcctcatgtagaaagccaacaactaccaagaagacgacctcgctgttgcaccctgactctagcaggtggatcccagagcgcatttctctgcaagctccctccaactactccctgctagatatgaggcccccccctacagcaatgatcacgttgaacaactccgtatattggcaggaattcgaggacacatgtgtgtatgaatgtttggatggtaaggactgccagagctttttctgttgttacgaggagtgtaaatccggcagctggcgcaagggccggattcacattgatattctcgaactggactcctactcacgagtctttttccccacctcatttttgctttttaatctcgtttattgggtgggctatctttacctttag

SEQ ID NO: 227744 - DNA, 1404 bp, Artificial Sequence
  derived and/or modified sequence
atggctcctaagttactcttgcttctgtgtctgttcagtggccttcatgccagaagtcggaaagtggaggaggacgagtacgaggattccagctctaatcagaaatgggtgttggcaccaaagtctcaggatacggacgttaccctgatactcaacaagctcttacgcgaatatgacaaaaagctgcggcctgacatcggcatcaaaccaactgttatcgacgttgacatctatgtgaactctatcgggccagtttcgagcataaatatggaataccagatcgatatcttttttgcacagacatggactgactcacggcttcgcttcaactcaaccatgaagatcttaaccttaaatagtaacatggtggggctcatctggatccccgacacaatcttcagaaactccaaaactgccgaggctcactggatcaccacgccaaaccagctactgaggatttggaacgatggcaaaatcctctatacgctgcgactgactatcaacgccgaatgccaactccagctccacaatttccccatggatgagcacagctgccctctcatcttctcgtcgtatggatacccaaaagaggaaatgatctacagatggaggaagaatagcgtcgaggccgctgatcagaaatcctggagactgtaccagttcgactttatggggctgaggaacactactgaaattgtcacgaccagcgccggagattatgttgttatgaccatttatttcgaactgtctcggcgtatgggctattttacaatccagacgtatatcccttgcattctgactgtagtcctgagttgggtcagcttctggatcaaaaaagatgcaacccccgctcgcacagccctcggcatcactactgttttgactatgaccacactaagcaccattgccaggaagagtctccctagagtatcttatgtcacagccatggacttgtttgtaaccgtgtgcttcctgttcgttttcgccgcactcatggagtacgcgacgctgaactactatagttcttgtcgaaagcccacaaccacaaaaaagactacatctctactccatcctgactcaagtcgctggattccggagagaattagcctccaggcgccttcaaactattccttgctcgatatgaggccaccgcctactgccatgattacattgaacaattctgtgtattggcaggagttcgaggatacttgtgtgtacgagtgtctggacggtaaggactgccagtccttcttctgctgttacgaagaatgcaagtccggcagttggcggaagggtcgtatccacattgacatcctcgaacttgacagctacagtcgtgtcttctttcccacttcctttcttttattcaatttggtgtattgggtcggttatctctatctttag

SEQ ID NO: 227745 - DNA, 1404 bp, Artificial Sequence
  derived and/or modified sequence
atggcccccaagctgctgctgctgctgtgcctgttcagcggcctgcacgccagaagcagaaaggtggaggaggacgagtacgaggacagcagcagcaaccagaagtgggtgctggcccccaagagccaggacaccgacgtgaccctgatcctgaacaagctgctgagagagtacgacaagaagctgagacccgacatcggcatcaagcccaccgtgatcgacgtggacatctacgtgaacagcatcggccccgtgagcagcatcaacatggagtaccagatcgacatcttcttcgcccagacctggaccgacagcagactgagattcaacagcaccatgaagatcctgaccctgaacagcaacatggtgggcctgatctggatccccgacaccatcttcagaaacagcaagaccgccgaggcccactggatcaccacccccaaccagctgctgagaatctggaacgacggcaagatcctgtacaccctgagactgaccatcaacgccgagtgccagctgcagctgcacaacttccccatggacgagcacagctgccccctgatcttcagcagctacggctaccccaaggaggagatgatctacagatggagaaagaacagcgtggaggccgccgaccagaagagctggagactgtaccagttcgacttcatgggcctgagaaacaccaccgagatcgtgaccaccagcgccggcgactacgtggtgatgaccatctacttcgagctgagcagaagaatgggctacttcaccatccagacctacatcccctgcatcctgaccgtggtgctgagctgggtgagcttctggatcaagaaggacgccacccccgccagaaccgccctgggcatcaccaccgtgctgaccatgaccaccctgagcaccatcgccagaaagagcctgcccagagtgagctacgtgaccgccatggacctgttcgtgaccgtgtgcttcctgttcgtgttcgccgccctgatggagtacgccaccctgaactactacagcagctgcagaaagcccaccaccaccaagaagaccaccagcctgctgcaccccgacagcagcagatggatccccgagagaatcagcctgcaggcccccagcaactacagcctgctggacatgagacccccccccaccgccatgatcaccctgaacaacagcgtgtactggcaggagttcgaggacacctgcgtgtacgagtgcctggacggcaaggactgccagagcttcttctgctgctacgaggagtgcaagagcggcagctggagaaagggcagaatccacatcgacatcctggagctggacagctacagcagagtgttcttccccaccagcttcctgctgttcaacctggtgtactgggtgggctacctgtacctgtag

SEQ ID NO: 227746 - protein, 312 aa, Artificial Sequence
  derived and/or modified sequence
MADGDSGSERGGGGGPCGFQPASRGGGEQETQELASKRLDIQNKRFYLDVKQNAKGRFLKIAEVGAGGSKSRLTLSMAVAAEFRDSLGDFIEHYAQLGPSSPEQLAAGAEEGGGPRRALKSEFLVRENRKYYLDLKENQRGRFLRIRQTVNRGGGGFGAGPGPGGLQSGQTIALPAQGLIEFRDALAKLIDDYGGEDDELAGGPGGGAGGPGGGLYGELPEGTSITVDSKRFFFDVGCNKYGVFLRVSEVKPSYRNAITVPFKAWGKFGGAFCRYADEMKEIQERQRDKLYERRGGGSGGGEESEGEEVDED

SEQ ID NO: 227747 - DNA, 939 bp, Artificial Sequence
  derived and/or modified sequence
atggctgatggggattcaggttcggaacggggcggaggtggcggcccatgcggtttccagccagctagccgaggcggcggcgagcaggaaactcaggaactggcgtcaaagagactggacatccagaacaagagattctatttagacgtgaagcaaaatgcgaaaggccggtttctcaaaatcgcagaagtgggcgctggaggtagtaagtcccggctcaccctcagcatggccgttgccgccgagttccgtgacagtctaggcgacttcattgagcactacgcccagctgggccccagcagccccgagcagctagctgccggtgccgaagaaggtggcggaccgagacgagcactaaagagcgaattcctggtccgtgagaatcgcaagtactatctcgacttaaaagaaaatcagcgaggccgcttcctgcggatccgacagactgtcaaccgagggggaggcggattcggtgctggtccgggacccgggggcctgcagagcgggcagaccattgcactgccagcccaaggacttattgagttcagagacgcgttggccaaactaatcgacgattatggcggcgaggatgatgagctggccggaggcccgggcggaggagcaggaggccccggcgggggactctatggtgagctgccggagggcacttccattaccgtagactctaagcggtttttcttcgatgtgggttgtaacaagtatggcgtctttttgcgggtatccgaggtcaaaccatcctatagaaacgctatcactgtgccatttaaggcctggggcaagttcgggggcgctttttgcaggtacgcagacgaaatgaaggagattcaagaaagacagcgggacaagctgtatgaacgtcgcggcggggggagcgggggcggagaggaaagcgaaggggaggaggtagatgaagattag

SEQ ID NO: 227748 - DNA, 939 bp, Artificial Sequence
  derived and/or modified sequence
atggctgatggagacagcggcagcgagcggggcggcggcggcggcccctgtggcttccagcctgccagcagaggaggaggagagcaggagacccaggagctggccagcaagaggctggacatccagaacaagcgcttctacctggatgtgaagcagaatgccaagggccgcttcctgaagattgctgaggtgggcgctgggggcagcaagagccggctgaccctgtccatggctgtggccgctgagttccgggacagcctgggggacttcatcgagcactacgcccagctgggccccagcagccctgagcagctggccgccggggctgaggagggcggcggcccccggcgggccctgaagtctgagttcctggtgagagaaaataggaagtactacctggacctgaaggagaaccagaggggccgcttcctgcgcatccggcagacagtgaacagaggaggcggcggctttggagctggccctggccctgggggcctgcagagcggccagaccatcgccctgcctgcccagggcctcatcgagttcagagatgccctggccaagctgattgatgattatggaggagaagatgatgagctggccggcggccctgggggcggggccggcggccctgggggcggcctgtatggagagctgcctgagggcaccagcatcaccgtggacagcaagcgcttcttctttgatgtgggctgcaacaagtatggagtcttcctgcgggtgtctgaggtgaagcccagctacagaaatgccatcaccgtgcccttcaaggcctggggcaagtttggaggagccttctgccgctatgcagatgagatgaaggagatccaggagcggcagagggacaagctgtatgaaagaagaggaggcggcagcggcggcggggaggagagcgagggggaggaggtggatgaagattag

SEQ ID NO: 227749 - DNA, 9065 bp, Artificial Sequence
  derived and/or modified sequence
ggcggcctagaagatggcggacggcgacagcggcagcgagcgcggcggcggcggtgggccgtgcgggttccagcccgcgtcccgcggcggcggcgagcaagagacgcaggagctggcctcgaagcggctggacatccagaacaagcgcttctacttagatgtgaagcagaacgccaagggccgcttcctcaagatcgccgaggtgggcgcgggcggttccaagagccgcctcacgctgtccatggcggtggccgccgagttccgcgactcgctgggcgacttcatagaacactacgcgcagctgggccctagcagccccgagcagctggcggctggcgccgaggagggcggcgggccgcggcgcgcgctcaagagcgaattcttggtgcgtgagaaccgcaagtactacctggacctcaaggagaaccagcgcggccgcttcctgcgcatccgccaaacggtcaaccgcggcggtggcggcttcggcgcgggccccgggccgggcggcttgcagagcggccagaccatcgcgctgcctgcgcagggcctcatcgagttccgcgacgcgctggcgaagctcatagacgactacggaggcgaggacgacgagctggcaggcggcccgggaggcggcgccgggggcccagggggcggcctgtatggagagctcccggagggcacctccatcaccgtggactccaagcgcttcttcttcgatgtgggctgcaacaaatacggggtgtttctgcgagtgagcgaggtgaagccgtcctaccgcaatgccatcaccgtacccttcaaagcctggggcaagttcggaggcgccttttgccggtatgcggatgagatgaaagaaatccaggaacgacagagggataagctttatgagcgacgtggtgggggcagcggcggcggcgaagagtcagagggtgaggaggtggatgaggattgaaacgggcagcttcccctacaggcctccacccaaccaccatccccttggctagagaattccctttcctgctcatccccagtgagctagtggagagggagcaagggaggccgcagagggaaaaaacaaaacgtaacacagttaagagaaataatcgtaagagaacagtgacggacaacttgagaaaagcagtcaagttccaaggaactgacagcaacctgcaaagaggaaaacagcatctcctcacctgcgtaaaattgtctcagcttctgttgtttctcaactgaggttcgtaaacccatcaggataatccctggagggaatagatccttgcacatccagggcaagaaacatgtccaagttacccagaccattgataacagttgcatttaggttgcacctgggtaatctggcataaaagatctctctaggcctcactgttgcggtgtctatcccttcacctccattgaaatcagcattttggatctaggtcttcatggaatccttgagaagagaggcctttacaattacccagttctgagggttcaggttcacgaaaagaaatgcaacttgggataatcatgaacaggttaaagataagatttcaagaagccatctaagaatacagaaccaaattggatccatttttttaaaaaaatggttttgcatggaacctggaccaaggcaaatgtcttttcttcgcagaattgttttccaggatgccagtggattcagatagcaatgcttggagtagaatccgttactaaaatagtttcaaagttgacaaaaaattttcaaagataaaagcagttttacattgggggttgctgaggtaggcacaagaaaaagtcaggcataaagcacaaggcagactgtttgagtggattggttgctgctcactaaagttgttcccctgatctctaaatatggaggtcattaccaagaaatgctttggtatgaatgagagccagatctccactgtgtgagccagtgaattatggctaattcggctgttacagccactggttggctggattttaaaccataaaacttgaagattacctacaaaagtaacagtgtggctataagcctgagctttaatggatatacatcctcacagaaaagttggaaataaccaaaactgaagtcttaatttaccttcagtttaatctgtggatttgttcaaatactaaagatcctcaggtccagaattccagcatcatttattcttttaaaatttttaagaacttgatccattgtatcagtacctcacaatcagagttggcaaatgatggatgagtgattcaagcagtgcacccggtggaagctgaaatccatctgtgaatggaactgaagtgaacgtgaatatgctgactatatcctggaagcatttttataccatcttgaaatttcaacaaactggcttttgccagttaatccagctgtctttcaagaataaaagttggggttttcaaggatcgcctcttctatattttaaatggattttcagtagaaatgatttttactaatcaagttaatcccaccccatcaaaaggtattcctagaaatgtcatagacctaggtaactttgaattgaatgggagctaacgttctttccaaagttttcaggtattctttgtgtgacaccttctcaaccaggaggcaagtaaccccgcctccacaatcttagtattttttttaaactgcatgcctgccccttatttgagctgcctttttaatttattgcatatcctttttattatcttattttggtattattcaatctatacaatctttttgtatttattgggaaatgagtaatatacaaaaaggttttcatgtatttgtggctgagagggcgggaaataattgtgtacataaaattaggcttttttaaaaaaatagattatgatgcagaatattgttgatcttagattaaaaagtggaagagccacaaacattggtgcccttttcagactatttctctactctcatcatccacagtagaatttttaaacagatttttttaaagcttttcttttaaatttttctccgttgcaaagaatgtttcctaaattgtatgggagcaatagtatttttgatgttttaatgacatccgtatacttgtactgtattttgtactacaaggcagctgtttttcaataatgtcctgctgtatttacctacgtgttttgagtgtctatttctttgctgcggagaacaaattcctaaatagttttagtaaaggagctgagaagctagcattaggtttgcagaaactatttaagtttcaactctgaggcagcaatgaaaatttaagttgcagctattagttgattgctgtaactttttcattttcaaaccatgtacaattcttgtatagaccaacttgttttcttgcttcagtggtggttctgttgctcagctgcagtgagccagttcaattttgcaaaggtgcagtacctctcctttttaaggggttggtttattcttttttctttttgtttggctgaattgcagtaactagccttgcctttctattctgtagaaatgacagggtcttcacaatccttcaccagtggctactaagctataattagctgaatagaaagaatgtggaagtggtctgaggcatatagagtatatgccaagaacactaccatatatggcatcagctttggttaccagagaaattttcttagtcattagaccatgtaacagtaatatatcatatgtaaatctttagatatcaatttgaaaatcctccaaaaaaaggagcaaagaatgcataagctatgtgttggcaaaagtaatttatattaaaattttgacctgcctatgtaagattaagtggtaatgtcatagtggtgggtttttaagtcttaaccaatctctaaggtttgtttctcctgcaagggatggttcatggcctctcttcccactgcaggaagattgcagaaggctgtggattaattgtagcatttcactgatcttcactccagtcactagggacaatagaaacctgcaaaacacagattcattcgtaaatattattaatagcttattaaaggaaatggtctttgttaattccagtcagataatggcattgtacagacatgggaaacaaccaatttttttgtttttcagttgttgctatgaatgattttgagcctttttttttaagcttggcaaacatcccagctaatcaaaatagtcatattcctgagaagtaggaaactaaaacttcttttcatataattgttagaaggtttgtttcccaaactaccatagttacaaaggtgaaaagccaaattttaggaacagaatcaaaagaataaaaatctgtgaagagatcctactactcttccttctatgttttggttttggtttctattgtccctatcatttcagcaagtggaacagcagcaagtttttcagtgcatatgctgcacaagaacaaaatataaatctgtatggcaccaaaaatcaaagtgaaaaccaaaccaaaaacccaaacaccctatgtaactatcggaggcatatacgtggtataaatgactgtagctgtgatacacacatggctacttgtcacatcactttccataattatttactgcaaaatgattgagaggcttttggtgcaggcagccgttaacctcctgcttcctttgttacctctggattactttgcagtaaattgcaggtcttttaagagatttaagcttcagttttctcaaaacaaaacaattatcctgtcttatctgaagatgcagggttgtgggcaaaagaggctggttataataatgccctcatattgagtggtctgtaaacggctgcacacttcaggcactgtagttgctgaagatgctttgttaaatgtgaccttgactggctttacaggggtgtagaatgtaatctacacaaggtgactttgcatctatcttgctcttgaggtggatgaaattgagaagctggagtgtgtaagccatgcacataagtattcttcactgtaaattttgttttcatttttaacccaattatggtactttatccaatgcacaactgatctctcagtagatattcatttgaaaatagtgtggccttgatcagtgagaaagggaaggagaaaagtgacttttttgcttatgtagaaatgactcatttgctgagagtttgtctttctgcagcactcttggtatatagtgatcggtctcctttttgattggggaaagttaatgtttttgaccctggagttaattcagttgagttatcttatatttttaggaagtatcagaattgctctgatgaataacaaagttgactgttttgatgtccaatctcaggttttagaatatagtggtgtaaagtcccactatttttaattcttaaaacaactttaatttcgtacaccctaaaagtcacatgcataaggcctgttcagagagcagagcctccatctttttgctccttttctactttgtacttcacttgaaaaaatatcaagtgactttacattgtatatttccattgtaaccctgacatttctcaaagataaagcactttttgatcatgaaatacatgaaatctttgtgtgatgtggatcatagtttctcaggctcccttagataattgcttatgaatattgttctaactctgtgtaagaagagtagaaatctttgctaatgttagaaggtttgtattattgatccagaatgcattttgctagtttccaatggatgggagagtaaataatgctgcattcacaatttaataagttactttcccttgagccttaaggtaactttttctttcctgtcaactacagcactgaagttatagtaagtgaatgagattatcagttttcagggttggttttagagtactgtaaatcaattagctgtcttcctaaagagttacaactcccattcagtatactggataatgggtgtgtgggtggggctggggagggcgggagatagtttgtagaaaagaaaaaagaaaaaaaaaaaaacacatttaccttaagaaaatacagacaaaaaagaataaagtatgtgtcatatgctccatttgagattccaaatgcggccgggcgtggtggctcacgcctgtaatcccagcactctgggaggctgaggtgggcgggtcagttcaggtcagcctggacaacatggtgaaaccccgtctctactaaaaatactaaaattagccgggcatggtggtgcatgcctgtagtcccagctacttgggaggctgaggcaggagaatggcatgaacccaggaagcggaggttgcagtgagccaagatcgcgccattgcactccagcctgggtaacagaacaagactccgtctcaaaaaataaataaataaattccaaatgtaaggtggaaatggcagattataacttcatttcccccatttttaacttagaaaaaacaaagtccttaattttcaagtattagccccccagaagtttcagcagatagctggactcttgaataatgatttcttttgatatgtctgactttgctatttaaagtctcctttcccagccctcagtcttaaaactcagttttattactgacggatttaacagactcttacttgaaaattgtccaattatcagtactgaaaattagatttggaaaatgaaaaaataataaaatcgcatcaagaaaacttattaccttagagattcccaattgatatctgtacccctgatccaagtaaggcctttatgaatgtattttatatttcctaaagaaatagggaatatgccatcagtgtaatcacctctattcacagtcatttaatttgaaaatctaactcatgtctcttgaattagacattccaattgggataggtagagtcatgttaaaacaatagaatagcaactgccatattggtagtttcactgctcaatatgatttctaataagagcagagctttattggaagctaaaactcatttttctccatagatgattctaacagtttaataaaaaagtataattatactttaagtgtcaacagattttgagtctagaagcaaatttcattttccttgtgttatatctaatatccattgacatgggtaagaaaactaattatgtctttttagtatgatgaaatgtgggcccagagtattggaaagaaagcaatagccctattcagtgtccactaggatggatattgcagaaggcatgagtttgtccttttttcccccttaccttaaataacacttcaatagctaactttttccaaaatatccatttaggccatctcttatttcttaaagccaaatatttcgtccccagtcttaactctgagttgcaagatcaggctggttggaagaatctttatatttagaaataggatggtgagtggtttgtttattctcttgtaaaattcctttttcagagacataactgcagggagagtcccaagagaactgaagaactggattatatcattaaacacatttgtgttgtaggaatttgggagtttcattttgaactgataagatattagacataaacccttgttccagcccacatgtgtcatccctgtgtacaaaagctctctggattctttttttttttttgagacggagtttcgctcttatcgtccaggctggagtgagtgtagtggcttgatctcagctcactgcaacctttgcctcccgggctcaagcgattctcctgcctcagcctcccaagtagctgggattacaagcatgtgccaccatgcccagctaattttctgtatttttagtagagacggggtttcaccatgttggccaggctggtctcgaactcctgacctcaagtgatctgcccgcctcagcttcccaaaatgctggaattacaggcatgagccatcacgcctagcctactctctgaatttctaaaagtcagtaggttgaccaaaaagtctagaaactggctttaagtcagtatgggacgtacttataaagagtccatggttttgcacgtttcggtagacaagtaaatctgagttatttttcaatgacttaccaatatttgaatagtaactaagatcgtcagtgtatctggacttctttttttgaagttctaaaacaattatagtagggatttattattttgggcctccatccagatgtttttccaagatcatttttaaaattcatttgtcttctgtttccagataacatactttccgttctataggaatcttcactgccaatcatagtatctaccagtggctttcttagactattcactccaaagctgggactgatgtcctgccagtagagaatctacagaaataatttgaatgaattaaaaccaaatcttgatagcaggagacagcttcctgatctagatgtacaattagagtttaggttggaaattactttaaaatgtgttttttggggatgtcttcaatctctgtgtaaatacccacatgcttatgcattgtaaaccaagtgtgtattcctgtgtatgaatttgtagaactgatttctgcttcaagagaagctgcacctttaattttataaggtcccctccacctgtaaccctataaatgtctgtaaataaaacactaaaatttgtagtgataggatcaatttgggaatatctgctgagagaccaaaaagttcatttttttaagtaccttggttaaagagtaaagattattcctcttattttttaaagaagaatgcactttaacaaacatagagctgcatgggcaattcaaacaaatctgtgaagtgcagtacccattcagaaatcacacttcctgaaaaccgttcaaaagcagagtccagacgggctgttgatctcactgcctgtaggttgaagctcagattctgatcaattttgagaggagcagggctgcttcaaaagagcaatgtgaatacagtcagaagcttcagactggtctgtaaaaatggcgggtcccgtatttaccactaactagcaaaactgacagaaaaactcacagagaaaaaatgtaagaatccttcctgctggtgtgcactccttacaatagacttttgcaaatggagttttacagtctatatttaaaaaaaattgtatgtttgtaacaaataaagtatgcagaaaagtgaatg

SEQ ID NO: 227750 - DNA, 939 bp, Artificial Sequence
  derived and/or modified sequence
atggccgacggcgacagcggcagcgagcggggcggcggcggcggcccgtgtggcttccagccggcgagtaggggcggtggggagcaagagacacaagagctggcatccaagcgccttgacattcaaaacaaaaggttctatctcgatgtgaagcagaacgctaaggggcgattcctcaaaattgctgaggttggtgcaggaggcagcaagtcacggctgacgttgtctatggccgttgcggcagaattcagagatagtttaggcgatttcattgaacactatgcccagttaggccccagctcaccagaacaacttgcagctggagcggaggaggggggggggcccagacgggccctgaagagcgaattcctggtccgggaaaaccgcaagtattacctggaccttaaagagaaccaaaggggcagattcctgaggatcaggcagacagtcaaccgcggtggcggcggttttggagcaggtcccggccccggcggactgcagagcgggcagactatcgcgctgccagcccaggggctgattgagttcagagacgctcttgccaaactgatcgacgattatggcggagaggatgatgaacttgccgggggtcccgggggaggcgcaggcggccccggcggcggcctgtatggtgaactgcctgagggaacgtctattactgtagatagcaaacggtttttctttgatgtagggtgtaacaagtacggtgtttttctcagagtgtccgaggtcaaaccttcctacaggaacgccatcaccgtcccttttaaagcttggggtaagttcggcggcgccttttgtcgctatgctgacgagatgaaggagattcaggagagacagagagacaagttgtacgaacgtagggggggaggatccgggggcggcgaagagagcgagggggaagaggtggatgaggattag

SEQ ID NO: 227751 - DNA, 939 bp, Artificial Sequence
  derived and/or modified sequence
atggccgatggcgactccggatccgagagggggggagggggtggaccctgcggcttccaaccggcaagccggggaggcggagagcaagaaactcaggaacttgcctccaagaggctagatatccagaataaacgcttctacctcgatgtaaagcagaatgccaagggtcggtttctgaaaattgcggaggtcggagccggaggatctaaaagtagactgacgctgagcatggctgtcgccgcagaatttcgggatagcctgggtgattttatcgagcactacgcacagctgggccctagctcacccgaacaattagcagcaggagctgaggagggcggaggaccacgcagggcccttaagagcgagttcctcgtgcgtgagaatcgcaaatattacctcgacctgaaagagaaccaacgcggaaggttcctgagaattcgccagactgttaacaggggcggaggtgggttcggagccggacccggtccaggtgggctacagagcgggcagactatcgctctgcccgcacaaggccttatcgaattccgtgacgccttggccaaattgatcgatgattatggcggtgaagatgatgagctcgccggaggtccgggtggaggcgcagggggtcccggtggagggctgtacggtgagcttcccgaggggactagcatcacggtcgatagcaagaggtttttttttgatgtgggctgtaataagtatggtgtgtttcttcgggtcagtgaggtcaagcctagctataggaatgccatcactgtgccttttaaggcctggggcaaattcgggggagccttttgtcgatacgcagacgagatgaaagagatacaggagaggcagcgcgacaaactctacgagcgacggggtggcggatccggcggtggggaggaaagcgaaggagaagaagtggatgaagattag

SEQ ID NO: 227752 - DNA, 939 bp, Artificial Sequence
  derived and/or modified sequence
atggccgacggcgacagcggcagcgagagaggcggcggcggcggcccctgcggcttccagcccgccagcagaggcggcggcgagcaggagacccaggagctggccagcaagagactggacatccagaacaagagattctacctggacgtgaagcagaacgccaagggcagattcctgaagatcgccgaggtgggcgccggcggcagcaagagcagactgaccctgagcatggccgtggccgccgagttcagagacagcctgggcgacttcatcgagcactacgcccagctgggccccagcagccccgagcagctggccgccggcgccgaggagggcggcggccccagaagagccctgaagagcgagttcctggtgagagagaacagaaagtactacctggacctgaaggagaaccagagaggcagattcctgagaatcagacagaccgtgaacagaggcggcggcggcttcggcgccggccccggccccggcggcctgcagagcggccagaccatcgccctgcccgcccagggcctgatcgagttcagagacgccctggccaagctgatcgacgactacggcggcgaggacgacgagctggccggcggccccggcggcggcgccggcggccccggcggcggcctgtacggcgagctgcccgagggcaccagcatcaccgtggacagcaagagattcttcttcgacgtgggctgcaacaagtacggcgtgttcctgagagtgagcgaggtgaagcccagctacagaaacgccatcaccgtgcccttcaaggcctggggcaagttcggcggcgccttctgcagatacgccgacgagatgaaggagatccaggagagacagagagacaagctgtacgagagaagaggcggcggcagcggcggcggcgaggagagcgagggcgaggaggtggacgaggactag

SEQ ID NO: 227753 - protein, 3426 aa, Artificial Sequence
  derived and/or modified sequence
VLPSHTCGNPGEILKGVLHGTRFNIGDKIRYSCLPGYILEGHAILTCIVSPGNGASWDFPAPFCRAEGACGGTLRGTSSSISSPHFPSEYENNADCTWTILAEPGDTIALVFTDFQLEEGYDFLEISGTEAPSIWLTGMNLPSPVISSKNWLRLHFTSDSNHRRKGFNAQFQVKKAIELKSRGVKMLPSKDGSHKNSVLSQGGVALVSDMCPDPGIPENGRRAGSDFSRVGANVQFSCEDNYVLQGSKSITCQRVTETLAAWSDHRPICRARTCGSNLRGPSGVITSPNYPVQYEDNAHCVWVITTTDPDKVIKLAFEEFELERGYDTLTVGDAGKVGDTRSVLYVLTGSSVPDLIVSMSNQMWLHLQSDDSIGSPGFKAVYQEIEKGGCGDPGIPAYGKRTGSSFLHGDTLTFECPAAFELVGERVITCQQNNQWSGNKPSCVFSCFFNFTASSGIILSPNYPEEYGNNMNCVWLIISEPGSRIHLIFNDFDVEPQFDFLAVKDDGISDITVLGTFSGNEVPSQLASSGHIVRLEFQSDHSTTGRGFNITYTTFGQNECHDPGIPINGRRFGDRFLLGSSVSFHCDDGFVKTQGSESITCILQDGNVVWSSTVPRCEAPCGGHLTASSGVILPPGWPGYYKDSLHCEWIIEAKPGHSIKITFDRFQTEVNYDTLEVRDGPASSSPLIGEYHGTQAPQFLISTGNFMYLLFTTDNSRSSIGFLIHYESVTLESDSCLDPGIPVNGHRHGGDFGIRSTVTFSCDPGYTLSDDEPLVCERNHQWNHALPSCDALCGGYIQGKSGTVLSPGFPDFYPNSLNCTWTIEVSHGKGVQMIFHTFHLESSHDYLLITEDGSFSEPVARLTGSVLPHTIKAGLFGNFTAQLRFISDFSISYEGFNITFSEYDLEPCDDPGVPAFSRRIGFHFGVGDSLTFSCFLGYRLEGATKLTCLGGGRRVWSAPLPRCVAECGASVKGNEGTLLSPNFPSNYDNNHECIYKIETEAGKGIHLRTRSFQLFEGDTLKVYDGKDSSSRPLGTFTKNELLGLILNSTSNHLWLEFNTNGSDTDQGFQLTYTSFDLVKCEDPGIPNYGYRIRDEGHFTDTVVLYSCNPGYAMHGSNTLTCLSGDRRVWDKPLPSCIAECGGQIHAATSGRILSPGYPAPYDNNLHCTWIIEADPGKTISLHFIVFDTEMAHDILKVWDGPVDSDILLKEWSGSALPEDIHSTFNSLTLQFDSDFFISKSGFSIQFSTSIAATCNDPGMPQNGTRYGDSREAGDTVTFQCDPGYQLQGQAKITCVQLNNRFFWQPDPPTCIAACGGNLTGPAGVILSPNYPQPYPPGKECDWRVKVNPDFVIALIFKSFNMEPSYDFLHIYEGEDSNSPLIGSYQGSQAPERIESSGNSLFLAFRSDASVGLSGFAIEFKEKPREACFDPGNIMNGTRVGTDFKLGSTITYQCDSGYKILDPSSITCVIGADGKPSWDQVLPSCNAPCGGQYTGSEGVVLSPNYPHNYTAGQICLYSITVPKEFVVFGQFAYFQTALNDLAELFDGTHAQARLLSSLSGSHSGETLPLATSNQILLRFSAKSGASARGFHFVYQAVPRTSDTQCSSVPEPRYGRRIGSEFSAGSIVRFECNPGYLLQGSTALHCQSVPNALAQWNDTIPSCVVPCSGNFTQRRGTILSPGYPEPYGNNLNCIWKIIVTEGSGIQDPSDQFCHGAELGLEIHDGGDVTAPRLGSFSGTTVPALLNSTSNQLYLHFQSDISVAAAGFHLEYKTVGLAACQEPALPSNSIKIGDRYMVNDVLSFQCEPGYTLQGRSHISCMPGTVRRWNYPSPLCIATCGGTLSTLGGVILSPGFPGSYPNNLDCTWRISLPIGYGAHIQFLNFSTEANHDFLEIQNGPYHTSPMIGQFSGTDLPAALLSTTHETLIHFYSDHSQNRQGFKLAYQAYELQNCPDPPPFQNGYMINSDYSVGQSVSFECYPGYILIGHPVLTCQHGINRNWNYPFPRCDAPCGYNVTSQNGTIYSPGFPDEYPILKDCIWLITVPPGHGVYINFTLLQTEAVNDYIAVWDGPDQNSPQLGVFSGNTALETAYSSTNQVLLKFHSDFSNGGFFVLNFHAFQLKKCQPPPAVPQAEMLTEDDDFEIGDFVKYQCHPGYTLVGTDILTCKLSSQLQFEGSLPTCEAQCPANEVRTGSSGVILSPGYPGNYFNSQTCSWSIKVEPNYNITIFVDTFQSEKQFDALEVFDGSSGQSPLLVVLSGNHTEQSNFTSRSNQLYLRWSTDHATSKKGFKIRYAAPYCSLTHPLKNGGILNRTAGAVGSKVHYFCKPGYRMVGHSNATCRRNPLGMYQWDSLTPLCQAVSCGIPESPGNGSFTGNEFTLDSKVVYECHEGFKLESSQQATAVCQEDGLWSNKGKPPTCKPVACPSIEAQLSEHVIWRLVSGSLNEYGAQVLLSCSPGYYLEGWRLLRCQANGTWNIGDERPSCRVISCGSLSFPPNGNKIGTLTVYGATAIFTCNTGYTLVGSHVRECLANGLWSGSETRCLAGHCGSPDPIVNGHISGDGFSYRDTVVYQCNPGFRLVGTSVRICLQDHKWSGQTPVCVPITCGHPGNPAHGFTNGSEFNLNDVVNFTCNTGYLLQGVSRAQCRSNGQWSSPLPTCRVVNCSDPGFVENAIRHGQQNFPESFEYGMSILYHCKKGFYLLGSSALTCMANGLWDRSLPKCLAISCGHPGVPANAVLTGELFTYGAVVHYSCRGSESLIGNDTRVCQEDSHWSGALPHCTGNNPGFCGDPGTPAHGSRLGDDFKTKSLLRFSCEMGHQLRGSPERTCLLNGSWSGLQPVCEAVSCGNPGTPTNGMIVSSDGILFSSSVIYACWEGYKTSGLMTRHCTANGTWTGTAPDCTIISCGDPGTLANGIQFGTDFTFNKTVSYQCNPGYVMEAVTSATIRCTKDGRWNPSKPVCKAVLCPQPPPVQNGTVEGSDFRWGSSISYSCMDGYQLSHSAILSCEGRGVWKGEIPQCLPVFCGDPGIPAEGRLSGKSFTYKSEVFFQCKSPFILVGSSRRVCQADGTWSGIQPTCIDPAHNTCPDPGTPHFGIQNSSRGYEVGSTVFFRCRKGYHIQGSTTRTCLANLTWSGIQTECIPHACRQPETPAHADVRAIDLPTFGYTLVYTCHPGFFLAGGSEHRTCKADMKWTGKSPVCKSKGVREVNETVTKTPVPSDVFFVNSLWKGYYEYLGKRQPATLTVDWFNATSSKVNATFSEASPVELKLTGIYKKEEAHLLLKAFQIKGQADIFVSKFENDNWGLDGYVSSGLERGGFTFQGDIHGKDFGKFKLERQDPLNPDQDSSSHYHGTSSGSVAAAILVPFFALILSGFAFYLYKHRTRPKVQYNGYAGHENSNGQASFENPMYDTNLKPTEAKAVRFDTTLNTVCTVV

SEQ ID NO: 227754 - protein, 3388 aa, Artificial Sequence
  derived and/or modified sequence
MTAWRRFQSLLLLLGLLVLCARLLTAAKGQNCGGLVQGPNGTIESPGFPHGYPNYANCTWIIITGERNRIQLSFHTFALEEDFDILSVYDGQPQQGNLKVRLSGFQLPSSIVSTGSILTLWFTTDFAVSAQGFKALYEVLPSHTCGNPGEILKGVLHGTRFNIGDKIRYSCLPGYILEGHAILTCIVSPGNGASWDFPAPFCRAEGACGGTLRGTSSSISSPHFPSEYENNADCTWTILAEPGDTIALVFTDFQLEEGYDFLEISGTEAPSIWLTGMNLPSPVISSKNWLRLHFTSDSNHRRKGFNAQFQVKKAIELKSRGVKMLPSKDGSHKNSVLSQGGVALVSDMCPDPGIPENGRRAGSDFSRVGANVQFSCEDNYVLQGSKSITCQRVTETLAAWSDHRPICRARTCGSNLRGPSGVITSPNYPVQYEDNAHCVWVITTTDPDKVIKLAFEEFELERGYDTLTVGDAGKVGDTRSVLYVLTGSSVPDLIVSMSNQMWLHLQSDDSIGSPGFKAVYQEIEKGGCGDPGIPAYGKRTGSSFLHGDTLTFECPAAFELVGERVITCQQNNQWSGNKPSCVFSCFFNFTASSGIILSPNYPEEYGNNMNCVWLIISEPGSRIHLIFNDFDVEPQFDFLAVKDDGISDITVLGTFSGNEVPSQLASSGHIVRLEFQSDHSTTGRGFNITYTTFGQNECHDPGIPINGRRFGDRFLLGSSVSFHCDDGFVKTQGSESITCILQDGNVVWSSTVPRCEAPCGGHLTASSGVILPPGWPGYYKDSLHCEWIIEAKPGHSIKITFDRFQTEVNYDTLEVRDGPASSSPLIGEYHGTQAPQFLISTGNFMYLLFTTDNSRSSIGFLIHYESVTLESDSCLDPGIPVNGHRHGGDFGIRSTVTFSCDPGYTLSDDEPLVCERNHQWNHALPSCDALCGGYIQGKSGTVLSPGFPDFYPNSLNCTWTIEVSHGKGVQMIFHTFHLESSHDYLLITEDGSFSEPVARLTGSVLPHTIKAGLFGNFTAQLRFISDFSISYEGFNITFSEYDLEPCDDPGVPAFSRRIGFHFGVGDSLTFSCFLGYRLEGATKLTCLGGGRRVWSAPLPRCVAECGASVKGNEGTLLSPNFPSNYDNNHECIYKIETEAGKGIHLRTRSFQLFEGDTLKVYDGKDSSSRPLGTFTKNELLGLILNSTSNHLWLEFNTNGSDTDQGFQLTYTSFDLVKCEDPGIPNYGYRIRDEGHFTDTVVLYSCNPGYAMHGSNTLTCLSGDRRVWDKPLPSCIAECGGQIHAATSGRILSPGYPAPYDNNLHCTWIIEADPGKTISLHFIVFDTEMAHDILKVWDGPVDSDILLKEWSGSALPEDIHSTFNSLTLQFDSDFFISKSGFSIQFSTSIAATCNDPGMPQNGTRYGDSREAGDTVTFQCDPGYQLQGQAKITCVQLNNRFFWQPDPPTCIAACGGNLTGPAGVILSPNYPQPYPPGKECDWRVKVNPDFVIALIFKSFNMEPSYDFLHIYEGEDSNSPLIGSYQGSQAPERIESSGNSLFLAFRSDASVGLSGFAIEFKEKPREACFDPGNIMNGTRVGTDFKLGSTITYQCDSGYKILDPSSITCVIGADGKPSWDQVLPSCNAPCGGQYTGSEGVVLSPNYPHNYTAGQICLYSITVPKEFVVFGQFAYFQTALNDLAELFDGTHAQARLLSSLSGSHSGETLPLATSNQILLRFSAKSGASARGFHFVYQAVPRTSDTQCSSVPEPRYGRRIGSEFSAGSIVRFECNPGYLLQGSTALHCQSVPNALAQWNDTIPSCVVPCSGNFTQRRGTILSPGYPEPYGNNLNCIWKIIVTEGSGIQIQVISFATEQNWDSLEIHDGGDVTAPRLGSFSGTTVPALLNSTSNQLYLHFQSDISVAAAGFHLEYKTVGLAACQEPALPSNSIKIGDRYMVNDVLSFQCEPGYTLQGRSHISCMPGTVRRWNYPSPLCIATCGGTLSTLGGVILSPGFPGSYPNNLDCTWRISLPIGYGAHIQFLNFSTEANHDFLEIQNGPYHTSPMIGQFSGTDLPAALLSTTHETLIHFYSDHSQNRQGFKLAYQAYELQNCPDPPPFQNGYMINSDYSVGQSVSFECYPGYILIGHPVLTCQHGINRNWNYPFPRCDAPCGYNVTSQNGTIYSPGFPDEYPILKDCIWLITVPPGHGVYINFTLLQTEAVNDYIAVWDGPDQNSPQLGVFSGNTALETAYSSTNQVLLKFHSDFSNGGFFVLNFHAFQLKKCQPPPAVPQAEMLTEDDDFEIGDFVKYQCHPGYTLVGTDILTCKLSSQLQFEGSLPTCEAQCPANEVRTGSSGVILSPGYPGNYFNSQTCSWSIKVEPNYNITIFVDTFQSEKQFDALEVFDGSSGQSPLLVVLSGNHTEQSNFTSRSNQLYLRWSTDHATSKKGFKIRYAAPYCSLTHPLKNGGILNRTAGAVGSKVHYFCKPGYRMVGHSNATCRRNPLGMYQWDSLTPLCQAVSCGIPESPGNGSFTGNEFTLDSKVVYECHEGFKLESSQQATAVCQEDGLWSNKGKPPTCKPVACPSIEAQLSEHVIWRLVSGSLNEYGAQVLLSCSPGYYLEGWRLLRCQANGTWNIGDERPSCRAGHCGSPDPIVNGHISGDGFSYRDTVVYQCNPGFRLVGTSVRICLQDHKWSGQTPVCVPITCGHPGNPAHGFTNGSEFNLNDVVNFTCNTGYLLQGVSRAQCRSNGQWSSPLPTCRVVNCSDPGFVENAIRHGQQNFPESFEYGMSILYHCKKGFYLLGSSALTCMANGLWDRSLPKCLAISCGHPGVPANAVLTGELFTYGAVVHYSCRGSESLIGNDTRVCQEDSHWSGALPHCTGNNPGFCGDPGTPAHGSRLGDDFKTKSLLRFSCEMGHQLRGSPERTCLLNGSWSGLQPVCEAVLCPQPPPVQNGTVEGSDFRWGSSISYSCMDGYQLSHSAILSCEGRGVWKGEIPQCLPVFCGDPGIPAEGRLSGKSFTYKSEVFFQCKSPFILVGSSRRVCQADGTWSGIQPTCIDPAHNTCPDPGTPHFGIQNSSRGYEVGSTVFFRCRKGYHIQGSTTRTCLANLTWSGIQTECIPHACRQPETPAHADVRAIDLPTFGYTLVYTCHPGFFLAGGSEHRTCKADMKWTGKSPVCKSKGVREVNETVTKTPVPSDVFFVNSLWKGYYEYLGKRQPATLTVDWFNATSSKVNATFSEASPVELKLTGIYKKEEAHLLLKAFQIKGQADIFVSKFENDNWGLDGYVSSGLERGGFTFQGDIHGKDFGKFKLERQDPLNPDQDSSSHYHGTSSGSVAAAILVPFFALILSGFAFYLYKHRTRPKVQYNGYAGHENSNGQASFENPMYDTNLKPTEAKAVRFDTTLNTVCTVV

SEQ ID NO: 227755 - protein, 3565 aa, Artificial Sequence
  derived and/or modified sequence
MTAWRRFQSLLLLLGLLVLCARLLTAAKGQNCGGLVQGPNGTIESPGFPHGYPNYANCTWIIITGERNRIQLSFHTFALEEDFDILSVYDGQPQQGNLKVRLSGFQLPSSIVSTGSILTLWFTTDFAVSAQGFKALYEVLPSHTCGNPGEILKGVLHGTRFNIGDKIRYSCLPGYILEGHAILTCIVSPGNGASWDFPAPFCRAEGACGGTLRGTSSSISSPHFPSEYENNADCTWTILAEPGDTIALVFTDFQLEEGYDFLEISGTEAPSIWLTGMNLPSPVISSKNWLRLHFTSDSNHRRKGFNAQFQVKKAIELKSRGVKMLPSKDGSHKNSVLSQGGVALVSDMCPDPGIPENGRRAGSDFSRVGANVQFSCEDNYVLQGSKSITCQRVTETLAAWSDHRPICRARTCGSNLRGPSGVITSPNYPVQYEDNAHCVWVITTTDPDKVIKLAFEEFELERGYDTLTVGDAGKVGDTRSVLYVLTGSSVPDLIVSMSNQMWLHLQSDDSIGSPGFKAVYQEIEKGGCGDPGIPAYGKRTGSSFLHGDTLTFECPAAFELVGERVITCQQNNQWSGNKPSCVFSCFFNFTASSGIILSPNYPEEYGNNMNCVWLIISEPGSRIHLIFNDFDVEPQFDFLAVKDDGISDITVLGTFSGNEVPSQLASSGHIVRLEFQSDHSTTGRGFNITYTTFGQNECHDPGIPINGRRFGDRFLLGSSVSFHCDDGFVKTQGSESITCILQDGNVVWSSTVPRCEAPCGGHLTASSGVILPPGWPGYYKDSLHCEWIIEAKPGHSIKITFDRFQTEVNYDTLEVRDGPASSSPLIGEYHGTQAPQFLISTGNFMYLLFTTDNSRSSIGFLIHYESVTLESDSCLDPGIPVNGHRHGGDFGIRSTVTFSCDPGYTLSDDEPLVCERNHQWNHALPSCDALCGGYIQGKSGTVLSPGFPDFYPNSLNCTWTIEVSHGKGVQMIFHTFHLESSHDYLLITEDGSFSEPVARLTGSVLPHTIKAGLFGNFTAQLRFISDFSISYEGFNITFSEYDLEPCDDPGVPAFSRRIGFHFGVGDSLTFSCFLGYRLEGATKLTCLGGGRRVWSAPLPRCVAECGASVKGNEGTLLSPNFPSNYDNNHECIYKIETEAGKGIHLRTRSFQLFEGDTLKVYDGKDSSSRPLGTFTKNELLGLILNSTSNHLWLEFNTNGSDTDQGFQLTYTSFDLVKCEDPGIPNYGYRIRDEGHFTDTVVLYSCNPGYAMHGSNTLTCLSGDRRVWDKPLPSCIAECGGQIHAATSGRILSPGYPAPYDNNLHCTWIIEADPGKTISLHFIVFDTEMAHDILKVWDGPVDSDILLKEWSGSALPEDIHSTFNSLTLQFDSDFFISKSGFSIQFSTSIAATCNDPGMPQNGTRYGDSREAGDTVTFQCDPGYQLQGQAKITCVQLNNRFFWQPDPPTCIAACGGNLTGPAGVILSPNYPQPYPPGKECDWRVKVNPDFVIALIFKSFNMEPSYDFLHIYEGEDSNSPLIGSYQGSQAPERIESSGNSLFLAFRSDASVGLSGFAIEFKEKPREACFDPGNIMNGTRVGTDFKLGSTITYQCDSGYKILDPSSITCVIGADGKPSWDQVLPSCNAPCGGQYTGSEGVVLSPNYPHNYTAGQICLYSITVPKEFVVFGQFAYFQTALNDLAELFDGTHAQARLLSSLSGSHSGETLPLATSNQILLRFSAKSGASARGFHFVYQAVPRTSDTQCSSVPEPRYGRRIGSEFSAGSIVRFECNPGYLLQGSTALHCQSVPNALAQWNDTIPSCVVPCSGNFTQRRGTILSPGYPEPYGNNLNCIWKIIVTEGSGIQIQVISFATEQNWDSLEIHDGGDVTAPRLGSFSGTTVPALLNSTSNQLYLHFQSDISVAAAGFHLEYKTVGLAACQEPALPSNSIKIGDRYMVNDVLSFQCEPGYTLQGRSHISCMPGTVRRWNYPSPLCIATCGGTLSTLGGVILSPGFPGSYPNNLDCTWRISLPIGYGAHIQFLNFSTEANHDFLEIQNGPYHTSPMIGQFSGTDLPAALLSTTHETLIHFYSDHSQNRQGFKLAYQAYELQNCPDPPPFQNGYMINSDYSVGQSVSFECYPGYILIGHPVLTCQHGINRNWNYPFPRCDAPCGYNVTSQNGTIYSPGFPDEYPILKDCIWLITVPPGHGVYINFTLLQTEAVNDYIAVWDGPDQNSPQLGVFSGNTALETAYSSTNQVLLKFHSDFSNGGFFVLNFHAFQLKKCQPPPAVPQAEMLTEDDDFEIGDFVKYQCHPGYTLVGTDILTCKLSSQLQFEGSLPTCEAQCPANEVRTGSSGVILSPGYPGNYFNSQTCSWSIKVEPNYNITIFVDTFQSEKQFDALEVFDGSSGQSPLLVVLSGNHTEQSNFTSRSNQLYLRWSTDHATSKKGFKIRYAAPYCSLTHPLKNGGILNRTAGAVGSKVHYFCKPGYRMVGHSNATCRRNPLGMYQWDSLTPLCQAVSCGIPESPGNGSFTGNEFTLDSKVVYECHEGFKLESSQQATAVCQEDGLWSNKGKPPTCKPVACPSIEAQLSEHVIWRLVSGSLNEYGAQVLLSCSPGYYLEGWRLLRCQANGTWNIGDERPSCRVISCGSLSFPPNGNKIGTLTVYGATAIFTCNTGYTLVGSHVRECLANGLWSGSETRCLAGHCGSPDPIVNGHISGDGFSYRDTVVYQCNPGFRLVGTSVRICLQDHKWSGQTPVCVPITCGHPGNPAHGFTNGSEFNLNDVVNFTCNTGYLLQGVSRAQCRSNGQWSSPLPTCRVVNCSDPGFVENAIRHGQQNFPESFEYGMSILYHCKKGFYLLGSSALTCMANGLWDRSLPKCLAISCGHPGVPANAVLTGELFTYGAVVHYSCRGSESLIGNDTRVCQEDSHWSGALPHCTGNNPGFCGDPGTPAHGSRLGDDFKTKSLLRFSCEMGHQLRGSPERTCLLNGSWSGLQPVCEAVSCGNPGTPTNGMIVSSDGILFSSSVIYACWEGYKTSGLMTRHCTANGTWTGTAPDCTIISCGDPGTLANGIQFGTDFTFNKTVSYQCNPGYVMEAVTSATIRCTKDGRWNPSKPVCKAVLCPQPPPVQNGTVEGSDFRWGSSISYSCMDGYQLSHSAILSCEGRGVWKGEIPQCLPVFCGDPGIPAEGRLSGKSFTYKSEVFFQCKSPFILVGSSRRVCQADGTWSGIQPTCIDPAHNTCPDPGTPHFGIQNSSRGYEVGSTVFFRCRKGYHIQGSTTRTCLANLTWSGIQTECIPHACRQPETPAHADVRAIDLPTFGYTLVYTCHPGFFLAGGSEHRTCKADMKWTGKSPVCKSKGVREVNETVTKTPVPSDVFFVNSLWKGYYEYLGKRQPATLTVDWFNATSSKVNATFSEASPVELKLTGIYKKEEAHLLLKAFQIKGQADIFVSKFENDNWGLDGYVSSGLERGGFTFQGDIHGKDFGKFKLERQDPLNPDQDSSSHYHGTSSGSVAAAILVPFFALILSGFAFYLYKHRTRPKVQYNGYAGHENSNGQASFENPMYDTNLKPTEAKAVRFDTTLNTVCTVV

SEQ ID NO: 227756 - protein, 3564 aa, Artificial Sequence
  derived and/or modified sequence
MTAWRRFQSLLLLLGLLVLCARLLTAAKGQNCGGLVQGPNGTIESPGFPHGYPNYANCTWIIITGERNRIQLSFHTFALEEDFDILSVYDGQPQQGNLKVRLSGFQLPSSIVSTGSILTLWFTTDFAVSAQGFKALYEVLPSHTCGNPGEILKGVLHGTRFNIGDKIRYSCLPGYILEGHAILTCIVSPGNGASWDFPAPFCRAEGACGGTLRGTSSSISSPHFPSEYENNADCTWTILAEPGDTIALVFTDFQLEEGYDFLEISGTEAPSIWLTGMNLPSPVISSKNWLRLHFTSDSNHRRKGFNAQFQVKKAIELKSRGVKMLPSKDGSHKNSVLSQGGVALVSDMCPDPGIPENGRRAGSDFRVGANVQFSCEDNYVLQGSKSITCQRVTETLAAWSDHRPICRARTCGSNLRGPSGVITSPNYPVQYEDNAHCVWVITTTDPDKVIKLAFEEFELERGYDTLTVGDAGKVGDTRSVLYVLTGSSVPDLIVSMSNQMWLHLQSDDSIGSPGFKAVYQEIEKGGCGDPGIPAYGKRTGSSFLHGDTLTFECPAAFELVGERVITCQQNNQWSGNKPSCVFSCFFNFTASSGIILSPNYPEEYGNNMNCVWLIISEPGSRIHLIFNDFDVEPQFDFLAVKDDGISDITVLGTFSGNEVPSQLASSGHIVRLEFQSDHSTTGRGFNITYTTFGQNECHDPGIPINGRRFGDRFLLGSSVSFHCDDGFVKTQGSESITCILQDGNVVWSSTVPRCEAPCGGHLTASSGVILPPGWPGYYKDSLHCEWIIEAKPGHSIKITFDRFQTEVNYDTLEVRDGPASSSPLIGEYHGTQAPQFLISTGNFMYLLFTTDNSRSSIGFLIHYESVTLESDSCLDPGIPVNGHRHGGDFGIRSTVTFSCDPGYTLSDDEPLVCERNHQWNHALPSCDALCGGYIQGKSGTVLSPGFPDFYPNSLNCTWTIEVSHGKGVQMIFHTFHLESSHDYLLITEDGSFSEPVARLTGSVLPHTIKAGLFGNFTAQLRFISDFSISYEGFNITFSEYDLEPCDDPGVPAFSRRIGFHFGVGDSLTFSCFLGYRLEGATKLTCLGGGRRVWSAPLPRCVAECGASVKGNEGTLLSPNFPSNYDNNHECIYKIETEAGKGIHLRTRSFQLFEGDTLKVYDGKDSSSRPLGTFTKNELLGLILNSTSNHLWLEFNTNGSDTDQGFQLTYTSFDLVKCEDPGIPNYGYRIRDEGHFTDTVVLYSCNPGYAMHGSNTLTCLSGDRRVWDKPLPSCIAECGGQIHAATSGRILSPGYPAPYDNNLHCTWIIEADPGKTISLHFIVFDTEMAHDILKVWDGPVDSDILLKEWSGSALPEDIHSTFNSLTLQFDSDFFISKSGFSIQFSTSIAATCNDPGMPQNGTRYGDSREAGDTVTFQCDPGYQLQGQAKITCVQLNNRFFWQPDPPTCIAACGGNLTGPAGVILSPNYPQPYPPGKECDWRVKVNPDFVIALIFKSFNMEPSYDFLHIYEGEDSNSPLIGSYQGSQAPERIESSGNSLFLAFRSDASVGLSGFAIEFKEKPREACFDPGNIMNGTRVGTDFKLGSTITYQCDSGYKILDPSSITCVIGADGKPSWDQVLPSCNAPCGGQYTGSEGVVLSPNYPHNYTAGQICLYSITVPKEFVVFGQFAYFQTALNDLAELFDGTHAQARLLSSLSGSHSGETLPLATSNQILLRFSAKSGASARGFHFVYQAVPRTSDTQCSSVPEPRYGRRIGSEFSAGSIVRFECNPGYLLQGSTALHCQSVPNALAQWNDTIPSCVVPCSGNFTQRRGTILSPGYPEPYGNNLNCIWKIIVTEGSGIQIQVISFATEQNWDSLEIHDGGDVTAPRLGSFSGTTVPALLNSTSNQLYLHFQSDISVAAAGFHLEYKTVGLAACQEPALPSNSIKIGDRYMVNDVLSFQCEPGYTLQGRSHISCMPGTVRRWNYPSPLCIATCGGTLSTLGGVILSPGFPGSYPNNLDCTWRISLPIGYGAHIQFLNFSTEANHDFLEIQNGPYHTSPMIGQFSGTDLPAALLSTTHETLIHFYSDHSQNRQGFKLAYQAYELQNCPDPPPFQNGYMINSDYSVGQSVSFECYPGYILIGHPVLTCQHGINRNWNYPFPRCDAPCGYNVTSQNGTIYSPGFPDEYPILKDCIWLITVPPGHGVYINFTLLQTEAVNDYIAVWDGPDQNSPQLGVFSGNTALETAYSSTNQVLLKFHSDFSNGGFFVLNFHAFQLKKCQPPPAVPQAEMLTEDDDFEIGDFVKYQCHPGYTLVGTDILTCKLSSQLQFEGSLPTCEAQCPANEVRTGSSGVILSPGYPGNYFNSQTCSWSIKVEPNYNITIFVDTFQSEKQFDALEVFDGSSGQSPLLVVLSGNHTEQSNFTSRSNQLYLRWSTDHATSKKGFKIRYAAPYCSLTHPLKNGGILNRTAGAVGSKVHYFCKPGYRMVGHSNATCRRNPLGMYQWDSLTPLCQAVSCGIPESPGNGSFTGNEFTLDSKVVYECHEGFKLESSQQATAVCQEDGLWSNKGKPPTCKPVACPSIEAQLSEHVIWRLVSGSLNEYGAQVLLSCSPGYYLEGWRLLRCQANGTWNIGDERPSCRVISCGSLSFPPNGNKIGTLTVYGATAIFTCNTGYTLVGSHVRECLANGLWSGSETRCLAGHCGSPDPIVNGHISGDGFSYRDTVVYQCNPGFRLVGTSVRICLQDHKWSGQTPVCVPITCGHPGNPAHGFTNGSEFNLNDVVNFTCNTGYLLQGVSRAQCRSNGQWSSPLPTCRVVNCSDPGFVENAIRHGQQNFPESFEYGMSILYHCKKGFYLLGSSALTCMANGLWDRSLPKCLAISCGHPGVPANAVLTGELFTYGAVVHYSCRGSESLIGNDTRVCQEDSHWSGALPHCTGNNPGFCGDPGTPAHGSRLGDDFKTKSLLRFSCEMGHQLRGSPERTCLLNGSWSGLQPVCEAVSCGNPGTPTNGMIVSSDGILFSSSVIYACWEGYKTSGLMTRHCTANGTWTGTAPDCTIISCGDPGTLANGIQFGTDFTFNKTVSYQCNPGYVMEAVTSATIRCTKDGRWNPSKPVCKAVLCPQPPPVQNGTVEGSDFRWGSSISYSCMDGYQLSHSAILSCEGRGVWKGEIPQCLPVFCGDPGIPAEGRLSGKSFTYKSEVFFQCKSPFILVGSSRRVCQADGTWSGIQPTCIDPAHNTCPDPGTPHFGIQNSSRGYEVGSTVFFRCRKGYHIQGSTTRTCLANLTWSGIQTECIPHACRQPETPAHADVRAIDLPTFGYTLVYTCHPGFFLAGGSEHRTCKADMKWTGKSPVCKSKGVREVNETVTKTPVPSDVFFVNSLWKGYYEYLGKRQPATLTVDWFNATSSKVNATFSEASPVELKLTGIYKKEEAHLLLKAFQIKGQADIFVSKFENDNWGLDGYVSSGLERGGFTFQGDIHGKDFGKFKLERQDPLNPDQDSSSHYHGTSSGSVAAAILVPFFALILSGFAFYLYKHRTRPKVQYNGYAGHENSNGQASFENPMYDTNLKPTEAKAVRFDTTLNTVCTVV

SEQ ID NO: 227757 - protein, 2109 aa, Artificial Sequence
  derived and/or modified sequence
MTAWRRFQSLLLLLGLLVLCARLLTAAKGQNCGGLVQGPNGTIESPGFPHGYPNYANCTWIIITGERNRIQLSFHTFALEEDFDILSVYDGQPQQGNLKVRLSGFQLPSSIVSTGSILTLWFTTDFAVSAQGFKALYEVLPSHTCGNPGEILKGVLHGTRFNIGDKIRYSCLPGYILEGHAILTCIVSPGNGASWDFPAPFCRAEGACGGTLRGTSSSISSPHFPSEYENNADCTWTILAEPGDTIALVFTDFQLEEGYDFLEISGTEAPSIWLTGMNLPSPVISSKNWLRLHFTSDSNHRRKGFNAQFQVKKAIELKSRGVKMLPSKDGSHKNSVLSQGGVALVSDMCPDPGIPENGRRAGSDFRVGANVQFSCEDNYVLQGSKSITCQRVTETLAAWSDHRPICRARTCGSNLRGPSGVITSPNYPVQYEDNAHCVWVITTTDPDKVIKLAFEEFELERGYDTLTVGDAGKVGDTRSVLYVLTGSSVPDLIVSMSNQMWLHLQSDDSIGSPGFKAVYQEIEKGGCGDPGIPAYGKRTGSSFLHGDTLTFECPAAFELVGERVITCQQNNQWSGNKPSCVFSCFFNFTASSGIILSPNYPEEYGNNMNCVWLIISEPGSRIHLIFNDFDVEPQFDFLAVKDDGISDITVLGTFSGNEVPSQLASSGHIVRLEFQSDHSTTGRGFNITYTTFGQNECHDPGIPINGRRFGDRFLLGSSVSFHCDDGFVKTQGSESITCILQDGNVVWSSTVPRCEAPCGGHLTASSGVILPPGWPGYYKDSLHCEWIIEAKPGHSIKITFDRFQTEVNYDTLEVRDGPASSSPLIGEYHGTQAPQFLISTGNFMYLLFTTDNSRSSIGFLIHYESVTLESDSCLDPGIPVNGHRHGGDFGIRSTVTFSCDPGYTLSDDEPLVCERNHQWNHALPSCDALCGGYIQGKSGTVLSPGFPDFYPNSLNCTWTIEVSHGKGVQMIFHTFHLESSHDYLLITEDGSFSEPVARLTGSVLPHTIKAGLFGNFTAQLRFISDFSISYEGFNITFSEYDLEPCDDPGVPAFSRRIGFHFGVGDSLTFSCFLGYRLEGATKLTCLGGGRRVWSAPLPRCVAECGASVKGNEGTLLSPNFPSNYDNNHECIYKIETEAGKGIHLRTRSFQLFEGDTLKVYDGKDSSSRPLGTFTKNELLGLILNSTSNHLWLEFNTNGSDTDQGFQLTYTSFDLVKCEDPGIPNYGYRIRDEGHFTDTVVLYSCNPGYAMHGSNTLTCLSGDRRVWDKPLPSCIAECGGQIHAATSGRILSPGYPAPYDNNLHCTWIIEADPGKTISLHFIVFDTEMAHDILKVWDGPVDSDILLKEWSGSALPEDIHSTFNSLTLQFDSDFFISKSGFSIQFSTSIAATCNDPGMPQNGTRYGDSREAGDTVTFQCDPGYQLQGQAKITCVQLNNRFFWQPDPPTCIAACGGNLTGPAGVILSPNYPQPYPPGKECDWRVKVNPDFVIALIFKSFNMEPSYDFLHIYEGEDSNSPLIGSYQGSQAPERIESSGNSLFLAFRSDASVGLSGFAIEFKEKPREACFDPGNIMNGTRVGTDFKLGSTITYQCDSGYKILDPSSITCVIGADGKPSWDQVLPSCNAPCGGQYTGSEGVVLSPNYPHNYTAGQICLYSITVPKEFVVFGQFAYFQTALNDLAELFDGTHAQARLLSSLSGSHSGETLPLATSNQILLRFSAKSGASARGFHFVYQAVPRTSDTQCSSVPEPRYGRRIGSEFSAGSIVRFECNPGYLLQGSTALHCQSVPNALAQWNDTIPSCVVPCSGNFTQRRGTILSPGYPEPYGNNLNCIWKIIVTEGSGIQIQVISFATEQNWDSLEIHDGGDVTAPRLGSFSGTTVPALLNSTSNQLYLHFQSDISVAAAGFHLEYKTVGLAACQEPALPSNSIKIGDRYMVNDVLSFQCEPGYTLQGRSHISCMPGTVRRWNYPSPLCIATCGGTLSTLGGVILSPGFPGSYPNNLDCTWRISLPIGYGAHIQFLNFSTEANHDFLEIQNGPYHTSPMIGQFSGTDLPAALLSTTHETLIHFYSDHSQNRQGFKLAYQGGSGNIGPAFPCLDTPFQARCQGEERTFN

SEQ ID NO: 227758 - protein, 3387 aa, Artificial Sequence
  derived and/or modified sequence
MTAWRRFQSLLLLLGLLVLCARLLTAAKGQNCGGLVQGPNGTIESPGFPHGYPNYANCTWIIITGERNRIQLSFHTFALEEDFDILSVYDGQPQQGNLKVRLSGFQLPSSIVSTGSILTLWFTTDFAVSAQGFKALYEVLPSHTCGNPGEILKGVLHGTRFNIGDKIRYSCLPGYILEGHAILTCIVSPGNGASWDFPAPFCRAEGACGGTLRGTSSSISSPHFPSEYENNADCTWTILAEPGDTIALVFTDFQLEEGYDFLEISGTEAPSIWLTGMNLPSPVISSKNWLRLHFTSDSNHRRKGFNAQFQVKKAIELKSRGVKMLPSKDGSHKNSVLSQGGVALVSDMCPDPGIPENGRRAGSDFRVGANVQFSCEDNYVLQGSKSITCQRVTETLAAWSDHRPICRARTCGSNLRGPSGVITSPNYPVQYEDNAHCVWVITTTDPDKVIKLAFEEFELERGYDTLTVGDAGKVGDTRSVLYVLTGSSVPDLIVSMSNQMWLHLQSDDSIGSPGFKAVYQEIEKGGCGDPGIPAYGKRTGSSFLHGDTLTFECPAAFELVGERVITCQQNNQWSGNKPSCVFSCFFNFTASSGIILSPNYPEEYGNNMNCVWLIISEPGSRIHLIFNDFDVEPQFDFLAVKDDGISDITVLGTFSGNEVPSQLASSGHIVRLEFQSDHSTTGRGFNITYTTFGQNECHDPGIPINGRRFGDRFLLGSSVSFHCDDGFVKTQGSESITCILQDGNVVWSSTVPRCEAPCGGHLTASSGVILPPGWPGYYKDSLHCEWIIEAKPGHSIKITFDRFQTEVNYDTLEVRDGPASSSPLIGEYHGTQAPQFLISTGNFMYLLFTTDNSRSSIGFLIHYESVTLESDSCLDPGIPVNGHRHGGDFGIRSTVTFSCDPGYTLSDDEPLVCERNHQWNHALPSCDALCGGYIQGKSGTVLSPGFPDFYPNSLNCTWTIEVSHGKGVQMIFHTFHLESSHDYLLITEDGSFSEPVARLTGSVLPHTIKAGLFGNFTAQLRFISDFSISYEGFNITFSEYDLEPCDDPGVPAFSRRIGFHFGVGDSLTFSCFLGYRLEGATKLTCLGGGRRVWSAPLPRCVAECGASVKGNEGTLLSPNFPSNYDNNHECIYKIETEAGKGIHLRTRSFQLFEGDTLKVYDGKDSSSRPLGTFTKNELLGLILNSTSNHLWLEFNTNGSDTDQGFQLTYTSFDLVKCEDPGIPNYGYRIRDEGHFTDTVVLYSCNPGYAMHGSNTLTCLSGDRRVWDKPLPSCIAECGGQIHAATSGRILSPGYPAPYDNNLHCTWIIEADPGKTISLHFIVFDTEMAHDILKVWDGPVDSDILLKEWSGSALPEDIHSTFNSLTLQFDSDFFISKSGFSIQFSTSIAATCNDPGMPQNGTRYGDSREAGDTVTFQCDPGYQLQGQAKITCVQLNNRFFWQPDPPTCIAACGGNLTGPAGVILSPNYPQPYPPGKECDWRVKVNPDFVIALIFKSFNMEPSYDFLHIYEGEDSNSPLIGSYQGSQAPERIESSGNSLFLAFRSDASVGLSGFAIEFKEKPREACFDPGNIMNGTRVGTDFKLGSTITYQCDSGYKILDPSSITCVIGADGKPSWDQVLPSCNAPCGGQYTGSEGVVLSPNYPHNYTAGQICLYSITVPKEFVVFGQFAYFQTALNDLAELFDGTHAQARLLSSLSGSHSGETLPLATSNQILLRFSAKSGASARGFHFVYQAVPRTSDTQCSSVPEPRYGRRIGSEFSAGSIVRFECNPGYLLQGSTALHCQSVPNALAQWNDTIPSCVVPCSGNFTQRRGTILSPGYPEPYGNNLNCIWKIIVTEGSGIQIQVISFATEQNWDSLEIHDGGDVTAPRLGSFSGTTVPALLNSTSNQLYLHFQSDISVAAAGFHLEYKTVGLAACQEPALPSNSIKIGDRYMVNDVLSFQCEPGYTLQGRSHISCMPGTVRRWNYPSPLCIATCGGTLSTLGGVILSPGFPGSYPNNLDCTWRISLPIGYGAHIQFLNFSTEANHDFLEIQNGPYHTSPMIGQFSGTDLPAALLSTTHETLIHFYSDHSQNRQGFKLAYQAYELQNCPDPPPFQNGYMINSDYSVGQSVSFECYPGYILIGHPVLTCQHGINRNWNYPFPRCDAPCGYNVTSQNGTIYSPGFPDEYPILKDCIWLITVPPGHGVYINFTLLQTEAVNDYIAVWDGPDQNSPQLGVFSGNTALETAYSSTNQVLLKFHSDFSNGGFFVLNFHAFQLKKCQPPPAVPQAEMLTEDDDFEIGDFVKYQCHPGYTLVGTDILTCKLSSQLQFEGSLPTCEAQCPANEVRTGSSGVILSPGYPGNYFNSQTCSWSIKVEPNYNITIFVDTFQSEKQFDALEVFDGSSGQSPLLVVLSGNHTEQSNFTSRSNQLYLRWSTDHATSKKGFKIRYAAPYCSLTHPLKNGGILNRTAGAVGSKVHYFCKPGYRMVGHSNATCRRNPLGMYQWDSLTPLCQAVSCGIPESPGNGSFTGNEFTLDSKVVYECHEGFKLESSQQATAVCQEDGLWSNKGKPPTCKPVACPSIEAQLSEHVIWRLVSGSLNEYGAQVLLSCSPGYYLEGWRLLRCQANGTWNIGDERPSCRAGHCGSPDPIVNGHISGDGFSYRDTVVYQCNPGFRLVGTSVRICLQDHKWSGQTPVCVPITCGHPGNPAHGFTNGSEFNLNDVVNFTCNTGYLLQGVSRAQCRSNGQWSSPLPTCRVVNCSDPGFVENAIRHGQQNFPESFEYGMSILYHCKKGFYLLGSSALTCMANGLWDRSLPKCLAISCGHPGVPANAVLTGELFTYGAVVHYSCRGSESLIGNDTRVCQEDSHWSGALPHCTGNNPGFCGDPGTPAHGSRLGDDFKTKSLLRFSCEMGHQLRGSPERTCLLNGSWSGLQPVCEAVLCPQPPPVQNGTVEGSDFRWGSSISYSCMDGYQLSHSAILSCEGRGVWKGEIPQCLPVFCGDPGIPAEGRLSGKSFTYKSEVFFQCKSPFILVGSSRRVCQADGTWSGIQPTCIDPAHNTCPDPGTPHFGIQNSSRGYEVGSTVFFRCRKGYHIQGSTTRTCLANLTWSGIQTECIPHACRQPETPAHADVRAIDLPTFGYTLVYTCHPGFFLAGGSEHRTCKADMKWTGKSPVCKSKGVREVNETVTKTPVPSDVFFVNSLWKGYYEYLGKRQPATLTVDWFNATSSKVNATFSEASPVELKLTGIYKKEEAHLLLKAFQIKGQADIFVSKFENDNWGLDGYVSSGLERGGFTFQGDIHGKDFGKFKLERQDPLNPDQDSSSHYHGTSSGSVAAAILVPFFALILSGFAFYLYKHRTRPKVQYNGYAGHENSNGQASFENPMYDTNLKPTEAKAVRFDTTLNTVCTVV

SEQ ID NO: 227759 - DNA, 10281 bp, Artificial Sequence
  derived and/or modified sequence
gtgcttccctcgcacacatgcggaaaccccggagagatactgaaaggtgttctacacgggactcggttcaatattggcgacaagatcaggtactcctgcctgccaggatatattctggaaggacatgcaattctgacgtgcattgtgtcaccagggaacggagcatcgtgggatttccctgcccctttctgcagggctgaaggggcctgcggagggacgctgcgaggaaccagcagtagcatttcctccccccacttcccaagtgaatatgaaaataacgccgactgtacctggaccatcctggccgagccaggcgacactatcgcattagtcttcactgacttccaattggaggagggctacgatttcctggaaataagcgggacggaagctcctagcatctggctgacaggaatgaatctgcccagccctgtcatttcttcaaagaactggcttcgactgcatttcactagcgatagcaatcaccgccgtaaaggttttaatgctcaattccaggttaagaaggccattgaactaaaatctcggggcgtgaaaatgcttccaagcaaagatgggtctcacaagaacagtgtgctgtcccagggcggggtggcactggtcagtgatatgtgtccagaccctggtattcctgaaaatgggcgaagagctgggagtgactttagtagggtcggcgctaacgtacagttttcttgtgaggataattatgtcctccaaggttccaagagcataacatgccaacgtgtaaccgagactctggctgcctggtcagaccatcgcccaatttgccgggctagaacctgcgggtctaatctccgtgggccttcgggcgtgataacaagtcccaactacccggtccagtacgaagataacgcacactgcgtctgggtgatcactacgactgatccggataaggttatcaaactggctttcgaagaattcgagcttgagcgcggctacgacactttgactgttggcgacgccggtaaggtcggggacaccaggtctgtgctctatgtactgacgggaagttccgtgcctgacctcatcgtgagtatgagtaaccaaatgtggcttcacctgcagtccgatgattccattggcagtcccggctttaaagcagtttatcaggaaatcgagaagggcggatgtggtgacccaggtatccccgcgtatggcaaacgtaccgggtcctcattccttcacggtgacaccctgaccttcgagtgtcccgcagcttttgagctggtgggagagcgggtcattacctgccagcagaataaccagtggagcggcaacaagccaagctgcgtcttctcctgcttcttcaactttacggcctcttctggcatcattctgtcacccaactatcctgaggagtacggcaacaacatgaattgcgtctggttaattataagtgaacctgggtcacgcatccaccttatatttaatgatttcgacgtcgaaccacaattcgatttcctggctgttaaagacgatggcatcagtgacattacagttctgggcactttctctgggaatgaggttccatcacaactggcctcctccggccacatcgtgcgtctggagtttcagagcgatcattccacaaccggaagaggcttcaatattacatacactacatttggccaaaacgagtgccacgaccctgggataccaattaatgggcggcggtttggcgatcgattcctgctcgggtcttccgtttcattccattgcgatgacggctttgtgaaaacccaagggagtgaatccataacctgtatcctgcaggacggaaacgtggtgtggtcctctacagttcctcgctgcgaggcaccttgtgggggccacttgaccgcatctagcggtgttattcttcctccgggctggcccggttattacaaagactccttacattgcgagtggatcatcgaggctaaacctgggcacagcatcaagatcaccttcgaccgttttcagaccgaggtgaactatgatacgttggaggttcgcgatggccccgctagttccagtcctctgatcggcgaataccacggcacccaggccccgcagttcctcatctctaccggcaactttatgtatctgctgtttacgacggacaactcacgcagctcaatcggcttcttgatccattatgaatcagttactctggaatcagactcctgcctggatccagggatcccagtgaacggacacagacacggaggtgatttcggtattcgtagcacagtgacattctcctgcgaccctgggtacacgctatcggacgacgagccactcgtatgcgagcggaaccatcaatggaaccacgctctaccatcgtgcgacgctctgtgcgggggctacatccaaggaaagtcagggaccgtgctgtcccctgggttccccgatttctaccctaatagccttaactgtacatggaccatcgaagtttcgcacggcaagggggttcagatgattttccataccttccatcttgagagctctcatgactacttgctgattacggaagacggctccttttcagagcctgtggctcgtttaacgggaagcgttctaccccacacaataaaggcggggctctttggaaatttcactgcccagcttcgcttcatctctgatttctcaatttcatacgaagggtttaacatcaccttttccgagtacgacctagagccgtgcgacgaccctggggtacctgcttttagccggcgcatcggatttcatttcggcgtaggagacagcctcacattttcgtgcttcctgggctaccgactggagggcgccactaaacttacttgtctcggaggagggcgtcgcgtatggtctgcccctctgccccggtgcgttgcggagtgcggggccagcgtgaagggaaatgagggaacccttttgtctccaaacttccctagcaattatgacaataatcatgagtgcatctataaaatcgaaactgaggcaggaaagggaatccacctgcgaacccgctctttccaactctttgaaggcgacacactgaaagtgtacgacggcaaggactctagctccaggccgttgggcacctttaccaagaacgaactcctggggttgatattgaacagcacaagcaaccatctttggctggaatttaacactaatgggagcgacactgaccagggattccagctcacttacactagcttcgatctggttaagtgcgaagaccccggaattccaaattatggttatcgtattagagacgagggacattttaccgacaccgtggtgctgtactcttgtaatcccgggtatgcaatgcacgggtctaataccctaacgtgcttgtcaggagacaggcgagtctgggacaagcccctaccttcgtgtatcgctgaatgtggcggacagatccatgcagccacgtcgggcagaatactttccccaggataccctgcgccctatgacaacaacctgcattgtacctggattatagaggcggatccaggaaagactatctctctgcacttcatcgtgttcgatacagagatggcccacgacatactgaaagtgtgggacgggcctgtcgattccgatatcctgctgaaagaatggtctggaagtgctctcccggaagacatccattcgacgttcaatagcttgaccctacagttcgactccgacttctttatcagcaagagcggcttttcaatccagttttcaacaagcatcgctgcaacctgtaatgacccaggaatgccccagaatggtacaagatacggggactcacgcgaggccggagatactgtcaccttccagtgtgaccctggataccaactgcaagggcaggctaaaatcacctgcgtccagttgaacaaccgctttttctggcaacctgatccccccacttgcattgccgcctgcggcgggaacctgaccggacctgccggggtgatcttgtctccgaactacccacagccctatccacccggaaaagagtgtgattggagggtgaaggtcaaccctgatttcgtgatagcattgatttttaaatcttttaacatggagccttcctacgatttcttgcacatttatgaaggggaggattccaactctccgttaataggatcttaccagggttcacaggccccagagcgcatcgagtcatctggaaactcactattcctggccttccgatcagatgccagcgttgggctaagtgggttcgccattgaatttaaggagaaaccccgggaggcctgctttgaccccgggaacatcatgaatggaacacgcgtcggtaccgacttcaagttaggaagcactattacgtatcagtgtgattcaggctacaagatcctcgaccccagtagtatcacctgtgtcattggcgccgatggcaagccttcatgggatcaagtcctgccttcttgcaatgctccctgtggaggtcagtacacaggttcagagggggtcgtactgtcacctaattatccacataactatactgctggccagatatgcctttactccattacagtcccgaaagaattcgtggtgtttggacagttcgcttactttcagacggccctcaacgacctggccgagttgttcgatggcacccacgcccaagccaggctgctgagttcgctgtccggatcgcattctggcgagaccttgccacttgcgacgagtaaccagatcctgctgcgattcagcgccaaaagcggcgctagtgcgagggggttccactttgtctaccaggctgtgccgagaacttctgatacccagtgttcatcagtacctgaacccagatatggcagacgtatcgggagtgaattctcggcagggtccattgtgagatttgagtgcaatccaggctatctgcttcagggatccaccgccctccactgccagtcggtacctaacgcccttgcccagtggaacgacacgatcccgtcgtgtgttgtgccttgctccgggaatttcacccagcgcagggggactattttatcccccggctatcctgagccatatggcaataacttaaactgtatttggaaaatcatcgttaccgagggcagtgggatccaggacccctccgaccagttttgtcatggggccgagcttgggctggagatccacgacggcggtgacgttaccgcgccccgcctgggtagctttagcggaactacagtgcccgccttgctgaattcaacttctaaccagctctatctgcactttcaaagcgacatatcagtggctgcggctggattccatctggagtacaaaactgtgggactagcagcctgtcaggagccagctttgcccagtaatagcatcaagatcggtgaccgatacatggttaatgatgtgctcagcttccagtgtgagcccggatatactctccagggccgcagccacatcagttgcatgccaggaaccgtcagacgctggaattaccctagccccctgtgcatcgccacatgcggaggcacattgtccactttgggaggggttatcctgagccccggattccctggaagctacccgaataacttggattgtacctggagaatctctctgcccattggttacggagcgcacatccagtttctgaacttttctaccgaggctaatcacgactttctcgaaatccaaaacggaccttaccatacaagccccatgatcggccagttctcaggaacggatctgcccgccgccctgctgagtactacccacgagacgcttatccatttttattccgaccattcgcagaatcgacaaggtttcaaactggcataccaggcatacgagctgcaaaattgtcctgatcctcctccatttcaaaacgggtatatgatcaattctgattactcagtaggtcagagtgtgtccttcgagtgctaccctggctacattctgattggtcaccctgttctgacctgtcagcacggaatcaatcgtaattggaattacccgtttccaaggtgcgacgcaccttgcggctataacgtaacttctcagaatggcacaatctacagtccaggctttccagacgaatatcctattctgaaagattgcatatggttgattactgttccaccaggacatggcgtatacataaacttcactcttttgcaaacggaagcggtcaatgactacattgctgtgtgggacggtcctgatcagaactcaccgcagttgggcgtgtttagcggtaacacagccttggagacagcctatagttctactaatcaggtcctccttaagttccacagcgacttcagcaatggaggcttcttcgtgctcaacttccacgcctttcagctgaaaaaatgtcaaccccccccagcagtgcctcaggctgagatgctgacagaagacgatgattttgagataggggatttcgtgaaataccagtgccatcctgggtacacactggttgggaccgatattctgacatgtaaactcagctcccagctgcagttcgaggggagtctaccgacttgtgaggcccagtgccccgcaaacgaggtccggaccggatcttctggcgttattttaagcccgggctaccccggcaactattttaacagccaaacatgttcttggtccattaaagtggaacccaattacaatatcaccatctttgtcgacacctttcagagtgaaaagcagtttgacgctctcgaggtatttgacggatcaagtgggcaatcacctttactcgtggtcctttcaggcaaccacacagagcagtcgaactttaccagccgctccaatcagctgtaccttcgatggtcgaccgatcacgccaccagcaagaaaggcttcaaaataagatacgccgctccctactgtagcctgacacatccccttaagaatggaggtattctgaataggacggctggagctgtgggatccaaagtgcattacttttgtaagccaggttaccgcatggtgggccactccaacgcaacctgtcgaagaaaccctctgggaatgtaccaatgggatagtctgacacccctttgccaggccgtgagctgtggaataccagagtcccctggaaacggctcatttaccggcaatgaattcacattggactcgaaggtagtttatgaatgtcacgagggctttaagttggaatcaagtcaacaagcaacggccgtgtgccaggaggatgggctgtggagcaacaaaggcaagccacccacctgtaagcccgtagcttgtccgtcaatagaagcccagcttagcgagcacgtaatctggcgtcttgttagcgggagccttaatgaatatggggcccaggtgctcctatcatgctcccccggctactacctagagggctggcgtttgctgcggtgtcaggccaacggcacctggaatataggtgatgagaggccctcatgcagggtgatctcatgcggatcgctttcttttccaccaaacggaaataaaatcggaacactgacagtctacggcgccactgctatctttacttgtaacactggatacactctggtgggttctcatgtgagagagtgtcttgcaaacggactctggagcggaagtgagaccagatgcttggctgggcactgcggttcaccagatcccattgtaaacgggcatatctctggcgacggcttctcttatagggataccgtggtttaccagtgtaatccaggcttcaggctggtgggaacgagcgtacggatatgcctacaagaccataagtggagcgggcaaactccagtatgcgttccaattacctgtggccaccctggaaacccggctcacgggtttacgaatggcagcgagttcaacctgaatgacgtcgtcaatttcacttgtaatactgggtacctgctgcagggagtatctcgcgcccagtgcaggagcaatggccagtggagcagccctctgcccacttgtcgggtggtaaattgttccgaccctggttttgtcgaaaacgccatccgtcacggccagcaaaactttccagaatcctttgagtacgggatgagcatactttatcactgtaaaaaggggttttacctgctgggcagctcggctttgacttgtatggccaatgggctgtgggatcgatctttgccaaaatgtttagccatatcctgcggtcaccccggagtcccagcgaacgccgtcttaactggagagctgtttacctatggtgctgttgtgcattactcatgcaggggttctgagagcctcattgggaatgatacacgagtgtgtcaagaggactcccactggtctggcgctttgcctcattgtaccggtaataaccccggcttttgcggcgacccgggaacccctgcccatggcagcaggctcggcgacgacttcaaaacaaagagcctcctccggttctcttgtgaaatgggacaccaactgcggggctcacctgagagaacctgcctgctgaacggcagttggtctggcttgcaacccgtatgcgaggctgtgagttgcggcaacccgggaacccccacaaacggaatgattgtgagcagcgacggaatcctgttttcatcaagtgttatctatgcctgctgggaaggttataagacatccggcctgatgacgagacattgcactgctaacggcacctggacgggtactgcacccgattgtacaattatctcatgcggcgaccccggaacgcttgccaatgggatccagttcggcacggatttcacatttaataagacggtgtcttaccaatgtaaccctggctacgtgatggaggccgtaacctctgccactatccgttgtaccaaagatggccgctggaatccatccaaaccagtttgcaaggcagtgttgtgccctcagccacctcccgtgcagaacggtaccgtggagggttccgatttcaggtggggcagctccatctcatactcatgtatggatgggtatcaactcagccactcagctatactgagctgcgaaggtaggggcgtctggaagggagaaatcccccagtgtctccccgttttttgcggcgaccctgggatccctgcggaggggcgcctcagcggcaagtctttcacgtataagtctgaagttttctttcagtgcaaatctcctttcatcctcgtgggctcttcccgcagggtttgccaggctgatggaacatggtctgggatccaacccacatgtatcgatccagcgcacaacacctgtcctgatccaggcacccctcactttggcatccagaacagctcccgtgggtacgaagttggaagtaccgtcttctttaggtgccgtaagggctatcatattcagggctccactacaaggacttgcctagctaacctgacgtggagtggtatccagacggagtgcatcccacacgcatgtcgacagcccgaaaccccagcacatgccgatgtgagagccattgatctcccgaccttcggatacaccttggtgtacacatgtcatccaggattcttcctggcaggtggatctgagcataggacctgcaaagcagacatgaagtggactggcaagtctcccgtttgtaagtccaaaggagtccgagaggtgaacgaaacagtgactaaaactcctgtgccatcggacgttttctttgtgaactcattgtggaaagggtactatgagtacctgggaaagagacaaccagcaacactgacagtggattggttcaacgcaacctcgtccaaagtgaatgccactttttcagaggccagtccagttgagctaaagctgactggcatctacaagaaggaagaagcacacttactgctcaaggcgttccagatcaagggccaagctgacatctttgtgagcaagtttgagaatgataattgggggctggacggatacgtgagttctggtctggagcgagggggctttaccttccaaggtgatatccatgggaaggacttcggaaaattcaaactggagcggcaggatccactgaacccagaccaggatagctcatctcactaccacggtacatcctcaggatcggttgctgccgccatcctggtcccctttttcgcccttatactcagtggcttcgctttctatctgtataagcatcgcactagacccaaggtccaatacaatgggtatgccgggcacgaaaactcaaacggccaggcatcattcgaaaacccaatgtatgatacaaacctgaaaccaactgaggcaaaagccgtgcgttttgacactacactgaacacggtttgtaccgtggtgtag

SEQ ID NO: 227760 - DNA, 10167 bp, Artificial Sequence
  derived and/or modified sequence
atgaccgcctggcgaaggttccaaagcctgctcctgctcctggggctcctggtcctatgtgcaagattactgacagctgcaaaagggcaaaattgcggggggcttgttcaagggccaaatggaactatagaatcccccggctttccgcacgggtatcccaactacgcaaactgtacgtggattatcatcacaggggagcgtaatcgcattcagttgtctttccatactttcgcccttgaggaagactttgatattctctctgtgtacgacggacagccgcagcagggcaatcttaaggtgcggttgagtgggtttcagctgccctccagtattgtgagcactggctcaattcttactctctggtttactaccgacttcgccgtgtctgctcagggcttcaaggctctttacgaggtcctgcctagtcacacctgcgggaacccaggcgaaatcctgaagggcgtgttacacggcactcggtttaatatcggggacaaaatccgctatagttgcctgcccgggtatattttggagggacacgcaatcctcacctgtatcgtgtccccaggaaacggcgcgtcctgggactttcccgccccattctgccgcgctgaaggtgcctgcgggggcaccctgagggggaccagctcatcaatttcctcgccacatttcccaagcgaatacgagaacaacgcggattgcacttggactatactggccgagcccggcgataccattgcgttggtattcaccgattttcaactcgaggaggggtatgatttcctcgagattagcggcacagaggccccttccatttggctgacaggtatgaatctgccatccccggtgatatcttccaagaattggcttagactccattttacctcggactccaaccatcggcgcaaaggcttcaatgcacagtttcaagtaaagaaggccatcgaattaaagagccggggtgtgaagatgcttccaagcaaagacggatctcacaaaaactcagtccttagtcagggtggggtcgctctggtttctgacatgtgtccggaccccggcattccggagaacggccgaagggccggatcggatttttccagagtgggggctaacgtgcagttcagttgcgaggataattatgttttacaggggagcaaatcaattacttgtcagcgggtgacagagactttggcagcttggtccgatcaccggcctatctgtagagcacgcacttgcggatccaatttaaggggaccctcaggggttattacctcccctaattaccctgtccaatatgaggacaacgcacattgcgtttgggtcattacgactactgatcctgataaagtgattaaactggcgtttgaggagtttgaattggaaaggggttacgacaccttaacagttggtgatgccggtaaggtaggggacacaaggagcgtgctgtacgtgctcacaggctccagcgtgcctgacctgatagtttctatgagtaaccagatgtggttgcacctccaatcagacgattctataggctcccctggcttcaaggctgtctatcaggagattgagaagggtgggtgtggtgatcctggaatcccagcgtatggaaaacgaactggatcctcgttccttcacggcgataccctgaccttcgaatgccctgcagctttcgaacttgttggcgaaagagttataacatgccaacagaataaccagtggagcggtaacaaaccatcttgtgtctttagctgcttttttaatttcacagccagctcagggattatactgagcccgaactaccctgaggagtatggtaataatatgaactgtgtctggttgatcattagcgaaccaggatctcgaatccacctaatttttaatgattttgacgtagagcctcagttcgattttctggctgttaaagatgacggtatatctgacatcaccgtgctgggcacattctctggcaatgaagtgccaagccagttggcaagctcaggccacatcgttcgcttagagtttcagtcagatcacagcacgaccgggcggggctttaacataacctataccactttcggccagaatgaatgtcatgaccctggcattcccattaatggccgccggttcggcgaccgatttttactgggcagttctgtgagttttcactgcgacgacggtttcgtcaagacacaaggctcggaatccatcacctgtattctgcaggatgggaacgtcgtgtggagctctacagtgccccgttgcgaggctccctgtggaggtcatttgaccgcttcatctggagtgatactaccccccgggtggcctggatactataaagactctctgcattgcgaatggattatcgaagcgaagcccggacatagtattaaaatcacgttcgacaggtttcagaccgaggtaaactatgataccctggaggtccgggatggtcccgccagttcctccccactaattggcgagtatcacgggacccaggcaccacagtttctaataagcacagggaatttcatgtacctgctgtttacaaccgacaattcacggtcctccatcggatttctgattcattacgagtcagtgaccctggagtctgactcttgtctagacccgggtatccccgtgaacgggcatcggcatggcggagacttcgggattcgctcaactgtcaccttttcttgtgaccctggttataccctcagcgatgacgaacctttggtgtgtgagcgcaatcaccagtggaaccatgccctacccagctgcgacgccctatgcggaggctacatccaaggaaagtcgggtactgtcctttctccagggttccccgacttctacccaaacagcctaaactgcacttggaccattgaggtgagccacggtaaaggcgtccaaatgatttttcacaccttccacctcgaaagctctcacgactaccttctcattaccgaggatggtagcttttcagagcccgtagcccgactgaccggatccgtactaccccataccataaaagccggacttttcgggaacttcacggctcagttgcggtttattagtgacttttcaatcagttacgaaggcttcaatatcacatttagtgagtacgacctggaaccatgcgatgaccccggagtgccggcattctcccggagaattggattccactttggcgttggcgattccttgacattttcctgtttcttaggatataggttggagggcgccacaaagctgacctgcttaggcggggggcgtagggtgtggtccgcgcctctgcccagatgtgtagccgagtgtggggcaagtgttaaagggaacgaaggcacactgcttagccctaactttccctcgaattacgacaacaaccatgagtgcatttataagattgaaactgaagccggtaaagggattcacttgagaacgcgctcctttcagctattcgagggtgatactttgaaggtttacgatgggaaagattccagctcacgaccgctgggaactttcacaaagaacgaactcctgggcctgatcctgaactctacatccaaccatctctggctggaattcaatacgaacggttccgacaccgaccaggggttccagttgacctacacgagctttgatttggtcaagtgcgaagaccctggtatccctaattatggttataggatcagagatgaagggcattttacggataccgtcgtgctgtactcctgtaaccccggctatgcaatgcacggctctaataccctgacctgcctaagcggggatcgccgggtgtgggataagcctcttccctcttgcatcgctgagtgtggaggccaaatccacgccgcaacatccggtagaatccttagtcccgggtaccccgccccttatgacaataacctccactgtacgtggattattgaagccgaccctggcaaaactatctcattgcatttcatcgttttcgataccgagatggctcatgacatcctcaaggtttgggacggaccggtggattccgacatcctgctgaaagagtggtcaggcagcgctctcccggaagacatccacagcacattcaattcgctgaccctgcagttcgattcagacttcttcatcagtaaatcaggtttttccatccaattttctacttccattgcagccacctgcaacgaccctgggatgccccaaaatggaacccgctacggtgatagcagggaggcaggtgatactgtgaccttccagtgtgacccgggatatcagctccagggacaggcaaaaatcacatgtgtgcagctgaacaatagatttttctggcaaccggatccaccgacttgcatcgccgcctgcggagggaatctgactggccccgctggcgtgattctctctcctaattaccctcagccctatccaccaggcaaggagtgtgactggcgagtgaaagtaaaccccgactttgttatagcactcattttcaagtccttcaatatggagccgtcctatgacttcttgcatatatacgagggggaggactctaatagcccactcataggttcctaccagggaagccaggcccctgaaaggattgagagtagtggaaatagcctatttttggccttccggtcagacgcgagtgtggggctttcgggctttgcaatagaatttaaagagaagccacgggaagcatgtttcgatccaggcaatattatgaatggaacccgagttggcaccgactttaaactcgggagcactatcacataccaatgcgattctggctataagatccttgaccccagttccattacctgcgtcataggcgctgacgggaagccatcttgggatcaggtgctgcctagctgcaacgccccttgcggggggcagtacaccggctcagagggcgtcgtacttagtcccaactatccacataattacaccgccggacagatttgtctctattcaataactgtaccaaaggagttcgtcgtattcggccagttcgcttacttccagaccgccctgaacgatctggcagaactttttgacgggacccatgctcaggcaagacttctgtcctctttgagtggatctcatagtggggaaacactccctcttgctacatccaatcagatcctcttgaggttctcggccaagagtggtgcttctgcccgaggattccactttgtttaccaagcagttcctaggacctcagacacccagtgctcgagcgtcccagagcctcgatatggacggagaatcgggagcgaatttagtgctggaagcattgtgcgtttcgaatgtaaccctggttacctgctccaagggtctacggctctacattgtcaaagtgttcccaacgcgcttgcacagtggaacgacactatccctagctgtgttgttccctgtagcggtaacttcacccagaggcgtggaacgatcctctcccctgggtaccccgaaccatacgggaacaacctgaactgcatctggaagattattgtcaccgagggttctgggatccagatccaggtcatcagctttgcaactgagcaaaattgggatagccttgagatccacgatggtggtgacgtgactgcacctcgtttgggatcattcagcggcactactgtccccgcccttctcaattcgacatctaatcagctgtatcttcacttccagtccgacatcagcgtggcggccgctgggtttcatttggaatacaaaacggtgggcctggctgcctgccaggagcctgcccttccttccaatagcattaaaattggagaccggtatatggtgaatgatgttcttagcttccaatgcgaaccaggctatacattgcagggtcgttctcacatcagttgtatgcccggaactgtgagaagatggaactatccctcccctctatgtatcgccacttgtggcggaacactgtcaacgctgggcggcgtgattctgagtcccggttttcctgggtcctatccgaataaccttgattgcacctggcgcatctctctcccaatcgggtatggcgcacatatccaatttttaaatttttcaactgaagcaaatcatgacttcctggaaatccaaaacgggccataccatacctccccaatgatcggccagttctccggaacagatctccccgcagcactactgtcaactactcacgagactcttattcatttttattcggatcactcacagaaccggcagggctttaagctggcttaccaggcgtacgagctgcagaattgtcctgacccccccccgttccagaacgggtatatgataaactcggattactctgtcggacagtcagtgagtttcgaatgttaccccggctatatcctgatcggccatcccgtcttaacatgccagcacgggattaaccggaactggaactacccgttcccaagatgcgacgcaccctgcgggtacaacgttacgtcgcagaatggcacaatatattcaccgggcttccctgatgagtacccgatcctgaaggattgtatttggctgatcacggtgccaccaggacatggtgtgtatatcaatttcactctactgcagaccgaggccgttaacgactatattgcggtctgggacggccctgaccagaatagcccccagctcggtgtgttctcaggtaacactgccctcgagaccgcatatagttccactaaccaagtattactaaagttccactctgactttagcaacggtggctttttcgtgcttaatttccatgcctttcagctcaagaagtgccagccgcctcccgctgtgccccaagccgagatgttaacggaggatgatgacttcgagatcggtgacttcgtgaagtaccagtgccacccaggctatactttggttggcactgacattttgacatgcaaattgagctcacaactgcagttcgaaggtagccttccaacatgcgaagcacagtgccccgcgaacgaggttaggaccggctcatccggcgtaatcctctctcctggatatcccggcaattacttcaactcccagacttgcagctggtccatcaaggtggaaccaaactataatatcacgatattcgtggacaccttccagagcgaaaaacaattcgatgccttagaggtgtttgacggctctagcggacaatctccattactagttgtcctgagtggaaatcatactgagcagtcaaacttcacttcacgctccaatcagttatatctgagatggagcactgatcatgctacgagcaagaagggctttaagatcagatatgcagcaccttattgttcacttacacaccctcttaagaatggcgggatcttgaatagaacggcaggtgcagtaggctctaaggtacactacttctgtaagcctggctatcgcatggtaggtcattccaatgcgacatgcagacgcaatccgctcggaatgtaccagtgggatagcctgaccccgttgtgccaggctgtttcatgtggcatccctgaatctccaggcaacggtagcttcacaggcaacgagtttacgctggactccaaggtcgtttacgagtgccacgagggattcaagctggagtcgtcgcaacaggcgactgcagtgtgtcaagaggatggtctttggagcaacaagggtaagccaccaacatgtaagcctgttgcatgtcctagtatcgaggcccagctctccgagcatgtcatatggaggctcgtgtctggcagtttaaacgaatatggtgcgcaagtccttctatcatgtagcccaggttattacctggaaggctggaggctcctcagatgccaagccaacggcacttggaatatcggggacgaacgcccctcatgcagggctggccattgtgggtctcccgacccaattgtgaacgggcacatctctggcgatggcttttcatatagggataccgtcgtttaccagtgcaaccccgggttccgcttagttggaaccagtgtgcgcatttgtctgcaagatcacaaatggtctggccagaccccggtctgcgtccctattacttgtggacatccaggcaatcctgcgcatgggttcaccaacgggagcgaatttaatctgaatgacgtagtgaattttacgtgcaacaccgggtacctgctgcagggggtgagtcgtgcccagtgccggtctaacggacaatggtcaagtcctttgccgacctgcagagtggtgaactgcagcgatcctggatttgtggaaaatgctatccgtcacggtcagcaaaacttccctgaaagttttgaatatgggatgtctattctttaccattgtaaaaagggcttttatctcctgggcagctctgcattaacctgcatggccaatgggctgtgggacaggtccctgcccaaatgtctggccatttcctgtggccatccaggcgtgccggcaaatgctgtactgacaggcgaactgtttacttacggtgccgttgtccattattcctgtaggggttcggaatcattgatcggaaatgacacacgcgtctgtcaggaagatagccactggagcggcgcactgcctcattgcactggtaataaccctggcttctgtggcgatccaggcactcctgcacacggaagtagacttggcgatgacttcaagaccaaaagtctgttaagattctcctgtgaaatgggccaccagctcaggggctctccagagagaacctgtctgttgaacggctcttggtctggactgcaacccgtatgcgaagctgtcctttgtcctcagcccccacctgtgcagaatggcactgtcgaagggtccgatttccgctggggttcctctataagttacagctgtatggacggctatcagttgagtcattccgcaattctttcttgcgagggtcgaggcgtgtggaagggggagatcccccagtgtctcccggtattttgtggcgacccaggaatccccgctgaaggcagactttctgggaagtcttttacttacaagagcgaggtgtttttccagtgtaaatctcctttcattctagttgggtcctcaaggcgagtatgtcaggcggacgggacctggtccggtatccagcccacctgtattgacccagcacacaacacatgtcccgatcctggcaccccacatttcggaatccaaaactcttccaggggatatgaggttggctcaactgtcttcttccgctgtagaaaaggatatcacatccagggctcgacaactcgaacctgtttagctaacctgacttggtccggtatccagaccgaatgtatccctcatgcatgccggcagccggaaaccccggctcacgctgacgtgcgtgcaatcgaccttcctactttcgggtacaccctggtttatacctgccacccaggattcttcctggcggggggcagtgaacacaggacatgtaaagccgatatgaagtggacaggaaaatctcctgtgtgtaagtctaaaggagtgagagaagtgaatgaaacagtgaccaagaccccagtcccttccgacgtgttctttgtgaatagtctgtggaagggctactacgagtatctcgggaagcggcagccagcaaccctgaccgttgactggttcaatgctactagcagcaaagtaaatgcaaccttttccgaagcatcacctgtagagctcaagctgaccggaatctataaaaaagaggaagcccacctgctacttaaggccttccagataaaaggtcaggctgatatcttcgtcagcaaatttgaaaacgacaattgggggctggacggatacgtgtcaagcggcctggaacggggagggtttacatttcagggagatatccatggcaaggactttgggaaatttaaactggaacggcaggaccccttgaaccctgaccaggactctagttcacattaccatggaacttccagtgggtccgttgcggctgctatcctggtcccctttttcgctctgattcttagcggatttgctttctatttatataagcatcgcacacgacctaaggtacagtacaacggctacgcagggcacgagaatagcaatggacaagcctctttcgaaaacccaatgtatgatacaaacttaaagcccacagaagccaaggctgtgaggttcgatactacgctcaatactgtttgcactgtggtctag

SEQ ID NO: 227761 - DNA, 10698 bp, Artificial Sequence
  derived and/or modified sequence
atgaccgcttggcggcggttccagtcattgctgctgctactgggtctgctcgtcctctgcgcccgactgctgaccgcggccaagggacaaaattgtggcggcctggtgcagggacctaatggcactatcgaatctccaggtttccctcacggttatcccaactatgcgaattgtacatggatcattatcaccggagaacggaatagaattcagctaagtttccacacattcgccctggaggaggacttcgacattctgagcgtttatgatggacagccccagcagggcaacctcaaagttagactctccgggttccagttacctagttcaattgtgtccacagggagcatcctgacgctatggtttactaccgattttgcagtgtccgcccaaggattcaaggctctgtatgaagtccttccatctcatacgtgcggaaatccaggagagattctgaagggcgtcttgcacgggaccaggtttaatatcggagataagatcaggtattcttgtttgccaggatatatccttgaggggcacgcgatccttacctgcattgtgtccccaggcaatggcgcctcatgggattttcctgcccctttctgcagagctgagggcgcgtgtggtggaacgcttagagggaccagcagctccattagctctccacattttccctctgagtacgaaaataacgctgactgcacctggacgatactcgcggaacccggagacaccattgctctggtgtttacagatttccagctcgaggaaggctatgactttctggaaatctccgggactgaggcacccagcatatggctgacaggcatgaacctgccctcacccgtgatcagctcaaaaaattggctacgcttgcactttacctccgacagcaatcataggcggaaaggatttaacgcacagttccaggtgaagaaagccatcgagcttaaatccagaggggtgaagatgctgccttccaaagacggttcgcacaagaatagtgttctgtcgcagggtggggtagcactcgtctcagatatgtgtcctgatcccggtatccccgagaatggacgccgcgccggctctgacttttcccgcgtgggcgccaacgtccaatttagctgtgaggacaattacgtccttcagggctctaagagcatcacttgccagcgcgtcactgaaaccctggcggcctggagcgatcaccggcctatctgccgagcaaggacttgtggttccaatctcaggggtccatctggcgtgattacgtcacctaattacccagtacagtatgaggataacgctcattgcgtgtgggtgattacgacaaccgatccagacaaggtgattaagttggcgtttgaagagtttgagctggaacggggatatgatacgctaaccgtgggggacgccggaaaagtcggagacaccaggagcgtgctgtatgttctgaccggcagtagtgtgcctgatcttattgtgtccatgtcaaaccaaatgtggttgcatctgcaatccgacgatagtatcggttcacctgggtttaaggccgtataccaggagatcgagaagggaggatgtggcgacccaggcattcccgcgtacggcaagcgtactggatcctcatttcttcatggcgatactctgacctttgagtgtccagccgcatttgaattggtgggcgaacgcgtgatcacttgtcaacagaataaccagtggagtggaaacaagcctagttgtgtgttttcttgctttttcaactttacagcgagctcgggcattatattgtctccaaactatcctgaggagtacggcaacaacatgaattgtgtttggctaattatctccgagccaggatctaggattcacctaatcttcaacgatttcgacgtggagccccagtttgacttcctggcagtgaaagacgacgggatttcagacatcaccgtgctcggaaccttcagtggcaatgaagttcctagtcagttagctagtagtgggcacatcgtacgcctcgaattccagagcgatcattctaccaccggaagagggtttaacattacttacaccacattcggccagaacgaatgccacgacccaggcatacctatcaacgggagacgcttcggcgatcgattcctgttgggctcatcagtgtcattccactgtgatgacggttttgtgaagactcagggttcagaatctattacatgcatactccaggatggcaatgtcgtgtggtcttcaactgtcccccgctgtgaggccccttgtggtggccatctaacggcatccagtggggtgatcctccccccaggatggcccgggtattacaaggacagtctgcactgtgagtggattatcgaagccaaacctggccacagtatcaagatcactttcgacaggttccaaactgaggtgaactatgatacacttgaggtgcgcgacggacccgcctctagctctcccctgatcggcgagtaccatggtacccaagccccacagttcctgatcagcactggtaactttatgtacttactgttcaccaccgacaactcccggtcatccatcggatttttaattcattacgaaagcgtgaccctggagtcagactcatgcttagacccagggatccccgtgaacggccacagacatgggggtgattttggcatacggtcaactgttactttctcatgcgatcccggatacaccctgtcagatgacgaacccctggtatgtgaaagaaaccaccagtggaatcatgctctgccttcctgcgatgcattatgcggggggtacatacaaggaaagtccggcaccgtactgtccccgggatttcccgatttttaccctaacagtttgaactgcacatggactatcgaggtttcccacgggaaaggcgtgcagatgatctttcacacctttcacctggagtcgtcgcatgattacctgctgataacagaagatgggagtttttccgagcccgtcgctagacttactggatcggtgctccctcatacaatcaaagctggcttattcgggaacttcaccgcgcaactgcgtttcattagcgatttctcaattagttacgaaggcttcaacattaccttcagcgagtatgacctcgagccatgcgacgaccccggagtgcctgcattttcaaggcgtatcgggttccacttcggggtgggagacagcctcacattttcatgcttcctaggatacaggctcgaaggagcaacgaaactgacatgtctcgggggcggtcggagagtttggagcgctcccttaccccgctgcgtagccgaatgcggcgccagcgtcaaaggaaacgaagggactctcctctcacctaacttcccaagtaattatgataacaaccacgaatgtatctataagatcgagacagaagcgggaaagggaattcacttgcgcactcggtcattccagttatttgagggagacaccttgaaagtgtatgacggtaaagactcatccagtcggccactcggtaccttcacaaagaacgagctgctgggactcattttaaattccacttcgaaccacttgtggctggaatttaataccaatggctcagatacagatcaggggtttcagctgacttatacgagctttgacctggtgaaatgcgaagatccggggataccaaattatgggtaccgaatccgtgacgagggtcatttcactgacactgtggttttgtattcatgcaaccctggatacgcaatgcacggatctaatacattaacatgcttgtcgggcgacaggcgagtttgggataagccactgccatcatgcatcgctgagtgcggtggacaaattcacgctgccacatctggtagaattctgagcccaggctatcccgcaccttatgacaacaacctccattgtacatggatcattgaagccgatcccggcaaaaccattagcctgcattttatcgtgtttgacacagaaatggcacacgatatccttaaggtgtgggatggccccgtcgattctgacattctgctgaaagagtggagtgggtcagccctccctgaagatatccactccacatttaactctttgacattgcaatttgactccgatttctttatatctaagtccggtttttctatacagttctctacgtctatagccgccacctgcaacgaccccggcatgccgcagaatggaactaggtacggagattctcgggaagcaggagacacggttaccttccaatgcgaccctggctaccagctgcagggacaggccaaaatcacctgtgtgcagcttaataacagattcttctggcaacccgatccacctacctgtattgcagcatgtgggggtaaccttactggaccagcaggtgtgattcttagtccgaattatcctcaaccgtaccctcccgggaaggagtgcgactggcgggtgaaggtcaatcctgacttcgtgatcgcccttatatttaagtcctttaacatggaaccaagttacgattttttgcatatttacgagggcgaggacagcaacagtccgctgatcggaagctatcagggttcccaggccccagaacggatcgagtccagtgggaattccttgttcctggccttccggagtgatgcctccgtaggactgtccggttttgccatcgagtttaaggaaaagccaagagaggcttgctttgaccccgggaacatcatgaatgggacccgcgtgggtactgattttaagttgggaagcactataacataccagtgtgacagcggatataagatactcgatcccagttccattacatgtgttatcggggccgatgggaaaccttcctgggaccaggtgctgcccagctgtaatgccccatgcggtgggcagtacactggttctgaaggtgtggttctgtcacctaattacccccacaactacactgctggccaaatctgtctgtattccattaccgttcccaaagaatttgtcgtgttcggtcagttcgcttatttccagaccgccctaaatgacttggccgaactctttgacggaacacacgctcaagctcgcctgctgagctctctgtctgggagtcattcaggcgaaactctgcccctggctacttcaaatcagatcttactgcgctttagtgcgaagtctggggcctctgctcgcggattccacttcgtctatcaggcggtgcctcgaacctctgacacacagtgcagctccgtgccagaaccacgttatgggcgcagaatcggtagcgaattctcagccggttccattgttcgcttcgaatgcaaccctgggtatctgcttcagggttcaacagctctgcactgtcaatcagtacccaacgctctggcccaatggaatgacacgatcccttcatgcgtcgtgccgtgtagcgggaatttcacccagcggcggggcactatcctctctcccggttacccagagccatatggcaataacctaaactgtatttggaagatcatagtcacagaagggagcggtattcagatacaggtgatatcgtttgctacagaacagaattgggactccctagagattcatgacgggggggacgttacagcccccagactgggaagcttttccggaaccaccgtgcccgctctactcaatagcactagcaaccagttgtatcttcacttccagtccgacatctctgtggccgccgcggggtttcatcttgagtataagactgttggattagccgcctgccaggagcccgccctgccttctaattcaattaagattggtgaccgctatatggtgaacgacgttctctcctttcagtgtgagccagggtataccctacaggggcggagtcacatctcctgtatgcctggtacagtgcgccgctggaattatccgtctccgctgtgtatcgccacctgtggaggcaccctgagtaccctaggaggcgtgattctgagcccaggctttccaggttcgtatcccaacaacctcgactgtacctggcgcatctctctccccattgggtacggagcccacatacagtttcttaatttctccactgaagccaaccacgacttcctggagatccaaaatggcccgtaccatactagtccaatgattggacagttcagcgggaccgatttgccagctgcgctgctctcgaccacccacgaaactctgatccatttttatagcgaccatagccagaatcggcagggatttaagctcgcctatcaagcttacgaactccagaattgcccggatcccccgccgtttcagaacggatatatgatcaattccgattacagtgtgggccaatcagtgtcctttgagtgctacccaggctacatcctaataggacacccagttttaacttgtcagcacggaatcaacagaaactggaactatcctttccccaggtgcgacgccccctgtgggtacaatgttacatcccaaaacggaaccatttattcgcccggatttccagacgagtatccaatccttaaagactgcatttggttgattacagtgcctccaggacatggagtgtacataaacttcaccctgctgcagaccgaggcggtgaatgattacatcgcagtctgggatggccccgatcaaaatagcccccagttgggagttttctcaggcaatacagccttagagaccgcatattccagcacgaatcaggtcctccttaaatttcactccgatttctctaatggaggtttcttcgtgctgaatttccacgcattccaactaaagaaatgtcagccaccgcccgccgtcccccaggcggaaatgttaacagaagacgacgattttgaaattggcgatttcgtcaagtaccagtgtcacccaggatatactctggttggcactgatatcctaacatgtaaactgtcctctcagctccagtttgagggttctctgcctacttgcgaggcacagtgtcccgccaacgaggtgcgtaccggatcgtccggtgtcattctcagtcctgggtaccctggaaactacttcaactcgcagacttgcagctggtcaattaaggtggagccaaactataacattacaatatttgtggacaccttccaaagcgaaaaacagtttgatgccttggaagtgtttgacggatcttccggtcagagccccctcttagttgttctctccgggaaccacaccgaacagagcaacttcaccagccgaagcaatcaactgtacttgcgatggagcacagatcatgcaaccagcaaaaagggctttaagatacgctatgccgcaccctattgctcccttactcatcccctgaagaatggggggattctaaatagaacagcaggcgctgttggatccaaggttcactatttttgcaaacccggctacagaatggtaggacattctaatgccacgtgccgacgcaatcccctgggaatgtatcagtgggactccctgacaccgctgtgtcaagctgtcagctgtgggattcccgaatctccagggaacgggagttttaccggaaatgaatttacgctggactccaaagttgtctacgagtgtcatgagggctttaaactggagtcatcccagcaggccacagccgtatgccaagaagatggtctgtggtctaacaagggaaaacctccgacctgcaagccggtggcctgtcctagtatcgaggcgcagttgtcggaacacgtaatctggaggctagtttctgggtccttgaacgagtatggggcacaggtgttgctgtcttgttccccaggatactacttagaaggatggagactcctccgctgccaagcgaatgggacgtggaatatcggcgacgagagaccctcttgccgggtcattagctgtgggtctctctctttccccccgaatggcaacaaaattgggactctgaccgtgtacggagcgacggctatcttcacctgcaacaccggttacacactggtcggttcccatgtgagggaatgtctcgctaatggtctgtggtcaggttcagagaccagatgcctagccgggcattgcggctcgccggatccaatagttaatggccacattagtggcgacggtttctcataccgggacacagtcgtctaccagtgcaaccctggctttaggcttgtcgggacatccgtacggatttgtctgcaggatcacaagtggagtggacagactccagtgtgcgtccctattacatgcggccatcctggtaatccggctcatgggttcaccaatggctctgagttcaacctcaatgacgtcgtgaattttacttgtaataccggctatctgctacagggagtctctcgagcccagtgtcgatcaaatgggcagtggtcaagcccactccccacatgccgcgtggtgaattgctcggatcctggctttgtggaaaatgcaattcggcacggccaacaaaactttcccgaatcctttgaatacggcatgtccatcctctatcactgtaaaaaaggtttttacctgctgggctcaagcgccctgacgtgcatggccaatggactgtgggaccgtagcttaccgaaatgtcttgccatctcctgcgggcaccccggcgtgccagcaaacgccgtcttaactggagagctattcacatacggagccgttgtgcattacagctgcagggggagcgaatccctcatcggcaacgatacgcgcgtctgtcaggaagatagtcactggagcggggctcttccacattgcactgggaacaatcctggcttctgtggcgaccccggcactccagcccacgggtcgcgattgggagatgacttcaagaccaagtccctcctgcgtttcagttgcgaaatgggacatcagctgcgtggtagcccagagcggacatgcctcctaaacggctcttggagcggcctccaacccgtgtgtgaggccgtcagctgtggcaatcctggcactccgacaaacgggatgattgtttcaagcgacggtattctgttctcgtcaagcgtgatctatgcttgttgggagggatataagacatccggactgatgacgcgtcattgcaccgctaacggtacatggaccggcacagccccagattgcaccatcatcagttgcggcgatcccggcacattggcaaacggcatccagtttggcactgacttcacattcaataaaactgtctcatatcaatgtaacccaggttacgtgatggaggcagttacatccgctaccatccgttgcactaaagacggtcgctggaacccatcaaaaccagtgtgtaaagcagtgctgtgcccacagcctccacccgtgcagaatgggacagtggagggaagtgattttcgctgggggtcatctatcagctactcgtgcatggatggttatcagctctcgcacagcgctatcctgtcatgtgagggaaggggggtatggaagggcgaaatcccccagtgtttgcccgtgttctgtggagacccagggatacctgctgaagggcggctctccggcaaatccttcacatataagtctgaagtattcttccaatgcaagtctccgtttatattggtgggctcatcacggcgtgtgtgccaggccgatgggacttggtccgggatccaacccacctgtattgatcctgcacacaatacgtgcccagaccccggcaccccacactttgggattcagaactcatcccgcggatatgaagtcgggtccacagtattttttagatgccgtaagggttatcatatacaaggatcgactacccgcacgtgccttgccaacctaacatggtcaggcattcaaaccgagtgtattccacacgcttgtcgccagcccgaaacaccagcccatgcagatgtgcgcgccattgacttacccaccttcggatacactctggtatatacatgccacccagggttcttcttagctgggggatccgaacacaggacctgtaaggctgacatgaagtggacaggcaagtcacccgtctgtaaaagtaaaggagtgagggaggtcaacgaaacggtgacaaagactcccgtaccgagcgatgtattttttgtgaattctctgtggaaggggtactatgagtacctcgggaaacggcagccagctaccctgaccgtggactggtttaatgccacgagcagcaaggtcaatgccactttttcagaagccagtcccgtggaattaaaactgacagggatctataagaaggaagaagctcaccttttacttaaagcttttcagattaaaggtcaagcagacatatttgttagtaagtttgagaatgacaactggggcttggatggctacgtcagtagtggtcttgaaagagggggcttcacttttcaaggggacattcatggcaaggatttcggaaagtttaagttagagcgccaagatcctctcaaccccgaccaggactcctcctctcactatcacgggacatcttccggctctgttgccgcagccatcctggttccctttttcgccttgatcctctccgggtttgcattctacctctacaagcacagaacaagacctaaggtgcagtacaacggctatgctggccatgagaactccaatgggcaggcctcttttgagaatcctatgtatgataccaacctcaagcccaccgaagctaaagcagtcaggtttgatactactctgaacactgtctgcactgtcgtgtag
